United States Patent Application Publication US 2024/0075116 A1 - sequence listing, part 2

SEQ ID NO: 2325 - RNA, 954 nt, synthetic construct
  misc_feature 1..954: note = BAE94308 variant
  source 1..954: mol_type = other RNA
atggccgtgcagggcagccaaagaaggctgctcgggtcccttaactctacccccacagctatccctcagctgggattggcagccaatcagactggtgcgcggtgcttagaggtctcaattagtgacggcctgttcctaagcctcgggctggtttcccttgtggaaaacgctctggtagtggccacgatagcaaagaatcgcaacttgcactctccaatgtactgttttatctgctgtctcgccctgtcggatctgctcgtctcaggaagcaatgtgttagagaccgctgttattctgcttttggaagcaggcgccctggtggctcgagccgcggtcctacagcaactcgacaacgtgacagatgtaatcacttgcagttccatgctgtctagcctttgtttcctgggtgcaattgccgttgaccgttatatctccatattttacgctttgagatatcattcaatcgtgaccctcacaagggcccggcgcgcagtcgctgccatttgggtggcgagtgtggtcttcagcaccctgtttatcgcctactatgatcacgttgcagtgttactgtgcctcgtagtgttctttcttgctatgctggtcttgatggccgtgctatacgttcatatgctggctagagcctgtcagcacgcacaggggattgccaggctccataaacggcagcgcccggtgcaccaaggattcggcctgaagggcgctgtcactcttacaatcctgttggggatatttttcctctgctggggaccctttttcctgcacttaaccctgattgtgctatgtcctgagcatccaacgtgcggttgtatctttaaaaatttcaacctcttcctggcgcttattatctgcaatgcaatcattgaccccttgatatatgcctttcactctcaggaactgcgaagaactctcaaggaggtactgacctgctcctggtga

SEQ ID NO: 2326 - RNA, 954 nt, synthetic construct
  misc_feature 1..954: note = BAE94307 variant
  source 1..954: mol_type = other RNA
atggccgtgcagggcagccaaagaaggctgctcgggtcccttaactctacccccacagctatccctcagctgggattggcagccaatcagactggtgcgcggtgcttagaggtctcaattagtgacggcctgttcctaagcctcgggctggtttcccttgtggaaaacgctctggtagtggccacgatagcaaagaatcgcaacttgcactctccaatgtactgttttatctgctgtctcgccctgtcggatctgctcgtctcaggaagcaatatgttagagaccgctgtgattctgcttttggaagcaggcgccctggttgctcgagccgcggtgctacagcaactcgacaacgtcatcgatgtgattacatgcagttccatgctgtctagcctttgtttcctgggtgcaatcgccgtagaccgttatatatccatcttttacgctttgagatatcattcaattgttatcctcccgagggcccggcgcgcagtggctgccatttgggtcgcgagtgtggtgttcagcactctgtttatcgcctactatgatcacgtcgcagttttactgtgcctcgtggtattctttcttgctatgctggtgttgatggccgtcctatacgtgcatatgctggctagagcctgtcagcacgcacaggggatagccaggctccataaacggcagcgccccgttcaccaaggattcggcctgaagggcgctgtgacccttacaattctgttggggatctttttcctctgctggggaccatttttcctgcacttaaccctgattgtcctatgtcctgagcatcccacttgcggttgtatctttaaaaatttcaacctcttcctggcgcttatcatttgcaatgcaataatcgaccctttgatttatgcctttcactctcaggaactgcgaagaacactcaaggaggtgctgacctgctcctggtga

SEQ ID NO: 2327 - RNA, 951 nt, synthetic construct
  misc_feature 1..951: note = BAE94306 variant
  source 1..951: mol_type = other RNA
atggccgtgcagggcagccaaagaaggctgctcgggtcccttaactctacccccacagctatccctcagctgggattggcagccaatcagactggtgcgcggtgcttagaggtctcaattagtgacggcctgttcctaagcctcgggctggtttcccttgtggaaaacgctctggtagtggccacgatagcaaagaatcgcaacttgcactctccaatgtactgttttatctgctgtctcgccctgtcggatctgctcgtctcaggaagcaatgtgttagagaccgctgttattctgcttttggaagcaggcgccctggtggctcgagccgcggtcctacagcaactcgacaacgtgatcgatgtaattacatgcagttccatgctgtctagcctttgtttcctgggtgcaatcgccgttgaccgttatatatccatctacgctttgagatatcattcaattgtgactctcccgagggcccggcaggcagtcgctgccatctgggtggcgagtgtggtctttagcaccctgttcattgcctactatgatcacgttgcagtgttactgtgcctcgtagtgtttttccttgctatgctggtcttgatggccgtgctatacgttcatatgctggctcgcgcctgtcagcacgcacaggggatcgccagactccataaaaggcaacggcccgtgcaccagggatttggcctgaagggcgctgtcacacttaccatactgttggggattttctttctctgctggggacctttctttctgcacttaactctgatcgtgctatgtccagagcatcccacatgcggttgtattttcaaaaattttaacctcttcctggcgcttatcatctgcaatgcaattatagaccctttgatctatgccttccactctcaggaactgcgccgaaccctcaaggaggtactgacgtgctcctggtga

SEQ ID NO: 2328 - RNA, 954 nt, synthetic construct
  misc_feature 1..954: note = AAQ62977 variant
  source 1..954: mol_type = other RNA
atggccgtgcagggcagccaaagaaggctgctcgggtcccttaactctacccccacagctatccctcagctgggattggcagccaatcagactggtgcgcggtgcttagaggtctcaattagtgacggcctgttcctaagcctcgggctggtttcccttgtggaaaacgctctggtagtggccacgatagcaaagaatcgcaacttgcactctccaatgtactgttttatctgctgtctcgccctgtcggatctgctcgtctcaggaagcaatgtgttagagaccgctgttattctgcttttggaagcaggcgccctggtggctcgagccgcggtcctacagcaactcgacaacgtgatcgatgtaattacatgcagttccatgctgtctagcctttgtttcctgggtgcaatcgccgttgaccgttatatatccatcttttacgctttgagatatcattcaattgtgactctcccgagggcccggcgcgcagtcgctgccatctgggtggcgagtgtggtcttcagcaccctgtttattgcctactatgatcacgttgcagtgttactgtgcctcgtagtgttctttcttgctatgctggtcttgatggccgtgctatacgttcatatgctggctagagcctgtcagcacgcacaggggatcgccaggctccataaacggcagcgccccgtgcaccaaggattcggcctgaagggcgctgtcacacttaccatactgttggggatctttttcctctgctggggaccatttttcctgcacttaactctgattattctatgtcctgagcatcccacatgcggttgtatctttaaaaatttcaacctcttcctggcgcttatcatttgcaatgcaataatcgaccctttgatttatgcctttcactctcaggaactgcgaagaaccctcaaggaggtgctgacgtgctcctggtga

SEQ ID NO: 2329 - RNA, 954 nt, synthetic construct
  misc_feature 1..954: note = AAQ62975 variant
  source 1..954: mol_type = other RNA
atggccgtgcagggcagccaaagaaggctgctcgggtcccttaactctacccccacagctatccctcagctgggattggcagccaatcagactggtgcgcggtgcttagaggtctcaattagtgacggcctgttcctaagcctcgggctggtttcccttgtggaaaacgctctggtagtggccacgatagcaaagaatcgcaacttgcactctccaatgtactgttttatctgctgtctcgccctgtcggatctgctcgtctcaggaagcaatgtgttagagaccgctgttattctgcttttggaagcaggcgccctggtggctcgagccgtcgtgctacagcaactcgacaacgtaatcgatgttattacatgcagttccatgctgtctagcctttgtttcctgggtgcgatcgcagtggaccgttatatatccatcttttacgccttgagatatcattcaattgtcactctcccgagggctcggcgcgccgtggcagctatctgggtggccagtgtcgttttcagcaccctgtttattgcgtactatgatcacgtggccgtattactgtgcctcgtggtcttctttcttgcaatgctggtgttgatggctgttctatacgtgcatatgctggccagagcttgtcagcacgcccaggggatcgcaaggctccataaacggcagcgccccgtccaccaaggattcggcctgaagggcgccgtgacacttaccatactgttggggatctttttcctctgctggggaccatttttcctgcacttaactctgattgtactatgtcctgagcatcccacatgcggttgtatttttaaaaatttcaacctcttcctggctcttatcatctgcaatgcgattatagaccctttgatctatgcatttcactctcaggaactgcgaagaaccctcaaggaggttctgacgtgctcctggtga

SEQ ID NO: 2330 - RNA, 954 nt, synthetic construct
  misc_feature 1..954: note = AAQ62974 variant
  source 1..954: mol_type = other RNA
atggccgtgcagggcagccaaagaaggctgctcgggtcccttaactctacccccacagctatccctcagctgggattggcagccaatcagactggtgcgcggtgcttagaggtctcaattagtgacggcctgttcctaagcctcgggctggtttcccttgtggaaaacgctctggtagtggccacgatagcaaagaatcgcaacttgcactctccaatgtactgttttatctgctgtctcgccctgtcggatctgctcgtctcaggaagcaatgtgttagagaccgctgttattctgcttttggaagcaggcgccctggtggctcgagccgcggtcctacagcaactcgacaacgtgatcgatgtaattacatgcagttccatgctgtctagcctttgtttcctgggtgcaatcgccgttgaccgttatatatccatcttttacgctttgagatatcattcaattgtgactctcccgagggcccggcgcgcagtcgctgccatctgggtggcgagtgtggtcttcagcaccctgtttattgcctactatgatcacgttgcagtgttactgtgcctcgtagtgttctttcttgctatgctggtcttgatggccgtgctatacgttcatatgctggctagagcctgtcagcacgcacaggggatcgccaggctccataaacggcagcgccccgtgcaccaaggattcggcctgaagggcgctgtcacacttaccatactgttggggatctttttcctctgctggggaccatttttcctgcacttaactctgattgtgctatgtcctgagcatcccacatgcggttgtatttttaaaaatttcaacctcttcctggcgcttatcatctgcaatgcaattatagaccctttgatctatgcctttcactctcaggaactgcgaagaaccctcaaggaggtactgacgaggtcctggtga

SEQ ID NO: 2331 - RNA, 954 nt, synthetic construct
  misc_feature 1..954: note = AAQ62973 variant
  source 1..954: mol_type = other RNA
atggccgtgcagggcagccaaagaaggctgctcgggtcccttaactctacccccacagctatccctcagctgggattggcagccaatcagactggtgcgcggtgcttagaggtctcaattagtgacggcctgttcctaagcctcgggctggtttcccttgtggaaaacgctctggtagtggccacgatagcaaagaatcgcaacttgcactctccaatgtactgttttatctgctgtctcgccctgtcggatctgctcgtctcaggaagcaatgtgttagagaccgctgttattctgcttttggaagcaggcgccctggtggctcgagccgcggtcctacagcaactcgacaacgtgatcgatgtaattacatgcagttccatgctgtctagcctttgtttcctgggtgcaatcgccgttgaccgttatatatccatcttttacgctttgagatatcattcaattgtgactctcccgagggcccggcgcgcagtcgctgccatctgggtggcgagtgtggtcttcagcaccctgtttattgcctactatgatcacgttgcagtgttactgtgcctcgtagtgttctttcttgctatgctggtcttgatggccgtgctatacgttcatatgctggctagagcctgtcagcacgcacaggggatcgccaggctccataaacggcagcgccccgtgcaccaaggattcggcctgaagggcgctgtcacacttaccatactgttggggatctttttcctctgctggggaccatttttcctgcacttaactctgattgtgctatgtcctgagcatcccacatgcggttgtatttttaaaaatttcaacctcttcctggcgcttatcatctgcaatgcaattatagaccctttgatctatgcctttcactctcaggaactgcgaagaatgctcaaggaggtactgacctgctcctggtga

SEQ ID NO: 2332 - RNA, 954 nt, synthetic construct
  misc_feature 1..954: note = AAQ62972 variant
  source 1..954: mol_type = other RNA
atggccgtgcagggcagccaaagaaggctgctcgggtcccttaactctacccccacagctatccctcagctgggattggcagccaatcagactggtgcgcggtgcttagaggtctcaattagtgacggcctgttcctaagcctcgggctggtttcccttgtggaaaacgctctggtagtggccacgatagcaaagaatcgcaacttgcactctccaatgtactgttttatctgctgtctcgccctgtcggatctgctcgtctcaggaagcaatgtgttagagaccgctgttattctgcttttggaagcaggcgccctggtggctcgagccgcggtcctacagcaactcgacaacgtgatcgatgtaattacatgcagttccatgctgtctagcctttgtttcctgggtgcaatcgccgttgaccgttatatatccatcttttacgctttgagatatcattcaattgtgactctcccgagggcccggcgcgcagtcgctgccatctgggtggcgagtgtggtcttcagcaccctgtttattgcctactatgatcacgttgcagtgttactgtgcctcgtagtgttctttcttgctatgctggtcttgatggccgtgctatacgttcatatgctggcttgggcctgtcagcacgcacaggggatcgccagactccataaaaggcagcggcccgtgcaccaaggattcggcctgaagggcgctgtcacacttaccatactgttggggatctttttcctctgctggggaccatttttcctgcacttaactctgattgtgctatgtcctgagcatcccacatgcggttgtatttttaaaaatttcaacctcttcctggcgcttatcatctgcaatgcaattatagaccctttgatctatgcctttcactctcaggaactgcgccgaaccctcaaggaggtactgacgtgctcctggtga

SEQ ID NO: 2333 - RNA, 954 nt, synthetic construct
  misc_feature 1..954: note = AAQ62971 variant
  source 1..954: mol_type = other RNA
atggccgtgcagggcagccaaagaaggctgctcgggtcccttaactctacccccacagctatccctcagctgggattggcagccaatcagactggtgcgcggtgcttagaggtctcaattagtgacggcctgttcctaagcctcgggctggtttcccttgtggaaaacgctctggtagtggccacgatagcaaagaatcgcaacttgcactctccaatgtactgttttatctgctgtctcgccctgtcggatctgctcgtctcaggaagcaatgtgttagagaccgctgttattctgcttttggaagcaggcgccctggtggctcgagccgcggtcctacagcaactcgacaacgtgatcgatgtaattacatgcagttccatgctgtctagcctttgtttcctgggtgcaatcgccgttgaccgttatatatccatcttttacgctttgagatatcattcaattgtgactctcccgcaggccaggcgggcagtcgctgccatctgggtggcgagtgtggtcttcagcaccctgtttattgcctactatgatcacgttgcagtgttactgtgcctcgtagtgttctttcttgctatgctggtcttgatggccgtgctatacgttcatatgctggctcgcgcctgtcagcacgcacaggggatcgccagactccataaaaggcaacggcccgtgcaccagggattcggcctgaagggcgctgtcacacttaccatactgttggggatctttttcctctgctggggaccatttttcctgcacttaactctgattgtgctatgtcctgagcatcccacatgcggttgtatttttaaaaatttcaacctcttcctggcgcttatcatctgcaatgcaattatagaccctttgatctatgcctttcactctcaggaactgcgccgaaccctcaaggaggtactgacgtgctcctggtga

SEQ ID NO: 2334 - RNA, 954 nt, synthetic construct
  misc_feature 1..954: note = AAQ62970 variant
  source 1..954: mol_type = other RNA
atggccgtgcagggcagccaaagaaggctgctcgggtcccttaactctacccccacagctatccctcagctgggattggcagccaatcagactggtgcgcggtgcttagaggtctcaattagtgacggcctgttcctaagcctcgggctggtttcccttgtggaaaacgctctggtagtggccacgatagcaaagaatcgcaacttgcactctccaatgtactgttttatctgctgtctcgccctgctggatctcttagtctcgggatcaaatgtgctggagaccgctgttattcttttgctggaagcaggcgccctagtggctcgagccgcggtcctccagcaactggacaacgtgatcgatgtaattacatgcagcagtatgctttcctctctgtgtttcttgggtgcaatcgccgttgaccgttatataagcatcttttacgctctcagatatcattccattgtgactctgccgagggcccggcgcgcagtcgctgccatctgggtggcgtcagtggtcttcagtaccttatttattgcctactatgatcacgttgcagtgctgctctgccttgtagtgttctttctggctatgttggtcctaatggccgtgctgtacgttcatatgctcgctagagcctgtcagcacgcacaggggatcgccaggctgcataaacggcagcgccccgtgcaccaaggattcggccttaagggcgctgtcacactgaccatattgctcgggatctttttcctgtgctggggaccatttttcttacacctgactctaattgtgctctgtcctgagcatcccacatgcggttgtatttttaaaaatttcaacctgttccttgcgttgatcatctgcaatgcaattatagaccctctgatctatgcctttcacagccaggaactccgaagaaccctgaaggaggtacttacgtgctcttggtga

SEQ ID NO: 2335 - RNA, 954 nt, synthetic construct
  misc_feature 1..954: note = AAQ62969 variant
  source 1..954: mol_type = other RNA
atggccgtgcagggcagccaaagaaggctgctcgggtcccttaactctacccccacagctatccctcagctgggattggcagccaatcagactggtgcgcggtgcttagaggtctcaattagtgacggcctgctactcagcctggggcttgtttccctggtggaaaacgctttggtagtggccacgatagcaaagaatcgcaacctccactctccaatgtactgtttcatctgctgtctggccctgtcggatctcttagtctcaggaagcaatgtgctggagaccgctgttattcttttgctggaagcaggcgccctagtggctcgagccgcggtcctccagcaactggacaacgtgatcgatgtaattacatgcagttccatgctttctagcctgtgctttttgggtgcaatcgccgttgaccgttatatatccatcttctacgctctcagatatcattcaattgtgactctgccgagggcccggcgcgcagtcgctgccatctgggtggcgagtgtggtctttagcaccttattcattgcctactatgatcacgttgcagtgctgctctgtcttgtagtgtttttcctggctatgttggtcctaatggccgtgctgtacgttcatatgctcgctagagcctgtcagcacgcacaggggatcgccaggctgcataaacggcagcgccccgtgcaccaaggatttggccttaagggcgctgtcacactgaccatattgctcgggattttctttctgtgctggggacctttctttttacacctgactctaatcgtgctctgtccagagcatcccacatgcggttgtattttcaaaaattttaacctgttccttgcgttgatcatctgcaatgcaattatagaccctctgatctatgccttccactctcaggaactccgaagaaccctgaaggaggtacttacgtgctcctggtga

SEQ ID NO: 2336 - RNA, 954 nt, synthetic construct
  misc_feature 1..954: note = AAO21073 variant
  source 1..954: mol_type = other RNA
atggccgtgcagggcagccaaagaaggctgctcgggtcccttaactctacccccacagctatccctcagctgggattggcagccaatcagactggtgcgcggtgcttagaggtctcaattagtgacggcctgttcctaagcctcgggctggtttcccttgtggaaaacgctctggtagtggccacgatagcaaagaatcgcaacttgcactctccaatgtactgttttatctgctgtctcgccctgtcggatctgctcgtctcaggaagcaatgtgcgagagaccgctgttattttactgcttgaagcaggcgccttggtggctcgtgccgcggtcctgcagcaactagacaacgtgatcgatgtaattacatgcagttccatgctctctagcctgtgtttccttggtgcaatcgccgttgacagatatatatccatcttttacgctctgaggtatcattcaattgtgactttgccgcgggcccgcagagcagtcgctgccatctgggtggcgagtgtggtcttcagcaccctctttattgcctactatgatcacgttgcagtgctgttatgcctggtagtgttctttctcgctatgcttgtcctgatggccgtgttgtacgttcatatgctagctagggcctgtcagcacgcacaggggatcgcccggctgcataaacgccagcgacccgtgcaccaaggattcggcctcaagggcgctgtcacactgaccatacttctggggatctttttcttgtgctggggaccatttttcctccacctgactttaattgtgctgtgtcctgagcatcccacatgcggttgtatttttaaaaatttcaacctattcctcgcgctgatcatctgcaatgcaattatagaccctcttatctatgcctttcactctcaggaattgagaaggaccctgaaggaggtactcacgtgctcctggtga

SEQ ID NO: 2337 - RNA, 954 nt, synthetic construct
  misc_feature 1..954: note = AHC09567 variant
  source 1..954: mol_type = other RNA
atggccgtgcagggcagccaaagaaggctgctcgggtcccttaactctacccccacagctatccctcagctgggattggcagccaatcagactggtgcgcggtgcttagaggtctcaattagtgacggcctgttcctaagcctcgggctggtttcccttgtggaaaacgctctggtagtggccacgatagcaaagaatcgcaacttgcactctccaatgtactgttttatctgctgtctcgccctgccggatctgctcgtctcgggatcaaatgtgttagagaccgctgttattctgcttttggaagcaggcgccctggtggctcgagccgcggtcctacagcaactcgacaacgtgatcgatgtaattacatgcagcagtatgctgtcctctctttgtttcctgggtgcaatcgccgttgaccgttatataagcatcttttacgctttgagatatcattccattgtgactctccccagggcccggcgcgcagtcgctgccatctgggtggcgtcagtggtcttcagtaccctgtttattgcctactatgatcacgttgcagtgttactgtgcctcgtagtgttctttcttgctatgctggtcttgatggccgtgctatacgttcatatgctggctagagcctgtcagcacgcacaggggatcgccaggctccataaacggcagcgccctgtgcaccaaggattcggcctgaagggcgctgtcacacttaccatactgttggggatctttttcctctgctggggaccatttttcctgcacttaactctgattgtgctatgtcccgagcatcctacatgcggttgtatttttaaaaatttcaacctcttcctggcgcttatcatctgcaatgcaattatagacccattgatctatgcctttcacagccaggaactgcgaagaaccctcaaggaggtactgacgtgctcttggtga

SEQ ID NO: 2338 - RNA, 954 nt, synthetic construct
  misc_feature 1..954: note = AHC09812 variant
  source 1..954: mol_type = other RNA
atggccgtgcagggcagccaaagaaggctgctcgggtcccttaactctacccccacagctatccctcagctgggattggcagccaatcagactggtgcgcggtgcttagaggtctcaattagtgacggcctgttcctaagcctcgggctggtttcccttgtggaaaacgctctggtagtggccacgatagcaaagaatcgcaacttgcactctccaatgtactgttttatctgctgtctcgccctgtcggatctgctcgtctcaggaagcaatgtgttagagaccgctgttattctgcttttggaagcaggcgccctggtggctcgagccgcggtcctacagcaactcgacaacgtgatcgatgtaattacatgcagttccatgctgtctagcctttgtttcctgggtgcaatcgccgttgaccgttatatatccatcttttacgctttgagatatcattcaattgtgactctcccgagggcccggcgcgcagtcgctgccatctgggtggcgagtgtggtcttcagcaccctgtttattgcctactatgatcacgttgcagtgttactgtgcctcatggtattctttcttgctatgctggtgttgatggccgtcctatacgtgcatatgctggctagagcctgtcagcacgcacaggggatcgccaggctccataaacggcagcgccccgttcaccaaggattcggcctgaagggcgctgtgacacttaccatactgttggggatctttttcctctgctggggaccatttttcctgcacttaactctgattgtcctatgtcctgagcatcccacatgcggttgtatttttaaaaatttcaacctcttcctggcgcttatcatctgcaatgcaattatagaccctttgatctatgcctttcactctcaggaactgcgaagaaccctcaaggaggtgctgacgtgctcctggtga

SEQ ID NO: 2339 - RNA, 954 nt, synthetic construct
  misc_feature 1..954: note = AHC10192 variant
  source 1..954: mol_type = other RNA
atggccgtgcagggcagccaaagaaggctgctcgggtcccttaactctacccccacagctatccctcagctgggattggcagccaatcagactggtgcgcggtgcttagaggtctcaattagtgacggcctgttcctaagcctcgggctggtttcccttgtggaaaacgctctggtagtggccacgatagcaaagaatcgcaacttgcactctccaatgtactgttttatctgctgtctcgccctgtcggatctgctcgtctcaggaagcaatgtgttagagaccgctgttattctgcttttggaagcaggcgccctggtggctcgagccgcggtcctacagcaactcgacaacgtgatcgatgtaattacatgcagttccatgctgtctagcctttgtttcctgggtgcaatcgccgttgaccgttatatatccatcttttacgctttgagatatcattcaattgtgactctcccgagggcccggcgcgcagtcgctgccatctgggtggcgagtgtggtcttcagcaccctgtttattgcctactatgatcacgttgcagtgttactgtgcctcgtagtgttctttcttgctatgctggtcttgatggccgtgctatacgttcatatgctggctagagcctgtcagcacgcacaggggacagccaggctccataaacggcagcgccccgtgcaccaaggattcggcctgaagggcgctgtcacccttactatcctgttggggatatttttcctctgctggggaccctttttcctgcacttaacactgattgtgctatgtccagagcatcctacctgcggttgtatctttaaaaatttcaacctcttcctggcgcttattatctgcaatgcaatcattgaccctttgatatatgcctttcactctcaggaactgcgaagaacgctcaaggaggtactgacttgctcctggtga

SEQ ID NO: 2340 - RNA, 954 nt, synthetic construct
  misc_feature 1..954: note = AHC09641 variant
  source 1..954: mol_type = other RNA
atggccgtgcagggcagccaaagaaggctgctcgggtcccttaactctacccccacagctatccctcagctgggattggcagccaatcagactggtgcgcggtgcttagaggtctcaattagtgacggcctgttcctaagcctcgggctggtttcccttgtggaaaacgctctggtagtggccacgatagcaaagaatcgcaacttgcactctccaatgtactgttttatctgctgtctcgccctgtcggatctgctcgtctcaggaagcaatgtgttagagaccgctgttattctgcttttggaagcaggcgccctggtggctcgagccgcggtcctacagcaactcgacaacgtgatcgatgtaattacatgcagttccatgctgtctagcctttgtttcctgggtgcaatcgccgttgaccgttatatatccatcttttacgctttgagatatcattcaactgtgaccctcccgagggcccggcgcgcagtcgctgccatttgggtggcgagtgtggtcttcagcacactgtttatcgcctactatgatcacgttgcagtgttactgtgcctcgtagtgttctttcttgctatgctggtcttgatggccgtgctatacgttcatatgctggctagagcctgtcagcacgcacaggggattgccaggctccataaacggcagcgccccgtgcaccaaggattcggcctgaagggcgctgtcacccttactatcctgttggggatatttttcctctgctggggaccctttttcctgcacttaacactgattgtgctatgtccagagcatcctacctgcggttgtatctttaaaaatttcaacctcttcctggcgcttattatctgcaatgcaatcattgaccctttgatatatgcctttcactctcaggaactgcgaagaacgctcaaggaggtactgacttgctcctggtga

SEQ ID NO: 2341 - RNA, 954 nt, synthetic construct
  misc_feature 1..954: note = AHC10044 variant
  source 1..954: mol_type = other RNA
atggccgtgcagggcagccaaagaaggctgctcgggtcccttaactctacccccacagctatccctcagctgggattggcagccaatcagactggtgcgcggtacttagaggtctcaattagtgacggcctgttcctaagcctcgggctggtttcccttgtggaaaacgctctggtagtggccacgatagcaaagaatcgcaacttgcactctccaatgtattgctttatctgttgcctcgccctgtcggatctgctcgtctcaggaagcaatgtgttagagaccgctgttattctgcttttggaagcaggcgccctggtggctcgagccgcggtcctacagcaactcgacaacgtgatcgatgtaattacatgtagttccatgctgtctagcctttgcttcctgggtgcaatcgccgttgaccgttacatatccatcttttatgctttgagataccattcaattgtgactctcccgagggcccggcgcgcagtcgctgccatctgggtggcgagtgtggtcttcagcaccctgtttattgcctattacgatcacgttgcagtgttactgtgtctcgtagtgttctttcttgctatgctggtcttgatggccgtgctatatgttcatatgctggctagagcctgccagcacgcacaggggatcgccaggctccataaacggcagcgccccgtgcaccaaggattcggcctgaagggcgctgtcacacttaccatactgttggggatctttttcctctgttggggaccatttttcctgcacttaactctgattgtgctatgccctgagcatcccacatgtggttgcatttttaaaaatttcaacctcttcctggcgcttatcatctgtaatgcaattatagaccctttgatctacgcctttcactctcaggaactgcgaagaaccctcaaggaggtactgacgtgctcctggtga

SEQ ID NO: 2342 - RNA, 954 nt, synthetic construct
  misc_feature 1..954: note = AHC09532 variant
  source 1..954: mol_type = other RNA
atggccgtgcagggcagccaaagaaggctgctcgggtcccttaactctacccccacagctatccctcagctgggattggcagccaatcagactggtgcgcggtgcttagaggtctcaattagtgacggcctgttcctaagcctcgggctggtttcccttgtggaaaacgctctggtattggccacgatagcaaagaatcgcaacctccactctccaatgtactgttttatctgctgtctggccctgtcggatctcttagtgtcaggaagcaatgtcctggagaccgctgtgattcttttgctggaagcaggcgccctagttgctcgagccgcggtgctccagcaactggacaacgtcatcgatgtgattacatgcagttccatgctttctagcctgtgtttcttgggtgcaatcgccgtagaccgttatatatccatcttttacgctctcagatatcattcaattgttactctgccgagggcccggcgcgcagtggctgccatctgggtcgcgagtgtggtgttcagcaccttatttattgcctactatgatcacgtcgcagttctgctctgccttgtggtattctttctggctatgttggtgctaatggccgtcctgtacgtgcatatgctcgctagagcctgtcagcacgcacaggggatcgccaggctgcataaacggcagcgccccgttcaccaaggattcggccttaagggcgctgtgacactgaccatattgctcgggatctttttcctgtgctggggaccatttttcttacacctgactctaattgtcctctgtcctgagcatcccacatgcggttgtatttttaaaaatttcaacctgttccttgcgttgatcatctgcaatgcaattatagaccctctgatctatgcctttcactctcaggaactccgaagaaccctgaaggaggtgcttacgtgctcctggtga

SEQ ID NO: 2343 - RNA, 954 nt, synthetic construct
  misc_feature 1..954: note = AHC11042 variant
  source 1..954: mol_type = other RNA
atggccgtgcagggcagccaaagaaggctgctcgggtcccttaactctacccccacagctatccctcagctgggattggcagccaatcagactggtgcgcggtgcttagaggtctcaattagtgacggcctgttcctaagcctcgggctggtttcccttgtggaaaacgctctggtagtggccacgatagcaaagaatcgcaacttgcactctccaatgtactgttttatctgctgtctcccgctgtcggatctgctcgtctcaggaagcaatgtgttagagaccgccgttattctgcttttggaagctggcgcactggtggcccgagctgccgtcctacagcaactcgacaacgtgatcgatgtaattacatgcagttccatgctgtctagcctttgtttcctgggtgcgatcgcagttgaccgttatatatccatcttttacgccttgagatatcattcaattgtgactctccccagggctcggcgcgccgtcgcagctatctgggtggccagtgtggtcttcagcaccctgtttattgcgtactatgatcacgttgccgtgttactgtgcctcgtagtgttctttcttgcaatgctggtcttgatggctgtgctatacgttcatatgctggccagagcttgtcagcacgcccaggggatcgcaaggctccataaacggcagcgccctgtgcaccaaggattcggcctgaagggcgccgtcacacttaccatactgttggggatctttttcctctgctggggaccatttttcctgcacttaactctgattgtgctatgtcccgagcatcctacatgcggttgtatttttaaaaatttcaacctcttcctggctcttatcatctgcaatgcgattatagacccattgatctatgcatttcactctcaggaactgcgaagaaccctcaaggaggtactgacgtgctcctggtga

SEQ ID NO: 2344 - RNA, 954 nt, synthetic construct
  misc_feature 1..954: note = AHC10733 variant
  source 1..954: mol_type = other RNA
atggccgtgcagggcagccaaagaaggctgctcgggtcccttaactctacccccacagctatccctcagctgggattggcagccaatcagactggtgcgcggtgcttagaggtctcaattagtgacggcctgttcctaagcctcgggctggtttcccttgtggaaaacgctctggtagtggccacgatagcaaagaatcgcaacttgcactctccaatgtactgttttatctgctgtctcgccctgtcggatctgctcgtctcaggaagcaatgtgttagagaccgctgttattctgcttttggaagcaggcgccctggtggctcgagccgcggtcctacagcaactcgacaacgtgatcgatgtaattacatgcagttccatgctgtctagcctttgtttcctgggtgcaatcgccgttgaccgttatatatccatcttttacgctttgagatatcattcaattgtgactctcccgagggcccggcgcgcagtcgctgccatctgggtggcgagtgtggtcttcagcaccctgtttattgcctactatgatcacgttgcagtgttactgtgcctcgtagtgttctttcttgctatgctggtcttgatggccgtgctatacgttcatatgctggctagagcctgtcagcacgcacaggggatcgccaggctccataaacggcagcgccccgtgcaccaaggattcggcctgaagggcgctgtcacacttaccatactgttggggatctttttcctctgctggggaccatttttcctgcacttaactctgattgtgctatgtcctgagcatcccacatgcggttgtatttttaaaaatttctctctcttcctggcgcttatcatctgcaacgcaattatagaccctttgatctatgcctttcactcccaggaactgcgaagaaccctcaaggaggtactgacgtgctcatggtga

SEQ ID NO: 2345 - RNA, 954 nt, synthetic construct
  misc_feature 1..954: note = AHC10696 variant
  source 1..954: mol_type = other RNA
atggccgtgcagggcagccaaagaaggctgctcgggtcccttaactctacccccacagctatccctcagctgggattggcagccaatcagactggtgcgcggtgcttagaggtctcaattagtgacggcctgttcctaagcctcgggctggtttcccttgtggaaaacgctctggtagtggccacgatagcaaagaatcgcaacttgcactctccaatgtactgttttatctgctgtctcgccctgtcggatctgctcgtctcaggaagcaatgtgttagagaccgctgttattctgcttttggaagcaggcgccctggtggctcgagccgcggtcctacagcaactcgacaacgtgatcgatgtaattacatgcagttccatgctgtctagcctttgtttcctgggtgcaatcgccgttgaccgttatatatccatcttttacgctttgagatatcattcaattgtgactctcccgagggcccggcgcgcagtcgctgccatctgggtggcgagtgtggtcttcagcaccctgtttattgcctactatgatcacgttgcagtgttactgtgcctcgtagtgttctttcttgctatgctggtcttgatggccgtgctatacgttcatatgctggctagagcctgtcagcacgcacaggggatcgccaggctccataaacggcagcgccccgtgcaccaaggattcggcctgaagggcgctgtcacacttaccatactgttggggatctttttcctctgctggggaccatttttcctgcacttaactctgattgtgctatgtcctgagcatcccacatgcggttgtatttttaaaaatttcaacctcttcctggcgcttatcatctgcaatgcaattatagaccctttgatccacgcctttcattctcaggaactgcgaagaaccctcaaggaggtactgacgtgctcctggtga

SEQ ID NO: 2346 - RNA, 954 nt, synthetic construct
  misc_feature 1..954: note = AHC09527 variant
  source 1..954: mol_type = other RNA
atggccgtgcagggcagccaaagaaggctgctcgggtcccttaactctacccccacagctatccctcagctgggattggcagccaatcagactggtgcgcggtgcttagaggtctcaattagtgacggcctgttcctaagcctcgggctggtttcccttgtggaaaacgctctggtagtggccacgatagcaaagaatcgcaacttgcactctccaatgtactgttttatctgctgtctcgccctgtcggatctgctcgtctcaggaagcaatgtgttagagaccgctgttattctgcttttggaagcaggcgccctggtggctcgagccgcggtcctacagcaactcgacaacgtgatcgatgtaattacatgcagttccatgctgtctagcctttgtttcctgggtgcaatcgccgttgaccgttatatatccatcttttacgctttgagatatcattcaattgtgactctcccgagggcccggcgcgcagtcgctgccatctgggtggcgagtgtggtcttcagcaccctgtttattgcctactatgatcacgttgcagtgttactgtgcctcgtagtgttctttcttgctatgctggtcttgatggccgtgctatacgttcatatgctggctagagcctgtcagcacgcacaggggatcgccaggctccataaacggcagcgccccgtgcaccaaggattcggcctgaagggcgctgtcacacttaccatactgttggggatctttttcctctgctggggaccatttttcctgcacttaactctgattgtgctatgtcctgagcatcccacatgcggttgtatttttaaaaatttcaacctcttcctggcgcttatcatctgcaatgcaattatacaccctttgatctatgcctttcattctcaggaactgcgaagaaccctcaaggaggtactgacgtgctcctggtga

SEQ ID NO: 2347 - RNA, 954 nt, synthetic construct
  misc_feature 1..954: note = AHC10869 variant
  source 1..954: mol_type = other RNA
atggccgtgcagggcagccaaagaaggctgctcgggtcccttaactctacccccacagctatccctcagctgggattggcagccaatcagactggtgcgcggtgcttagaggtctcaattagtgacggcctgttcctaagcctcgggctggtttcccttgtggaaaacgctctggtagtggccacgatagcaaagaatcgcaacttgcactctccaatgtactgttttatctgctgtctcgccctgtcggatctgctcgtctcaggaagcaatgtgttagagaccgctgttattctgcttttggaagcaggcgccctggtggctcgagccgcggtcctacagcaactcgacaacgtgatcgatgtaattacatgcagttccatgctgtctagcctttgtttcctgggtgcaatcgccgttgaccgttatatatccatcttttacgctttgagatatcattcaattgtgactctcccgagggcccggcgcgcagtcgctgccatctgggtggcgagtgtggtcttcagcaccctgtttattgcctactatgatcacgttgcagtgttactgtgcctcgtagtgttctttcttgctatgctggtcttgatggccgtgctatacgttcatatgctggctagagcctgtcagcacgcacaggggatcgccaggctccataaacggcagcaccccgtgcaccaaggattcggcctgaagggcgctgtcacacttaccatactgttggggatctttttcctctgctggggaccatttttcctgcatttaactctgattgtgctatgtcctgagcaccccacatgcggttgtatttttaaaaatttcaacctcttcctggcgcttatcatctgcaatgcaattatagaccctttgatctatgcctttcattctcaggaactgcgccgaaccctcaaggaggtactgacgtgctcctggtga

SEQ ID NO: 2348 - RNA, 954 nt, synthetic construct
  misc_feature 1..954: note = AHC11615 variant
  source 1..954: mol_type = other RNA
atggccgtgcagggcagccaaagaaggctgctcgggtcccttaactctacccccacagctatccctcagctgggattggcagccaatcagactggtgcgcggtgcttagaggtctcaattagtgacggcctgttcctaagcctcgggctggtttcccttgtggaaaacgctctggtagtggccacgatagcaaagaatcgcaacttgcactctccaatgtactgttttatctgctgtctcgccctgtcggatctgctcgtctcaggaagcaatgtgttagagaccgctgttattctgcttttggaagcaggcgccctggtggctcgagccgcggtcctacagcaactcgacaacgtgatcgatgtaattacatgcagttccatgctgtctagcctttgtttcctgggtgcaatcgccgttgaccgttatatatccatcttttacgctttgagatatcattcaattgtgactctcccgagggcccggcgcgcagtcgctgccatctgggtggcgagtgtggtcttcagcaccctgtttattgcctactatgatcacgttgcagtgttactgtgcctcgtagtgttctttcttgctatgctggtcttgatggccgtgctatacgttcatatgctggctagagcctgtcagcacgcacaggggatcgccaggctccataaacggcagcgccccgtgcaccaaggattcggcctgaagggcgctgtcacacttaccatactgttggggatctttttcctctgctggggaccatttttcctgcacttaactctgattgtgctatgtcctgagcatcccacatgcggttgtatttttaaaaatttcaacctcttcctgacccttatcatctgcaatgcgattatagaccctttgatctatgcatttcactctcaggaactgcgaagaacgctcaaggaggtactgacttgctcctggtga

SEQ ID NO: 2349 - RNA, 954 nt, synthetic construct
  misc_feature 1..954: note = AHC09535 variant
  source 1..954: mol_type = other RNA
atggccgtgcagggcagccaaagaaggctgctcgggtcccttaactctacccccacagctatccctcagctgggattggcagccaatcagactggtgcgcggtgcttagaggtctcaattagtgacggcctgttcctaagcctcgggctggtttcccttgtggaaaacgctctggtagtggccacgatagcaaagaatcgcaacttgcactctccaatgtactgttttatctgctgtctcgccctgtcggatctgctcgtctcaggaagcaatgtgttagagaccgctgttattctgcttttggaagcaggcgccctggtggctcgagccgcggtcctacagcaactcgacaacgtgatcgatgtaattacatgcagttccatgctgtctagcctttgtttcctgggtgcaatcgccgttgaccattatatatccatcttttacgctttgcgttatcactcaattgtgactctcccgagagccaggcgggcagtcgctgccatctgggtggcgagtgtggtcttcagcaccctgtttattgcctactatgatcatgttgcagtgttactgtgcctcgtagtgttctttcttgctatgctggtcttgatggccgtgctatacgttcacatgctggctcgcgcctgtcagcatgcacaggggatcgccagactccacaaaaggcagcggcccgtgcaccaaggattcggcctgaagggcgctgtcacacttaccatactgttggggatctttttcctctgctggggaccatttttcctgcatttaactctgattgtgctatgtcctgagcaccccacatgcggttgtatttttaaaaatttcaacctcttcctggcgcttatcatctgcaatgcaattatagaccctttgatctatgcctttcattctcaggaactgcgccgaaccctcaaggaggtactgacgtgctcctggtga

SEQ ID NO: 2350 - RNA, 954 nt, synthetic construct
  misc_feature 1..954: note = AHC11840 variant
  source 1..954: mol_type = other RNA
atggccgtgcagggcagccaaagaaggctgctcgggtcccttaactctacccccacagctatccctcagctgggattggcagccaatcagactggtgcgcggtgcttagaggtctcaattagtgacggcctgttcctaagcctcgggctggtttcccttgtggaaaacgctctggtagtggccacgatagcaaagaatcgcaacttgcactctccaatgtactgttttatctgctgtctcgccctgtcggatctgctcgtctcaggaagcaatgtgttagagaccgctgttattctgcttttggaagcaggcgccctggtggctcgagccgcggtcctacagcaactcgacaacgtgatcgatgtaattacatgcagttccatgctgtctagcctttgtttcctgggtgcaatcgccgttgaccgttatatatccatcttttacgctttgagatatcattcaattgtgactctcccgagggcccggcgcgcagtcgctgccatctgggtggcgagtgtggtcttcagcaccctgtttattgcctactatgatcacgttgcagtgttactgtgcctcgtagtgttctttcttgctatgctggtcttgatggccgtgctatacgttcatatgctggctagagcctgtcagcacgcacaggggatcgccaggctccataaacggcagcgccccgtgcaccaaggattcggcctgaagggcgctgtcacacttaccatactgttggggatctttttcctctgctggggaccatttttcctgcacttaactctgattgtgctatgtcctgagcatcccacatgcggttgtatttttaaaaatttcaacctcttcctggcgcttatcatctgcaatgcaattatagaccctttgatctatgcctttcacaaccaggaactgcgaagaaccctcaaggaggtactgacgtgctcttggtga

SEQ ID NO: 2351 - RNA, 954 nt, synthetic construct
  misc_feature 1..954: note = AHC09665 variant
  source 1..954: mol_type = other RNA
atggccgtgcagggcagccaaagaaggctgctcgggtcccttaactctacccccacagctatccctcagctgggattggcagccaatcagactggtgcgcggtgcttagaggtctcaattagtgacggcctgttcctaagcctcgggctggtttcccttgtggaaaacgctctggtagtggccacgatagcaaagaatcgcaacttgcactctccaatgtactgttttatctgctgtctcgccctgtcggatctgctcgtctcaggaagcaatgtgttagagaccgctgttattctgcttttggaagcaggcgccctggtggctcgagccgcggtcctacagcaactcgacaacgtgatcgatatgattacatgcagttccatgctgtctagcctttgtttcctgggtgcaatcgccgtagaccgttatatatccatcttttacgctttgagatatcattcaattgttactctcccgagggcccggcgcgcagtggctgccatctgggtcgcgagtgtggtgttcagcaccctgtttattgcctactatgatcacgtcgcagttttactgtgcctcgtggtattctttcttgctatgctggtgttgatggccgtcctatacgtgcatatgctggctagagcctgtcagcacgcacaggggatcgccaggctccataaacggcagcgccccgttcaccaaggattcggcctgaagggcgctgtgacacttaccatactgttggggatctttttcctctgctggggaccatttttcctgcacttaactctgattgtcctatgtcctgagcatcccacatgcggttgtatttttaaaaatttcaacctcttcctggcgcttatcatctgcaatgcaattatagaccctttgatctatgcctttcactctcaggaactgcgaagaaccctcaaggaggtgctgacgtgctcctggtga

SEQ ID NO: 2352 - RNA, 954 nt, synthetic construct
  misc_feature 1..954: note = AHC11324 variant
  source 1..954: mol_type = other RNA
atggccgtgcagggcagccaaagaaggctgctcgggtcccttaactctacccccacagctatccctcagctgggattggcagccaatcagactggtgcgcggtgcttagaggtctcaattagtgacggcctgttcctaagcctcgggctggtttcccttgtggaaaacgctctggtagtggccacgatagcaaagaatcgcaacttgcactctccaatgtactgttttatctgctgtctcgccctgtcggatctgctcgtctcaggaagcaatgtgttagagaccgctgttattctgcttttggaagcaggcgccctggtggctcgagccgcggtcctacagcaactcgacaacgtgatcgatgtaattacatgcagttccatgctgtctagcctttgtttcctgggtgcaatcgccgttgaccgttatatatccatcttttacgctttgagatatcattcaattgtgactctcccgagggcccggcgcgcagtcgctgccatctgggtggcgagtgtggtcttcagcaccctgtttattgcctactatgatcacgttgcagtgttactgtgcctcgtagtgttctttcttgctatgctggtcttgatggccgtgctatacgttcatatgctggctagagcctgtcagcacgcacaggggatcgccaggctccataaacggcagcgccccgtgcaccaaggattcggcctgaagggcgctgtcacacttaccatactgttggggatctttttcctctgctggggaccatttttcctgcacttaactctgattgtgctatgtcctgagcatcccacatgcggttgtatttttaaaaatttcaacctcttcctggcgcttatcatccgaaatgcaattatagaccctttgatctatgcctttcactctcaggaactgagaaggaccctcaaggaggtactgacgtgctcctggtga

SEQ ID NO: 2353 - RNA, 954 nt, synthetic construct
  misc_feature 1..954: note = AHC09521 variant
  source 1..954: mol_type = other RNA
atggccgtgcagggcagccaaagaaggctgctcgggtcccttaactctacccccacagctatccctcagctgggattggcagccaatcagactggtgcgcggtgcttagaggtctcaattagtgacggcctgttcctaagcctcgggctggtttcccttgtggaaaacgctctggtagtggccacgatagcaaagaatcgcaacttgcactctccaatgtactgttttatctgctgtctcgccctgtcggatctgctcgtctcaggaagcaatgtgttagagaccgctgttattctgcttttggaagcaggcgccctggtggctcgagccgcggtcctacagcaactcgacaacgtgatcgatgtaattacatgcagttccatgctgtctagcctttgtttcctgggtgcaatcgccgttgaccgttatatatccatcttttacgctttgagatatcattcaattgtgactctcccgtgggccaggcgggcagtcgctgccatctgggtggcgagtgtggtcttcagcaccctgtttattgcctactatgatcacgttgcagtgttactgtgcctcgtagtgttctttcttgctatgctggtcttgatggccgtgctatacgttcatatgctggctcgcgcctgtcagcacgcacaggggatcgccagactccataaaaggcagcggcccgtgcaccaaggattcggcctgaagggcgctgtcacacttaccatactgttggggatctttttcctctgctggggaccatttttcctgcacttaactctgattgtgctatgtcctgagcatcccacatgcggttgtatttttaaaaatttcaacctcttcctggcgcttatcatctgcaatgcaattatagaccctttgatctatgcctttcactctcaggaactgcgccgaaccctcaaggaggtactgacgtgctcctggtga

SEQ ID NO: 2354 - RNA, 954 nt, synthetic construct
  misc_feature 1..954: note = AHC11794 variant
  source 1..954: mol_type = other RNA
atggccgtgcagggcagccaaagaaggctgctcgggtcccttaactctacccccacagctatccctcagctgggattggcagccaatcagactggtgcgcggtgcttagaggtctcaattagtgacggcctgttcctaagcctcgggctggtttcccttgtggaaaacgctctggtagtggccacgatagcaaagaatcgcaacttgcactctccaatgtactgttttatctgctgtctcgccctgtcggatctgctcgtctcaggaagcaatgtgttagagaccgctgttattctgcttttggaagcaggcgccctggtggctcgagccgcggtcctacagcaactcgacaacgtgatcgatgtaattacatgcagttccatgctgtctagcctttgtttcctgggtgcaatcgccgttgaccgttatatatccatcttttacgctttgagatatcattcaattgtgactctcccgagggcccggcgcgcagtcgctgccatctgggtggcgagtgtggtcttcagcaccctgtttattgcctactatgatcacgttgcagtgttactgtgcctcgtagtgttctttcttgctatgctggtcttgatggccgtgctatacgttcatatgctggctagagcctgtcagcacgcacaggggatcgccaggctccataaacggcagcgccccgtgcaccaaggattcggcctgaagggcgctgtcacacttaccatactgttggggatctttttcctctgctggggaccatttttcctgcacttaactctgattgtgctatgtcctgagcatcccgaatgcggttgtatttttaaaaatttcaacctcttcctggcgcttatcatctgcaatgcaattatagaccctttgatctatgcctttcactctcaggagctgcgaagaacactcaaggaggtactgacctgctcctggtga

SEQ ID NO: 2355 - RNA, 954 nt, synthetic construct
  misc_feature 1..954: note = AHC10874 variant
  source 1..954: mol_type = other RNA
atggccgtgcagggcagccaaagaaggctgctcgggtcccttaactctacccccacagctatccctcagctgggattggcagccaatcagactggtgcgcggtgcttagaggtctcaattagtgacggcctgttcctaagcctcgggctggtttcccttgtggaaaacgctctggtagtggccacgatagcaaagaatcgcaacttgcactctccaatgtactgttttatctgctgtctcgccctgtcggagctgctcgtctcaggaagcaatgtgttagaaaccgctgttattctgcttttggaggcaggcgccctggtggctcgagccgcggtcctacagcaactcgataacgtgatcgacgtaattacatgcagttccatgctgtctagcctttgtttcctgggtgcaatcgccgttgatcgttatatatccatcttttacgctttgagatatcattcaattgtgactctcccgagggcccggcgcgcagtcgctgccatctgggtggcgagtgtggtcttcagcaccctgtttattgcctactatgaccacgttgcagtgttactgtgcctcgtagtgttctttcttgctatgctggtcttgatggccgtgctatacgttcatatgctggctagagcctgtcagcacgcacaggggatcgccaggctccataaacggcagcgccccgtgcaccaaggattcggcctgaagggcgctgtcacacttaccatactgttggggatctttttcctctgctggggaccatttttcctgcacttaactctgattgtgctatgtcctgaacatcccacatgcggttgtatttttaaaaatttcaacctcttcctggcgcttatcatctgcaatgcaattatagatcctttgatctatgcctttcactctcaggagctgcgaagaaccctcaaggaggtactgacgtgctcctggtga

SEQ ID NO: 2356 - RNA, 954 nt, synthetic construct
  misc_feature 1..954: note = AHC09597 variant
  source 1..954: mol_type = other RNA
atggccgtgcagggcagccaaagaaggctgctcgggtcccttaactctacccccacagctatccctcagctgggattggcagccaatcagactggtgcgcggtgcttagaggtctcaattagtgacggcctgttcctaagcctcgggctggtttcccttgtggaaaacgctctggtagtggccacgatagcaaagaatcgcaacttgcactctccaatgtactgttttatctgctgtctcgccctgtcggatctgctcgtctcaggaagcaatgtgttagagaccgctgttattctgcttttggaagcaggcgccctggtggctcgagccgcggtcctacagcaactcgacaacgtgatcgatgtaattacatgcagttccatgctgtctagcctttgtttcctgggtgcaatcgccgttgaccgttatatatccatcttttacgctttgtgctatcattcaattgtgactctcccgagagccaggcgggcagtcgctgccatctgggtggcgagtgtggtcttcagcaccctgtttattgcctactatgatcacgttgcagtgttactgtgtctcgtagtgttctttcttgctatgctggtcttgatggccgtgctatacgttcatatgctggctcgcgcctgccagcacgcacaggggatcgccagactccataaaaggcagcggcccgtgcaccaaggattcggcctgaagggcgctgtcacacttaccatactgttggggatctttttcctctgttggggaccatttttcctgcacttaactctgattgtgctatgccctgagcatcccacatgtggttgcatttttaaaaatttcaacctcttcctggcgcttatcatctgcaatgcaattatagaccctttgatctatgcctttcactctcaggaactgcgccgaaccctcaaggaggtactgacgtgttcctggtga

SEQ ID NO: 2357 - RNA, 1665 nt, synthetic construct
  misc_feature 1..1665: note = CCDS816.1 variant
  source 1..1665: mol_type = other RNA
atgaccgcccccggcgctgcagggagatgccctccaacaacttggctgggaagcctccttctgttggtgtgtttactggcctccaggtctatcacggaggaagtctcagagtactgcagtcacatgattggtagcggccatctacagtccctccaacggctgatagactctcagatggaaacctcgtgtcagatcacattcgagtttgttgatcaggaacaacttaaggacccggtgtgctatctgaaaaaggcgttcttgctcgtacaggatattatggaggacactatgcgctttcgagataacacccccaatgctatcgccattgtgcagctgcaggagctgtcactccgtttaaaaagctgtttcacaaaggactacgaagaacacgataaagcatgcgtcagaaccttttatgaaactcctctgcaacttttggagaaggtgaagaacgttttcaatgagaccaaaaacctgctagacaaggattggaatatctttagtaaaaactgtaataactccttcgccgaatgctctagccaggacgtggtcacaaagccagattgtaattgcctctaccccaaagctataccttcctcagacccagcaagtgtgagcccccatcagcctctggccccatctatggctccggtagccgggcttacgtgggaggattccgaaggaactgagggctcaagcctgttgcccggtgaacagcctctccacaccgttgacccagggagtgcgaagcaaaggccccctcggtctacatgtcagtcctttgagccacccgagactccggtggtcaaggacagcaccatcggaggctcgcctcagccccgcccatctgtgggcgcattcaaccctgggatggaagatattctggactccgccatgggaacaaattgggtgcccgaggaggcttcaggtgaggccagtgaaatcccagtcccccaaggcaccgagttaagcccttccagaccagggggaggctctatgcagacggagccggcaaggcccagcaactttctgtcagctagttcccctctcccagccagcgcgaaaggtcagcagcccgccgatgttactgggacagcacttcctcgggtgggaccagtacgccccaccggccaagactggaatcatactccgcagaagacagatcacccttctgctctgttgcgagacccacccgaacctggctcacccagaattagtagcctaaggccacaggggctgtccaacccttctaccctctcggcccagccccaactgagccggtcccactcaagtggatctgtgcttccactgggtgagttggaaggccgtcgcagcacgagagataggcggtccccggctgagcctgaagggggacccgcctcagagggcgcagcccgaccactcccccgcttcaatagcgtccctctgaccgacacaggtcatgagagacagtctgaagggtcctttagtccacagttacaggagagcgtgttccatctgctagttccctctgtgatcctcgtcctgcttgctgtgggcggattgctgttctataggtggcggcgcagatcccaccaagaacctcagagggcggattcaccgctcgagcagccagagggcagtcccctgactcaggacgatcgtcaagtagaacttcctgtttga

SEQ ID NO: 2358 - RNA, 1893 nt, synthetic construct
  misc_feature 1..1893: note = EAW85719 variant
  source 1..1893: mol_type = other RNA
atggccctgcccaccgctagacctctccttggcagctgcgggacaccagcactgggatccttgttattcctgctattttctctcggttgggtgcagccgtcaaggactctggccggcgagacggggcaagaagcggctccccttgacggagtcctggccaaccctccaaatatcagtagcttgtctccccggcagctcctgggcttcccttgtgcagaggtttccggtctgtcgaccgaacgcgtgcgagagctcgccgtagctttagcacagaagaacgtgaaactgtcaacagaacagcttcgttgcttggcccacagactgagcgagccacccgaggatctagacgctctccctctggatcttctgttgtttctcaatccagacgccttcagtgggccgcaagcgtgtactaggtttttctcccggattaccaaggcaaacgtcgatctgttaccccgcggagcccctgaaagacagaggctgctcccagctgcccttgcatgctggggcgtgcggggctctctgttgagcgaggctgacgttcgcgccctagggggactggcgtgtgatctccccggtcgatttgtggccgaatccgcagaggtcctgcttcctagactggtgtcatgcccaggccccttggaccaggatcagcaagaggctgccagggctgccctccaagggggaggcccgccttacggtcccccaagtacatggagcgtatctaccatggacgcactgcgggggttactgcctgttctaggacagcccataatccgttccattccacagggcatcgtggccgcttggcgccagagatcaagcagggatcccagttggcggcagcctgaacgaactattctccgcccaagattcaggcgggaggtcgaaaagacagcgtgtccgtctggcaagaaagcacgcgagatcgacgaatccctgatattttataagaagtgggagcttgaggcctgcgtggatgctgccttgctggcaacccagatggacagagtgaatgccatccccttcacgtacgaacaactcgacgtcctgaaacataaacttgatgagctgtatcctcaggggtacccagaaagcgttattcagcacttgggatatctctttctgaaaatgtcgcccgaggacatcaggaagtggaacgtgacttctttagaaaccctgaaagctctactcgaggtaaataagggtcatgagatgtcccctcaggccccacgtcggcccctgccgcaagtggcaacacttattgatcgattcgtcaagggcagagggcagttggacaaagatactctggacaccctcacagcgttttaccctggatatctgtgttcattaagtccagaggaactgagctccgtgcccccttctagcatctgggctgttaggccccaggatcttgatacctgcgacccacgccagttggacgtgctctaccctaaggcccggctggcattccaaaacatgaatggctcagaatacttcgtcaaaatacagagttttctaggtggggcccccacggaggatctgaaggctctctcccagcagaacgtgagcatggacctggccactttcatgaaacttagaacagacgcagtattgccactgaccgttgctgaagtgcaaaagttactcggcccgcacgtcgagggactgaaagccgaggaaaggcatcgccctgtgcgagattggattcttcggcagcgtcaggacgatctggacactttgggcctcgggctgcagggaggtatccccaatggctatctagtcctggatctctctatgcaagaggcgctgtcagggacaccatgtcttttgggacccggccctgtgctgaccgttttagccctcctgcttgctagtacgctggcatga

SEQ ID NO: 2359 - RNA, 1515 nt, synthetic construct
  misc_feature 1..1515: note = CCDS46865.1 variant
  source 1..1515: mol_type = other RNA
atggaggccctgagagtgcagatgttcatgccctgcagctttgaatccctctacctttcttcagctgagcaccctggcgcaagtaagccaccgatcagctcctcttcgatgacctcaaggattctgttgcggcaacagttaatgcgcgaacagatgcaggagcaagaacgacgtgagcagcagcagaaactgcaagccgcgcagttcatgcagcagagagtccccgttagccaaactcctgctataaacgtgagtgtaccaacaacgctaccctccgccacccaggtgcctatggaggtcctcaaggtgcagacacatctggaaaatccaactaaatatcacatccaacaggcacagaggcagcaagttaagcagtacctttctaccacactggccaacaaacatgctaatcaggtgttgagcctcccctgtcctaaccagccaggggaccacgtcatgccgcccgtgcctggatcctcagcaccaaatagtcccatggccatgctgaccctgaacagcaattgcgagaaggaaggtttttataagttcgaggagcaaaaccgggctgaatctgagtgtcctggcatgaatactcattcccgcgcctcatgcatgcagatggatgacgtaattgatgacatcattagcctcgaaagttcttacaacgaggaaatcttagggctgatggatccagcgcttcagatggcaaatacattgcccgtttccggaaacctgatagacctatatggcaatcagggtctcccgcctcccgggctgaccatcagcaactcgtgtccagccaatcttcctaacattaaaagagagctgacggagtctgaagctagggccttggcaaaggagcggcagaaaaaggataaccacaatctcatcgaacgccgaagaaggtttaacattaatgaccggatcaaagagctgggaactttaatacccaagtccaacgatccagacatgcgttggaataagggcaccattctgaaggcttcagtggattacatccgcaagctccaaagagaacagcagagggccaaagagcttgagaaccggcaaaagaaactggaacacgcgaatcgacatttgctactgcgcattcaggagctcgaaatgcaggccagagcacacggcctgagtcttatccccagcacagggctgtgctcccctgacttggtcaacaggatcattaagcaagagccagtgctcgaaaattgttctcaggatctgttacagcatcacgctgacctgacttgcaccacaaccctagacctcacggatggaactataacattcaacaataacctgggtaccggcactgaggccaatcaggcttatagcgtgccgacaaaaatggggtcaaaacttgaggacatcttgatggatgacaccctgagtcccgtcggagttacggatcctctcctgtccagcgtgtctccaggcgcctcaaagaccagtagccggcgctcctctatgtcgatggaagagacagaacacacttgttga

SEQ ID NO: 2360 - RNA, 1260 nt, synthetic construct
  misc_feature 1..1260: note = CCDS2913.1 variant
  source 1..1260: mol_type = other RNA
atgctggagatgctcgaatacaaccactatcaggtgcaaacccatcttgagaatcccacaaagtaccacatccagcaggcccagagacaacaggtcaaacagtatctgagcactacgttggctaacaagcatgcaaatcaggttttatccctgccttgcccaaaccaaccgggcgaccacgtgatgccccctgtaccagggtcttcagcccccaatagtcctatggcgatgctaaccctcaacagcaattgtgaaaaagagggattctacaagtttgaggaacagaacagggctgagtccgaatgcccaggtatgaatacacattctcgggcctcgtgtatgcagatggatgacgtgattgatgacataatctcactggagagcagttataacgaagagattcttggcctgatggatcccgcattgcagatggccaatactctccctgtctccgggaacctgatcgacctgtacggaaatcaaggcctcccaccgcccggtttaaccatttctaacagctgccctgctaatctgccaaacatcaaacgcgagcttacagcatgtatattccccaccgaatccgaggcccgagctttggccaaggaacgtcagaagaaagataaccacaatctgatcgagagaaggcggcgctttaacattaatgacagaatcaaggaactagggactctcattcctaaatcaaacgatccagacatgaggtggaataagggaacaatcctgaaagcgagtgtggattatatacggaaacttcagcgcgagcaacagcgagcaaaggagctggaaaacagacagaagaagttggagcacgccaataggcatctcctgttacggattcaggaactggagatgcaagctcgtgcccacggcctcagccttatcccctctaccggcctgtgctccccggacttggttaaccgcattatcaaacaggaacctgtgctagagaattgttcacaggatctgctccagcatcacgcagacctgacgtgcactaccacacttgacctgactgatgggaccatcacattcaacaataacttgggaaccggtacggaggctaatcaagcctacagcgtccccactaagatgggcagtaaactcgaagacattctgatggatgacacattatctccagtgggggtaaccgatcctctgctatccagcgtttcgcccggagcgtctaagacttcctcaagaaggagtagcatgtccatggaggaaacagagcacacctgttga

SEQ ID NO: 2361 - RNA, 1581 nt, synthetic construct
  misc_feature 1..1581: note = XM_005264754 variant
  source 1..1581: mol_type = other RNA
atgcaaagcgagtccggcatcgtgcccgacttcgaagtcggggaggaatttcacgaggaacctaagacctactatgagctgaaatctcaaccactcaagtcaagtagctccgccgagcatccgggagcttctaaaccccctatttcgtcaagcagtatgacatccagaatacttctgaggcagcagttgatgcgggaacagatgcaagagcaggaacgccgagagcagcagcaaaagttacaggcagcccagttcatgcagcaacgtgttccagtgtctcagactcccgcgatcaacgtaagcgtgcctacgaccctgccatccgctacacaggtccccatggaggtgctaaaagttcaaactcacctcgaaaatcctaccaagtaccatattcagcaggcccagagacaacaggtgaagcagtatctgtcaacaacccttgcaaacaaacacgccaatcaggtcctgagtttgccatgcccgaaccaacccggtgatcatgtgatgcctccagtacccggcagctctgctcctaattccccaatggcaatgctcactctgaactcaaattgtgagaaggaagggttttacaaattcgaggaacagaacagggccgagagcgagtgccccggaatgaatacacacagtcgggcttcttgtatgcagatggacgatgttatcgacgatattatctccctggaaagctcgtataacgaggaaatactcggcttaatggacccggccctgcagatggcgaatacccttcctgtgtctggtaacttgatcgatctgtacgggaatcaaggactacccccacctggcctcacgatttccaactcatgccccgcaaatctgccaaacatcaagcgcgagcttactgcctgtatttttcccaccgaaagtgaggctagagccctggcaaaagagaggcagaagaaggacaaccacaatttgatcgaacggcgccgaagattcaacataaatgataggattaaagagctcggcacactgatccctaagagcaacgacccagatatgcggtggaataaagggactattttaaaggcttccgtcgactatatccgtaaactgcagcgcgaacagcaaagagccaaggagctcgaaaacaggcagaaaaagctggagcatgcgaatcggcaccttttgctacgaatccaggagctggaaatgcaagcccgcgcacatggactctctctgattccgagcaccggtctttgctcacccgatctggtgaacagaataatcaagcaggagcctgtgttggaaaattgtagtcaggacctcctgcagcaccacgctgacttaacatgcaccacgactctggatctaacagacggcaccattacttttaacaataacctcgggacaggaaccgaggccaatcaggcttactccgtcccaacgaaaatgggcagcaagctggaggatatccttatggacgataccttgtctcccgttggtgtgacagaccctctgctctcaagtgtaagcccaggggcctccaaaacttcttcgaggcggagctccatgtcaatggaagagaccgaacatacatgttga

SEQ ID NO: 2362 - RNA, 1065 nt, synthetic construct
  misc_feature 1..1065: note = BAG52140 variant
  source 1..1065: mol_type = other RNA
atggcccccgctgcatggctgagaagcgccgcggctagggccctccttcctccaatgctgttgttactgctacagccgccccctctcctggcacgggcccttccacccgacgtgcaccatctgcacgctgagcgccgaggccctcaaccatggcatgcagccttgccctcctctcctgctccagccccggcgacccaggaagcaccccgtcctgcctcaagtctcagaccacccaggtgcggggtccctgatccaagcgacggactgtccgctcggaaccgccagaagagaatcctgaggttcccctggcagctcgttcaagaacaggtgcggcagacaatggccgaggcattaaaagtatggtctgatgtgactccgctgacgtttaccgaggtccacgaaggtcgcgctgacattatgatagatttcgcccgatactggcatggcgacgatcttccttttgacgggcccggaggcatcttggcgcacgccttctttccaaagacacacagagagggtgatgtgcatttcgactatgatgagacttggaccattggggacgatcagggaacagacctgctacaagttgcagctcacgaatttggccatgtgctcggcctgcagcacaccactgccgctaaagcccttatgtcggcattctacacatttaggtatcctctgtcattgagccccgacgattgtcgtggggtccagcacctctacggacagccatggcccaccgtgacgagtcggactcctgccctgggtccacaagctggcatcgacaccaatgagattgcgccgttagaacccgatgcacctccagacgcctgcgaggcttccttcgatgccgtatctacaatccgcggggagctgtttttctttaaggcaggattcgtttggagactcaggggcggtcagcttcagcccgggtatcctgccctggctagccggcattggcaaggattgccatcccccgtggacgccgcattcgaagatgcgcagggccacatatggtttttccagggcactaccggggtctcaacaccggctcctggagtgtga

SEQ ID NO: 2363 - RNA, 804 nt, synthetic construct
  misc_feature 1..804: note = AAV40839 variant
  source 1..804: mol_type = other RNA
atgagactgaccgtgctctgcgccgtctgtcttctgcccggcagcttggctttacctctgccacaggaggcagggggaatgtccgaactacaatgggagcaggcccaggactacctcaagaggttctatctgtacgattctgaaacaaagaacgctaattcacttgaggcgaagctgaaagaaatgcagaagtttttcggtttgccgatcactggcatgctcaacagtcgggttattgagataatgcaaaaaccccgctgcggggtgcctgacgtagccgagtatagcctgtttccaaattcccccaagtggacgtctaaggtggtcacctaccgaatcgtgtcgtatacacgtgatctgcctcacattactgttgacagactcgtgtcaaaagcattaaacatgtggggaaaggaaatcccactgcatttcaggaaagtcgtgtggggcaccgccgatattatgatcggttttgctcgcggggcacacggagacagctaccccttcgatggccctggcaatacacttgcccatgcttttgccccagggaccggattgggtggcgacgcgcacttcgatgaggacgaacggtggactgatgggagttccctgggaataaactttctatatgcagccacacatgagctcggccactctctgggtatggggcacagctccgacccgaatgctgtaatgtaccccacctacggaaacggcgatcctcagaatttcaaactttcacaggacgacatcaaaggcattcagaagctgtatgggaagagaagtaacagcaggaaaaagtga

SEQ ID NO: 2364 - RNA, 3768 nt, synthetic construct
  misc_feature 1..3768: note = J05582.1 variant
  source 1..3768: mol_type = other RNA
atgacccccggcacacagagccctttctttctgctccttctgttgactgtgttaacggtcgttaccgggtccggacacgcctcttcaacaccaggtggcgagaaggaaaccagtgctactcaaagaagctccgtgccgtcttcgacagagaaaaacgcagtatcaatgaccagcagtgtgctgtcctctcatagccccgggtccggatcaagtactacacagggccaggacgtcaccctagcccctgcgacggaaccagctagcggttctgccgcaacttgggggcaggatgtgacctccgttcccgtgacaaggcctgccctcggatcaactaccccacccgctcacgacgtcacaagcgcacctgataataagccagccccgggcagtaccgctccccctgcccatggcgtgacgtctgcgccagacactcggcccgcacctgggtccacagccccacccgctcacggagtaaccagcgccccggatactcgccctgcacccggttcgacagctccaccagcccatggcgttacctctgcgcccgacacgcgaccagcccccgggtccaccgcacctccagctcacggagtgacatcagccccggatactcgtcccgctcctggcagtaccgccccacccgcacacggtgtcacaagcgcccctgacactagaccagctcccgggtccaccgcgccgcctgcacatggagtgacatctgccccagataccaggcccgctcctggcagcactgccccaccagcacacggcgtgacgtcagcccctgacacacggcccgctccagggagtaccgccccgcctgcacatggagtcacttccgcgcccgatacccgcccagctcccggtagcacagcccctccagcacacggcgttacctctgcccccgacactagacctgctccggggtcaacagccccacccgcacacggagtgacgagtgctcctgataccaggccagcccccggcagcactgcgcctccggcccatggtgtaacatccgctcccgacacccggccagcacctgggtctacagctcccccagcccacggcgtgacttcggcccctgacacccgccccgcaccaggaagcacggcgccgcctgcccatggcgtcacctccgctcccgatacacgaccagcccccgggtcaactgcacctccagctcacggagtgaccagtgcccccgacacaagacctgcaccgggttctactgccccacccgctcatggcgttaccagcgcgcctgatacgaggcccgccccagggtccacagcacctcccgctcacggagtgacctcagccccagacactcggcctgccccgggcagcacagctcccccagcacacggtgtcacctctgcccctgatactcgtcccgcgccagggtccaccgctcctcccgcccatggcgtgacaagtgcaccggacacgcgcccagcccctggaagcaccgctcccccagcacacggcgtaacttctgcccccgatacaagacctgcgccggggtccaccgctcccccagcccatggagttacatcagcacctgacactaggcccgcccctggtagtaccgctccacccgcccacggcgtgacgagcgcacctgatacacggccagctcccgggtcgaccgccccgcctgcgcacggagtcacttccgccccagacacccgacccgcacctggctctacagctccacccgcccatggtgtgactagcgctccggatacccgccctgcacccgggtcaacagcccctcctgcccacggcgtcacgagtgctcccgacaccagaccagcgcccggatccactgcacctccagcccatggcgtgacatctgctccggacaccaggcccgcccctgggagcactgcaccacccgcccacggagttacatccgctcctgatacccggccagcgcccggctcaacggcccctccggcacatggtgtgactagcgctccagacacccgccccgcccctgggagtacagcacccccagcccacggagtaacctctgctcctgatactagacccgccccaggctccacagcgccgcctgcacacggtgtcaccagcgcccccgacacaaggccagctcccggctcgactgcccctccagctcatggggtgacctcagcacccgatacgcgtcctgccccgggatctacagctccacccgcccacggcgttaccagtgcacctgacactcggccagcgcccgggtccaccgcccctcccgctcatggagtgacaagcgccccagatactcgaccggcacctggctctaccgctcccccagcccacggtgtcacgagcgcacctgacacaagacccgccccagggtccaccgctcctcccgcgcatggagtgacttcagccccggatacaaggccagcacctggcagtaccgctcccccagcccacggtgtaactagcgcccccgacacacgccctgcaccgggctctaccgctccacccgcccacggggtgacgtccgcgcctgatactcggcccgctccaggatcaaccgcccctcccgcacatggcgttacaagtgccccagacaccagacctgctccggggagcacagcacccccagcccacggagtcacttccgcgcctgataccaggcccgctccaggctctacggcccctcccgcacatggtgtgacatcggccccggacactcgcccagctcctgggagcaccgcacccccagcccacggagtgacatcagctcccgacacccgacctgcccccggctccactgcgccccctgcccacggtgtcaccagtgcaccggataaccggcccgctctgggctctacagccccacctgttcataatgtgacgagcgcatccgggtcagcttctggaagcgccagtactcttgtgcacaacggcacctccgcccgtgcgacaaccactcccgctagcaaatctacaccattctcaatcccttcccatcacagtgacacccccacgactctggcaagccattcgacaaagaccgatgcctcttccacccaccacagctcagtaccgcctttgacaagttctaatcattccactagcccacaactctcaaccggggtcagctttttctttctgagtttccacatttccaacctgcagtttaattctagcctcgaggacccctccacagattactatcaggaattacagagagacatatcagagatgttcctgcaaatctacaaacagggaggctttcttggtttgtctaacattaagttcaggcctgggagtgtggttgtgcagctgactctagcttttcgcgagggaacgatcaatgtccatgatgtggaaacccagttcaaccaatataagacagaggccgcatcgcggtacaatctcactattagcgacgtttccgtgtctgatgtaccatttcccttctcagcccagagcggcgctggcgtccctgggtggggaatcgcgctgcttgtgctggtgtgcgtcttggttgccctcgcaatagtgtatctgatcgctttagccgtatgtcagtgcagaaggaaaaactacggtcaactggacattttcccagcacgagatacctatcaccccatgtccgaatacccgacataccacacccatggccgctatgtgcctcccagttctactgaccggagcccatacgagaaggtctcagccgggaatggaggctccagtctcagctatacgaaccccgctgtggccgcggcatctgccaatctttga

SEQ ID NO: 2365 - RNA, 2136 nt, synthetic construct
  misc_feature 1..2136: note = NM_032853 variant
  source 1..2136: mol_type = other RNA
atgatggccgacgctaagtacgtgctgtgcagatgggagaaaaggctctggcccgcaaaggtccttgcccggaccgcgacaagcactaaaaacaagcgccgaaaagaatatttcctggctgttcagatcttgtccttagaggaaaagattaaggtgaaatctacggaggtagaaatactggagaagtcacaaatcgaggccattgcaagtagcctagcctcccagaatgaagtgcctgctgcaccactcgaggaactggcctaccgtagatctcttagggtcgctctggatgtgttgtcggagggctcaatctggagccaggagagttccgccgggaccggacgggcggaccgctctctcagaggtaaaccgatggaacacgttagctccccctgtgattcaaacagtagctctctgcctaggggcgacgtgctggggtcctcacggccacatcgccgaagaccctgcgtccagcaaagcctcagttcttcctttacatgtgagaaggatcctgaatgcaaagtggaccacaagaagggattaaggaaaagcgagaatccacggggccccctggtacttcctgccggtgggggagcacaggatgaatcgggctctcgtattcatcacaagaactggactttggcttccaaacgcggcgggaatagcgcccagaaggcaagtctgtgtctaaacggaagctccctctctgaggacgataccgagagagacatgggtagcaaaggcgggtcatgggctgccccaagtctgccgtccggagttagggaagatgacccctgcgcgaatgccgagggccatgatcctggtcttccactggggagcttgacagcaccccctgctccagaaccctctgcctgttcagagccgggagaatgccctgctaagaaacggccccgactcgacggcagtcagcgccctccagccgtgcaactggagcccatggcagccggcgctgcgccaagccccgggcctggaccaggtccgagagagtccgtcacccccaggtctactgcacggttaggccctccaccctcgcacgccagcgctgacgccacacgctgtctgccttgcccagattcccagaagctcgaaaaggagtgtcagtcaagtgaagagtctatggggagcaactccatgagatcaatccttgaagaggacgaggaagatgaggaacccccgagggtgctgttgtatcacgagcctcgtagcttcgaggtgggaatgctagtctggcataaacacaagaaatacccattttggcccgcagttgtgaagtctgtacggcagcgagacaaaaaggcctccgtgctgtatatagaaggccatatgaatcctaagatgaaaggtttcaccgtcagtctcaagagcctgaaacactttgattgcaaggagaaacaaacgcttctgaaccaggctagagaagacttcaatcaggatatcgggtggtgcgtgtctttgattactgactacagggttcgcctcggctgtggatcctttgccggctcattcctggagtattacgcagcggatatcagttaccccgtgcggaagtcaattcaacaggacgtcttagggaccaagctgccacagctatcgaaaggatcccctgaagaacccgtggtaggttgcccactcggccagagacaaccgtgtaggaagatgctgcctgatcgctctcgagctgcccgggaccgtgcaaaccagaaacttgttgagtatatcgtgaaggccaaaggggctgaaagccacttgagagccatactgaagtcaaggaagcccagtcgctggctccagacatttctgtcctctagccagtacgtcacttgcgtggagacctatcttgaagacgagggacaactggatttggtcgtgaaatacctccagggcgtttatcaggaagtgggtgcaaaggtactgcagcggacaaatggggacagaattaggttcatcttagatgtcctgctaccagaggctattatctgtgccatctccgcggtggacgaggttgattacaaaaccgccgaagagaagtatattaaaggcccctcactcagctaccgagaaaaggagatatttgacaaccaactgcttgaggagcgcaatcggagaaggcgttga

SEQ ID NO: 2366 - RNA, 438 nt, synthetic construct
  misc_feature 1..438: note = AAD44697 variant
  source 1..438: mol_type = other RNA
atgaccgtgcacaacctgtacctcttcgacagaaatggcgtctgccttcattatagcgagtggcacaggaagaaacaggccgggatccccaaggaagaggaatacaaactgatgtatggaatgttgttttccattcggtctttcgtttcaaagatgagtcctttagatatgaaagacggttttctggctttccaaacaagccgctacaagctacattattacgagactccaacgggcataaaggtggtaatgaacaccgatctcggggtgggaccgatccgagacgtcctgcaccatatttattccgcactttacgtggaactggttgtgaaaaatcccttgtgtcctctcggccagacagtccagtctgagctgtttcgttcgagactggattcatacgtgaggagcctcccattctttagtgcccgggcgggttga

SEQ ID NO: 2367 - RNA, 1395 nt, synthetic construct
  misc_feature 1..1395: note = AAH02712 variant
  source 1..1395: mol_type = other RNA
atgcccagctgctccacctctacaatgcctggcatgatctgtaagaacccagacctggagttcgattcactccagccgtgcttttaccccgacgaagatgacttctattttgggggacctgatagtactccacccggtgaggacatttggaaaaagttcgaacttctgcctacgccacccttgagcccttccagaggctttgccgagcactcttcggaaccaccgtcatgggtgaccgagatgttactggagaatgaactatgggggagccccgctgaggaagatgcattcggactcggcggtctagggggacttacacctaacccagtcatactgcaagactgtatgtggagtggcttttccgccagggagaaattggagcgggcggtttctgaaaagctccagcatggccgcgggccccctactgctggaagcaccgcccagtccccaggtgcaggcgccgcttcacccgcagggcgaggacacggcggtgccgctggggccggacgtgcgggcgcagccctgccggctgagctggcccatcctgcagctgaatgcgtggatcccgccgtagtgttcccatttcctgtcaataaaagagagcccgcgccagtgcccgccgcccctgctagtgccccagctgccggcccggcagttgccagcggggctggaatcgcggcacccgccggtgctcctggcgtggccccacccaggcctgggggacggcagacatctggcggtgaccacaaggcactctccacctcaggggaagatactttaagcgacagtgatgacgaggacgatgaggaagaggacgaagaggaagagattgatgtcgtgacagtagagaagcgcagatcttccagcaacaccaaagccgttacgactttcaccatcacagtgaggccaaagaatgctgccctgggccccggacgggcacaatcgtctgaacttattttgaaacgctgtctgccgatccatcagcagcacaactacgcggctccttccccatatgtcgagtcagaagacgcaccccctcagaagaaaataaagagtgaggcaagcccccgaccactaaagtccgtgatccctcccaaagccaagtctctcagcccaagaaattcagatagtgaagactccgagaggcggcgtaaccacaatattctggagcgccaaagaaggaacgatcttcggagctcttttctgactttgcgagaccatgtgccggaactcgtcaaaaatgagaaggctgccaaagttgtgatcctgaagaaagcaaccgaatacgtacactcattacaggctgaggagcatcagctgctccttgaaaaggagaagctgcaggcccgccaacagcagttgctgaaaaagattgaacacgcgagaacatgctga

SEQ ID NO: 2368 - RNA, 3132 nt, synthetic construct
  misc_feature 1..3132: note = AAC78645 variant
  source 1..3132: mol_type = other RNA
atgcccctgctcgagggcagcgtgggggtcgaagaccttgttctgttggagcctttagtggaagagtccctgctaaagaacctccagctgagatacgaaaataaagagatctatacctacattggaaacgtagtgatatctgtcaatccatatcaacagcttccgatctacggtcccgagttcattgccaagtatcaggattacacattttatgaactgaaacctcacatctacgctttggcaaacgtggcctaccagtcactcagggaccgggatcgcgaccaatgcattctgatcactggcgagagtgggagcggaaagacggaagcgtccaaactggttatgtcttatgtggctgccgtctgtggcaagggtgagcaggtaaattcggtgaaggagcagctcttacagtcaaacccagttctggaagcattcgggaatgccaaaaccatacgaaacaataacagcagtcgttttggaaagtacatggatatcgagttcgactttaaaggcagtccccttggcggggtgattacaaattatttgctggaaaagtctaggctagtcaaacaactcaagggagagagaaacttccatatcttttaccagctgcttgctggtgcagatgaacagctgttgaaggccctcaaactggagcgggacactaccggctatgcttacttaaatcacgaggtgagccgcgtggatgggatggacgatgcctcctcattcagagcggtccagagtgcaatggccgttattggatttagcgaagaggaaatcaggcaagtgctggaggtaacatctatggtgctcaaacttggcaacgtcctggtggctgacgagttccaggcctccggtatacctgcatcagggattcgggatggacgcggcgttcgagaaatcggcgagatggtggggttgaatagcgaagaggtcgaaagagctctatgcagtaggaccatggagactgccaaggaaaaggtggtaacagcgctgaacgttatgcaggcccaatatgcacgggacgctctcgccaaaaacatttactctcgtctgtttgactggatcgtgaatcgcatcaacgagtccattaaggtcggaataggtgagaaaaagaaggtgatgggcgtccttgatatctacgggttcgaaattctggaggacaatagctttgaacagttcgtgatcaactattgtaatgagaaattgcagcaggttttcatagagatgaccctcaaggaggaacaagaagagtacaaaagagaaggcattccatggacgaaggtggattattttgacaacggaatcatctgcaaactgattgagcataatcagaggggtatcttagctatgctggatgaggaatgtctacggcccggggtagtctcggactctactttcctcgccaagctgaaccagctgttttccaagcacggccattacgagtcaaaagtgacccagaatgcacaacgacagtatgatcacacaatgggattgagttgcttccgcatttgtcactacgccggcaaggttacttataacgtgaccagctttatagacaaaaataacgatcttctcttcagagacctgcttcaggctatgtggaaggcgcagcatcctctgttgaggtccctctttccagaagggaatccgaaacaagcatctctgaagcggccccctacagccggagctcagttcaagagctcagtcgccatcttaatgaaaaacctgtacagtaagtccccaaattacattcgctgcatcaaacccaacgagcaccagcagagaggtcaatttagctctgatctagtggcaacccaggccaggtatctcggcctgcttgaaaacgtacgtgtgcggcgagctgggtacgcccatagacagggatatggccctttcttggagaggtaccgcctgctctcacggagtacgtggccacactggaatggtggggacagagagggcgttgaaaaggtcctgggagagttaagcatgtcctctggcgaactggcatttgggaaaactaagatcttcattaggtcgcccaagacattgttttatcttgaggaacaacgccgactccggctgcagcagctagcgaccctgatacagaaaatctaccgtggatggagatgtaggactcactatcaactcatgcgcaagagccagattctgatctcctcatggttccggggtaacatgcagaaaaagtgctacggcaaaattaaggctagtgtgcttttgatccaggccttcgtgagagggtggaaagcaaggaagaattaccgaaagtattttcgctctgaggccgctctgacattagccgacttcatatacaaaagcatggtccaaaagtttctcctgggacttaaaaacaatctgccgtccaccaacgttttggataagacgtggcctgcagctccctataaatgtctctcaaccgccaatcaggagctgcagcagctattctaccaatggaagtgcaagcggtttagagaccagctgagcccaaaacaggtggaaatcctcagggagaagctgtgcgcgtctgaacttttcaaaggcaagaaagcctcctatcctcaaagtgtgcccattccattttgtggtgattacatcgggttgcagggcaaccccaagctgcagaagttaaaaggaggcgaggaggggcctgtactcatggctgaagcagtcaagaaagtgaatcgtggaaacggcaagacaagctctcgcattctgcttctgactaaaggtcatgttatcctaaccgacacaaagaagtcccaggccaaaatagtgattgggctcgataatgtcgctggagtgtcagttacttccctgaaggacggcttgttcagcctgcacttatcggagatgtcctctgtgggtagcaaaggcgattttctcctggtatcagaacatgtcatcgagcttctgaccaagatgtatcgggccgtgttggacgcaacacaaagacagctcaccgtgactgtcacggaaaaattcagtgttaggtttaaggagaactccgtggcggtaaaagtggtccaggggccagccggaggcgataattctaagctgcgatacaagaaaaaggggagccactgcctagaggtgacagttcagtga

SEQ ID NO: 2369 - RNA, 3411 nt, synthetic construct
  misc_feature 1..3411: note = AAH53558 variant
  source 1..3411: mol_type = other RNA
atggccaagatggaggtgaaaaccagcctgctcgacaacatgatcggcgtcggggatatggttcttctggaacccttgaatgaggaaacattcattaacaatttaaagaaaagatttgaccactccgagatatacacttatatcggatctgtggtaatttcagtgaacccttacaggagtctgccaatctatagcccggaaaaggtcgaggagtaccggaatcgcaacttctatgaactaagtccccatatttttgctctctctgatgaggcataccgatcgctgcgtgaccaggataaagaccaatgcatccttataacgggtgaatcaggcgccgggaagaccgaggcgagcaagctggtgatgagttatgttgctgccgtgtgtggaaaaggcgcagaggtcaatcaggtgaaggaacagttgctccagtccaaccctgtactggaggccttcggtaatgctaaaacagttagaaacgataattctagcaggtttgggaagtacatggacatcgagttcgattttaaaggagacccactgggcggcgtgatttccaactacctcttagaaaagtcacgggtcgtgaagcaaccccgcggggaaagaaatttccacgtgttttatcagctgcttagtggagcaagcgaggagttgctgaacaaactaaagctcgaaagggatttctctcggtacaattatctgtcccttgactcagccaaagtcaacggtgttgatgacgctgccaactttcgcactgtgcgaaatgcgatgcagatcgtaggcttcatggaccatgaggcagaaagcgtgctggccgtcgtggctgccgttttgaagctcgggaacattgagtttaaacctgaaagtagagtgaatggactggatgagtctaagatcaaagacaagaacgagttaaaggaaatatgcgagctgaccggcattgatcagtccgtcctcgaaagggcattcagcttccggacagtggaggctaaacaagaaaaggtatcgaccactcttaatgttgcccaggcgtactatgcccgtgacgcactggctaaaaacttgtactctcgcctattttcctggctggtgaatagaatcaacgagtcaattaaggcccagacaaaagtcaggaagaaggtgatgggtgtcctcgatatctatgggttcgagatctttgaagacaatagtttcgagcagtttattataaactactgtaatgaaaaactgcaacagatcttcattgagcttaccctgaaggaggaacaggaggaatacatccgggaggatatagaatggacgcacattgactattttaacaatgctatcatctgcgatttgattgagaacaatactaacggaatcctcgccatgctggacgaggaatgtttacgaccaggcaccgtgacagatgagactttcctggaaaaactaaaccaagtttgcgcaacccatcagcactttgagagccgcatgtccaagtgttctagattcctcaatgacacaagcctgccccactcatgctttaggattcagcattacgccggcaaagtgctttatcaggtagaagggttcgtcgacaagaacaatgatttgctgtaccgggacctcagtcaagctatgtggaaggcgtcccacgcactgataaaaagcctttttcctgagggaaacccagccaagatcaatctgaaacgcccgcccaccgctggttctcagttcaaggcctcagtggcaacgttgatgaaaaacctccagactaagaatcctaactatattagatgtatcaagccaaatgataaaaaggccgctcatatcttcaacgaggccctggtttgccaccagattaggtacttaggcctgctagaaaatgtgcgtgtccggcgagcagggtatgcgtttagacaggcttacgagccctgtctcgaaaggtacaaaatgctgtgcaagcaaacatggcctcactggaaaggaccagcccgcagtggcgtggaggtacttttcaacgaattggagatacccgtggaggaatatagctttggtcggtccaagatcttcattagaaatccgaggaccctgtttaaactcgaggacctgcgcaagcagcgattagaagatctggcaactcttatccagaagatttaccgggggtggaaatgccgtacacatttcttgctcatgaagaaatctcaaatcgttatagccgcttggtatagaaggtacgcccagcagaagcgctatcagcaaaccaaatcgagcgcactggtcatccagtcctacattcggggctggaaggctagaaagatcctaagggagctgaaacaccagaagcgatgtaaagaggccgtgacgaccattgcggcctattggcatggaacacaagctcgccgggaactcagaaggctgaaggaggaagcacgtaacaaacacgccatcgctgtgatatgggcctactggcttggctcaaaggcacgccgggagttgaagagactgaaagaagaggcgaggcgaaagcatgccgtcgctgttatttgggcctactggttagggctcaaagtgcggcgcgagtatagaaagtttttcagggcaaatgctggtaaaaagatctacgaatttactctgcagcggattgtgcagaagtatttccttgagatgaaaaacaagatgcctagtctgtctcccatcgacaaaaactggccaagccgaccttacttgtttctcgattccacccacaaggaactgaaaagaatattccacctatggcgctgcaagaaatatagggaccagtttacagatcaacagaagctgatctacgaggaaaagctcgaggcctcagagctgttcaaagacaagaaagcactttatcccagctctgtaggacagccattccagggcgcctacttggaaattaataagaaccccaaatacaagaagctgaaagatgctatcgaggaaaagattatcatagcggaggtcgtgaataaaattaaccgtgccaatgggaagtccacttcccggatctttttactcaccaacaataacctgcttctggcagaccagaaaagcggacaaatcaagtctgaagttcctctagtggatgtcacaaaggtgtccatgtcaagtcagaatgacggcttctttgctgttcatctcaaagagggtagcgaggccgcctcgaagggggacttcctgttttcctctgatcacttgattgaaatggctaccaaactgtatagaactacgttaagccagacaaagcaaaaactcaacatcgagatttcagacgagttcctggtgcagtttaggcaggataaggtatgtgtcaagttcatacaaggcaatcagaaaaacggaagtgtgccaacctgcaagcgcaaaaataaccgacttctggaagtggcagtcccgtga

SEQ ID NO: 2370 - RNA, 3192 nt, synthetic construct
  misc_feature 1..3192: note = CCDS42226.1 variant
  source 1..3192: mol_type = other RNA
atggcccttcaggtggagctcgtccccaccggcgaaatcattagagttgtgcaccctcataggccatgcaagctggctctggggagcgacggagtacgggtgacaatggagtccgcattgactgcccgcgatcgagtcggtgtgcaagacttcgttttactggaaaactttacgtctgaggcggctttcatagaaaatctacgtagaaggtttcgggagaacctcatctacacctatattggcccggtgctggtctcagtgaatccctaccgcgatcttcagatctatagtagacagcacatggagaggtaccgcggggttagcttctatgaagtacctccacatctgtttgccgtggcagacacagtctaccgggccttgcgaactgagagaagggatcaggctgtgatgatttccggagaatctggcgcaggtaaaaccgaggccacaaagcggctcctgcaattctatgctgagacctgtcccgcccctgaacgtgggggagcggtgcgcgacagactgctccagtcgaacccagtcttagaggcatttggcaatgccaaaactctgaggaacgataattcaagccggttcggcaagtacatggacgttcagtttgatttcaaaggggctcccgtgggaggtcacatccttagttacttgctggaaaagtcccgagtagtgcatcagaaccacggcgagcgcaattttcacatattctatcaactactcgaagggggagaggaggaaacactgagaaggcttggcctggagcggaaccctcagtcttacttgtatctcgtcaagggtcagtgcgccaaagtgagctccatcaatgacaagtcagattggaaagttgtgcgcaaggcactgaccgtcattgactttacggaagatgaggtggaagacttactgagtatcgtagctagcgttctccatcttgggaacattcacttcgccgcgaatgaggagtctaacgcccaggtgactaccgaaaatcaactgaaatacttgacaagactactgtccgtcgagggatcaactctcagggaagcactgacccatcgtaagatcatagctaagggcgaggaacttctgagcccattgaacctcgagcaggccgcttatgcccgggacgcactggccaaagctgtgtacagtcgaacattcacctggttagtcggcaagattaacagatctctggcgtccaaagatgtggagagcccgtcgtggaggtctacgactgttctagggctcctggacatctatggatttgaagtgttccagcacaattcctttgagcaattctgtattaactactgcaatgaaaaacttcagcagttgtttatcgagctgacactcaagtcagagcaggaagagtacgaagcagagggtatcgcctgggaacccgtacaatatttcaacaataagattatatgtgatctggtcgaggagaaatttaagggcatcattagtatccttgacgaagagtgcctgcgccctggggaagctaccgatttgactttcctcgagaagctggaagacacagtgaaacaccatccacactttttaacccataagctggccgatcagcggacgagaaaaagcctaggaaggggcgagttccgcctcctgcactacgctggtgaggttacctattccgtgacagggtttcttgacaagaacaatgatttgctgttccgaaacctcaaagaaactatgtgttctagcaagaatcccataatgtcacagtgctttgaccggagtgagctgtccgataagaaacgtcctgaaaccgtcgccacacagttcaagatgagcttactgcaacttgtggagattttgcagtctaaagaaccagcttacgtaagatgtatcaagcccaacgacgccaaacagccgggcaggttcgacgaggtgctcatccgccatcaggttaagtatctgggactactggagaatctccgggtcagaagggcaggctttgcgtaccgacgcaagtatgaggctttcctgcaacggtacaaatcactttgccctgaaacttggcccacctgggccgggagaccacaggatggagtggcagtgttggtcaggcacctgggttacaagcctgaagagtataaaatgggccgtacaaagatttttatccgcttccccaaaaccttatttgccactgaggacgctctcgaagttcggagacagagtctggccacgaagattcaggcagcttggagggggttccactggcgacaaaagtttcttcgggtgaaacgcagcgccatatgtatccagtcctggtggagaggaacactgggcaggcggaaggcggccaaacgaaagtgggctgcacagaccattagacgcttgatcaggggtttcgtgctccgtcatgccccacggtgccccgagaacgcatttttcctggatcacgtaagaacttcttttctactgaatctcaggcgccaactgcctcagaacgtccttgacacctcgtggccaacaccgccccctgccttgcgagaagcaagcgagctgttaagagaactctgcatcaaaaatatggtgtggaagtactgtcggtccatttcaccagagtggaaacagcagctgcaacagaaggcggttgccagtgagatattcaaggggaaaaaggataactatccccagtctgtgcctaggctttttatcagcacccgcctgggcactgacgaaatttccccacgtgtcctacaggctctcggatcagagcccatccaatacgccgtgccggttgtgaaatatgatagaaagggctacaaacctcggagcaggcagctgttgctgacaccaaacgcagtagtcattgtggaagacgctaaggtgaagcagcgcatcgattatgccaatttaacggggatatctgtctccagtctcagcgactctctgttcgttcttcatgtgcagcgagcagataacaaacaaaagggagacgtagtgctgcagtccgatcacgtcatcgagaccttgactaaaacagccctctcagctaatagagtgaacagtattaatatcaaccagggtagcattaccttcgcgggcgggcccggacgggacggcacaatcgactttactcctggttcggaactgctaataaccaaggccaaaaatgggcacctggcagttgtggctcccaggcttaactcccgctga

SEQ ID NO: 2371 - RNA, 3021 nt, synthetic construct
  misc_feature 1..3021: note = AAI46764 variant
  source 1..3021: mol_type = other RNA
atggccgagcaggaaagcctggagttcggcaaggctgactttgtgctcatggataccgtctccatgcccgagttcatggcaaaccttagactgaggtttgagaaagggcggatctacacattcattggagaagttgtggtatctgtgaatccttataagttgttaaacatatacggtcgcgacactatcgagcaatataaaggccgagagctgtacgaacgtccaccgcacctatttgccattgcggatgctgcctataaggcaatgaaaagaaggtcaaaggacacgtgcatcgtcattagtggggagagcggagccggcaagaccgaggcttccaaatacatcatgcagtatatagcagccatcacaaatccctctcagcgggctgaagtggagcgcgttaagaacatgctcctgaaatcgaattgtgtgcttgaagccttcggtaacgcgaagactaatagaaacgataattcaagcaggtttgggaaatacatggacattaacttcgattttaagggagaccctatcggcggccatattaataactacctgttggagaagagtcgggtcatcgtgcagcaaccaggggaacgctccttccactctttttatcagctcctgcagggaggtagcgagcagatgctgcgatccctccatttacaaaaatcactgagtagctacaattatatacacgtaggcgcacagcttaagtcttccattaacgatgccgctgagttcagagttgtggccgacgcaatgaaagtcatcgggtttaagcccgaagagattcagaccgtgtacaaaatcttggctgccatcctgcatctaggaaatctcaagttcgtggtcgatggcgacacacctctgattgaaaacggtaaagttgtgtcaataatcgcggagcttctgagcaccaagactgatatggtagaaaaggccttgctctataggacagtggcaaccgggcgggacattatcgacaaacagcacacggagcaagaagctagttacggacgtgatgccttcgctaaggccatatatgagcgcctgttttgctggattgtcactagaatcaacgacatcattgaggtgaaaaattacgataccacaatccacggcaagaacactgttattggcgtgttagacatatacgggttcgaaatctttgataataactctttcgagcagttttgtattaattattgcaacgaaaaactgcagcaactcttcatccagcttgtcctgaagcaggagcaggaagagtaccaaagggagggaatcccatggaagcatattgactattttaataaccagataatcgtggatttggtagaacagcagcacaaaggtattatcgcaattctagacgatgcctgtatgaatgttggcaaggtgaccgacgagatgttcctggaagctctcaactccaaactggggaagcatgcgcactttagctcgcggaaactttgcgcatctgataagatcctggagttcgaccgagactttcgcataagacactacgccggagatgtcgtgtattccgtcatcggcttcattgacaagaataaagatacattgtttcaagacttcaagaggctcatgtacaactcaagtaatcccgtgctgaaaaacatgtggcctgagggtaagttaagcatcaccgaagttacgaaacggccactgactgctgccacactattcaaaaattccatgattgcactcgtggataacctggcctctaaggagccgtattacgtacgctgtatcaagcccaacgacaagaaaagccctcagatatttgatgacgaaagatgcaggcatcaggtcgagtaccttgggttgctggaaaatgtgcgtgttcggcgagctggcttcgcctttagacagacctatgagaagttcctccacaggtacaaaatgatttcagagtttacttggccaaaccatgatctgcccagtgacaaggaagcagtgaaaaagctgatcgagcgctgtggattccaagatgacgtcgcgtatggcaagacaaaaatttttatccggacccctagaacgcttttcaccttggaagaactcagggctcagatgctgatacgcatcgtgttatttctgcagaaggtatggcgagggacactagcccggatgcgttacaaaagaactaaggcagccctcaccattatcaggtattaccgccggtataaagtgaagtcctacattcacgaagttgctagaaggttccatggagtcaagacaatgcgagattacggtaaacacgtgaagtggccatcacccccgaaagtgctgcgccggtttgaggaggcccttcagactatcttcaatagatggagggcatctcaattgataaagtcaattcctgctagtgacctgccccaggtccgtgccaaagttgcggccgtggaaatgctcaagggccagcgcgctgacctggggttacaacgggcatgggagggaaactatctggccagcaagccagatacccctcagacatccggcacctttgtgcccgtagctaatgaacttaaaagaaaggacaaatacatgaacgtcttgttctcttgccacgtgaggaaggttaatcgattctcgaaagtggaggatcgggccatctttgtcactgaccgccatctctataagatggatccaacgaagcagtacaaagtgatgaagacaatccccctgtataacctaaccggtctgagcgtttccaatgggaaagaccagctcgtggtattccacactaaggataacaaagacctgattgtctgtctttttagcaagcaacctacccatgaaagtagaatcggcgagttggtgggagtgctggtcaatcacttcaaatctgagaagaggcacttacaggttaacgtgacaaatccagtacagtgcagcctccatggcaagaaatgcaccgtgtccgtcgaaactcggctgaaccagccgcaacccgattttacaaagaatcgatcagggttcattcttagcgtgcctggaaactga

SEQ ID NO: 2372 - RNA, 3327 nt, synthetic construct
  misc_feature 1..3327: note = CCDS32254.1 variant
  source 1..3327: mol_type = other RNA
atgggcagcaagggggtgtaccagtatcactggcaatcccataacgtcaaacactctggagttgacgatatggtgctgctctcaaagatcaccgagaatagtattgtagaaaaccttaaaaagagatacatggacgattatatattcacatacatcggtagcgtgctgatttccgtcaatccctttaaacagatgccttatttcggcgagaaggaaatcgagatgtaccagggggccgctcagtatgaaaacccaccgcatatttacgcattggccgacaatatgtacaggaacatgatcatagatcgggagaatcaatgcgtgatcatttctggagagtcgggcgcgggtaagactgttgctgccaaatatatcatgtcatacattagccgcgtgagtgggggaggcacgaaggtccagcacgtgaaagacatcatattacagtccaaccccctgctagaagcatttggcaatgccaagaccgtacgaaacaataactctagccgtttcgggaaatattttgagattcagttctcccctggaggtgaaccagatggcgggaagatctcaaattttctcctggagaagagtagagttgtgatgaggaaccccggagagcggagcttccatattttctaccaacttatcgaaggcgcttctgcagagcagaaacactccctgggtatcacatcaatggactattactattacttgagcctcagtgggtcttacaaggtcgatgacattgatgaccgcagagaatttcaggagactctgcacgccatgaatgtgataggaatctttgctgaggaacagaccctggtgctccaaattgtcgccggcatcttacatctgggcaacatatccttcaaagaggttgggaactatgcggcagtggaaagcgaggaatttcttgccttccctgcttacttgctgggaattaatcaggataggctaaaggagaaactcacatcgcggcagatggactctaagtggggtggcaaatccgaatcaatccacgtaaccctgaacgtggagcaagcctgttatactcgcgacgcacttgctaaggccctgcatgcgcgagtcttcgattttctcgtggacagtatcaataaggccatggagaaagatcacgaagagtacaacattggggttctcgacatctatggattcgaaatttttcagaagaatggcttcgagcagttttgcataaacttcgtgaatgaaaaactgcagcaaatctttattgagttaacactgaaggcagagcaggaagagtacgtccaggaaggtatcagatggaccccaatcgagtatttcaacaataaaattgtgtgtgatctcatagagaacaaggtaaatccccctgggatcatgagcattcttgacgatgtttgcgctacgatgcacgccgtgggcgaaggagctgaccagactctgttgcaaaagctacagatgcagatcggctcccatgagcactttaactcttggaatcaggggttcattatccatcactacgccggaaaagtcagctacgatatggacggtttttgtgaaaggaaccgggatgtgctgttcatggacctcatagagctgatgcaatcaagtgaacttccatttatcaagtccctgttcccggagaatttgcaggcagacaaaaagggccgtcccaccacagccgggagcaaaattaagaagcaggctaacgatctcgtctctactctgatgaaatgcacccctcattatatccgctgtattaagccaaacgagaccaaaaagcccagagactgggaagagtcaagggtgaaacaccaggttgaatacttaggactgaaggagaatatccgggtgcgacgcgcgggctatgcatacagaaggatattccaaaagtttctacagcggtatgccattctcacaaaagctacgtggcctagttggcagggtgaagagaagcaaggggtactgcaccttttgcagagcgtcaacatggattccgaccagttccagctgggccgctctaaagtgtttatcaaggccccagagtcgttgttcctgcttgaagagatgagagaaaggaaatacgatggatatgcacgtgttattcaaaagagctggcggaaatttgtggcccgaaagaagtacgtccagatgagagaggaggcttccgacctgttgctcaataaaaaggaaaggcgccggaactcaatcaatagaaacttcataggcgattacatcgggatggaggaacatcccgagctgcagcagtttgtgggaaaaagggaaaagattgacttcgccgatactgtaacaaaatatgaccgccgatttaagggtgtgaagcgggatttactgctaaccccgaaatgcctctacctgatcggccgtgagaaggttaaacaagggcctgacaagggacttgtcaaagaggtgttgaagagaaagattgaaatcgagaggatactgagtgtgtctctcagcactatgcaggatgacattttcatcctgcacgaacaggagtatgactccttactggaatcagtctttaaaacagagttccttagcttgctcgcaaagcgctacgaggagaaaacccagaagcaactgcccctaaaattttctaatacgctggaactcaagctgaagaaagaaaactggggcccatggtccgcgggtgggagtcggcaggttcagttccatcaaggcttcggagatcttgctgtgttgaagcctagcaataaagtgctgcaggtatctatcggccccgggttaccaaagaactccagacccaccaggcgaaatacaactcagaacaccggatattcaagtggcacacagaatgccaactaccctgtccgcgcagccccaccgccccctggttatcaccaaaatggggtgattcggaaccagtacgttccatacccccacgctcctggaagccagagatcgaaccagaaatccctctatacttctatggccaggccacccctgccgcgtcaacagagcacctcaagtgaccgcgtgtcccagacacctgagtctcttgattttctgaaggtcccagaccagggcgcagctggtgtgcggagacaaaccactagcaggccccctcccgccggcgggcgaccaaaacctcagcccaagccaaagccgcaggttcctcagtgtaaagcgttgtacgcctatgatgctcaagacacggatgaactctccttcaatgcaaacgacatcattgatataatcaaggaggacccctcaggatggtggacaggccggctgcgcgggaaacagggactatttccaaataactacgtgaccaagatttga

SEQ ID NO: 2373 - RNA, 3297 nt, synthetic construct
  misc_feature 1..3297: note = AAH28071 variant
  source 1..3297: mol_type = other RNA
atgggcagcaaggagagattccactggcagtcccataacgtgaaacaatctggggtcgacgatatggttctgctcccccagatcaccgaagacgccattgctgcaaatcttaggaagcggtttatggatgactacatattcacatatatcggatcagtgctgattagtgtaaacccttttaaacagatgccatacttcactgatcgcgagatcgacttgtatcagggtgccgcgcaatacgaaaatccgccccacatttatgctttaacggataacatgtaccgaaatatgctgatcgactgcgagaaccagtgtgtgataatcagcggcgaatccggggccggaaagaccgtcgcagccaaatatattatgggctacatctctaaggtgtcgggtgggggagagaaggttcagcatgtgaaagatattatcctacagtcaaatcctctcctggaggcttttggcaacgcaaagacagtccgtaataacaatagcagtagattcggcaaatactttgaaatacaattctccaggggaggagagccagacggtggcaagatttctaactttcttctggagaaaagccgggtggtaatgcagaatgaaaacgagcgcaatttccacatctattaccagttgctcgaaggggcctcccaggagcaaagacagaacctgggactgatgactcccgattattactattacctcaaccagtcagacacctatcaagttgatggcacagacgacaggagtgattttggtgaaaccttaagcgctatgcaagtgattgggatccctccatctatccagcagctggtccttcagttggtggccgggattctgcatctaggcaatatatccttctgcgaggacggcaactacgcgcgggtggaatcagtcgatctcctggcatttcccgcctaccttctggggatcgacagcggacgcttgcaggagaagctcacttcacgaaagatggattctagatggggtggcaggtccgagagcattaatgttacactgaacgtggaacaggctgcctatacccgggacgcattagctaaagggctgtacgcccgtctcttcgatttccttgtagaggcgatcaatcgcgccatgcagaagcctcaagaagagtattcgataggagtgctggacatttacggctttgaaatcttccagaaaaacggttttgagcagttctgtatcaattttgtcaacgagaagttgcagcaaattttcatcgaactaacgctgaaagcagagcaggaagagtatgtgcaggaagggattagatggactccaatacagtactttaataacaaggttgtgtgcgatctcatcgagaataaactgtctccgcccggcattatgtccgtccttgacgatgtgtgtgctaccatgcacgccacaggaggcggggctgaccaaactctgttgcagaagctccaggccgcagtaggaacccacgagcatttcaactcatggagtgccggttttgttatccaccattatgctggcaaggtgagctacgacgtctccgggttctgcgaaaggaatcgggatgtgctgttttctgacttaatcgagctgatgcaaacaagcgaacaggcgttcctacgaatgctctttcctgagaaactggatggagacaagaaaggccgcccatcaaccgcaggtagtaagattaaaaagcaggccaacgatcttgtcgctacgttgatgagatgtactccccactacataaggtgcatcaagcctaatgagacaaaacggccacgcgactgggaagagaacagagtgaagcaccaggttgaatatctggggctcaaagagaacattagggtgcgtcgggccggcttcgcataccgaagacaattcgccaagtttctgcagaggtatgctatccttacccccgaaacttggccgcgctggcggggagatgagagacagggcgtacagcatctgttgagggccgtcaatatggagcctgaccaataccagatggggtccacaaaagtgttcgttaagaaccccgaaagcctctttctgttagaggaagtgcgcgagcgaaagttcgatggatttgcacggaccattcagaaagcgtggcgtagacacgtcgctgtgaggaagtatgaagagatgcgcgaggaagcctctaatatcctgctaaacaaaaaggagcggagaaggaatagtataaaccgaaatttcgtaggtgactacctcggcctggaggaacgcccagaacttcggcagtttttggggaaaagagagagggtggatttcgcagacagtgttacgaagtatgatcgtcgctttaagcctatcaaacgggacctgattctcacccccaagtgtgtctacgtgatcggaagagagaaagtgaagaaaggcccagaaaagggtcaagtctgcgaggttctgaaaaagaaggtggacattcaggccttacgaggggtgagcctgtccacaaggcaggatgacttctttatccttcaagaagatgctgccgactctttcttggagtcggtatttaaaactgagttcgtcagcctcctgtgtaagcggttcgaagaggcaacccgcagacccctacctctgacattttccgatactctccagttcagggtgaaaaaggaaggctggggaggcgggggaacccggtcagttacatttagtcgaggcttcggtgacctggctgtgcttaaagtcgggggaagaaccttgactgtgtctgttggcgatggtctgccaaagagctccaagccgacgcgcaaaggcatggccaaggggaaacccaggcgttcaagccaggcgcctacacgggccgctccagcaccccctagaggaatggacaggaacggcgtgccaccctctgcccgcgggggaccgttacctctcgagataatgtccggcggtgggacccatcgaccacccagaggacctcccagtactagcctgggcgcttctcggaggccacgcgcccgtcctccctccgaacacaataccgagtttcttaacgtaccagatcagggtatggcaggcatgcaaagaaagcggtcagtcgggcagaggccggtgcctggagtgggccgccccaaaccacagccccgaacacatgggcctagatgccgggcgctgtaccagtatgtcggacaagacgttgatgagttgagtttcaatgtgaacgaagtaattgagatcctcatggaagacccaagcggctggtggaagggtaggctgcacgggcaggagggactatttcccggcaattacgtggaaaagatttga

SEQ ID NO: 2374 - RNA, 3057 nt, synthetic construct
  misc_feature 1..3057: note = CCDS34629.1 variant
  source 1..3057: mol_type = other RNA
atggaggacgaagagggccccgaatacgggaagcctgatttcgtgctgctcgaccaggtcaccatggaggattttatgagaaaccttcaactgaggttcgaaaaaggacggatctatacatacattggtgaggttttggtgagcgtaaatccatatcaggagttaccgctgtacggccccgaagccatagctcgctatcaggggcgagagctatacgaacgtcctccacacctctatgcagtggccaacgcggcttacaaggccatgaaacatagatccagggacacttgcatcgtcatttctggagagtcaggcgcaggtaagacggaggccagtaaacacatcatgcagtacattgctgcagtgaccaatcccagccaacgggccgaagttgagcgcgtgaaggatgtcctgcttaagtccacatgtgtgctggaagcctttgggaacgctagaactaataggaaccataattcttcgcggttcggaaaatatatggacatcaactttgatttcaagggcgaccctataggcgggcacatccattcatacttgctcgagaaaagccgcgtactgaagcagcacgttggagaacgaaattttcacgcgttctatcagctgctcagaggtagtgaggataaacagttacatgagctgcaccttgaaaggaacccagcagtgtacaattttacccatcaaggcgccgggttgaacatgacagtccactccgctctggactctgatgagcagagccaccaggccgtgaccgaagcaatgcgggtgattggattctcccccgaggaagtcgagtcagttcatcgtatcctagctgccattctccacctgggcaatatcgagtttgtggaaactgaggaaggtgggcttcagaaggagggactggcggtagccgaagaggcattggtggaccatgtcgctgagctcacagccacccctcgcgatctggtgttaagaagtctgctcgctaggacggttgccagcggcggccgggaacttatagagaaggggcacactgcagccgaggcttcttatgcgcgagacgcatgcgccaaagctgtgtaccaacgcctgttcgaatgggtcgtgaacagaattaattccgtaatggagccaaggggacgggacccgcgcagagatggtaaggacaccgttatcggcgtgttggatatttatgggtttgaagtcttccccgtgaactcattcgagcagttttgtatcaactactgcaatgaaaaactacagcaactgttcatccagctcattctgaagcaggagcaggaagagtacgagagggaaggaataacatggcaaagcgtcgagtattttaacaatgccactatcgtggaccttgttgaacgtcctcatcggggcattctggcagtgttggatgaggcctgtagttctgctggtaccatcacagaccgaatattcctccagaccctggatatgcaccacagacatcacttacattacacgtccaggcagctgtgcccaactgacaaaacaatggaatttgggcgcgatttccggattaagcactatgccggcgacgtaacctacagcgtcgagggatttatcgataaaaacagagacttcctatttcaggacttcaagaggctcctgtataattcgactgatcccacacttcgcgcaatgtggcctgacggccaacaggatatcaccgaggtgacgaagcgaccattgaccgcggggacactgtttaaaaactctatggttgctctcgtggaaaatctggcctccaaggagcccttctacgtccggtgtattaaaccgaacgaagacaaggtggcaggaaaacttgatgagaatcactgccgtcatcaggtagcctatctgggtttgctcgaaaacgtgagagttaggcgcgctggctttgcctcacggcagccttacagtagattcctgttaaggtacaagatgacttgtgagtatacctggcccaatcacctcctagggagcgacaaggcagctgtctccgccctcctggagcaacatggacttcagggcgatgtggcgttcggtcactctaaattgtttatccgaagcccacgcacactggtgactctcgaacagtcacgggccagactgattcctataatcgtcttactgcttcagaaggcttggagggggaccttggcacgttggcgctgccggagactcagggccatttacacaatcatgcgatggttccggcgccataaagttagagctcacctggccgagctacaaaggcggtttcaggcagcgcgacagcccccactgtatggcagagacctcgtgtggcccctgcctccagccgtgcttcaaccgttccaggatacctgtcacgctttgttttgccgctggagggcccgtcagctggtaaagaacattccccctagtgacatgccacagatcaaagcaaaggtcgctgccatgggagcattacaaggcctccggcaggattgggggtgcagaagggcctgggctcgcgactacctgtccagcgcgactgataatcccacggcctcttcacttttcgcacagcgactgaagacattgcaggacaaagacggatttggtgctgtgctgttcagtagccatgttagaaaggtgaaccggtttcacaaaataaggaatcgcgccctgctactgaccgatcaacatctctataagctggaccctgatcgtcagtacagagtcatgcgggccgtgccacttgaagctgttactggcttgtccgtgacctctgggggagaccagctggtagtcttacacgcaaggggccaggatgacctcgtggtgtgtctgcatcgctcgcgacccccgcttgataacagagtcggtgagctggttggggtgctagccgcgcactgccaaggcgagggacggacactcgaagtaagggtgagcgactgtatccctctgtcccaccgcggcgtcagaaggttgatttcagtggagccacggcccgaacagcctgagcccgatttccgttgcgctcgcgggagttttaccctgttatggccatctcgatga

SEQ ID NO: 2375 - RNA, 3069 nt, synthetic construct
  misc_feature 1..3069: note = CCDS53826.1 variant
  source 1..3069: mol_type = other RNA
atggagggcgccctgaccgctagagacaaggtgggggtccaggatttcgttctccttgacgcatacacaagcgaatccgcctttgtggataacctgaggaaacggttctctgagaatttgatctatacttacattggaacgttactggtatcagtgaacccctatcaagaactaggtatatacaccgtcagtcagatggagctctatcagggcgtgaactttttcgaactgcctccacacgtttacgcgatcgctgacaatgcctatcgcatgatgtgcgcagagcttaataaccattttattctgatcagcggggagtccggagccggcaagacagaggcttctaaaaagattttggagtacttcgcagtgacttgtccgatgacccagtcgctccaaatcgcccgagatcgtctgctgttttcaaatcccgtcctcgaggctttcggtaacgccagaacattaaggaatgacaacagcagtcggtttgggaaatacatggatatacagttcgactttcagggaatccctgtgggcggccacattatctcctatctgattgagaagtctcgcgtagtttaccagaatgagggggaaagaaacttccatatcttttatcaacttttggcgggaggtgaggaagagaggctgagctacctaggcctcgaacgggatccacagctgtataagtacctttcccaggggcactgcgcaaaagagtcaagtataagcgacaagaatgattggaaaaccgtgtctaacgccttctccgtcattgacttcactgaggctgatctggaaaatttgtttggaatcattgcctcagtgctccatctgggcaacatcggtttcgaggaagacgaccaggggtgtgcaacaatccccgatacccacgagattaagtggatagctaaattactgggagtgcaccctagcgtcctccttgaagccctgacgcatcgcaagatcgaggcgaagactgaggaagttatttgcccattgaccctagagctgagtgtgtatgcccgagacgcaatggctaaagccgtatacggcagaacatttacttggctcgtgaacaagatcaattcttccctggtcaacaaagatttcaccaggaagacagtgataggccttctggacatttacgggtttgaagttttcgataaaaatggatttgagcaattctgtatcaactattgcaatgaaaagttgcagcagctcctgatcgagcggaccttaaaagctgagcaagccgaatacgagatggaaggtattgagtgggagcccatcaagtattttaacaataagattatatgtgacctggtggaagaacgtcacaaaggcatcattagcatcctagatgaagagtgcatccgccctgggccagcaacggacctctcgttcctggaaaaacttgaggagaaagtcggaaagcatgcccactttgaaactagaaaattggctggcccgaagggtaggaagcggattgggtggatggagttccgactgctccactacgcgggcgaagtgacatattgtaccaaaggatttctggagaagaacaatgatcttctgtaccgccatttgaaagaagtactctgcaagtctaaaaacataatcctgagagagtgtttcttactggcagagctagaaaataggcggcgaccccctactgttggcacacagttcaagaactccctctcaagtctgcttgagaccttgattagcaaggaaccatcctatatcagatgcattaaacccaatgacaggaaggagccttctaaatttgatgacttcctgatccgtcaccagataaagtacctcgggctgatggaacatttacgggtgcgcagagccggatttgcttacaggcgcaaatatgagcacttcctgcagcggtacaagagcctttgcccagacacgtggccccattggcacggtccgcctgccgagggcgtcgaaagattgatcaagtatattgggtacaaacccgaggaatataagctcggaaaaaccaagatctttattaggttcccacgcacactgtttgcaactgaggatgccttcgagttttcaaaacaccagctagtggctcgaatccaagccacctacaagcggtgtctgggccgtagagaatatgtcaaaaagaggcaggcagcgataaagctcgaggctcattggcgcggtgccctggcacggaaagccattcagagaaggaagtgggctgtgcgaatcattcgcaaattcatcaaggggtttataagtcggaacaaacctctttgccccgacaatgaagagttcatcgtttttgtgagaaagaactacattttgaacctgaggtaccacttaccaaagacagtactcgataaatcctggctgcgtccccctggcatccttgaaaatgccagcgacctgttgcgcaagatgtgtgtccggaacctcgtgcaaaaatattgcagaggaattactgcagagaggaaggctatgatgcagcagaaagttgtgacctctgagatcttccgaggccggaaggatgggtacacagaatcactgaatcagccattcgtcaacagtcgcatagacgagggagatattaatccgaaggtgctacaactgatcagccatgaaaagatccagtatggtgtacccgtgattaagtacgacagaaaaggctttaaggccaggcagcggcagctcatcctgacccaaaaagcggcctatgttgtcgagcttgctaagattaagcagaaaatagaatactccgcattgaagggggtgtctacttcgaacctgagcgatggaatcttagtgattcacgtctcccctgaggactcaaaacagaagggcgatgccgttctccaatgtggtcacgtgttcgaggctgtgacgaaactggtaatgcttgtcaagaaagaaaatatcgtgaacgttgtgcaggggagtctgcagtttttcatttctccaggcaaggagggaacaatcgtctttgacaccggcctagaagaacaggtgtataagaataaaaacgggcaactcactgttgtgagcgtacgaagaaagtcctga

SEQ ID NO: 2376 - RNA, 2379 nt, synthetic construct
  misc_feature 1..2379: note = BAC84969 variant
  source 1..2379: mol_type = other RNA
atgatcaccgtgaaccccgacggcaagattatggtcagaaggtgcctggttacactccggcctttccgcctttttgtgctggggataggattctttactttgtgtttcttaatgacgagcctgggtggccagttttccgcccgacgtctaggggattctccattcaccatcagaacagaggtaatgggaggcccggaatcaaggggtgtgctccggaaaatgagtgacctgcttgagctgatggtcaagcgcatggatgctttggcaagactcgaaaatagctccgagctgcacagggccgggggagacctgcattttcccgcggatcggatgcctccaggcgctggcctcatggaacgcattcaagccatcgcacagaacgtgtctgacattgccgttaaagtggatcagatcttacgacactcgctgcttttgcattcaaaggtcagcgaggggagaagggaccagtgcgaggctcccagtgatcctaaattcccagactgttccggaaaggtggaatggatgcgggcacgttggacttctgatccctgctacgcctttttcggtgtagacggcaccgagtgtagctttctgatatatctatccgaagttgagtggttctgccctccactcccgtggcgcaatcaaacagctgcccagagagcgcccaagcctctgccaaaagtgcaggcagtctttaggtcaaaccttagtcacctgttggatctcatggggagcggaaaggagtctctgatcttcatgaaaaagcggaccaaacgattaactgcccagtgggctctggccgcacaacgcctcgctcagaagctgggcgccacacagagagaccagaagcaaattctggtgcatatcggtttcttgaccgaagagtccggggacgtgttttcacccagggtcctaaaaggaggccctctgggcgaaatggttcagtgggcggatattctcacggccctgtacgtgcttgggcacggactgcgggtaactgtgagcttgaaggagctccagagtaatctgggtgtcccacccggccgcgggtcttgtccgttaaccatgcctctgcccttcgacctaatctatacagattaccacggactccaacagatgaaaagacatatgggcctgtcctttaagaaatataggtgccgtatacgggtgattgacactttcggtaccgaaccagcatacaaccacgaggagtatgctacacttcatgggtaccgaaccaattggggctactggaacttgaatcctaagcagtttatgacgatgttcccccacactccagataacagctttatgggattcgtttcggaggaactgaatgaaacagagaaaagactcatcaagggcgggaaggcctctaacatggctgtggtctatggaaaagaagcctccatttggaagctgcagggtaaagagaagtttcttggcatcctgaataaatacatggagatccacgggaccgtgtattacgaatcacaaaggccccctgaggtaccagcattcgttaagaaccatggattgctcccgcagcccgaatttcagcagctgttacgcaaggccaaactgttcattggctttggtttcccttatgaggggccagctcccctagaagcgatagcaaatggctgtatcttcctccaaagtcggtttagccctccacactcctctctgaaccatgagttctttagaggaaagcccactagcagggaggtgttctcacagcacccgtacgccgaaaactttattggcaaacctcatgtctggacagtggactataataacagtgaggaatttgaggctgccatcaaggcaataatgcgcacccaggtcgatccataccttccctacgagtatacgtgcgaagggatgttggagcggattcacgcctacatccagcaccaagacttttgtcgagctcctgatcccgccctgccagaagcacatgcgcctcagtcccccttcgtgctcgctccaaatgccacccacctggagtgggcacgtaacacaagcctggccccgggagcttggcctcccgcccatgcactgagagcttggcttgccgttccaggtagggcgtgcactgatacctgcttggaccacggcctcatctgtgaaccctctttcttcccttttcttaattcacaggacgccttcctaaaattacaggtgccatgcgacagtacagagagcgagatgaaccacctctatcccgcttttgcacaacctgggcaggaatgttacctgcagaaggagccgcttttgttctcctgcgccggatctaatactaagtatcgccggctgtgtccatgcagagatttcaggaaaggccaagtagctttatgtcagggttgcctctga

SEQ ID NO: 2377 - RNA, 36 nt, synthetic construct
  misc_feature 1..36: note = AF164963.1 variant
  source 1..36: mol_type = other RNA
atgacccagggccaacacttcctgcagaaggtgtga

SEQ ID NO: 2378 - RNA, 2211 nt, synthetic construct
  misc_feature 1..2211: note = AAI11702 variant
  source 1..2211: mol_type = other RNA
atgaaggagatgagcgccaacaccgtgctggactcccagagacaacagaaacactacggcatcacatctcccatttcactcgctagtcctaaggaaatagatcatatctatactcagaaacttattgacgcaatgaagccattcggggtctttgaggatgaagaggaactgaatcacaggttggttgtgttaggaaaactgaacaatctagtaaaggagtggatcagcgacgtgtccgagtctaagaacctcccgccctcggtcgtggccacggttggtggcaaaattttcacctttgggtcataccggctgggagtgcatacaaagggcgcggatatcgacgctctttgcgtcgcccctcgccacgtggaacgaagcgatttctttcagagtttctttgagaaactgaagcatcaagacggtatacgtaatttgagagcagtagaagatgccttcgttccagtgatcaaatttgagttcgacgggattgagatcgatctcgtctttgctaggctggcaattcagactatctccgacaacctggatctccgggacgactctcgcttaagaagcctggatataaggtgtattcggtcccttaatggatgccgcgtgaccgacgaaatcttgcacctggtgcccaacaaggagacattccgactaaccctcagagccgtcaagctgtgggctaaaaggcggggcatttattcaaatatgcttggctttctgggaggggttagttgggccatgttggtggcgcgtacttgtcagctctaccctaacgcagccgctagcacactggtacacaagttcttcttagtgttttctaaatgggaatggccaaatcccgtcctgctcaagcagcctgaggaatccaaccttaatctgccagtgtgggatccgcgcgttaacccctcagacagatatcatttgatgcctatcatcaccccagcctacccccaacagaatagcacgtataacgtgagtacttctaccaggacagtcatggtggaggagttcaaacagggtctagcagtaactgatgaaattctgcagggcaagtccgactggagcaaactcctggagcctccaaactttttccaaaagtaccggcactacatagttcttaccgcttcggcctctacagaagagaatcatctggaatgggtggggttggtcgagtccaagatccgagtgctcgtcggaaacctggagcgcaatgaatttattaccttagcgcacgtgaacccccagtcattcccgggcaataaagagcaccataaggataacaattatgttagtatgtggtttctgggtatcatattcagaagggtggaaaacgccgagagcgtaaatattgacctaacgtacgatatccagtcctttactgacacagtctatcggcaagcaaacaatatcaacatgctcaaagaagggatgaagattgaggctacccacgtgaaaaagaagcagctgcatcactaccttcctgccgagatcttgcagaaaaagaaaaagcagtctctgagcgatgttaatcgctcaagtggaggcctccaatccaaaagactgagccttgactcttcatgcctggacagtagcagggatactgacaacggcacacccttcaattccccagcttctaagtcggatagcccttccgtgggggaaaccgagcgtaactcagccgaacccgcagccgtcattgtggagaagccattgagtgtaccccctgctcagggactctctataccagtgatcggtgcgaaagttgacagcacggtcaagaccgtgtccccgcccacagtgtgtactattcctaccgtcgttggccggaacgtgatcccacgaatcacaactccccataatcctgcacaggggcagccacacctgaacggaatgtcaaatattaccaaaacagtgacccccaagagaagccactctccgtccatagatggcactcctaaaaggttaaaggacgtagagaagtttatccgcctggaaagtacgttcaaagatccacggacagccgaggaaagaaagaggaaaagcgtcgacgctattggtggggagtctatgcccatccctaccattgatacttcccgcaagaaacgactaccctcaaaggaactcccagacagtagctcgcctgtgcccgccaacaatatccgggttatcaaaaactccatacgtctgacccttaatagatga

SEQ ID NO: 2379 - RNA, 1377 nt, synthetic construct
  misc_feature 1..1377: note = AAG28389 variant
  source 1..1377: mol_type = other RNA
atgagcaccgagggcgggttcggaggtacatcctcttcagacgcccagcaaagtctgcagagcttttggcccagagtgatggaagagatcaggaacctcactgtcaaggatttccgggttcaggaacttcctctggctcgcattaaaaagataatgaaattggacgaggatgtgaagatgatctccgcagaagccccagtattatttgcgaaagctgcccagattttcatcacggagctgaccctacgagcatggattcacacagaggacaataagcgtagaactctccaaaggaacgatatcgccatggctataaccaagtttgaccagttcgattttctgatcgacattgtgccgcgggatgaacttaaaccccctaagcgccaggaggaagtcagacagtctgtgacaccagcagagcccgttcaatactatttcaccctggcccagcagcctactgctgtgcaggtccaaggccagcagcaagggcagcagacaacctcgtcaacgactaccatccagccaggacaaattatcatagcccagccccagcagggccaaacaactcctgtgaccatgcaggtaggtgaggggcagcaggttcaaattgtgcaggcgcagccacagggacaagcacagcaggcccaaagcggcacaggccagaccatgcaggtcatgcagcaaatcattacgaatactggggaaatccagcagatcccggtgcagttgaacgctggacaactccagtacattaggctggcccagcccgtgagtggtacacaggtcgttcaaggccagatacagaccctggcaactaatgctcaacaggggcagcggaacgcctcccagggaaaacctcgccgatgcctcaaggagacattacaaatcacccagacggaagtgcagcagggccaacagcagttttctcagttcaccgacggtcaaagaaatagcgtacagcaggcgagggtgtccgagctgacaggggaagccgagccacgggaggtcaaagcaactggaaactcaaccccctgtacaagtagccttcctactacccatccaccctctcaccgtgctggcgcctcctgcgtgtgttgctcacagccgcaacagagcagtacatctcctcccccatccgatgctttgcagtgggttgtggtcgaagtgagcggcacccctaatcaactggagactcatcgcgaactacacgcacccctcccagggatgacgtcgctgtctccccttcatccttcccagcagctgtatcagattcaacaggtaacaatgccagccggacaggacttggcccagccgatgtttatccaatcagctaaccagcccagtgatggtcaggcgcctcaggttaccggcgactga

SEQ ID NO: 2380 - RNA, 2802 nt, synthetic construct
  misc_feature 1..2802: note = CCDS33423.1 variant
  source 1..2802: mol_type = other RNA
atgagaatggccgctaccgcatgggccggcctgcaggggccccctctcccaacactttgcccggcggtgaggactggactgtactgtcgggaccaagctcacgccgagcgctgggcaatgacgagcgaaacctcctctggttcacattgcgcccgaagtcgtatgttgagaaggcgggctcaggaggaagatagcacagtcttaatcgacgtttcaccccctgaggcagaaaagcgcggctcttatgggtcgactgcccacgcttcagagccaggaggccagcaggccgcggcatgtagagccggtagccccgctaaacctaggattgccgatttcgtgctggtatgggaggaagacctaaagctcgatcggcaacaggacagtgcagctcgcgatcgaaccgacatgcatagaacatggagggagacctttctggataaccttcgggccgcggggctgtgcgtggaccagcaggatgtccaagacggaaatactacagtgcactacgccttgctctccgcatcttgggctgttctgtgttattacgccgaagatctgcgtctcaaattaccactgcaggagcttcccaaccaggctagcaattggtccgccggcttgctggcatggctaggcatacctaacgtgctcctggaggtcgtgccagacgtaccgcccgaatattactcatgccgcttcagagttaataaacttcctaggtttctggggagtgacaaccaggataccttctttacgagcactaagcggcatcaaatcttgttcgagattctcgccaagaccccatatggacacgaaaagaaaaatctgttaggtatccaccagctgctcgctgagggcgtgctttctgcggcatttcccctgcatgacgggcctttcaagacaccacccgaaggaccgcaggcccctcgattgaaccaacgccaggtcctatttcagcactgggctagatggggcaaatggaataagtaccagcccctggatcatgtgaggcggtacttcggtgagaaagtggccctctattttgcatggctggggttctacactggatggcttctgccagccgctgtcgttggcaccttggtgtttctcgtaggctgtttcctggtgttctccgacattcctacacaagagttatgcgggtcaaaggatagctttgaaatgtgtcccctgtgcctagactgtccattctggctcctgagttctgcctgcgcacttgcgcaggctggacgcttgtttgatcacggtggcaccgtcttcttttccctgttcatggccctctgggcagtgctgcttctggagtattggaagagaaaaagcgccacgttggcttacaggtgggactgctcggattatgaagacactgaggaacgtccccggcctcagtttgccgcatctgctccaatgacagccccgaaccccatcaccggggaggatgagccttacttcccagaacgatccagagcgaggcgcatgctcgccggatcagttgtgatagtcgtgatggtagctgttgtggtcatgtgtctggtgagtatcattttatatcgggcaatcatggccattgtcgtgagcagatccggcaatactctgctagctgcctgggcatctaggatcgcgagcctcacaggttcagttgtgaacctggtatttatacttattttgagtaagatctacgtctccctggcccacgtgctcacccgctgggagatgcatcgaacgcagaccaaattcgaagacgcttttacactgaaggttttcatttttcaattcgtgaatttctacagctctcccgtctatatcgcctttttcaaagggcggtttgtgggctaccctggaaactatcacactttattcggcgtacgtaatgaggaatgcgcagctgggggatgtctgatcgagcttgcccaggagttgctcgtgattatggttggtaagcaggtcataaacaacatgcaggaagtgctgatcccaaaactaaagggctggtggcaaaagtttagactgaggtccaaaaagcgcaaagcaggggccagtgctggagcgagccagggcccctgggaggacgattacgaactcgtgccgtgcgagggtctgttcgacgagtatcttgaaatggtcttgcagtttgggttcgttaccatttttgtggccgcatgtcctctggctccattattcgccctcctgaataactgggtggagatccggcttgatgccagaaagtttgtatgcgaatacaggcgacccgtcgctgagcgcgcacaggacataggcatttggttccatatcctggccggattgacacacctcgcggtgatctccaatgcttttctgctagccttctcttcggatttcctgcctcgggcatattacagatggactagggcccatgacctccgtggctttctgaacttcacccttgctcgcgcacccagctcctttgccgcggctcacaatcggacatgtagatacagggccttccgagatgacgatgggcactattcacaaacctactggaacttgctggcaattcggttagcctttgttatcgtgttcgaacatgtcgtgtttagtgttggacgcctcctggaccttctggtgccagatattcctgagtctgtagagataaaagtcaagagagaatattacctagctaagcaggccctcgcagagaatgaagtgctgttcggtactaacggcacgaaagacgagcagcccgaagggagcgagttgtcctcacactggacaccatttaccgtgccgaaggctagccaactgcagcagtga

SEQ ID NO: 2381 - RNA, 885 nt, synthetic construct
  misc_feature 1..885: note = AAA36380 variant
  source 1..885: mol_type = other RNA
atggaggacagcatggatatggacatgtctcccctgagacctcagaactacctcttcggctgcgaacttaaggccgataaagactatcactttaaggtggataatgacgagaacgaacatcaactgtccttgaggaccgtctcattaggggctggagcaaaagatgagctgcacatcgttgaagccgaggcgatgaattacgagggtagtccaattaaggtgacactagctactctcaaaatgagcgtacagccgacggtgtccctgggcgggttcgaaataacaccccctgtcgtgcttcggctgaagtgtggatctggcccagttcatatctcgggtcagcacttggtggccgtcgaggaagacgcagagtcagaggatgaagaggaagaggacgtgaagctcctgagcattagtgggaaacgctccgcccccggaggcggctctaaggtacctcagaaaaaggttaaactggctgcagatgaagacgatgacgacgatgacgaggaggatgacgatgaagacgatgacgatgacgattttgacgacgaggaagccgaggaaaaggctccagtgaagaaaagcatccgagatacccccgccaagaacgcgcaaaaatccaatcagaacgggaaggactcaaaacctagtagcactccacgttctaagggacaggagtccttcaaaaagcaggagaagaccccgaaaacacccaagggtccttcaagcgtcgaagatattaaagcaaagatgcaagccagtatcgagaaaggcgggtctctcccaaaggtggaagctaagtttataaattatgtgaaaaactgcttcagaatgaccgaccaggaggccatccaggatttatggcagtggaggaagtccctgtga

SEQ ID NO: 2382 - RNA, 3915 nt, synthetic construct
  misc_feature 1..3915: note = CCDS47686.1 variant
  source 1..3915: mol_type = other RNA
atgcagctgaagatcatgcccaaaaagaaaagactcagcgccggcagggtgcctcttattctgttcttgtgccaaatgatatccgctttagaggtcccactggacccgaagctactcgaagatctggttcagccccctaccatcacacagcagtctccaaaagactacattatcgatccccgggagaatattgtgatccaatgtgaagcaaaggggaagcctccaccctcatttagttggactcgcaatggaacgcacttcgacatagataaagaccctcttgtaaccatgaagccaggtacaggcactctgatcattaacatcatgagcgaggggaaagccgaaacctatgagggagtgtaccagtgcacagcgcgaaatgagcgtggcgctgccgtctccaacaatattgtggttagaccgtctaggtcgcccttgtggaccaaggaaaaactcgagcctatcactctgcagtcaggtcagagcctggtgctcccatgtcggccccctatagggttaccacccccgattatcttttggatggataacagtttccaacgcctgcctcagtccgaaagagtctctcagggacttaatggcgacttgtattttagcaacgtgctgcccgaggatacaagggaggactacatttgctatgcacggttcaatcatacccagacgatccaacagaagcagccaatctccgtaaaggttatttcagtggatgaactaaacgacactatagccgctaatctcagtgataccgagttttacggcgcaaaaagctctcgcgaacgacctcccacattcctgactccagaggggaacgcctccaataaggaggaacttagaggaaacgtcctgtcattggagtgtatcgctgaaggtctccccacccctattatctattgggccaaagaggacggcatgctgccaaagaataggacagtgtacaaaaactttgaaaagaccttacaaataattcacgtgagcgaggcggacagtgggaactaccagtgcatcgctaaaaatgccctgggagctatccatcacacgatttctgtccgggttaaggccgcaccgtattggatcactgctccccagaacctcgtgctttcccctggcgaagatggtacactgatttgtcgtgccaatgggaacccaaagccccgcataagctggttgaccaatggagtacctatcgagattgcgccagacgatccctcgagaaaaatcgacggcgatactatcattttctctaacgtgcaggagaggtcctcagccgtctaccaatgcaatgcaagtaacgaatatggctacctactggctaatgcctttgtgaacgttctcgctgagccgcctcggatactgacaccagccaataccctttatcaggtgatcgcaaaccgacccgccctgttggactgtgctttctttgggagccctctccccacgattgaatggttcaagggagcgaaaggttccgcactgcatgaggatatctacgtcttacacgaaaatggcaccctggagattccagtggcccagaaggactctacagggacttatacctgcgtagctcgcaacaaactaggaatggccaagaatgaggttcacctcgaaatcaaggatcctacatggatagtgaaacagcccgagtacgcagtcgtgcaaagaggcagcatggtctcattcgaatgtaaggtgaaacatgaccacactctgagtcttaccgttttgtggctgaaggataacagggagctcccatccgacgagcggtttacagtggacaaagatcatctggtagtcgccgacgtgagcgatgacgattctggtacctacacttgcgttgctaacacgacacttgactcagtgagtgccagcgcagtcctgtccgtggtagcgccgacccctactcccgctccagtgtatgatgttcccaatcctccattcgacttggaactcaccgatcagctggacaagtctgtccagttatcgtggacacccggggatgacaacaatagccctatcaccaagtttattatcgagtacgaagatgccatgcacaaaccgggcctgtggcaccatcagactgaggtgtccggaacacaaacgaccgcacagctaaagctctcaccatatgtgaactacagtttccgcgtcatggccgttaattctattggcaaaagcctgccctccgaagcatcagagcagtatcttactaaggccagcgagcctgacaaaaacccaacagcagtggaagggttgggatctgagcccgacaatctggtgatcacctggaagcctctcaacggttttgaatccaatggcccggggctgcagtacaaggtaagttggagacaaaaagatggagacgatgagtggacaagcgtcgtggttgctaacgtgtctaagtatatagtctccggcactcccaccttcgtgccatacttaattaaagttcaggccctgaatgacatgggttttgcgcctgaacccgccgtggtaatggggcactcaggcgaggatcttccaatggtcgctcctggaaacgtgagggtgaatgtcgttaacagtacgttggcagaggtgcattgggaccccgtaccactcaagagcatccgtggccatctgcaggggtaccggatttattactggaaaacccaatcgtcctctaagcgaaatagaaggcacatcgaaaagaagatactaacattccagggaagcaagactcacggtatgctgccgggcctcgagcctttttcacactataccctgaacgtgcgcgtcgtgaacgggaaaggagaaggccccgccagtccagatcgggttttcaatacacccgagggtgtgccttccgctccatctagccttaagatcgtcaaccccactttggactccctgaccttagaatgggatcctccgtcacatccaaatgggattctcacggagtacacactgaaatatcagcccatcaacagcacccacgagcttggccctctggtggacttgaagattcccgccaataaaactagatggacactcaagaacctgaattttagtaccaggtacaagttctatttttacgcacagacttctgcgggatccggcagccaaatcaccgaagaggccgttacaacggtggatgaagctgggatactaccacctgacgtcggagccggcaaagtacaggcagtgaacccccgcatttcgaatctgaccgctgccgcagccgagacttacgctaacatctcatgggagtatgaaggtccagagcatgttaatttctacgtggaatatggggtcgcgggatctaaggaggaatggcgaaaagagatcgtgaacggcagtcggtccttctttggtctcaagggcctgatgcctgggacagcctacaaagtacgtgtgggagcagtcggcgatagcgggttcgtttctagcgaggacgtgtttgaaaccggaccggctatggcctccagacaggtggacattgccacacagggctggttcatcggtcttatgtgcgctgtcgcattgctgattttaatactcctgatcgtgtgttttattaggcgcaataaagggggaaagtatcccgttaaagagaaggaagatgcccacgcggacccagagatccaacctatgaaagaagatgacggcactttcggtgagtactcagatgctgaggaccacaagccccttaaaaagggcagtcggaccccaagcgatagaacggtaaagaaagaagactctgatgactccctggtggattatggggagggagtcaacggccagtttaatgaagacgggtcattcattggacagtacagtggcaagaaagagaaggaacctgccgagggtaacgagagctccgaagcaccctctccggtgaacgccatgaactcgtttgtttga

SEQ ID NO: 2383 - RNA, 1305 nt, synthetic construct
  misc_feature 1..1305: note = AAB51320 variant
  source 1..1305: mol_type = other RNA
atgagcatcgagaagatttgggccagagaaatactggactccaggggcaaccccaccgtggaggtcgatctctacacagctaaagggcttttccgggcagccgttccttctggagcgtcaactggtatctatgaagctctggagttgcgcgacggcgataagcagcgatacttagggaaaggagtgctgaaggccgtagaccacattaatagtacgatcgcaccagccctaattagctccggcctctctgtggtcgaacaagagaaactggataaccttatgctggagttggacggtaccgaaaataagtcgaagtttggggctaacgcaatcctcggagtgtcactggccgtttgcaaagctggcgccgcggagcgtgaactgccgctctatagacatatagcacagttagccggcaatagcgatctgatccttcccgtgcctgctttcaacgtcattaatgggggaagtcacgccggtaacaagttggcaatgcaggagtttatgatcctgccagtgggcgctgagtccttcagggacgccatgcggctaggggcggaagtataccatacactcaaaggagttattaaggataaatatggcaaggacgccactaatgtgggtgatgaagggggatttgcacccaacatcctggaaaattctgaggctcttgaactggtcaaggaggccatagacaaagctggctacaccgagaagattgtgatcggcatggatgtggccgcaagcgagttctatcgcgacgggaaatacgacttggattttaagtcccctacagacccatcaagatacattaccggagatcagctcggtgccctgtatcaagacttcgtcagggattaccccgttgtgagtatcgaggacccttttgatcaggacgattgggctgcgtggagcaaattcactgcaaacgtaggcatccagattgtgggggacgatttaacagtcaccaatccaaagcggatagaacgcgccgtggaggaaaaggcttgtaactgcctgctccttaaagttaatcagatcggatctgtgacggaggccattcaagcatgtaagctggcccaggagaacggctggggtgtcatggtgtcccaccgatcaggggaaactgaggacacctttatcgctgacttggtagttggcctatgcacaggacagataaaaactggcgccccgtgtagaagcgaaaggctggcaaagtataaccagctcatgcggattgaggaggaactgggggatgaggcgcgtttcgctggacataattttcgcaaccccagtgtgctttga

SEQ ID NO: 2384 - RNA, 1395 nt, synthetic construct
  misc_feature 1..1395: note = AAH08489 variant
  source 1..1395: mol_type = other RNA
atggagaccctgagcttccccagatacaacgtggccgaaatcgtcattcacataaggaataagatcctcacaggcgctgacgggaaaaaccttactaagaatgatctgtatcctaacccaaaaccggaggttttgcatatgatttacatgcgggcattacagatcgtgtatggtattcgcctggaacacttttacatgatgcccgtaaattccgaggtgatgtatcctcatctaatggaaggattcctcccattttctaacctggtcacgcaccttgactcattcctgcccatctgccgagtgaatgattttgagaccgccgacatattgtgtcctaaggcgaaacgtacaagtagattcctcagcggcatcattaactttatccatttcagggaggcttgccgggaaacttacatggagtttctgtggcaatataagtcctctgccgataagatgcagcagctgaatgcagcccaccaggaagctctcatgaaattagagcgcctggactcggttccagtggaggaacaagaggagttcaagcagctttcagatgggattcaggagttgcagcaaagcctgaaccaggactttcaccagaaaaccatcgtcctacaggaaggaaatagtcaaaagaaatccaacatatctgagaagacaaagagactcaatgagctgaaacttagcgtggtatccctgaaggaaattcaggagtcattgaaaaccaagatcgttgatagtcccgaaaaactcaagaactacaaagagaagatgaaggacactgtgcagaaactgaagaatgcaaggcaagaagtcgtggagaaatacgagatttatggcgatagcgtggactgtttaccttcttgccagctggaagtccagctctaccagaagaaaatccaagatctttccgacaaccgggagaagctggcctcaatcttgaaggaaagcctaaacctggaggaccagattgaaagtgatgagtctgagctcaaaaagctgaaaacagaagaaaattccttcaagcgccttatgatagttaaaaaggaaaagctggctaccgcccagtttaaaatcaacaagaaacatgaggacgtgaagcagtataaacgaacggtaattgaggattgtaataaggtgcaagaaaagagaggtgcggtctacgagagggtgactaccatcaaccaggaaatacagaaaattaagttggggatccagcaactcaaagacgcagccgagcgggaaaagctgaaaagccaggagatcttcttaaatctgaagacagctctagagaaatatcacgatggaattgaaaaggccgcagaggactcgtacgctaagatcgatgagaaaactgccgaactcaagcgtaaaatgttcaagatgtctacctga

SEQ ID NO: 2385 - RNA, 543 nt, synthetic construct
  misc_feature 1..543: note = AAB49693 variant
  source 1..543: mol_type = other RNA
atgcaggccgagggcagagggaccggaggtagcacaggcgacgctgatgggcccggaggccctggtatcccagacgggccgggaggcaacgcaggcgggcccggagaagccggtgcgactggcgggaggggacctcggggcgctggtgccgcacgcgcctccgggccaggaggcggcgctccccgagggcctcacggaggtgcagcctctggcctgaatgggtgctgtcgttgcggagctagaggcccagagtcaaggctccttgagttctacctggccatgccctttgcgacgcctatggaagcagaattggcccggcgcagtttagctcaagatgccccaccgctgcccgtgcctggtgtcctactcaaggagttcaccgttagcgggaacattctgacaataagacttactgcagctgaccataggcagctgcagttgtccatctcttcgtgtctccagcaactgtcactgctcatgtggattacccagtgctttttaccagtgttcctggcccagccccctagcggccagcggcgctga

SEQ ID NO: 2386 - RNA, 1215 nt, synthetic construct
  misc_feature 1..1215: note = CCDS14134.2 variant
  source 1..1215: mol_type = other RNA
atggccagccccagactgggcaccttctgctgtcctacaagggacgctgcaactcagctcgtgctttcctttcaaccacgggccttccacgcgctgtgcttggggtctggaggtttacgcctggctctaggcctcctgcagcttctgccggggcgacgtcccgccggacctggctcaccagcaacgagtccccctgccagcgtcagaatcttgagggctgcagccgcttgtgatctcctgggttgcctggggatggttattcggtccaccgtgtggctcggatttccaaacttcgtagactctgtgtcggatatgaatcatacagagatatggcccgccgcgttttgtgtcggctcagcaatgtggatccagttactgtacagcgcctgcttctggtggttgttttgttatgctgtggacgcctaccttgttattcgcagaagtgcaggcctgtccactatcctactctatcacattatggcttgggggctggccacccttctgtgcgtggaaggagcggccatgttgtactatccttctgtctccaggtgtgagcggggtctcgatcatgcaatcccacactacgtgacaatgtatctgccgttactgctcgtacttgttgctaaccccatactgttccagaagaccgtgactgccgtcgctagcttgctaaaaggccgccaagggatctacacagaaaatgagcgaagaatgggagccgtgattaagatcaggtttttcaaaattatgctggtgctcatcatatgctggctgtcaaacattatcaatgaaagtcttctgttttacttggagatgcagaccgacattaacggcggtagcctcaagcctgtccggacggcagccaaaactacctggttcatcatggggatcctgaatccagctcagggatttttactgtctctagcgttctatggctggacaggctgttccctcgggttccagtcaccccgtaaggagattcaatgggaaagcctgactaccagtgcagccgagggagctcatccttctccacttatgccccacgaaaacccggcctccggtaaggttagccaggtgggcgggcagacatcggatgaggcattgtctatgctgtccgagggatcagacgccagtaccatagaaatccacacggctagcgagtcctgcaataaaaacgaaggcgatcctgccctccccactcatggtgacctgtga

SEQ ID NO: 2387 - RNA, 3141 nt, synthetic construct
  misc_feature 1..3141: note = AAH38180 variant
  source 1..3141: mol_type = other RNA
atggccagctccgtgggcaacgtcgctgactctaccgagcccacaaagagaatgctgtcattccaggggctcgcagaacttgcccacagggagtaccaagcgggagattttgaagctgccgagcggcattgcatgcagctgtggcgccaggaacctgacaatactggtgttttgttactgctaagtagcatccacttccagtgtcgacgtctcgatagatccgcacatttttctacgctggccattaaacaaaacccacttctggctgaggcatattcgaatttgggcaacgtgtacaaggagagggggcagctccaggaagccatagagcactatcggcatgctctgcgcctgaaaccggacttcatcgatggatacattaatctcgccgcggcattagtagccgctggcgacatggaaggtgccgtgcaggcatatgtctcagctctgcaatacaaccccgatctttattgcgtgagaagcgacttggggaatctgctaaaggccctcggaaggctggaggaggcgaaagcctgttaccttaaggcaatcgaaacccagcctaactttgctgttgcctggagtaatctgggctgcgtgttcaacgctcagggcgagatttggttggccatccaccactttgaaaaggcagtcacactcgatccaaatttcctggacgcctacataaacttagggaatgtgctgaaagaggctcggatctttgatcgcgcggtagcagcctatctccgagctctttccctgtctcccaaccatgccgttgtgcacggaaatttggcatgtgtctactatgaacagggtctaattgacctggccatcgatacttacagaagggctattgagctccaacctcatttcccagacgcctattgcaacctggcaaacgcgcttaaggagaaaggcagcgtggctgaagccgaggactgttacaataccgcactgcggttgtgccccacacacgccgattccctcaacaatctggctaacatcaagcgtgaacaggggaatatagaggaagccgtgcgcttatatagaaaagcactggaggtctttcctgagttcgctgccgcgcactcaaacctagccagtgttctccagcaacagggaaagctgcaggaagctcttatgcattacaaggaggcaattaggatcagcccaacctttgccgacgcttactctaatatgggcaacactttgaaagaaatgcaggatgtgcaaggtgccctgcagtgttatacacgggcaattcagatcaatccggcgttcgccgacgctcactccaacctcgcctcaatccataaggatagcgggaatattcccgaggcaatagctagttaccgaaccgccctgaaacttaagcctgacttcccagatgcatattgcaacctggcccactgtttgcagatcgtatgcgactggacggattacgacgaacgcatgaaaaagctcgtgtctattgtcgctgatcaactggagaaaaatagattaccctccgtgcatcctcaccacagcatgctgtatccactatcgcatggatttaggaaggcgatcgccgagcggcacggcaacctctgcctggacaagataaatgttcttcataaacccccgtacgaacaccctaaggacttgaaactgtctgatggccgcctcagagtggggtatgtctcctcagacttcggaaaccaccccaccagtcatctgatgcagagcattccaggtatgcacaaccctgataagtttgaggtgttctgttacgcattatcccccgacgatggcactaattttagggtaaaagttatggctgaagccaaccatttcatcgacctgtctcagatcccatgcaatgggaaggccgctgatcgtattcaccaggacggaatccatattcttgtgaacatgaatggctacacaaagggtgcacggaacgagttgtttgccctccgacccgcgcctatacaagctatgtggctggggtatccaggcactagcggagccctattcatggattacatcattaccgaccaggagacatcaccggcagaagtcgccgagcagtatagtgaaaaactggcttacatgccccacacctttttcatcggcgatcacgcaaatatgtttcctcatctcaagaaaaaggccgtgatcgacttcaaatccaacgggcacatttatgataatagaatagtcctgaacggaatcgaccttaaggcgtttttggacagcctgccagatgtgaagattgttaaaatgaagtgtcccgacggtggcgataatgctgactcttcaaacacggccttaaatatgcctgtgatcccaatgaacactattgcagaggccgtaatcgaaatgataaatagggggcagatccaaattacaatcaacggattcagtattagcaacggcctcgctaccactcagatcaataacaaagccgcaacaggtgaggaggtcccccgcaccataattgtgacgacccggtcccagtacgggctgccggaagatgctatcgtttattgcaatttcaaccaactttacaagattgacccttctacactgcagatgtgggccaatatcttgaaaagagtgccaaactcggtcctctggctgctaaggtttcccgcggtgggcgagcctaatatacagcagtacgcccaaaacatgggactgccccagaatcgcatcattttcagcccagtagcacctaaggaggaacatgtgcgacggggccagctcgctgatgtttgtctggacactcccctttgcaacgggcacaccacaggaatggatgtcttgtgggccggtactccaatggtgaccatgccgggcgaaacactggcttcccgtgtggcagcctcacagttaacctgtctcgggtgcctggagcttatcgccaagaatagacaagagtatgaagacattgctgtcaaactgggaactgatctagagtacctcaagaaagttaggggcaaggtgtggaaacagcgcatcagttctcctctgtttaacacgaagcagtatacaatggaattggagcggctgtacttacagatgtgggaacattatgcggcaggtaataaacccgaccacatgataaagccagtggaggtaaccgagagcgcctga

SEQ ID NO: 2388 - RNA, 441 nt, synthetic construct
  misc_feature 1..441: note = BAG57972 variant
  source 1..441: mol_type = other RNA
atggccgctgagaccctgctcagctcccttctgggcttgttactgctagggctcctgcttcccgcatctctgacaggaggtgtgggctcattgaacctcgaggaactgagtgaaatgagatacgggatcgagattctgcctctcccagtcatgggaggccagagccaatcctctgacgttgtgatagtatcgtcaaagtataaacagaggtacgaatgccggttaccggtgggtgccatccacttccagcgcgagcgagaggaagagactcccgcgtatcaggggcctggcattccagaactgcttagccccatgcgtgatgctccttgtttgctgaagacgaaagactggtggacctacgagttttgctatggaagacatatccaacagtaccacatggaggatagtgaaattaagggcctacaggccgcatcctcttga

SEQ ID NO: 2389 - RNA, 1221 nt, synthetic construct
  misc_feature 1..1221: note = BAG65333 variant
  source 1..1221: mol_type = other RNA
atggccgctgagaccctgctcagctcccttctgggcttgttactgctagggctcctgcttcccgcatctctgacaggaggtgtgggctcattgaacctcgaagaactgagtgaaatgagatacgggatcgagattctgcctctcccagtcatgggaggccagagccaatcctctgacgttgtgatagtatcgtcaaagtataaacagaggtacgaatgccggttaccggccggtgcgatccacttccagcgcgagcgagaggaagagactcccgcttatcaggggcctggcattccagaactgcttagccccatgcgtgatgccccttgtttgctgaagacgaaagactggtggacctacgagttttgctatggaagacatatccaacagtaccacatggaggatagtgcatccggcgccccaaatgacttccagaacaatgtgcaggtcaaggtgattaggtctcccgctgatctaatccggtttatagaggagctcaaagggggaacaaagaagggtaaacctaacatcggccaagaacagccagttgacgatgcagccgaggtgccgcagcgcgaacccgagaaggagagaggggaccctgaaaggcagcgggagatggaagaggaagaggatgaggacgaagatgaggacgaagatgaggacgaacgccaactgcttggagagttcgagaaagaactggagggcattttgctcccaagcgaccgagatagactgaggtccgaagtcaaggctggtatggagcgggagttagaaaatatcattcaggagactgaaaaagagctggaccccgatgggctcaagaaggaatcagagcgtgaccgcgccatgcttgcgctgaccagtacattgaacaaactaatcaagagactggaggaaaaacagagccctgagctcgtgaagaaacataagaaaaagagggtagttccaaagaaacccccgccttctccccaaccaaccggaaagatagaaattaaaatcgtgcggccttgggcagagggcactgaagagggcgcccgatggctgacagatgaggacacccgcaatcttaaggaaatctttttcaacattctggtccccggggctgaggaagcccagaaagagagacagaggcagaaggaattggagtccaattatcggcgcgtgtggggatcaccaggtggcgaggggacgggagatctcgacgaatttgatttctga

SEQ ID NO: 2390 - RNA, 2223 nt, synthetic construct
  misc_feature 1..2223: note = BAH13933 variant
  source 1..2223: mol_type = other RNA
atggccgtggagaccctgctcagctcccttctgggcttgttactgctagggctcctgcttcccgcttctctgacaggaggtgtcggctcattgaacctcgaagaactgagtgaaatgagatacgggatcgagattctgcctctcccagttatgggaggccagagccaatcctctgacgtggtaatagtgtcgtcaaagtataaacagaggtacgaatgccggttaccggccggtgcaatccacttccagcgcgagcgagaggaagagactcccgcgtatcaggggcctggcattccagaactgcttagccccatgcgtgatgctccttgtttgctgaagacgaaagactggtggacctacgagttttgctatggaagacatatccaacagtaccacatggaggatagtgaaattaagggcgaggtcctatatctcgggtactaccagtccgccttcgactgggatgacgaaacagcaaaagcctctaagcagcataggctgaagcggtatcacagccaaacttacggaaatggttccaaatgtgatcttaacggccgcccaagagaggctgaagtgaggtttctgtgcgacgagggggcaggaatctcaggcgattatatagaccgggttgatgagcccttgagttgtagctacgtgctcaccatccgcacacctcgactgtgcccacatccgttactgagaccccctccatctgccgctccccaggccattctctgtcacccttcccttcagccagaagagtatatggcgtacgtccagaggcaagcagactcaaagcagtatggtgataaaatcattgaggagctgcaggacttggggccccaagtgtggagcgaaaccaagagtggagtagccccgcagaaaatggctggccggactctattccacctgtttcgtgagatccatttccactttttcccttctcccgacctcacagttctgaccgattggtggggcgggggaggtgtggagaagtaccatggcccatccagccttggggaccgcggaggcgaaggtacgccttcgtacctgttgccctctgtctccccactcctgtcagatcagagtttacccgtgctgtgcactctaggggccagccctaccaaggacgattccaaagactctgatttttggaagatgctcaatgagccagaagaccaggcaccgggcggagaggaagtgcccgctgaggagcaagatcctagcccagaagccgcggactcagccagtggcgcacccaacgatttccagaataacgtccaggttaaagtgataagatcccctgctgacctgattaggtttatcgaggaacttaaagggggaacaaagaagggtaaaccaaatattggccaggagcaacccgtagacgatgccgctgaggtgccgcagcgggaacctgagaaggaacgaggggacccagagcgccagagagaaatggaggaggaagaggatgaagacgaggatgaagacgaggatgaggacgaaaggcagttgctgggagagttcgaaaaggagctcgaaggcatcctgcttcccagcgatcgggaccgcctgagatctgaggtcaaagccggtatggagagggaattggagaacatcattcaagaaactgagaaggagctcgatcctgacgggctgaaaaaggaatcagagcgtgatcgggcaatgttagccctgaccagtacactaaataaactcataaagcgactggaagagaagcagagccccgaacttgtgaaaaagcacaaaaagaaaagagttgtgccaaagaagcctcccccatccccgcagcctaccgaggaggaccccgaacacagggtccgcgtgcgggtaacgaaattgagactgggcggaccaaaccaggacctcactgttctggagatgaagagggaaaatccccaattaaaacagatcgagggcctggtgaaggaacttttggagcgcgaggggctcacagctgcgggaaaaattgaaatcaagatagtccgaccttgggcagagggtaccgaagagggcgcccggtggctgactgatgaagacacacgtaacctaaaggagattttcttcaatatcctggtgccaggggctgaggaagcccagaaagagagacaaaggcagaaggaactcgagtctaactatcgccgggtctggggatcgcccggcggtgaggggaccggcgatctggacgaatttgatttttga

SEQ ID NO: 2391 - RNA, 2004 nt, synthetic construct
  misc_feature 1..2004: note = AAB06495 variant
  source 1..2004: mol_type = other RNA
atggccgctgagaccctgctcagctcccttctgggcttgttactgctagggctcctgcttcccgcatctctgacaggaggtgtgggctcattgaacctcgaagaactgagtgaaatgagatacgggatcgagattctgcctctcccagtcatgggaggccagagccaatcctctgacgttgtgatagtatcgtcaaagtataaacagaggtacgaatgccggttaccggccggtgcgatccacttccagcgcgagcgagaggaagagactcccgcttatcaggggcctgggattccagaactgcttagccccatgcgtgatgccccttgtttgctgaagacgaaagactggtggacctacgagttttgctatggcagacatatccaacagtaccacatggaggatagtgaaattaagggcgaggtgctatatctcgggtactaccagtccgcattcgactgggatgacgaaacagccaaagcctctaagcagcataggctgaagcggtatcacagccaaacttacggaaatggttccaaatgtgatcttaacggccgcccaagagaggcagaagtcaggtttctgtgcgacgagggggccggaatctcaggcgattatatagaccgggtggatgagcccttgagttgtagctacgttctcaccatccgcacacctcgactgtgcccacatccgttactgagaccccctccatctgctgctccccaggcgattctctgtcacccttcccttcagccagaagagtatatggcatacgtgcagaggcaagccgactcaaagcagtatggtgataaaatcattgaagaactgcaggacttggggccccaagtctggagcgaaaccaagagtggagtggctccgcagaaaatggccggcgcatctcctactaaggacgattccaaggacagcgatttctggaaaatgctaaatgagcccgaggaccaggctccaggcggggaagaggtacctgccgaggagcaggatccctcgccagaagcggccgactctgcatccggagctcccaacgattttcaaaataacgttcaggtgaaggtcatccggagtcctgccgacctgatacgtttcattgaggagctcaaaggtggcacaaagaaagggaagccaaatatcggacaggaacagccggtggatgacgctgccgaggtgccccaacgcgaacctgagaaagagagaggcgatccagaaaggcagcgggagatggaagaggaagaggacgaggacgaagatgaggacgaagatgaggacgaacgacagctgcttggtgagtttgagaaggaactggaggggattttgctcccctcagatcgcgacagactgaggagcgaagtcaaggcaggcatggagcgggaattagagaacatcatccaggagaccgaaaaagagctggatcctgacggactaaagaaagaatccgagcgcgatagagccatgctcgctctgacgtctactcttaataagttgattaaaaggctggaggaaaagcaaagcccagagctcgttaagaaacacaagaaaaagcgtgtggtacccaaaaagccgcctccatcaccccagcctaccgaagaggaccccgaacatcgggtgcgagtcagagtgacaaagctgaggcttggcgggccaaaccaggatctgactgttttggagatgaaacgcgagaatcctcagctcaagcaaatagaaggactggtgaaagagttactggaacgggagggtctaaccgcggcaggcaagatcgaaattaaaatcgtcagaccctgggccgaggggacagaggaaggagctaggtggctcaccgacgaggatacgcgcaacctgaaggaaatattctttaatattcttgtgccaggcgccgaggaagcacagaaggagcgacagcggcaaaaagagttggaaagtaactaccgtagagtatggggttccccgggaggcgagggaactggcgacctggacgagttcgatttttga

SEQ ID NO: 2392 - RNA, 303 nt, synthetic construct
  misc_feature 1..303: note = AAI13433 variant
  source 1..303: mol_type = other RNA
atgagagccctgaccctccttgctctgttggcattagccgcgctgtgcatcgctggccaggccggggcaaagcccagcggagccgagtcctctaaaggtgctgcattcgtgtcaaagcaagaaggcagtgaggtcgttaaaaggcctcggcgctacctatatcagtggctcggggccccagtgccgtaccccgaccctctggaaccacgacgtgaggtatgtgaacttaaccccgattgcgacgagctggctgatcacattggatttcaggaggcctatagaaggttctacggccctgtgtga

SEQ ID NO: 2393 - RNA, 945 nt, synthetic construct
  misc_feature 1..945: note = EAX06008 variant
  source 1..945: mol_type = other RNA
atgagaatcgccgtgatttgcttctgtctgctcggcataacctgcgctatccccgtcaagcaggcagacagcgggtcctctgaggaaaaacaactttacaacaagtatcctgatgccgttgcgacatggctgaatccagacccgtcacagaaacagaacttgttagctccccagaatgccgtgagtagcgaggaaactaacgattttaagcaagagacgctgccttccaaatctaatgaatcgcacgaccatatggatgacatggatgacgaggatgacgatgaccacgtagattcacaggacagcattgacagtaacgattccgacgatgtggacgataccgacgattctcatcagagcgacgagtcccaccattcagatgaaagtgacgagctagtcacagatttcccaactgacctccccgcaaccgaagtgtttacacctgttgtgccaaccgtcgacacttacgatggaaggggtgacagcgtggtatatggcctgcggtctaagtccaagaaattccgccgacccgatatccagtaccctgacgccacagatgaggacattacctcacacatggagagcgaggaacttaatggggcttataaggcaatcccagttgcccaagatctgaacgctccgagtgactgggattctcgtggaaaagactcctacgaaacgagccagttggatgaccagtcggccgagactcactctcataagcagtccagactctataaaaggaaggcgaatgatgaatcaaacgagcacagtgacgtgatagacagccaagagctgtccaaggtctctcgggaatttcatagccacgagttccactcacatgaagatatgctggtggtggaccccaaaagtaaggaggaagataaacacctcaagtttcgcatctcccatgagttagacagcgcatcttcagaggtcaattga

SEQ ID NO: 2394 - RNA, 903 nt, synthetic construct
  misc_feature 1..903: note = EAX06009 variant
  source 1..903: mol_type = other RNA
atgagaatcgccgtgatttgcttctgtctgctcggcataacctgcgctatccccgtcaagcaggcagacagcgggtcctctgaggaaaaacaactttacaacaagtatcctgatgccgttgcgacatggctgaatccagacccgtcacagaaacagaacttgttagctccccagactctgcctagtaagagcaatgagtcccacgatcatatggacgatatggacgatgaagacgatgacgatcacgtggactctcaagattcgattgactcaaacgacagcgatgacgtagatgacacggatgacagtcatcagtccgatgagtctcaccatagcgacgaatccgatgagctagtgaccgactttccaacagatctccccgccactgaggtcttcacccctgtggttccaacagtggacacctacgacggaaggggtgattcagtcgtgtatggcctgcggagtaaaagcaagaagtttcgccgacccgacatccagtaccctgatgcaactgacgaagatattacatctcacatggagtccgaagaacttaatggggcctataaagctatcccagtagcacaggacctgaacgccccgtcagattgggacagccgtggaaaggatagttacgagacctctcaattggacgatcagtccgctgaaacgcacagccataaacagtcgagactctataagaggaaagccaatgacgagtctaacgaacactccgatgttatagactcacaggagctgagtaaggtgagccgggagttccattcccacgagtttcactctcatgaggacatgctggtcgtggatcccaagagcaaagaagaggacaagcacctcaaattccgcatctcacatgaattagatagtgcgtccagcgaggtgaattga

SEQ ID NO: 2395 - RNA, 864 nt, synthetic construct
  misc_feature 1..864: note = EAX06010 variant
  source 1..864: mol_type = other RNA
atgagaatcgccgtgatttgcttctgtctgctcggcataacctgcgctatccccgtcaagcaggcagacagcgggtcctctgaggaaaaacaaaacgccgtttcaagtgaggaaacaaatgattttaagcaggagactcttcctagcaaatccaacgaatctcacgaccatatggatgacatggatgacgaggatgacgatgaccacgtggattcgcaggactcaattgatagcaatgacagtgacgatgtagacgatacggacgattcccatcagtctgacgagagccaccattccgatgaatcagacgagctggtgaccgatttcccaacagacttgccggcgactgaagtctttacccccgtggttcctacagtggatacctacgacggaaggggtgacagtgtcgtgtatggcttacggagcaagtctaaaaagttccgccgaccagatatccaataccccgacgctactgatgaggacattacatcccacatggagtcagaggaactgaacggggcctataaggcaatccctgtagcccaggatctaaatgctccaagcgactgggatagtcgtggaaaagactcttacgaaacctcccagctcgatgaccagagcgcagagacgcactcgcataagcaatctagactgtataaaaggaaggccaacgatgaatccaatgagcactcagacgttatagatagtcaggagcttagcaaagtgtcccgggaatttcattctcacgagttccacagccatgaagacatgctggtcgtggaccccaagtcaaaggaggaagataaacacttgaagtttcgcatcagtcatgagctcgactccgctagctctgaggtgaactga

SEQ ID NO: 2396 - RNA, 984 nt, synthetic construct
  misc_feature 1..984: note = BAH12087 variant
  source 1..984: mol_type = other RNA
atgggcatcgtgcccagaagcctggacaagaaagcccacagggtccagttccaactcaaccggattaaggctaaaatagagcttccttgggggtccctgcagttggattgcttaatgaagaccctgaaagaactatacaataagtatccagacgcagttgccacatggctcaacccggatccctctcagaagcagaatctgcttgcgcctcaaaacgctgtgtcaagtgaggaaactaatgactttaaacaggagacgctgccaagcaagtccaacgaatctcatgatcacatggacgatatggacgatgaggacgatgacgatcatgtagactcgcaggactcaatcgatagcaatgacagtgatgacgtggatgacaccgatgactcccaccagtctgatgagagccatcactccgacgaatcagatgagttggtcacagacttccccactgacctccctgccaccgaagtgtttacaccagttgtgcccaccgtcgatacttacgacggacgcggtgatagtgtggtatatggcctgcgaagcaaatctaagaaattccgtagacctgacattcaatacccagatgcaacagacgaggatatcacctcccacatggagtcagaggaactgaacggggcctataaggctattccggttgcacaggacctcaatgcccccagcgattgggacagtaggggaaaggattcttacgaaacgtcccagttagacgatcagagcgctgagactcattcgcacaaacaatctcggctgtataagcgcaaagccaacgacgaatccaatgagcattcagacgtgatcgatagtcaggagcttagcaaggtctccagagaatttcactctcacgagttccatagccacgaagacatgttggtggtggatcctaaatcaaaggaggaagacaaacatctgaagtttaggataagtcacgagctagattccgcgagctctgaggtcaactga

SEQ ID NO: 2397 - RNA, 879 nt, synthetic construct
  misc_feature 1..879: note = AEA49030 variant
  source 1..879: mol_type = other RNA
atgagaatcgccgtgatttgcttctgtctgctcggcataacctgcgctatccccgtcaagcaggcagacagcgggtcctctgaggaaaaacaactttacaacaagtatcctgatgccgttgcgacatggctgaatccagacccgtcacagaaacagaacttgttagctccccagaatgccgtgagtagcgaggaaactaacgattttaagcaagagacgctgccttccaaatctaatgaatcgcacgaccatatggatgacatggatgacgaggatgacgattcacaccagagcgacgagagtcatcactccgatgaatctgacgagctagtaaccgacttcccaacagatctccccgcaactgaagtgtttacccctgtcgtgccaacagttgacacctacgatggaaggggtgacagcgtggtctatggcctgcggtccaagtcaaagaaattccgccgacccgatattcagtaccctgacgccactgatgaggacatcacaagtcatatggagagcgaggaacttaacggggcttataaggcaattccagtggcccaggatctgaatgctccgtctgactgggattcccgtggaaaagactcatacgaaaccagccaattggacgatcagagtgccgagacgcactctcacaagcagtccagactctataaaaggaaggcgaacgacgaaagcaatgagcattcggatgtaatcgactctcaggagctgtccaaggtttcacgggaatttcacagtcatgagttccacagccacgaagatatgctggtggtcgaccccaaatccaaggaggaagataaacatctcaagtttcgcatatctcacgagttagacagcgcatcaagtgaggtgaactga

SEQ ID NO: 2398 - RNA, 945 nt, synthetic construct; identical to SEQ ID NO: 2393
  misc_feature 1..945: note = AAA86886 variant
  source 1..945: mol_type = other RNA

SEQ ID NO: 2399 - RNA, 1182 nt, synthetic construct
  misc_feature 1..1182: note = AAA59988 variant
  source 1..1182: mol_type = other RNA
atggaggaaccccagagcgacccttccgtggagccaccgctgtctcaagaaaccttctcagatctctggaaacttctgcccgagaacaatgtcttgagtcctttaccaagccaggccatggacgatctgatgctatcccccgacgatatcgaacagtggtttacagaggaccctggcccagatgaggctcccagaatgcctgaagcagccccaccggttgcgcccgctcctgccgcaccaactcccgccgctcctgcaccagccccctcttggccgctctcgtcaagcgtgcctagtcagaagacgtaccaagggtcctatggattcaggctgggttttcttcactctggcaccgctaagagcgtaacatgcacttactcccccgccctgaacaaaatgttctgtcagttggcgaagacctgcccagtgcagctctgggtcgactcaacacctcccccagggacccgggtgcgcgcaatggccatttataaacagagtcaacatatgactgaggttgtgcgacgttgtccccaccatgaaagatgcagcgattctgacggactggctcctccacagcacctgataagggtcgagggcaatctccgggtggagtacttagatgaccgcaacacatttagacattccgtagttgtgccgtatgaaccccctgaggtcggttcagattgtaccacgatccactacaattatatgtgcaacagcagttgtatgggagggatgaataggcggccaattctgactatcattacccttgaagactcttccggcaacttgctgggccgcaatagcttcgaggtgcgagtgtgcgcctgtcccgggagagacaggcggacagaagaggagaacctacgtaagaagggagaacctcaccatgagctcccacccggttcgactaaacgcgcactgccgaataacacctcttcctcacctcagccaaagaaaaagccccttgatggcgaatactttacactgcagatcagagggagggagcggttcgaaatgtttcgagagttgaatgaggctctcgaactgaaagacgcccaagcgggaaaggagcctggcggtagtcgcgcccacagctcccatttaaagtctaaaaaggggcagagcacctcaagacacaaaaagctgatgttcaaaacggaaggacccgatagtgactga

SEQ ID NO: 2400 - RNA, 309 nt, synthetic construct
  misc_feature 1..309: note = AAF88037 variant
  source 1..309: mol_type = other RNA
atgagcgccagagtgaggtcccggtctcgcggccgaggggacggacaggaggctcccgatgtcgttgcattcgtggcccctggtgaatcacaacaggaggaaccaccgaccgacaaccaggatatcgagcccggccaggaacgtgaggggacacctccaattgaggaaagaaaggtagagggagactgccaagaaatggatctggagaaaactaggagtgagcggggcgacggtagcgatgtgaaggagaaaacgccccctaatccaaagcacgcgaaaaccaaggaagctggggacggacagccctga

SEQ ID NO: 2401 - RNA, 1209 nt, synthetic construct
  misc_feature 1..1209: note = AAA60003 variant
  source 1..1209: mol_type = other RNA
atgcagatgagccccgccctgacctgcctcgtgcttggcctggctttggtcttcggggagggatccgcagttcaccatcctccatcttacgtggcccacttagcgtcagactttggtgtaagagtgttccaacaggtcgctcaggccagtaaggataggaacgtggtttttagcccgtatggcgtggcatccgtcctggccatgctacagctcacaactgggggagaaacgcaacagcagatccaggctgcaatgggcttcaaaattgacgataagggtatggcccccgctctgcggcatctttacaaagagctgatggggccttggaataaggacgaaatatctaccacagatgccatctttgtgcaacgcgacttgaaactcgtacagggattcatgccacactttttccgactgtttcgttcgactgttaaacaggtggatttctcagaggtcgaaagagcgaggtttattatcaacgactgggtgaagacccatacaaagggcatgattagcaatctgctcggcaagggggcagtggatcagttaacccggctggtccttgttaacgccttgtatttcaatggacaatggaaaactccctttcctgacagttccacacaccgcagactgttccacaagtctgatggtagcaccgtgtccgtaccaatgatggctcagacgaacaaattcaattacactgagtttaccacacccgacggccattattacgatatcctagagctcccttatcacggggacactctgtcaatgttcatagccgcaccatacgaaaaggaggtgccgcttagtgctctgaccaacatcttgagcgcccagctcatttctcattggaagggaaatatgacaaggctgccccggttactggtcctccctaaattttcccttgaaaccgaggtggacctgcgcaagccattggagaacctaggcatgacggatatgttccgacaatttcaggcggacttcacttcactgagcgatcaggaacccctccacgttgcccaggcactgcaaaaagtgaagatcgaggtcaatgaaagtggtacagtggcttcttccagcaccgccgtaattgtttcggctagaatggcccctgaggaaatcataatggacaggccatttcttttcgtggtccggcacaaccccactgggacagtgctgtttatgggacaggtcatggagccgtga

SEQ ID NO: 2402 - RNA, 1248 nt, synthetic construct
  misc_feature 1..1248: note = AAA36797 variant
  source 1..1248: mol_type = other RNA
atggaggacctgtgcgtggccaacaccctcttcgctcttaatctgtttaagcacttggcaaaagccagccccacacagaacttattcctgtccccttggtctatctcaagtactatggcgatggtctacatgggcagcagagggtccacggaagatcaaatggctaaggttctacagtttaatgaggtgggagccaacgcagtaaccccaatgacaccggaaaatttcacttcttgtggttttatgcagcagattcaaaaaggctcgtatcccgacgccatactccaggctcaggcagccgataagatccatagctcattcaggagtctgtcctctgctattaacgccagcaccgggaattaccttctggagtccgtgaacaaattgtttggagaaaagtcagcgagtttccgggaggagtatatccgcctctgccagaagtactatagctctgaacctcaagcagtcgactttctggagtgtgccgaagaggctcgtaaaaagattaattcctgggtgaaaacacagaccaagggcaaaatcccaaacctgctccccgagggttcagttgatggggacactcgaatggtgttagtcaatgccgtgtacttcaagggaaagtggaaaacaccttttgaaaagaaactgaacggcctttatccattcagagtaaatagcgcacagaggacccccgttcagatgatgtacttgcgggagaagctgaacataggctacatcgaagatctaaaagctcaaattctcgagctgccttatgccggggacgtgagtatgtttcttctgttgccagatgaaatcgcggacgtctctacgggactcgagctgttagagtccgaaattacttacgataagctgaataaatggaccagcaaggacaagatggccgaggatgaagtggaggtgtatatcccgcagttcaaactcgaggaacactacgagcttcgctcgatactgagatctatgggtatggaagacgcattcaacaagggcagggctaacttttccgggatgtcagagcggaatgacttgttcctaagtgaagtctttcatcaggccatggttgatgtgaacgaggaaggaacagaggctgccgcaggcactggtggggtaatgaccggacgcacaggccacggcgggccccaattcgtggccgaccatccttttctgttcctcattatgcacaaaatcaccaattgcattctgtttttcggacgatttagctccccatga

SEQ ID NO: 2403 - RNA, 528 nt, synthetic construct
  misc_feature 1..528: note = AAA60020 variant
  source 1..528: mol_type = other RNA
atgctgccccctatggccctcccaagcgtgtcctggatgcttctgtcttgcttgatgttactgtcacaggtccaaggcgaggaaccgcagagagagctacccagtgctaggatccggtgtcctaaggggagcaaagcatacggatcccactgctatgccctcttcctgtctccaaagtcgtggaccgacgcggatcttgcttgtcagaaacgcccctcaggtaacctggttagcgtgttgagtggcgccgaagggtcctttgtatctagcctcgtgaagtccattggaaattcatacagttatgtctggataggcctgcatgaccctacacagggtactgagccaaacggggaaggatgggagtggtctagctccgatgtgatgaattacttcgcatgggagcgaaacccctcaacgatcagcagtcctggccactgcgcctctctgtcccgtagcaccgcttttctcagatggaaagactataattgtaacgttaggttaccatacgtgtgcaagttcacagattga

SEQ ID NO: 2404 - RNA, 528 nt, synthetic construct; identical to SEQ ID NO: 2403
  misc_feature 1..528: note = AAT11159 variant
  source 1..528: mol_type = other RNA

SEQ ID NO: 2405 - RNA, 381 nt, synthetic construct
  misc_feature 1..381: note = AAH39863 variant
  source 1..381: mol_type = other RNA
atggacaagagcctgctccttgagctgcccatcttgttatgctgtttcagagccctgtccggctctctatcaatgaggaacgatgctgtgaatgaaattgtcgcagttaaaaacaattttcctgtgatagagatcgtacagtgccggatgtgtcacctccaattcccaggggaaaagtgcagtcgcggacgaggtatttgtaccgccacaactgaggaagcgtgcatggtgggccgtatgtttaaaagagacgggaacccgtggctgacgttcatgggatgtcttaagaattgcgctgatgtcaaaggcatcaggtggagcgtgtacctggttaactttcggtgttgccgctcccatgacttgtgtaatgaggatctctga

SEQ ID NO: 2406 - RNA, 1440 nt, synthetic construct
  misc_feature 1..1440: note = CCDS42826.1 variant
  source 1..1440: mol_type = other RNA
atgaccacactggccggcgctgtgcccagaatgatgaggcctgggccaggacagaactacccgcggagcggtttccccctcgaggtctccactcctcttggccaagggcgcgttaatcagctgggaggcgtgtttatcaacggtcgaccattgcccaatcacattcgtcataagatagtagaaatggcacaccatgggatcagaccttgcgtgatttctaggcagttacgggtctcacacggatgcgtgagtaaaatcctgtgccgctatcaggagacgggcagcattagaccaggcgccatcgggggatccaagcccaaacaagttaccacacctgacgtggaaaagaaaatagaggaatacaagagggagaacccaggtatgttctcttgggagatccgggataagctactcaaagacgcggtctgtgatcgcaatactgtgccgtcggtatcaagcattagtcgaatcctgagatccaagtttggcaaaggggaagaggaagaggctgaccttgagaggaaggaagccgaggaatctgagaaaaaggcaaagcatagcattgatggaatcctgtccgaacgggcctcagctccccagagtgacgagggcagcgatatagactctgagcctgatttgccactcaaacgtaagcagcgcagatccaggaccacattcaccgcagaacagctggaggaactggagcgggcctttgaacgaactcactatcccgacatttacacacgcgaggagctcgctcaaagagccaaattaaccgaagcgagggttcaggtgtggttctcaaaccggcgcgcaagatggaggaagcaggccggtgctaatcagctgatggcctttaaccaccttatccctgggggattcccacccacggcaatgccgactttgcctacctatcaactgagcgagacaagttaccagcccacttctattccacaggctgtctccgatcctagctcgaccgtgcatcgtccccaaccactacccccttctacagtgcaccagtccaccatcccatcaaatccggacagtagctccgcctattgcctcccctctacgcggcatggctttagctcatacactgatagtttcgtccctccatccggccccagcaaccctatgaatccaacaatcgggaacggactgtctccccaggttatgggtcttctgaccaatcacggcggggtgccgcaccagcctcaaactgactacgcgttgtcaccactcacaggaggcctggaacccaccacgaccgtaagtgccagctgttcccagcgattagaccatatgaaatctctggattcgctccctacaagccagtcctattgtcccccaacttactcaaccacaggttatagtatggaccctgtgactgggtaccagtatggccaatacggacagtctaagccctggaccttttga

SEQ ID NO: 2407 - RNA, 1176 nt, synthetic construct
  misc_feature 1..1176: note = AAA58397 variant
  source 1..1176: mol_type = other RNA
atggacctggagaagaactaccccacccctagaacaagcaggactggccacgggggagtgaatcagctcggtggcgtcttcgttaacgggcggccacttccggatgtggtacgccaacgaatcgtggaactggcccatcagggagtccgtccctgcgacatttccagacagttgagggtgtctcacggctgtgtttcaaaaatattaggtcggtattacgagacggggagtatcaagcctggagtgattggcggcagcaaaccaaaggtcgctacccccaaagtggtagaaaagatcgcagagtataagcgccagaatcctacaatgtttgcctgggaaattagagataggctgctagcggagcgggtttgcgacaacgatactgtgccatccgtctcttcgatcaatcgcataatccgaaccaaagtgcaacagccccctaaccagccagtgccggcttcaagccatagtattgtctccacagggtctgttacccaggtgagctccgtatcaactgacagtgccggaagctcttactccatctcaggtattctcggcatcacaagccccagtgcagataccaataagagaaaaagggacgaggggatacaagaatctcctgtgccaaacggacactccctgcccggccgggatttccttcgtaagcagatgcgcggtgacctgtttacgcagcagcaattggaggtcctcgatagagtgttcgaaaggcagcattatagcgacatttttactaccacagagcctatcaaaccagagcagactaccgaatactcggccatggcttctctggcagggggactggatgacatgaaggccaatctcgcttcccccacaccggccgacattggctcaagtgttcctggcccccaaagctatccaatcgtgaccgggcgggatttagcgtccacgactctgcctggatatcccccacacgtgccccctgcaggtcagggctcttacagcgccccaacacttaccgggatggtcccgggatcagagttcagtggctccccctacagccaccctcagtactcttcatataacgacagttggcgatttccaaatcccggtttgctggggagcccttactattactccgctgccgcacgcggcgctgccccacccgcggccgcaactgcttatgatagacattga

SEQ ID NO: 2408 - RNA, 873 nt, synthetic construct
  misc_feature 1..873: note = AAF25807 variant
  source 1..873: mol_type = other RNA
atgagaatcttcgccgtgtttattttcatgacctactggcacctcctcaacgcttttacagtcactgttcccaaggacctttatgtggtagagtacggcagcaatatgacgatagaatgcaaattccctgtggagaagcagctggatttggcagccttaatcgtctattgggaaatggaggacaaaaacattatccaatttgtgcatggggaagaggatctgaaggttcagcactcctcttacaggcagcgggcgcgcctactcaaagaccagctgtcacttggaaatgctgccctgcaaattaccgatgtgaagttgcaggacgccggtgtctatcgatgtatgatcagttacggcggggcagattataagcgtataacagtgaaagtaaacgctccatacaataagatcaaccagaggattctcgttgtggacccggtcactagcgagcatgaactgacctgccaggcagagggataccccaaagccgaagtgatctggacatcctctgatcaccaagtgctgtcgggcaagaccactacaaccaattcaaaaagagaggagaagctgttcaacgtcacgagcactttacggattaataccacaactaacgaaatcttttattgtaccttccgcagactggaccctgaggaaaatcatacagctgagcttgttataccagaattgcccctggcccaccctccaaacgagaggacccacctagtgattctcggtgcgatcctgctttgcctgggggtagcattgacgtttattttccggctccgcaagggacgaatgatggatgtgaaaaagtgtggcatccaggacactaatagtaaaaagcagtccgatacacatctggaggaaacctga

SEQ ID NO: 2409 - RNA, 867 nt, synthetic construct
  misc_feature 1..867: note = AAH74740 variant
  source 1..867: mol_type = other RNA
atgcagatcccccaagccccttggccagtggtctgggctgttctgcagctcggctggagaccggggtggttccttgacagccccgataggccttggaacccacccaccttttcccctgcactgttggtggtaacagagggagacaatgccactttcacgtgctctttttcaaacaccagtgagagcttcgtgttaaattggtaccggatgtccccatctaaccagacagataagctggcggcttttcccgaagaccgctcgcagcctggtcaagattgtcgattccgtgtcactcagctaccaaatggcagagactttcacatgtcagtggttagggcccggcgcaacgatagcgggacctatctctgcggagcaattagtctggccccgaaagctcagataaaggaatcccttagagcagagctgagggtgacagaacggcgcgccgaggtccccaccgctcatccttctccaagcccccgacctgccggccagttccaaactttggtggtaggtgttgtcgggggactcctgggctccctggtgctcttagtgtgggtgctggcggtcatctgttcaagagcagccaggggcacaattggggctcggcgtaccggacagccacttaaagaggaccccagtgccgttccggtgtttagcgtagattacggtgaattggacttccagtggcgcgagaagacgcctgaacccccagtgccttgcgtccccgagcagactgagtatgcaaccatcgtgtttccatctggcatggggacatcctcacccgctagaaggggaagcgccgatggccctcggagtgcgcaaccactgcgaccggaagacggtcactgttcttggcccctatga

SEQ ID NO: 2410 - RNA, 1008 nt, synthetic construct
  misc_feature 1..1008: note = AAC95296 variant
  source 1..1008: mol_type = other RNA
atgggcagcgcctcccccgggctgtcttcagtgagtcctagccacctccttctgccaccggacaccgtctccagaacaggattggagaaggctgcagccggtgcggttggcttagaaaggcgggattggtctccctcgcctccagctactcccgagcaggggctgtcagccttctacctaagctattttgacatgctctaccctgaagatagttcctgggcagccaaagctccaggagcatctagccgcgaggaaccccctgaggagccagaacaatgcccggtgatcgactcccaggcccccgctggctcactggatcttgtacctggtgggctgacgttggaggaacatagtctcgaacaggtgcagagcatggtcgtgggagaggttctgaaggacattgaaaccgcctgtaaactgctcaacataacagcggatccaatggactggtctccctccaatgtgcaaaagtggttactgtggactgagcaccagtatcgacttcctccaatgggcaaagcattccaggaattggccggcaaggagctgtgcgctatgtcagaggagcagtttcgtcaaagaagccccctagggggagatgtcctccatgcccacctggacatctggaagagtgcagcttggatgaaagagaggacctctccgggtgccattcattactgtgcgtccacaagcgaagagtcgtggaccgattctgaagtggactcctcatgcagtggccagcctatccacctttggcagttcctgaaggagttgctcctgaaaccccacagctatgggcggtttattcgctggttaaacaaggaaaaaggaatcttcaagatagaggattccgcccaggtagcaagactgtggggcatcaggaagaatcggccagctatgaactacgacaaactctctcgcagcattcgacaatattacaagaaaggtatcattagaaagcctgacatctcacagaggcttgtttaccagtttgtgcatcccatatga

SEQ ID NO: 2411 - RNA, 2217 nt, synthetic construct
  misc_feature 1..2217: note = AAA36429 variant
  source 1..2217: mol_type = other RNA
atgcagcccagatgggcccaaggcgctaccatgtggctgggggtgctccttacactgttgttatgcagctccctggagggacaggaaaactctttcactatcaattcagtcgacatgaagagtctacctgattggacggttcagaacggtaaaaatctcaccctgcagtgttttgcagacgtgagcacaacttcccacgtaaagccacaacatcagatgcttttctacaaagatgacgtgctgttttataacatttcttcgatgaagtcaaccgagagctacttcataccggaagtcaggatctatgatagtggcacatacaaatgcaccgtgattgttaataacaaggagaagactacagccgaatatcagttgctcgtggagggggtcccctcccctcgggtgaccctggacaaaaaggaggcgatccagggaggcattgtacgcgttaattgttctgtgccagaagagaaagctcccatccactttacgatagaaaagctggagctcaacgagaaaatggtcaagttaaagcgagaaaagaatagccgtgatcaaaacttcgtgatcctggagtttcctgtggaggagcaggacagagtcctttccttcaggtgccaggcccggattatctcaggtattcatatgcagaccagtgaaagcactaagtctgagttggttacagtgactgagtccttttcaaccccaaaattccacatcagccccacagggatgataatggaaggagcacaactgcatattaagtgtaccatccaggtaacgcacctagcccaggagtttcctgaaattatcatccaaaaagataaggctattgtggcacacaatcgccatggcaacaaagccgtctacagtgtgatggctatggttgagcactctggcaattatacttgcaaggtggaatccagcagaatatcgaaggtctcttccatcgtggtaaacattacagaactcttctcaaaaccagagctggaaagtagctttacccatcttgaccagggggagaggctgaatttgtcctgttctatcccgggagctccccctgcgaacttcactatacagaaggaagatacaattgttagccagacccaagacttcacgaaaatcgcatcaaagagtgattccggtacctacatctgcacagccggcattgacaaagtggtcaaaaagagcaacactgtgcagatcgtcgtgtgtgagatgctctctcagccacggatttcatacgacgctcagtttgaagttataaaagggcaaaccatcgaggtgcgctgcgagagtattagcggaacactgcccatctcctatcagttactgaagacttctaaagtactcgaaaattcgaccaagaacagcaatgatcctgccgtcttcaaagacaacccaacagaggatgtggaataccagtgtgttgcagacaattgccactcccacgctaagatgctttcagaggtgctgcgagtcaaggtgatcgcccccgtagatgaggtgcagattagtatattgtctagcaaagttgtcgaatccggcgaggacatcgtgctacaatgcgcggtgaacgaaggttcagggccgattacctataagttttacagagagaaagaaggaaagcctttctatcagatgactagcaatgccacgcaggcattttggacaaaacagaaggcttctaaggagcaagagggcgaatactattgtaccgccttcaacagggctaatcatgcctccagtgtcccccggagcaaaatcctgactgttcgtgtgattctcgcaccatggaagaaaggcctgatcgccgtggtaataatcggggtcattatcgcccttctgattatcgcggcaaagtgctactttttgcgcaaagccaaggctaaacagatgcctgtggagatgtctagacccgccgttccactcctgaactccaataacgaaaagatgtcagatcccaatatggaggcaaacagtcactacggacataatgacgatgtgaggaaccacgccatgaagcctataaacgacaataaagaaccattaaacagcgatgtccagtataccgaggtgcaagtttcgtccgctgagtctcataaggacctgggtaaaaaggacacagaaaccgtgtacagcgaggtacggaaagccgtcccggatgcagtggaatcacgatatagtcgcactgagggctccctagacgggacatga

SEQ ID NO: 2412 - RNA, 2736 nt, synthetic construct
  misc_feature 1..2736: note = AAG23134 variant
  source 1..2736: mol_type = other RNA
atggcccagctgttcctcccccttctggctgcattggtgttagcccaagcgcctgctgccctggcagacgtcctagagggcgatagctccgaagacagagcctttagggttcggatcgctggggatgcaccactccagggagtgctgggtggcgcccttaccattccgtgccacgtacattacctgcgaccccctccatctcgccgtgctgtgttggggtcacccagagtcaagtggacattcctcagtaggggacgggaggccgaagtgctggttgcgcgcggcgtgagagtcaaagtgaacgaggcatataggtttcgggtagccctgcctgcttacccagccagcctcactgacgtttccttagcactgtctgaacttcgccccaatgattcgggtatatatcgatgtgaggtgcagcacgggatcgacgattcaagcgacgctgtcgaggtgaaggtgaaaggagtcgttttcttgtacagagaaggcagtgccaggtatgcgttttccttctctggcgcccaggaggcatgcgctcggattggggcccatatcgctacgcctgaacaactgtacgccgcatatctaggaggttacgagcagtgtgatgccggctggctcagcgaccagaccgtgcgttacccaattcagacaccgcgcgaggcttgctatggggatatggacggatttcccggcgtaagaaactacggtgtggtcgatcctgacgacctgtatgatgtgtactgttatgcggaagaccttaatggggagctgttcttgggagatccacccgaaaagctcactctggaggaagcaagggcctactgccaagagcggggcgctgagatcgccaccacaggccagttatatgcagcctgggacgggggactggatcactgttcccctggttggctcgctgacggctcagttcgatacccaatagtgacccccagtcagcgctgcgggggaggccttccgggtgtcaaaactctgtttttgttccctaaccagacagggtttcccaataagcatagcagattcaacgtgtactgttttagggattctgcccaaccatccgcaatccctgaagcgtcaaatcccgctagcaacccagccagtgacggcctagaggcaattgtaaccgttacggaaactctggaggaactccagctgccccaggaggccaccgagtctgaatcccggggagctatctatagcattcctatcatggaggatggcgggggaggttcgtctacaccagaagacccggccgaggcaccccgcactcttctggagttcgaaacccaatccatggtgcctccaacaggcttctcagaggaagaggggaaggctttggaagaggaggaaaaatacgaggatgaagaggaaaaggaggaggaagaggaagaggaagaggtcgaggacgaagccctctgggcgtggcccagtgagctgagctcccctggaccagaagcctctttacccaccgagccggctgcacaggaagagagcctgtcacaggcccctgctagagccgtgctacagccaggcgcaagtcccctccctgacggtgagtccgaagcgagcaggcccccacgtgtccacgggcctcccacggagactctgccaacaccgcgggaacgaaatcttgcctctccttcacccagtaccttggtggaggctagagaggttggcgaagccactggaggcccagagctgagcggggtgcccaggggagaatccgaggaaacaggttcttcggagggcgcacctagcctcctgccagctacccgcgcccccgaggggacgcgggaacttgaggcaccttccgaagataactcaggaagaaccgccccggctggcacaagtgtacaagcgcagccagtcctgcccactgactctgccagcaggggtggggtggcagttgtgcctgcttccggcgattgcgtcccatcaccctgtcacaatggagggacctgcttggaggaagaggagggcgtgcgctgcctctgtctgcctggatatggcggtgacttatgcgatgtagggctgcgattttgtaacccgggatgggacgccttccagggcgcctgctacaaacattttagcacacggcgttcttgggaagaggctgaaactcagtgtagaatgtatggtgcacacctagcctccataagtacccccgaggaacaagatttcattaataacaggtaccgcgagtatcagtggatcggcctcaatgaccggacaattgagggggattttctgtggagcgacggagtgccacttttgtacgaaaactggaaccctggccagcccgattcttacttcctgtccggggagaattgcgttgtcatggtgtggcatgaccagggacaatggtcagatgtgccatgtaactatcacctcagttatacctgcaagatgggcctggtcagctgtggtcctcccccagaattaccgctggcgcaggtttttgggagacctaggcttcgatacgaggtggacactgtgttgcgctaccggtgcagagagggactcgctcagaggaatctgcccctaatccgttgtcaggaaaacggccgctgggaggccccacaaatctcgtgcgtaccccggagacctgcaagggccctgcacccagaagaggaccccgaaggtcgacagggccggctcctggggcgctggaaagctcttttgattcctccgtcctctccaatgcccggaccttga

SEQ ID NO: 2413 - RNA, 3321 nt, synthetic construct
  misc_feature 1..3321: note = AAA60049 variant
  source 1..3321: mol_type = other RNA
atgagactgcccggcgccatgcctgctctcgcacttaagggggagctgttgttactgagcctactcctgcttctggaaccacagatctcccaaggattggtggtcaccccgcccggtcctgagctcgttctgaacgtgtcttcaacattcgtactgacttgcagtggcagcgccccagtggtctgggaaaggatgtcccaggagccccctcaggaaatggcgaaagctcaggacgggacgttttcttcggtgctcaccttaacaaatctgactggacttgataccggcgagtacttctgtacacacaacgactcacggggtttggagaccgatgaacgcaagcgactgtatatttttgttccagaccccactgtggggttcctacctaatgatgccgaggaactctttatattcctgacagagatcaccgagattacgatcccatgccgtgtcactgacccgcaacttgtggtaaccctgcatgaaaagaagggagatgttgcattgcccgtgccttacgaccaccagagaggctttagcggcattttcgaggataggagttatatctgtaaaacaactataggggaccgggaagtcgattccgacgcctactatgtgtaccgcctccaggtgtctagcatcaacgtctccgttaatgctgtgcagaccgtagtgagacaaggagagaacattacactgatgtgcatcgtcattggtaatgaagtggttaactttgagtggacctatccaaggaaggagtcaggccggttagtggaacccgtcacggatttcctgctcgacatgccttaccatatccgcagtatacttcacattccaagcgcagagctggaagactctgggacttacacatgtaatgtgaccgagtccgtaaacgatcatcaggacgaaaaggccatcaatattactgttgtggagtcaggatatgtccgattgctaggcgaggtgggtacactgcagtttgctgaactccacagaagcaggaccctgcaggtcgtgttcgaggcctatcccccgcctacggttctttggtttaaagataaccggaccctgggggacagttctgcgggagaaatcgcattgtccacacgtaatgtgagcgagactcgctacgtatcggaactcaccctggtcagagtgaaggttgccgaggctggccactacacaatgagggccttccatgaggatgcagaagtgcaattatctttccagctgcagatcaacgtccccgtgcgggtactagagctctccgaatcacacccagacagtggcgagcaaactgtgcgatgccgcgggagaggaatgcctcagcccaatattatatggagcgcttgtagggatctgaaacggtgcccacgcgagcttccccctaccttgctgggtaactcctctgaagaggaaagccagctcgagacaaacgttacctattgggaagaggagcaggaatttgaggtcgtgtcaactctgagacttcaacatgtggacaggccactgagtgtccgttgtacgttgcggaatgccgttggccaggatacacaggaagtgatcgtggtaccgcactccctccccttcaaggtcgtggttattagcgcgatcctggccttagtggtcctgaccataatttctctaatcatcctcattatgctgtggcagaaaaagcctcgatacgagatcagatggaaggtgattgaatcagttagtagcgacgggcacgagtatatatacgtggatccaatgcaacttccctacgactccacttgggagttgcctagggaccagctggtactcggacgcaccctgggctctggtgcatttgggcaggtcgtggaagctacagcccatggcttatcgcacagccaggctaccatgaaagtggccgtcaagatgctgaaatccactgcacggtcaagtgagaagcaagcccttatgtctgaattgaaaatcatgagccatctcggaccacacctgaacgttgtgaatctactgggcgcttgcacaaaagggggacccatttatatcatcacggagtactgtagatatggtgatctcgtagactacctgcataggaacaaacacaccttccttcagcaccattccgataagcgccgaccgccttcagcggaattgtatagcaatgcactgccagtgggcttacccctcccttctcacgtctccctgactggggagagtgacggaggctacatggatatgagcaaggacgagtctgtggattatgttcccatgcttgacatgaaaggtgatgtgaagtacgccgacattgaatcctcaaactacatggctccatatgataattacgtccctagtgcccccgagcggacatgccgtgcaaccctgataaacgaaagcccagtgttgtcgtatatggacctcgttgggttttcctaccaggtggccaatggcatggagttcctggcttctaaaaactgcgtccatagagatctagccgcaaggaatgtactgatctgtgagggaaagctcgtgaaaatttgcgactttggcctggcgcgcgacatcatgcgggatagcaactatatttcaaaggggagtacattccttccgttgaagtggatggctcctgaatccatctttaattctctgtacactaccttaagcgacgtttggtccttcggaatactcctgtgggagatctttacgcttggtggcaccccctatccagaactgcccatgaacgagcagttctacaatgccattaaaagagggtacaggatggcacaacctgcccacgcttcagatgaaatctatgagattatgcagaagtgttgggaggaaaaatttgagatccgaccacccttcagccagctagtgctcctgttggaacgcctgttaggagagggctacaagaaaaagtatcaacaggtcgacgaagagttcctccggagtgatcaccctgccatactgagatctcaggcaaggcttccgggttttcatgggctgcgttccccattggacacaagctcggtgctctacactgctgtacagcccaacgagggcgataacgactatattatccctctgccagatcccaagcctgaagtggccgacgagggaccgctagaaggctcaccctctctggcgagttccacccttaatgaggtcaacacaagctctactattagctgcgattccccactcgaacctcaagacgagcccgagccagaacctcagctggagttgcaggttgaacccgagccagagctggaacagttaccggattcagggtgtcctgctccccgcgccgaggcagaagacagtttcctctga

SEQ ID NO: 2414 - RNA, 942 nt, synthetic construct
  misc_feature 1..942: note = EAX03935 variant
  source 1..942: mol_type = other RNA
atgctgctcagcaagatcaactcccttgcccacctgagagctgcaccctgcaatgacttgcatgccaccaaattagcgcctggcaaggagaaagaaccactggagtctcagtaccaagtggggccgctactcggatcaggtggcttcgggagtgtctatagcggaattagggtttccgataacctgcccgtggctataaagcacgtagaaaaagaccggatctctgattggggcgagcttcctaatggtacacgcgtgccaatggaagtcgtgctgttgaagaaggtttcgtcagggtttagcggagtgattcgactcctggactggttcgagcgtcccgatagttttgtcctgatcctcgagagacctgaaccagtgcaggacttattcgattttattactgagaggggcgccctgcaggaggaacttgcacggtccttcttttggcaggtattggaggccgttcgccattgtcacaactgcggcgtgctgcatagagacatcaaagatgaaaatatactaatcgacctcaacaggggagagctgaaacttattgatttcggatctggtgctctgttgaaggacacggtctacaccgattttgacggcacacgggtgtatagccctcccgaatggatccgctaccaccgatatcacgggagatccgcagccgtgtggtcactcgggattctgttatacgacatggtctgtggcgatatcccattcgagcatgacgaagagataattaggggtcaagtgtttttccggcagcgtgttagtagcgagtgccagcacctgatccgctggtgtctcgctcttagaccgtctgataggcccacttttgaagagattcagaatcatccttggatgcaagacgtactgttgccacaggaaaccgccgagatccacctacactccctgtcacccgggcctagcaagtga

SEQ ID NO: 2415 - RNA, 303 nt, synthetic construct
  misc_feature 1..303: note = AAB81333 variant
  source 1..303: mol_type = other RNA
atggccgacgaggaaaagctgccccctggctgggagaaaagaatgagcaggccatccgggcggggatactatttcaaccacatcaccaatccgtctcagtgggaacgcccctcaggtaacagtagctccggcgggaagatttggcaaggagagcctgctcgagtgcgtagatctcatctccttgtcaaaccagttaaggcagccctggatttggcggctggcaatcaccccgaccagggtgggggacctggcgccgatcagaggttacatccagaagaccagggccggcgcgaggggctgtga

SEQ ID NO: 2416 - RNA, 492 nt, synthetic construct
  misc_feature 1..492: note = AAC50492 variant
  source 1..492: mol_type = other RNA
atggccgacgaggaaaagctgccccctggctgggagaaaagaatgagcaggtcctctgggcgggtgtactatttcaaccacatcaccaatgcttcacagtgggaacgcccaagtggaaacagctcctctggtggcaagaatgggcaaggagagccggcacgagtccgttgctcgcatctccttgttaaacactcacagagcagaaggcccagttcctggcggcaggaaaagattacacgcactaaagaggaggccctggaattgataaacggctacatccagaagattaagtctggtgaggaagattttgagagcttagcgtcccaattctcagactgtagtagcgctaaagccagaggggatctgggagcattttctaggggccagatgcagaagcctttcgaggacgcctcctttgctctacggacgggcgaaatgtcagggccagtgttcaccgatagcggaatccatattatcctccgcacagagtga

SEQ ID NO: 2417 - RNA, 138 nt, synthetic construct
  misc_feature 1..138: note = AAH31971 variant
  source 1..138: mol_type = other RNA
atgcagaagcccttcgaggacgccagctttgctctgagaaccggcgaaatgtccgggcctgtgttcacagattctggaatccacattatactcaggactgagtgctggcggcaaacgcgcggtccaaactgtttttga

SEQ ID NO: 2418 - RNA, 639 nt, synthetic construct
  misc_feature 1..639: note = AAG22596 variant
  source 1..639: mol_type = other RNA
atgaaggtgttcaaatttatcggcctgatgattctccttaccagcgccttctccgctgggtctggacagtcacccatgacagtcctgtgcagtatagactggtttatggttactgtgcaccctttcatgttgaacaatgatgtatgtgtgcattttcacgagttacatctgggtctaggctgcccaccgaaccacgtccaaccccatgcataccagttcacgtatagagtgaccgaatgtgggatcagggccaaggcggttagccaggacatggtgatttactccacagagatccactattcttcgaaaggaactccttcaaagtttgtcattccagtgagctgcgctgcaccccagaaaagtccttggctcaccaagccatgttccatgcgggtagcctctaagagccgcgccacagctcaaaaagatgaaaagtgctacgaggttttctccctgtcacagagtagccagcgacccaattgtgactgccctccatgtgtgttttctgaagaggagcacacccaggtcccgtgccatcaagcaggcgcccaggaagctcagccccttcagccttcccacttcctggatatctcagaggactggagcttgcatactgatgacatgataggtagtatgtga

SEQ ID NO: 2419 - RNA, 1986 nt, synthetic construct
  misc_feature 1..1986: note = AAB00386 variant
  source 1..1986: mol_type = other RNA
atggacctggtgctcaagagatgccttctgcacttggccgtcatcggcgctttactggcagttggggccaccaaagtgcccaggaaccaggattggctaggagtaagccggcaactccgcacaaaggcgtggaatcgacagctgtaccctgagtggactgaagctcagcgtcttgactgttggagaggtggccaggtgtccctgaaagtctctaacgatgggccaacgttgattggagccaatgcatcattcagtatagccctcaactttccgggcagccaaaaggtgctgcccgacggtcaggttatctgggtgaataacaccattatcaatgggtcccaggtctggggaggccagcctgtgtatccacaagagacagatgacgcttgcattttccccgatggcgggccttgtccatctggatcgtggtcacagaaaaggagctttgtatacgtttggaagacttggggtcagtattggcaagtgctgggcgggcccgtcagtggactctccatcggcaccggtcgggcaatgttagggacacataccatggaagtgactgtgtaccaccgcagaggatctaggagctatgtccctctggcccattcctcaagtgctttcacaataaccgaccaggttccatttagcgtgtctgtatcccagcttcgggccttggatggcggcaacaagcacttcctgcgcaatcagccgctaacgtttgcgctccaactgcatgacccctcagggtaccttgcagaggccgatctgagctatacttgggacttcggagatagttctggtaccttgatctcccgagctctcgtggtcacacacacttacctggaacctggcccagtgaccgcccaggttgtgttacaggcagctattcccctgacaagctgcgggtcgtctcctgtcccaggaaccacggacggccacagacccactgccgaggcgccgaacacaaccgccggtcaggtgcctactacagaggtagttgggaccacgcccggccaagcaccaaccgctgaaccttccggaacaacttcagtgcaggtccccaccacagaggtgatcagtactgccccagtccagatgcccaccgctgaaagcacaggcatgacccctgagaaagtgccagtttccgaggtgatggggactacgctcgccgaaatgtctacaccggaggcaaccggaatgactcccgccgaagtaagcattgtcgtgctttcaggtaccacagctgcgcaggttaccactacagagtgggtggaaacgaccgcaagggagctgcctatcccagagcccgaaggccctgacgccagttccataatgagcactgagtctattacagggtcattgggaccactactggatggcaccgctacactccggctggtcaagcgtcaagtgccccttgactgtgtactgtaccgctatggtagttttagcgtgactttggatatcgttcaggggattgaatccgccgagatcctccaggcagtcccgtctggcgaaggagacgccttcgagctgaccgtgtcgtgccagggcgggttacctaaagaggcttgtatggaaatcagctccccaggatgccaaccccctgcccagagactgtgtcagcccgtgctaccaagtcctgcatgccagctcgtcctgcatcaaattcttaagggtggctcagggacgtactgtttgaatgtttctctggcggataccaacagcctcgctgtggtgtccacacagctgataatgcccggacaggaggccggccttggtcaagtaccactgatcgtcgggattttgctcgtgctgatggcagttgtgttagcctcactgatctataggcggcgactaatgaaacaggactttagcgtcccgcagctccctcactcttccagtcattggctgcgccttcccagaatattctgcagctgcccaattggcgaaaattctcccttgctgtccggacagcaagtgtga

SEQ ID NO: 2420 - RNA, 2649 nt, synthetic construct
  misc_feature 1..2649: note = CCDS10255.1 variant
  source 1..2649: mol_type = other RNA
atggagcccgcccctgctagaagcccaaggccgcagcaagaccccgcacggcctcaggaaccaaccatgccccctccagagacaccctccgaaggccgccagccttctccatcaccgagtcccactgagcgagcccctgcgagcgaagaggagttccagtttctgcgttgccaacagtgtcaggctgaagccaagtgcccaaaactccttccctgtctgcacacgttgtgctccgggtgtttagaggcatctggaatgcagtgccctatctgtcaagccccatggcccctgggtgctgataccccggcactagacaacgtgttctttgaatcgctccagagaaggctgtcagtctaccggcagattgttgatgcccaggctgtgtgcacacgctgtaaggagagcgccgacttctggtgctttgagtgtgaacaacttctgtgcgcgaaatgcttcgaggcacatcagtggtttttgaagcacgaagccagacctctcgctgagctgaggaatcagagtgtacgggaatttctggatggcactcgcaaaaccaacaatatattttgttccaaccccaatcatcgaacaccaaccctcacttctatctattgcagagggtgtagcaagcctttatgctgttcctgcgccctgcttgactcaagtcacagcgagttgaagtgtgatatttctgcagagatccaacagaggcaggaagaactggacgctatgacacaggccctacaagaacaggattccgcgttcggagccgtgcatgcacagatgcacgctgccgtcggccagctcggtcgggctcgtgccgagaccgaggagctgattcgcgagagagtgaggcaagttgtggcacacgtccgggcccaggaacgagagcttctggaagctgtggacgcgcgctaccagagagattatgaggaaatggcatcaaggttggggcggctcgacgccgtactgcagcgcatcagaacgggaagcgctttagttcaaaggatgaaatgctacgccagtgatcaggaggtgctggacatgcatggctttctccgtcaggcactttgtcggctgcgacaggaggaaccccaatctttgcaggccgctgtcagaactgacggcttcgatgagtttaaggtgaggctacaggacctgtccagctgcataacccaagggaaagatgccgcagtgtcgaagaaagcgtctccagaagctgcctccacaccccgcgaccctatcgatgtcgacctcccagaggaggcagaacgggttaaggcccaggtgcaggctctgggacttgccgaggcacagccgatggctgtagtgcaatcagtccccggtgcccaccctgtgccagtttatgcgttcagtattaagggccccagctacggggaagatgtgtccaacactaccacagcccagaaaagaaagtgttctcagacccagtgccctaggaaagtcatcaagatggagagcgaagagggaaaagaggctcgcctggcacgatcaagtccagaacaaccccggccgtccacgagcaaggccgtgtctcctccacatttggacggtcccccttcaccccgtagtccagtaattggcagcgaggttttcctccctaattccaaccacgtggcttctggggccggagaagcagaggaaagagtcgtggtcatctcgagctccgaggattcagacgcggagaatagttctagcagggaactggatgactcctcaagcgagtcttccgacttacagctggaaggccccagtactctacgcgtgctcgatgagaacctggccgacccacaggctgaagatcggccgcttgttttcttcgacttgaaaatagataatgagacacagaagattagccaactggccgcagtgaacagagagtctaagtttagggtagtcatccagcctgaggctttcttttccatttattcaaaagccgtgagtctcgaagttggcctgcagcacttccttagctttctgtcgtccatgcgacgccccatcttggcatgctacaagctctgggggccaggactgcccaatttctttcgggccttagaagacatcaacagactgtgggagttccaagaggctatttctggttttctagcggccctccctctgataagggaacgtgtgccaggcgcaagctcattcaaacttaagaatttggctcagacctacctggcccgcaacatgagtgagcggtccgccatggctgcagtcctcgccatgagagatctgtgtaggttactggaagtgtctcccgggcctcagcttgcgcagcatgtatatccgtttagctccttgcaatgcttcgcttcactccagccactggtgcaggccgcagttctaccccgagccgaggctcggctgctcgcactgcacaacgtcagcttcatggaacttttgagtgcccatcgcagagacaggcagggaggcctgaaaaagtactctcggtatttatccctccaaactacaaccctgcctccagcgcagcccgcttttaatcttcaggccctgggtacgtacttcgaggggttgctcgagggccctgcactggcccgagctgaaggagtgagcaccccgctagccggcagagggctggcagagcgcgcttcgcagcaatcatga

SEQ ID NO: 2421 - RNA, 3228 nt, synthetic construct
  misc_feature 1..3228: note = CCDS46409.1 variant
  source 1..3228: mol_type = other RNA
atggtggtcgaggttgacagcatgcccgccgcttcctctgtgaagaaacctttcggcctgagatcaaagatggggaaatggtgctgtaggtgctttccatgttgccgggaaagtggaaagagcaacgtaggtacctccggcgatcacgacgattctgcaatgaaaacactccgctcgaagatggggaagtggtgtcgacattgcttcccgtgttgccgtggatcaggcaaaagcaatgtgggtgccagtggggaccacgatgactccgcgatgaagactcttagaaacaaaatgggaaagtggtgttgccattgttttccctgctgcaggggctctagcaaatccaaggtcggcgcttggggagattacgacgattcagccttcatggagcctcggtatcacgtgcgcggggaagacctggataagttgcatagagcagcctggtggggtaaagttccaaggaaggacttaatcgtgatgctgcgggatacggacgtcaataaacaggacaagcaaaaacgcaccgctctacacctcgcaagtgccaacggcaatagcgaggtggtaaagctgcttctggatcgaagatgtcagttgaacgttctcgacaataaaaagaggacagctctgattaaggccgtgcagtgccaggaagatgagtgtgcgctgatgctcttagagcacgggactgaccccaacatacctgatgaatacggaaataccacactgcattatgcaatctacaacgaggacaaacttatggccaaggctttgctgctatatggcgccgatattgaatctaaaaataagcacggtctcaccccactgcttctgggggtccatgagcaaaaacaacaggtggtgaagtttttgatcaagaaaaaggcaaacctcaatgctctggaccggtacggacgtactgccttaattctggcggtctgctgtggctccgcctcaatcgttagcctccttctggagcagaacatagatgtgagttctcaggacttgtccggccagacagcacgcgaatatgctgtaagctcgcaccaccatgtgatctgccagctactgtctgattacaaagagaagcagatgctcaaaatttcctcagaaaatagtaaccccgagcaagacctgaaacttaccagcgaagaggagtcccagagattcaaggggtctgaaaacagccagcctgagaagatgtcacaagaaccagagatcaataaggacggagatagggaagtcgaggaggaaatgaaaaagcacgagagtaacaatgtgggtctgttggaaaacctcacgaatggcgttactgccgggaacggagacaatggcctgattccgcagcggaaatcccgaacccccgagaaccagcagtttcctgataatgaaagcgaggagtaccatcgcatctgtgaattactgtctgactataaggagaagcaaatgccaaaatactcaagtgaaaacagcaatcccgagcaggatctaaagctcacatccgaggaagagtctcagagactgaaaggttcggaaaacgggcagcctgagaagaggagccaagaaccagagataaataaagacggcgatcgggagcttgaaaacttcatggctattgaggaaatgaagaaacaccgctccactcatgtgggatttcccgagaatttgaccaacggcgccacagcagggaacggagacgatggtctgatcccgcctagaaagtcaaggacccccgaaagtcagcagttcccagacacggagaatgaggaatatcactctgatgagcagaacgacactcaaaagcagttttgcgaggaacagaatacaggcattctccacgatgaaatcctgatccatgaggagaaacagattgaagtcgtggagaagatgaacagcgaactttccctgtcatgtaaaaaggagaaagacatattgcacgagaatagcaccctccgtgaagagatcgccatgctgcggttagaactggacactatgaagcatcaatctcagctacgagagaagaaatacctcgaagatattgagtccgtaaagaaaagaaacgacaatctgcttaaggctttgcagctgaacgagctcacaatggatgacgataccgcggttctggtgatcgacaatgggagtggaatgtgcaaagcaggcttcgccggtgatgacgctcctagggccgtctttcccagcatagtggggcgcccacggcaacagggcatgatgggaggcatgcaccagaaggaatcttatgtcgggaaggaggcacagtccaaaagaggaattttaacgctgaagtaccccatggaacacggtatcatcaccaactgggatgacatggagaaaatttggcatcacacattctataatgaacttagggtggcccctgaggagcatccagttttgctcactgaagctaccctgaacccgaaggccaatcgcgagaaaatgacacaaatcatgttcgaaacttttaacacccccgcaatgtacgtggcgattcaggctgtactatcactgtacacaagtggccgaaccactgggatagtcatggatagcggagacggcgtgacgcacacagttcctatctatgagggtaatgccctcccacatgcaaccctgcggcttgatttggccgggcgtgaactgcccgactacttaatgaagattctcactgagcacggctatagattcaccacaatggctgagagggaaatcgtgcgcgacatcaaggagaaactgtgttacgtcgcccttgattttgaacaggagatggcaaccgtggcttcgtcctctagcctggagaagtcatatgaattgcctgacggacaggtaattactataggcaacgagcggttcagatgcccagaagccctctttcaaccctgcttcctggggatggagagttgtggaatccacgaaacaacgtttaactccattatgaaatctgatgtggacatcaggaaggatctatacaccaatactgttctgagcggcggtacaaccatgtatccggggatggcgcatcgaatgcagaaagagattgccgctctcgcaccttccatgatgaagatccgcataatcgccccacccaaacggaagtactcagtctgggtgggaggcagcattctggctagtctttctacattccagcagatgtggatctccaagcaagagtacgacgaaagcggtccttcgattgtgcacagaaaatgcttgtga

SEQ ID NO: 2422 - RNA, 1755 nt, synthetic construct
  misc_feature 1..1755: note = CCDS13562.1 variant
  source 1..1755: mol_type = other RNA
atggtggccgaggtctgcagcatgcccaccgcttccacagttaagaaacctttcgacctgagatctaagatgggcaaatggtgtcaccataggtttccatgctgtcgggggtcaggaaagagtaacatgggtactagcggcgatcacgacgattccttcatgaaaatgctccgctctaagatggggaagtgctgtcgacattgctttccgtgttgccgtggatcgggcacgtcaaatgtgggtaccagcggggaccacgaaaacagtttcatgaaaatgcttagatccaagatgggaaaatggtgttgccattgttttccctgctgcaggggctctggcaagagcaatgtaggggcatggggagattacgaccactccgccttcatggagcctcggtatcacatccgcagagaagatctggacaaattgcatagggcggcttggtggggtaaggtgccacggaaggatttaattgtcatgctgcgcgacacagatatgaacaaacgagacaaggagaaaagaactgccctacacctcgcatcagccaatggcaacagtgaagtggttcagctgcttctggataggcggtgtcaattgaatgtgctcgacaacaagaaacgtaccgctctgataaaggcaatccagtgccaggaggacgagtgtgtcctgatgctcttagaacatggggccgatcgcaatattcccgacgagtacggaaacacagctctgcactatgccatctacaatgaagataaacttatggcgaaggcattgctgctatatggcgccgacattgagagcaagaacaaatgcggtctcacccctctgcttctgggggtgcacgagcagaagcaacaggtagttaaatttttgatcaagaaaaaggctaatctcaacgtgctggatagatacggaaggactgccttaatactggcagtctgttgcggctctgcttccatcgtgaatctccttctggaacagaacgtggacgtctcaagccaggatttgagtggccaaacagcccgggagtatgcggtttcttcccatcaccatgtgatttgtgaactactgagcgactacaaggagaaacagatgctcaagatctcgtctgaaaactccaatccagagcaggatctgaaacttacctcagaggaagagagtcagcgactgaaggtaagcgaaaactcccaacccgagaaaatgtctcaggaacctgagattaataaggactgcgatcgcgaggtggaagaggaaatcaagaaacacgggagcaacccagtcggattgccggagaatctcacgaacggtgcctcagcaggcaatggggacgacggactgataccccagagaaggagtcggaagcctgaaaaccaacagttcccagatactgagaatgaggaataccattccgacgagcagaacgatacccgcaaacagttaagcgaagaacaaaatacaggcatttctcaggacgagatcctgactaacaagcagaaacagattgaagtggctgagcaaaagatgaatagtgaactatcactcagccacaagaaagaggaagatctgcttagagagaactccgttttgcaggaggaaatcgccatgctgaggctcgagctggacgaaaccaagcaccagaatcagcttcgtgagaacaaaatcctggaagagattgagtctgtgaaggagaaaacagataagttgctccgggctatgcaactgaacgaggaagccttaaccaaaacgaatatatga

SEQ ID NO: 2423 - RNA, 1530 nt, synthetic construct
  misc_feature 1..1530: note = EAW59519 variant
  source 1..1530: mol_type = other RNA
atggagagaaggcggctgtggggcagcatccagtcccgctacatttctatgtcagtgtggaccagtccccgacgtctcgtcgaacttgccgggcaaagcctgttgaaggacgaggctttagcaatagccgcgctggaactactccctagagagctgttcccaccgctttttatggctgccttcgatggaaggcactcccagacactgaaagcaatggttcaggcctggccctttacttgcttgcctctcggtgtgctgatgaagggccagcatctgcacctcgaaacgttcaaagctgtattagacgggctggatgtgcttttggcacaagaggtccggccacgcagatggaagctacaggtgctggacctcaggaaaaactctcatcaggatttttggaccgtttggtcgggaaatcgggcctcactgtatagcttccccgagcctgaagctgcccagccaatgacaaagaagcgcaaagtggacggccttagtactgaggcggaacaaccctttatccctgtcgaggtgctggtagatttgttcctcaaggagggtgcatgtgacgaactgttttcctacttaattgagaaagttaagcgaaagaaaaacgtgctgagactctgctgtaagaaacttaagatcttcgccatgccaatgcaggatattaaaatgatcctgaagatggtccagttggactctatagaagatctagaggtgacctgcacatggaaactgccgaccctcgctaagtttagcccctatctggggcagatgatcaatcttaggcggctgttgctctcccacattcatgcctcaagttacatcagccctgaaaaagaggagcaatatattgcacagttcacttctcagtttctgtccttacaatgtctgcaggctctatacgtggactcactcttcttcctgcgtggacgccttgatcagttgctgagacacgtcatgaacccactcgaaacactgagcatcaccaattgcaggcttagtgagggcgacgttatgcacctgtctcagtcccccagcgtgtcgcaattgtctgtactctccctgtcaggcgtgatgttaacggacgtcagtcctgaaccactgcaggccctactcgagcgggcgagcgccactctgcaggatcttgtgtttgacgaatgtgggataaccgatgaccagttgctggcactcctgccctccttatctcattgcagccaactgacaactctttcattctatggaaacagtatttccatcagcgctttgcagtctctcctgcagcacctaattggtctgtcaaatctcacccatgttctgtacccggtgcctcttgagagttacgaggatatccacggcacattgcacctggaacgattagcctatctccatgctcgcctgagagagcttctgtgtgaattggggaggcccagcatggtctggctctccgccaacccatgccctcactgtggagaccggaccttttacgatcccgagccaatcctgtgcccctgcttcatgcctaattga

SEQ ID NO: 2424 - RNA, 1530 nt, synthetic construct; identical to SEQ ID NO: 2423
  misc_feature 1..1530: note = AAC51160 variant
  source 1..1530: mol_type = other RNA

SEQ ID NO: 2425 - RNA, 645 nt, synthetic construct
  misc_feature 1..645: note = CCDS8069.1 variant
  source 1..645: mol_type = other RNA
atgggcctggccggggtgtgcgctctcagaaggagcgcaggatacatccttgtcggtggcgccgggggacagtccgcggctgccgcagcccggcgctattctgagggcgaatgggcttcaggtggggttcgaagtttcagccgtgcagccgctgccatggcgcccattaaggtgggagacgcaatacctgccgtagaggtgtttgaaggcgagccaggcaacaaagtcaatctggctgaattgttcaaggggaaaaagggagtgttatttggtgttccgggcgccttcacccccgggtgttccaaaacacatctgcctggatttgtggagcaagcagaggctctaaaggccaagggcgtccaggtggtagcgtgcctctctgttaacgatgccttcgtgactggtgaatgggggagagcacacaaagctgagggaaaggtcaggctgcttgccgacccaacgggcgcttttggcaaagaaaccgatctgttgctcgacgattcgctggtgtcaatcttcgggaatcggcgcctgaagagatttagcatggtggtccaggacggaattgttaaagccctcaacgtggagcccgatggtacaggcttaacttgtagtctggcacctaatatcatttcccagctttga

SEQ ID NO: 2426 - RNA, 309 nt, synthetic construct
  misc_feature 1..309: note = AAA63250 variant
  source 1..309: mol_type = other RNA
atggtgagatacagggtccggagcctgtccgagcgctctcacgaagtttatcgacagcaactccatggccaggagcaggggcaccatggacaggaggaacaaggtctttcacccgaacacgtggaggtatacgagcgtacccatggccagagtcactatagaaggcggcactgcagccgcagaaggctgcatcggatccaccgccgacagcatagatcctgtaggcggcgtaagcgcagatcttgcaggcaccggcgacgccacagaagggggtgtcggacacgcaaaagaacttgcaggcgtcattga

SEQ ID NO: 2427 - RNA, 1662 nt, synthetic construct
  misc_feature 1..1662: note = AAH50416 variant
  source 1..1662: mol_type = other RNA
atggtgcagagactgtgggtcagcaggctccttcggcaccgcaaggcccaactgttgttagttaacctgctaaccttcggcctcgaggtgtgcctggctgcagggatcacatacgtaccccctcttctgttggaagtgggagtcgaggaaaaatttatgactatggtgctcggtattggcccagttctggggctggtgtgtgtcccgctcttaggatccgcctctgaccattggcgaggccgttatggtagaaggcggcccttcatatgggcgctgtcacttgggatcttgctgagtctatttctcattcctcgcgctggatggctggccggccttctgtgcccagatcccagacctttggagctcgcactgttaatcctgggcgtggggctccttgacttctgtggacaggtatgctttacgccactggaagccttgctaagcgatctgttcagggaccccgatcactgtcggcaggcttactccgtttatgcatttatgatttctctcggtggctgcctggggtaccttctgcctgccatcgactgggatacctcggctttggccccatatctcggaacacaggaggagtgtctgttcggcttactgactctaatatttttgacctgcgtggcggcaacactgcttgtcgccgaagaggctgccttgggtccgaccgaacccgcagaggggctgtcagctcctagcctcagtccacattgttgcccctgtcgcgcccgactggcgttcagaaatcttggagccctgttgcctaggctccaccaactgtgctgccggatgccacgtactttacgcagactgtttgtggcagagctatgttcctggatggctctcatgacattcaccctgttttacacggacttcgtgggcgaaggcctttatcagggggtccccagggccgagccgggaactgaagctcggcgacattacgatgagggtgttcgcatgggctctttggggctgttcctccagtgcgccatcagcctggtgttttccttagtaatggacagactggtgcagaggttcggaacccgggcagtctaccttgcctcagtggctgcgtttcctgttgcagccggcgctacatgtttgagtcacagcgtggccgtcgtgactgcatctgccgctctcaccggtttcacattttccgccctgcaaattctaccctataccctggcatcactctaccaccgcgaaaagcaggtattcctgccaaaatatagaggggatacgggcggagcgagcagtgaggactctcttatgacttcctttttgcctggccccaagccaggggctcccttccctaacggacatgttggtgccggcgggagcggactgttaccaccgccccctgcactctgcggcgcctcggcttgtgatgtgtctgtcagggtggtcgtgggtgagccaacagaagcccgtgttgtgcccgggcggggcatctgcctggaccttgcaattctggactccgcttttctcctctcacaggtagcccctagtctgttcatgggaagcatcgtccagctatcccaatctgtgaccgcgtacatggttagcgccgctggcctggggctcgtggcaatatattttgccactcaggtcgtgttcgataaatcagacctggctaagtacagtgcctga

SEQ ID NO: 2428 - RNA, 648 nt, synthetic construct
  misc_feature 1..648: note = CBI83574 variant
  source 1..648: mol_type = other RNA
atggccagcctgcagatgagaggcaaccccgggtcccacttctgcggaggtaccctcatccatccttcttttgtgcttacagctgcacactgtctgagggacattccacaacggttggtcaatgttgtgttaggcgcccataacgtacgcactcaggagccgacgcagcagcacttctcagtggcgcaagtctttctgaataactacgatgctgaaaataagctaaacgacatactcctgatccagcttagtagccccgccaatctgtccgcatctgtggccaccgttcagttgcctcagcaagatcagccagtgccccatgggacacagtgcctcgctatgggatggggccgagtcggtgcacacgaccctccagcccaggtgctgcaagagctgaacgtaactgttgtgaccttcttttgtcgtccccacaatatttgcacattcgtccctagaaggaaagctgggatctgttttggagattcgggcggcccactcatttgcgacgggatcatacagggaatcgattcattcgtgatttggggttgtgccacccggttatttccggacttctttactcgcgtggcgctgtatgtcgattggatcagaagcacacttaggcgggttgaagcaaagggccgcccctga

SEQ ID NO: 2429 - RNA, 771 nt, synthetic construct
  misc_feature 1..771: note = AAH96183 variant
  source 1..771: mol_type = other RNA
atggcccacagaccccctagcccagctctggcatccgtgctccttgccctgttgttatctggcgcggctagggccgcagagatcgtcgggggacatgaagcccagccgcactcacggccctacatggctagtctgcaaatgcgcggtaaccctggcagccatttctgcgggggaaccctaattcacccatcctttgttctcacagcagcccattgtctgcgagacataccccagcgtcttgtgaatgtagtgctgggcgctcacaacgtcagaactcaggagcctacgcagcaacacttctctgtggcccaggtgtttttgaataactatgatgcggaaaataagctcaacgacgttctgctgatccagctctcgtcaccagcaaatttaagcgccagtgtcgctaccgtgcagctgccccaacaggatcagcctgtaccacatggtacacagtgccttgccatggggtggggaagggttggcgcacacgacccgcccgctcaagtgttgcaggagctgaacgtcactgtggtgaccttcttttgtcggcctcataatatttgcacattcgtcccacgcagaaaagccggcatctgttttggggattccggaggtcccctaatttgcgacggcatcatacaggggatcgattctttcgttatttggggatgtgcgaccaggctctttcctgacttctttactcgggtggccctgtacgtagattggatccgcagcacacttcgaagagtggaagcaaagggcaggccatga

SEQ ID NO: 2430 - RNA, 2760 nt, synthetic construct
  misc_feature 1..2760: note = CCDS45721.1 variant
  source 1..2760: mol_type = other RNA
atgtggctggccgctgcagcccccagcctcgcgagaaggcttctgttcttgggccctccaccgccccctttactgctactcgtgttttcccggtcttcacgccgacgtctgcacagtcttgggctggctgccatgccagagaagagacccttcgaaaggttgcctgcagacgtcagcccaatcaactactccctctgcctgaaacccgatctgctcgactttaccttcgagggaaagttagaagccgctgcacaggttcggcaagccacaaatcagattgtgatgaactgtgctgatatagacatcattactgcctcttatgcgcctgagggtgatgaagagatccatgcaacgggctttaattaccagaacgaggacgaaaaagtaaccctgtcgttcccatcaacacttcagactgggaccggaacattgaagattgattttgtgggcgagctgaatgacaaaatgaagggtttctatcgcagcaagtacaccactccgagtggggaagtcagatatgccgctgtgacacaatttgaggccaccgatgcaaggcgggctttcccctgctgggacgagcctgccatcaaagcgacgtttgatatatccctagttgtgccaaaggaccgcgtcgccctctctaacatgaatgtgatcgatcgaaaaccctaccctgacgacgaaaacctggtagaggttaagttcgcaagaactccagtgatgagcacctatcttgtcgcttttgtggtgggagaatacgatttcgtcgagacaaggtccaaagacggcgtttgtgtgcgggtatacactcccgtgggcaaggccgaacaggggaagttcgctctggaggtcgccgcaaaaaccttgccgttttataaggattacttcaatgtgccttatcccctcccaaaaattgacctgatcgccattgctgattttgcggcaggagccatggagaactggggtttagttacataccgtgaaaccgctctgctcatcgaccctaaaaattcatgcagtagctctcgccagtgggtggcccttgtcgtgggccacgagctggcacatcagtggttcgggaacttggtaacgatggaatggtggactcacctatggctgaatgagggatttgcctcctggatagaatatctctgtgttgatcattgcttccccgagtacgacatttggacacaatttgtgtcagctgattataccagagcccaggagctggacgcacttgataacagccacccaatcgaagtcagtgtgggccacccctctgaggtcgacgaaattttcgacgcgatctcctacagcaagggtgcttcggtgatcaggatgctgcatgattacattggggacaaggattttaaaaagggaatgaatatgtatttgactaagttccagcagaaaaacgccgcaacagaggacctctgggaatctctggagaacgcctccggcaagcctatagctgccgttatgaatacctggacgaaacaaatgggctttccattaatctacgtggaggcagaacaggtagaggatgaccggctgctacgactctcacagaagaaattctgtgctgggggaagttatgtcggtgaagattgcccgcaatggatggtgcccattaccatcagcacatccgaggaccctaaccaggccaagctgaagatacttatggataaaccagagatgaatgttgtgttgaagaacgtcaaacccgaccagtgggtgaagctgaatctcggcactgtagggttttaccgcacccagtattctagcgcgatgctggaatcacttctgcctggaattagagatttgagtctcccacccgtggacaggctgggcttacaaaacgatctgttctccctagcccgggctggtatcatcagcacagttgaggtcctcaaagtgatggaagcattcgtgaatgagccgaactacactgtctggtctgacctgtcatgtaatcttgggattttgagtaccctgctcagccacacagacttttatgaagagatccaggagttcgttaaggatgtgttttcccctattggcgaacgcctgggatgggacccaaagcccggcgaggggcatttagatgccctgcttagaggattggtgctcggtaaactgggcaaggctgggcacaaagccaccctagaagaggcaaggcgtcggttcaaggaccacgtagaaggaaaacagatactgtctgcggatctccgatcgcctgtctacctgactgtgcttaagcatggcgacggtacgacattggatatcatgctgaagttacacaaacaggccgacatgcaagaggagaagaacagaattgaaagggttctcggggctaccctgcttcccgatctgatccagaaagtgttgacttttgccctcagcgaggaagtccgcccacaggacaccgtgtccgttatcggcggagtggcaggcgggtcaaagcatggacggaaagctgcctggaagttcattaaagataattgggaggaactgtacaacagatatcagggtggctttctaataagtaggctgatcaagctctctgtagaggggttcgcagtcgacaagatggccggagaggtgaaagcgtttttcgaaagccaccctgctccctccgccgagcgcacaattcaacagtgctgtgaaaatatcctgcttaacgcagcttggttgaagcgagatgccgagtcaattcatcagtacctgttacagcggaaagccagcccaccgaccgtgtga

SEQ ID NO: 2431 - RNA, 660 nt, synthetic construct
  misc_feature 1..660: note = AAH65513 variant
  source 1..660: mol_type = other RNA
atgctgagagccggcgctcccaccggggacctccctagggcaggagaggtgcacacaggtactacgatcatggccgtcgagttcgatggcggggttgtgatgggaagcgactcccgggtatctgcgggcgaagctgtggtcaaccgcgtgtttgataaactttcaccactgcatgaacgaatttactgcgccttgagtggtagcgcagccgacgctcaggcagttgccgatatggctgcctatcaattagagctgcacgggatagaactagaggagccgcccctcgtgctggcggcagccaatgtcgtgcgtaacatctcctacaagtatagagaagacctttctgctcatctgatggtagccggatgggatcagagggagggcggccaggtttacgggaccttgggaggtatgctcacacggcagcctttcgcaattggcgggtcgggatcaacttttatctatggctacgtggacgctgcctataagccaggtatgagccccgaagagtgtcgcagattcaccacagatgcgattgccctggcaatgagtagggacgggtcctctggaggcgtcatctacctggtgaccataactgctgccggcgtggatcaccgggtcatcctcgggaatgagttacctaaattttacgacgaatga

SEQ ID NO: 2432 - RNA, 345 nt, synthetic construct
  misc_feature 1..345: note = EAW82312 variant
  source 1..345: mol_type = other RNA
atggccggcctggctctccagcccgggaccgcacttctgtgctacagctgtaaggcccaagtgtccaacgaggactgcttgcaggtcgaaaattgtacacagttaggagagcagtgctggactgcgagaatcagggctgttggtctgctaacggtgatttctaaaggctgttcactcaactgcgtagatgacagtcaagattattacgtggggaagaaaaatataacctgttgcgacacagatctgtgtaacgccagcggagcacacgcccttcagcctgctgcagccatcctggctttgctcccagccctgggcctgctcttatggggtccggggcagctgtga

SEQ ID NO: 2433 - RNA, 372 nt, synthetic construct
  misc_feature 1..372: note = AAC39607 variant
  source 1..372: mol_type = other RNA
atgaaggccgtgctgctcgcacttctgatggctggcttggccttacagcccgggaccgcgctgctatgctacagctgtaaagctcaagtctccaacgaggactgcctccaggttgaaaattgtacacagctgggagagcagtgctggactgccagaatcagggcagtgggtcttctgacggtaatttctaagggctgttcattgaactgcgtggatgacagtcaagattattacgtcgggaaaaagaatataacctgttgcgacacagatctctgtaacgccagcggagctcacgcactgcagcctgccgctgccatcctggcgctcttaccagcactgggccttttgctgtggggtccggggcagctatga

SEQ ID NO: 2434 - RNA, 963 nt, synthetic construct
  misc_feature 1..963: note = AAG40776 variant
  source 1..963: mol_type = other RNA
atgagctcctgcaacttcacccacgccacatttgtgctgatcggcattcccgggctcgagaaggctcatttctgggtcggatttcctcttctgtctatgtacgttgtggcaatgttcggtaattgtatagtagtgtttatcgtcagaactgaaaggtcattgcacgccccaatgtatttattcctgtgcatgctagcggctattgacctcgccctgagtacgagcaccatgccgaaaatccttgcactgttttggttcgattcccgggagatttcttttgaagcctgtttgacacagatgttctttatccatgctctctcggcaatagagtcaactatcctgctggccatggctttcgaccgctacgtggccatttgccaccccctccgacatgcggcagttttaaacaataccgtgacagcccaaatcggcattgtcgctgtggtacgtgggagcctgtttttcttccctcttccattgctgatcaagagactagccttttgtcacagtaacgttctctcccactcttattgcgtgcatcaggatgtcatgaaactggcatacgctgacacccttcccaatgtggtgtatggactgactgccatattgctcgtcatgggcgttgatgtgatgttcattagcctgtcctactttttaatcattaggacagtactgcagctcccttcaaagagtgaacgggcgaaagccttcggtacctgtgtgagccacatcggggtcgtgcttgcattttatgttccactgatcggattgtctgtggtccatcgcttcggcaactccctacaccccattgtgagagtagttatgggcgacatatacctgctcctgcctccagtgatcaatccgattatctacggggctaagacgaagcagataaggactcgggtccttgccatgtttaaaatttcatgcgataaggacctgcaagctgtgggaggtaaatga

SEQ ID NO: 2435 - RNA, 2253 nt, synthetic construct
  misc_feature 1..2253: note = AAA60209 variant
  source 1..2253: mol_type = other RNA
atgtggaacctgctccacgagaccgacagcgccgtggctacagcaagaaggccccggtggctttgcgccggcgcgctggtcttggctgggggattctttttactgggtttcctatttggctggttcatcaagtcctctaatgaagccactaacattacgcctaaacataatatgaaggcatttctcgatgagctgaaagccgaaaacataaagaaattcctttacaattttacccagatcccacacctggctgggacagagcaaaacttccagttggcaaagcagattcagtcacaatggaaggaatttggactcgacagtgttgagctggcccattatgatgtgctgctcagctacccgaataaaactcaccccaactatatctccattatcaatgaggacggcaacgaaatattcaatacctctttatttgagcctccaccccctggttacgaaaacgtatcggatatcgtgccacccttctcagcttttagccctcaggggatgccagagggagacctggtctatgtgaattacgcccgcacagaggatttcttcaagctagaacgagacatgaaaattaactgtagtggcaagatcgttattgcgcgttatggcaaagtgtttagagggaataaggtcaagaacgcacagttggccggagctaaaggtgtgatcctgtactccgatccggccgactacttcgcacccggcgtaaagtcttatcctgatgggtggaacctaccaggaggcggtgttcagagggggaatatactcaacctgaatggagctggcgacccccttacccctggctacccagccaacgagtatgcgtaccggcgcgggattgccgaagcagtgggactgcccagcatcccggtccatcctattggttattacgatgctcaaaaattgctcgagaagatgggcgggtccgctcccccagactcaagttggagaggaagcctgaaagtgccttataatgtgggccccggttttactgggaacttctctacacagaaggtcaaaatgcacatccactccaccaatgaagttacgaggatctacaacgtgattggcactttacggggagccgtagagccagaccgctacgtgatactgggcgggcatcgagattcatgggtctttggaggtatcgacccccagagcggcgccgcagtggttcacgagattgtgagaagtttcgggaccctcaagaaggaaggatggaggcctcggcgtacaatcctttttgcctcttgggatgctgaggagttcggcctgttgggttccactgaatgggcggaagagaatagccgcctactgcaggagagaggggtcgcatatataaacgccgactcgtctattgaaggcaattacaccctcagggtggattgcacaccactgatgtattcccttgtacataacctgaccaaagagttgaagtcaccggacgaaggatttgagggcaaaagtctctacgaaagctggacgaagaaatccccctctcctgagttcagcgggatgccacggatctcaaagctgggaagtggtaatgattttgaggttttctttcaacgattaggcatcgcttccgggcgcgccagatatactaagaactgggaaacaaataaattcagcggataccccctgtatcactctgtgtacgagacctacgaacttgtcgagaagttctatgaccctatgtttaaataccacctcactgtggcacaggtcaggggcggtatggtgttcgagctggccaactcaattgttcttccatttgattgtcgggactatgctgtggtattgcgcaagtacgccgataaaatctatagtattagcatgaagcatccccaggaaatgaagacatactccgtctctttcgactcgctgtttagcgcagtgaaaaacttcaccgagatagcgtccaagttttcagaaagactccaagacttcgataaaagtaatccgatcgttctgaggatgatgaacgaccagcttatgtttctggagcgtgctttcattgatcctttggggctcccagaccggcccttttatcgacacgtgatctacgccccttctagccataataagtacgcaggcgaatccttccccggaatctatgatgccctgtttgacattgagtcaaaagtcgatccaagcaaggcttggggcgaggtgaagagacagatatacgtagccgcattcacggtgcaggctgccgcggaaaccttatctgaggttgcctga

SEQ ID NO: 2436 - RNA, 3921 nt, synthetic construct
  misc_feature 1..3921: note = CCDS1397.2 variant
  source 1..3921: mol_type = other RNA
atgaccatgtacctgtggctcaagctcctggccttcggctttgctttcttggacacagaggtgtttgtcactgggcagagccccacgccttccccaaccggattaacaactgcaaaaatgccgtctgttcccctgtcaagtgatcctctaccaacccacacaaccgccttcagccccgcgtccacttttgaaagagagaacgacttctctgaaacaaccacgtcgctctcacctgataatactagcacccaagtgagtccagactccctggataacgcttctgcctttaatacaactggtgtaagctccgtgcagacaccccatcttcctacccacgcagactcacagaccccaagtgccggcacggatactcagacattcagcgggtctgctgcaaacgccaagctgaatccgacccccggatccaacgctatctcagacgtccctggcgagaggagcactgccagtacatttccaaccgatcccgtgtctcctttgacgaccacactctccctggcgcatcacagctcggcagccctgccagctcggacttctaataccacaattactgccaacacctccgacgcatatctcaatgcttcagaaacaaccactttaagtcccagcggttccgccgttatatctacgacaaccatcgcgactaccccgagcaaacctacatgcgatgagaagtacgccaacattaccgtggactatctgtacaataaagagactaaacttttcacagcaaagttgaacgtcaatgaaaacgtggagtgtgggaataacacgtgcaccaacaatgaagtacataacctgactgagtgtaagaatgcttcagttagtatctcccacaacagctgcacagcccccgataagaccctaattctcgacgtgccacctggagtcgagaaatttcaactgcacgactgtacacaggtggaaaaggctgatactaccatctgccttaaatggaagaatatagagacgttcacctgtgacacacagaacatcacttatcgctttcagtgcggcaatatgattttcgataacaaggaaatcaaactggagaatttggaacccgagcatgagtacaagtgtgactctgaaattctctataacaatcacaaattcaccaacgcctcaaagatcataaaaacagattttggcagtccaggggagccccaaattatcttctgccgaagcgaagcagcccatcagggagtgattacttggaatcctccacagcgttcctttcacaacttcaccctgtgttacatcaaggagacggaaaaagactgcttaaatctggataagaacctcatcaagtacgaccttcagaacctgaaaccgtatacaaagtacgtcttgtctctacacgcttatattatagcgaaagttcaaagaaatggttcggcagccatgtgccattttaccactaagagcgctcccccttcccaggtgtggaacatgacagtatcaatgaccagtgataattctatgcacgtgaaatgtaggccaccccgggaccgcaacggccctcatgagagataccacctggaggtcgaagccgggaatactctcgtgaggaacgagagccataagaattgcgatttccgggttaaggacctgcagtattccaccgactacacatttaaagcatatttccacaacggagattacccaggcgaaccctttatccttcaccattcaacgagctacaattctaaggccctgattgctttcttggcctttctcatcatagtgacctccattgcactgttagtcgtgctgtataaaatctacgacctacacaagaaacgcagttgtaacctcgatgagcaacaggaactggtagagcgagacgatgagaagcagcttatgaatgttgaaccgatccatgcggacattttgctggagacttataagagaaaaatcgctgatgaaggtaggcttttcctggccgagtttcagagcattcctcgggtgttctctaagttcccaataaaagaggcacgtaagccctttaaccaaaataaaaaccgctacgtcgacatccttccttatgattacaatagagtggaactgtccgagattaacggggacgccggatcaaactatatcaatgctagttacatcgatggcttcaaggaacccaggaagtacattgccgcacagggcccacgggacgagacagtcgatgacttttggcgaatgatatgggaacagaaagctaccgtgatcgttatggtgacacgctgcgaggaggggaacagaaataagtgtgccgaatattggcctagcatggaggaaggaactagggcgttcggtgacgtagtcgtgaaaattaaccagcacaagcggtgccccgattacatcattcaaaaattgaatatcgttaacaagaaagagaaggccaccggccgcgaagtgacgcacatacagtttacatcgtggccagaccatggggtcccggaggatcctcacctcctgttaaagctgagaaggcgtgtgaatgctttctccaactttttctctggacccatcgtagtgcattgtagcgcaggcgttggtcggaccgggacttatattggcatcgacgccatgctagagggactcgaagctgagaataaagtcgatgtgtacggctatgtggtcaagctgcgaagacagaggtgccttatggttcaggtggaagcccaatacattttgatccaccaggcactggtggagtataaccagtttggggaaaccgaggtaaatctctcagagctgcatccatacttacacaacatgaaaaagcgcgatccccctagtgaaccatcacccctggaggcggagttccagcggcttccttcttacagaagctggaggacacaacacataggaaatcaggaagagaacaaatccaagaatcgcaactcaaacgtcattccgtatgactacaatcgagtgccattgaagcatgaactcgagatgagcaaagaaagtgagcacgactctgatgaatccagcgacgatgactcggattcagaggagccctctaagtatatcaacgccagttttattatgtcctactggaaacctgaagttatgatcgctgcccagggtccactgaaggagactataggcgacttctggcaaatgatctttcagcggaaagtgaaggtcattgtgatgctaaccgaactgaagcatggggaccaggagatctgtgcacagtattggggagaaggcaaacaaacatacggtgatattgaggttgacctcaaggatacggacaaaagctctacctatactctgcgtgtgttcgagcttagacacagcaagaggaaagattcccgcacagtataccagtaccagtataccaattggtcagtcgaacagttgcccgctgagcctaaggaactgatcagtatgatacaagtggtgaagcagaaattaccgcagaagaacagctctgaggggaataaacatcacaagtccactcccctcctgattcactgccgggacggctcacagcaaacaggaatcttctgtgcccttctgaacttgctcgaaagtgcagagaccgaggaagtcgttgatatctttcaggtggtaaaagccctgagaaaggctaggccaggcatggtgagcacgttcgagcagtaccaatttctatatgacgtcattgcgtccacttaccctgcccagaatggacaggtgaaaaagaacaatcatcaggaagataagatcgagttcgacaacgaggttgataaagtgaagcaagacgcaaattgcgtcaaccccctgggggctccagaaaaactccctgaggccaaggaacaggccgagggttctgaacccacctcgggcacagaggggccagagcacagcgtgaatggaccggcttcccctgcactgaaccagggctcctga

SEQ ID NO: 2437 - RNA, 624 nt, synthetic construct
  misc_feature 1..624: note = AAH02977 variant
  source 1..624: mol_type = other RNA
atggccaagacctacgactatctgttcaaactccttctgatcggcgatagtggggtgggaaagacatgcgtcttgtttagattctccgaggacgcttttaactctactttcatttcaacgataggtatcgattttaaaattaggaccatcgaattagacggcaagcggattaaactgcagatctgggatacagcagggcaagagcgcttccgaactataaccacagcctactatcgtggagcgatgggcatcatgctagtttacgacattaccaatgaaaagagttttgataacatcagaaattggattaggaacatcgaggaacacgctagcgccgacgtggagaagatgatactcggtaataaatgtgatgtaaacgacaagcggcaagtgtccaaagagcgcggggaaaagctggcacttgattatggaattaaattcatggagacttctgccaaggctaatatcaacgtcgaaaatgcatttttcacactggccagagacattaaggctaaaatggataagaaattggagggcaactcgccccagggctcaaatcagggggtgaagatcacccctgaccagcagaaaaggagcagctttttccggtgcgttctcctgtga

SEQ ID NO: 2438 - RNA, 1260 nt, synthetic construct
  misc_feature 1..1260: note = BAA81688 variant
  source 1..1260: mol_type = other RNA
atgaagaactacaaagccatcggcaagattggggagggaaccttcagcgaagtgatgaaaatgcagtccctgagagacggtaattattacgcttgcaagcaaatgaaacagaggtttgagtctatagaacaggtcaacaatctccgggagatccaggcacttcgccgactgaacccccaccctaatattttgatgttacatgaagttgtgttcgatcgtaagtcaggcagtctggccctaatctgtgagctcatggacatgaacatttatgagctgatcagagggaggcggtacccacttagcgaaaagaaaataatgcactatatgtaccaactgtgcaagtccttggatcatatccaccgcaatggaatttttcatagagacgtaaaaccggagaacatcctcattaagcaggatgtgctgaaactgggcgacttcggttcttgtaggtcggtctattcaaagcagccctacacagaatacatcagcactcggtggtatcgcgcgcctgagtgcctcttaacggatgggttttacacctataagatggacctgtggagtgctggatgtgtgttctacgagatagcctcccttcagccattgtttcccggcgttaatgaactggatcaaatttctaaaatccacgacgtgattggcactcctgcacagaagatcctaacaaaattcaagcagagccgagccatgaactttgatttcccatttaaaaaggggtccggaatccccctcctgaccacaaatctttcacctcagtgcctgagtttgctccacgctatggtcgcatatgacccagatgagagaattgccgctcatcaagccctgcagcacccgtacttccaggaacaaaggaaaaccgagaagcgggcgttaggtagccatcgtaaggcaggctttcccgaacaccctgtggccccagagcccctgtctaactcctgtcagatatcaaaagaggggcgcaagcagaaacagagcctcaagcaagaagaggacagacctaaaaggcggggaccagcttatgtaatggaacttcccaagctgaagttgagtggcgttgtgcgactatcttcctacagctcgccgactctgcagtctgtcctcggttccgggacaaatggacgcgtgcctgtgctgagaccccttaaatgcatcccagcctcaaagaaaaccgaccctcagaaggatctgaaacccgcaccacagcaatgtaggttgcccacgattgtccggaagggcggccgctga

SEQ ID NO: 2439 - RNA, 1389 nt, synthetic construct
  misc_feature 1..1389: note = AAH08727 variant
  source 1..1389: mol_type = other RNA
atggccagcaactcctcttcatgccccacccctggcgggggacacctgaatggttacccagtgccgccctatgctttctttttccctccaatgctcggcgggcttagtccccctggagcactgacaactttgcagcatcaattaccagtcagcggctactccacgccctctcctgccaccatcgagacacagtcgtcaagcagtgaggagattgttccatccccgccctctcctccacccctgcctagaatatataagccatgttttgtgtgccaggacaaaagctccggttaccactatggggtatcagcgtgtgaaggatgcaagggcttctttaggcggagtatccagaaaaacatggtgtacacttgtcatcgcgataagaattgcattatcaacaaagtcacccgaaatcgttgtcaatattgcagactacagaagtgtttcgaggtgggcatgagcaaggaatctgttaggaacgaccggaataaaaagaaaaaggaggtgcccaaaccggagtgctccgaatcatacacactcacccctgaggtcggggaactgattgagaaggtgcgcaaggctcaccaggagacttttcccgccctttgtcagctgggaaaatacacaaccaacaatagcagtgaacaaagagtatctttggatatcgacctctgggataagttctccgagctgagcacgaaatgcataatcaagactgttgaatttgcaaaacagctgccaggtttcaccacactcactattgccgaccagatcaccttactgaaggctgcatgccttgatattttgatcctgaggatatgtacacggtatacccctgagcaggacacgatgactttttcggatggcctaacactcaaccgcacccaaatgcataatgccgggttcggacccctgactgaccttgtgtttgctttcgccaaccagctgttgccactcgaaatggatgacgcggagacaggcctgttatctgcaatttgcctgatctgtggtgatcgacaggacctcgagcaacccgacagagtcgatatgcttcaggaacctctgttggaggccctaaaagtgtacgtgaggaagcggcgtccatcccgcccgcacatgttccccaagatgctgatgaaaattaccgacctcagatcaatcagtgctaagggggccgaaagggtcatcacgctgaaaatggagattcctggaagcatgccaccccttatacaggaaatgctggaaaattccgagggcttggataccctctctggccagcctgggggaggtggccgggacgggggaggcctggcaccacccccgggtagctgctcacctagtttatccccaagctctaaccgatcaagtcccgctacacacagcccttga

SEQ ID NO: 2440 - RNA, 570 nt, synthetic construct
  misc_feature 1..570: note = AAB02605 variant
  source 1..570: mol_type = other RNA
atgaccgagtacaagctggtggtcgttggcgccgggggagtgggtaaaagcgctctcacaatccagcttattcaaaaccacttcgtagacgaatatgatcccactatagaggactcctacagaaaacaggtggtcatcgatggcgaaacgtgcctgttggacattttagataccgcagggcaggaggaatattctgccatgagggaccagtacatgcggacaggagagggctttctgtgtgtgttcgcgatcaataacactaagtcatttgaggatattcatcaatatcgcgaacagatcaagcgagttaaagacagtgatgacgtgcctatggtcctagtgggtaataagtgcgatctcgctgcccgtaccgtagagagcagacaggcacaggacctggccaggtcctacgggataccatatatcgaaacatctgctaagacccggcaaggagttgaggatgcattctacactcttgtgcgcgagattagacagcacaaactgaggaagttgaacccgcccgacgaatcgggccctggctgtatgtcatgcaaatgtgtcctcagctga

SEQ ID NO: 2441 - RNA, 570 nt, synthetic construct
  misc_feature 1..570: note = AAB59445 variant
  source 1..570: mol_type = other RNA
atgaccgagtacaagctggtggtcgttggcgccgggggagtgggtaaaagcgctctcacaatccagcttattcaaaaccacttcgtagacgaatatgatcccactatagaggactcctacagaaaacaggtggtcatcgatggcgaaacgtgcctgttggacattttagataccgcagggcaggaggaatattctgccatgagggaccagtacatgcggacaggagagggctttctgtgtgtgttcgcgatcaataacactaagtcatttgaggatattcatcactatcgcgaacaaatcaagcgagttaaagacagtgaggatgtgcctatggtcctagtgggtaataagtgcgacctcccaagccgtaccgtagatacaaagcaggctcaggacctggccagatcctacgggataccgttcatcgaaacctctgcaaaaactaggcagcgggttgaggatgccttttatacacttgtgcgcgagattagacaatacaggctgaagaaaatctcgaaggaagagaaaacccccggatgtgtcaagattaagaaatgcatcataatgtga

SEQ ID NO: 2442 - RNA, 570 nt, synthetic construct
  misc_feature 1..570: note = AAA60255 variant
  source 1..570: mol_type = other RNA
atgaccgagtacaagctggtggtcgttggcgccgggggagtgggtaaaagcgctctcacaatccagcttattcaaaaccacttcgtagacgaatatgatcccactatagaggactcctacagaaaacaggtggtcatcgatggcgaaacgtgcctgttggacattttagataccgcagggcaggaggaatattctgccatgagggaccagtacatgcggacaggagagggctttctgtgtgtgttcgcgatcaataactcaaagagttttgctgatattaatctatatcgcgagcaaatcaagcgagttaaagacagcgatgacgtgcctatggtcctcgtgggtaacaagtgcgatctgccaactcgtaccgtagacacaaagcaggcccatgaacttgcaaaatcctacgggataccgttcatcgagacctctgccaagactagacagggagttgaagatgctttttatacactggtgagggagattcggcagtaccgcatgaaaaagctcaattcgtcagacgacggcacccaaggctgtatggggttgccctgcgtcgtgatgtga

SEQ ID NO: 2443 - RNA, 546 nt, synthetic construct
  misc_feature 1..546: note = AAB84001 variant
  source 1..546: mol_type = other RNA
atgtgcaagggcctggccgctctcccccacagctgtcttgagagagcaaaagaaatcaagattaaactggggatattgttacagaagcctgactccgtgggagatctggtcatcccatacaacgagaaaccggaaaagcccgccaagacccagaaaacatctctagacgaggcgctccaatggagggattcactggacaaacttctgcagaataactatggtttggctagtttcaagagctttctcaagtccgagttctctgaagagaatctggaattttggattgcctgcgaggattacaaaaagatcaagtcgcctgcaaaaatggccgaaaaggctaaacagatttatgaggagttcatccaaactgaagcaccaaaggaggttaacatagaccattttacgaaagatatcaccatgaagaatctggtggaaccctcactcagcagtttcgacatggcccagaaacggattcacgctttaatggagaaggattccctgcctcgctttgtacgatctgagttctaccaggaacttatcaagtga

SEQ ID NO: 2444 - RNA, 2175 nt, synthetic construct
  misc_feature 1..2175: note = CCDS4362.1 variant
  source 1..2175: mol_type = other RNA
atgagcttccccaaggcccctctgaaaagatttaacgacccatccggctgcgctccgtctcccggggcatacgatgtgaagaccctcgaggtccttaaaggacctgtttcattccagaagagtcaaaggtttaaacagcagaaggaaagcaagcagaatctgaacgtggacaaagatacaactttgccagcctccgcgcggaaggtaaaatcttcggagtcaaaggaaagccaaaagaatgacaaggatttaaagatcctggagaaagaaattcgcgtgctactccaggagcgaggtgctcaggaccgtagaatacaggatctggagacggaacttgagaagatggaagccaggctgaacgcagccttgcgggagaaaaccagtctctccgctaataacgcaacactggagaagcaactgatcgaactcactcgcaccaatgagttactgaaatctaagttcagcgaaaacggcaatcagaaaaaccttagaattttgtccctggagctaatgaagctcaggaataagcgggaaacaaaaatgcgcgggatgatggccaagcaggagggaatggagatgaaactgcaggtcacccaacgatcacttgaagagagtcagggcaagatcgctcagctggaaggtaaattggtgagcattgagaaggaaaagatcgacgagaaatctgagactgaaaagctcctggagtatatagaagagatctcctgtgcctcagatcaagttgaaaaatacaagttagacattgcgcagctggaggagaacctcaaagaaaagaatgatgagatccttagcctgaagcagagtttggaagagaacattgtgatcctatctaaacaggtcgaggacctgaatgtgaagtgccaactcctggaaaaagagaaggaagatcacgtaaacagaaacagggagcataatgaaaaccttaatgcagagatgcagaacctgaaacagaagtttatattggagcagcaagaacgggagaagctccagcagaaagaactgcagattgactccttactgcaacaggagaaggaactaagctcgtctctccaccagaaactgtgttccttccaggaggagatggttaaggagaaaaatctttttgaagaagagttgaagcaaacactggacgaactcgataaactgcagcagaaggaggagcaagccgaacgtcttgtgaagcagctggaggaagaggctaaatcacgcgccgaggaattgaagctcctggaggaaaaattaaaggggaaagaggcagaactggagaagagtagcgctgcccatacccaggcgacgctactcctgcaggagaagtatgactccatggtccaatctcttgaagatgtgactgcccagttcgagagctacaaagcattgaccgcttcagaaatcgaggacctgaagctcgaaaacagttccctgcaggagaaagccgctaaggccggcaaaaatgcagaggatgtgcagcaccaaattttagccacagaaagctctaaccaggagtatgtcagaatgctgcttgacttgcagactaagtcagctctcaaggaaaccgagatcaaagaaatcacagttagttttctgcagaagattaccgatctacaaaatcagctgaaacagcaagaggaggacttcaggaagcagctcgaagatgaggaaggacggaaagcggagaaggagaacacgactgcagaactgacagaggaaataaataagtggcgacttttgtacgaggaactgtataacaaaaccaagccctttcagttacagctcgacgccttcgaggtggagaaacaagctctgcttaatgaacatggcgccgcacaggagcagctgaacaagatccgcgatagctacgccaaattgctcgggcaccagaatctgaagcagaaaattaagcacgtagtgaagctaaaagacgaaaactcccaactgaagtctgaggtctcgaaactcagatgccagctggctaagaaaaagcagagcgaaactaaacttcaagaggagttgaacaaagtgctgggaatcaagcattttgacccttccaaagccttccaccatgaatcaaaggagaatttcgcattaaaaacaccactcaaggaaggtaacaccaattgttacagggcgcccatggagtgccaggaaagttggaagtga

SEQ ID NO: 2445 - RNA, 582 nt, synthetic construct
  misc_feature 1..582: note = AAC33179 variant
  source 1..582: mol_type = other RNA
atggccgctatcagaaagaaactggtgattgtcggcgacggggcatgcggaaagacctgtctccttatagttttcagcaaagatcagtttcccgaggtgtacgtacctacagtgttcgaaaactatatcgccgacattgaggtcgatggtaagcaagtggaactggcgttgtgggacactgctggccaggaggattacgacaggttacggccactgtcctatccggatacggacgttatcctaatgtgcttttctattgattcacccgacagtctcgaaaatatccctgagaaatggaccccagaggtgaagcacttctgtcccaacgtccctataatcctggtggggaataagaaagatcttcgccaggacgaacatacacgacgtgagctggccaagatgaaacaggaaccagtaagaagcgaggagggaagggatatggcaaaccggatttccgcctttggctacttggaatgctctgctaagactaaagagggtgttcgcgaagtgttcgagatggcaaccagagccgggctccaagtcaggaagaataagcggcgccgaggatgtcccatcctgtga

SEQ ID NO: 2446 - RNA, 888 nt, synthetic construct
  misc_feature 1..888: note = AAA36161 variant
  source 1..888: mol_type = other RNA
atgagcggcgccctggacgtgctccagatgaaggaggaagatgtccttaaattcctggctgcagggacccacttgggaggtacaaacttagactttcaaatggagcagtacatctataagagaaaatccgatggcatttacataatcaatctgaagaggacttgggaaaaactactcctggccgcgcgggctattgttgccatcgagaaccccgcagacgtgtctgtaatttcaagtcgcaatacggggcagcgagccgtgcttaagttcgctgcagccaccggagctacacctatcgccggccgttttactccaggtaccttcacaaaccagatacaagcggcatttagagaaccgaggctgttggtcgtgaccgatccccgggccgaccatcagcctctcactgaggctagctatgttaatctgccaacaatcgccctgtgcaacaccgattctcccctccgctacgtggacattgcaatcccttgtaataacaagggggctcactccgtcggattaatgtggtggatgctggccagagaggtgcttaggatgcggggcacgatttcgcgcgaacatccatgggaggtaatgcccgatttgtatttctaccgagaccctgaagagatcgagaaagaggaacaggcggccgcagaaaaggctgttactaaagaggaatttcagggcgagtggaccgccccagctccggagttcacagccactcaacccgaagtggcagattggtcagagggggtccaggtgcctagcgtgccaatacagcagtttcccaccgaagactggagtgcccaacctgctacagaggattggtccgcggcaccaaccgcccaggctacggaatgggtcggagccactacagactggtcttga

SEQ ID NO: 2447 - RNA, 2601 nt, synthetic construct
  misc_feature 1..2601: note = AAH14614 variant
  source 1..2601: mol_type = other RNA
atgaacggcgagcagcaactggacgccgatgctgggagcggaatggaagaggtggaactctcctgggaggactaccttgaagagaccggttctacagcagtcccctatggctcattcaagcacgttgatactagactgcagaatgggtttgcccctggaatgaaattggaggtggcggtaaggacggacccagaaacctactgggtggctacagtcatcactacctgcgagcagttactgctactccggtatgatggctacggtgaagaccgccgagccgatttctggtgtgacattcgtaaggcagatctgtatccgatagggtggtgcgagcagaacaaaaagacacttgaggcccccgaaggaatcagagacaaagtgagtgattgggacgagtttctgaggcaaaccttgattggcgcttgtagccctccagttcccctcctggaaggcctgcggaatgggcgcaaccctctcgatttaatcgcaccaggatccagactggagtgccaggccttccaggactctctttcgacttggattgtgacagtcgtggaaaatatcggtggcaggttgaagctgcggtacgaggggctagagtcaagcgacaactatgaacattggctctactacctggatccctttcttcaccatgtaggatgggctgcccagcaaggctatgagctgcagcctccaagtgcgatacgccacttgaagaatgaagcagagtggcaggaaatcctcgccaaagttaaggaggaggaagaggaaccgctgccctcctacttattcaaagacaaacaggtgattggtatccataccttttctgtcaacatgaagctggaggctgtggatccttggagcccattcgggatttcccccgccacggtggtcaaggtttttgacgaaaagtatttcctcgtggagatggatgaccttcgacctgagaatcacgcaagaaggtcatttgtatgtcacgctgatagtccaggaatcttccccgtgcaatggagcctgaaaaacggcttgcatatatctccgcctcccggctacccatcccaggactttgattgggccgactatctaaagcagtgcggggcggaagccgcacctcaacggtgttttcccccactgatttcagagcacgagttcaaagaaaatatgaagctcgaggctgtcaaccccatcctgcctgaagaggtgtgcgttgccactattaccgctgtgcgtggaagctacctttggctgcagttggaaggtagtaaaaagccaatcccggagtgtatcgtctctgtggaatccatggatattttccccctcggctggtgcgagacaaatgggcatcctctgagcactccacgcagagccagggtatataaacagcggaagatagcagttgtgcagcccgagaagcaagtcccttcgtctcgaaccgtgcacgaaggattacgcaaccaggagcttaattccacagaatcagtcatgatcaacggcaaatactgttgcccaaagatttacttcaaccacagatgctttagtggtccctatctaaataaagggaggatcgccgagctcccgcagtgtgtgggccctggaaactgcgttctggtgcttcgggaagtattgaccctgctcataaatgctgcgtacaagccaagccgcgtcctgagagagcttcagctggacaaagactccgtgtggcatggctgtggggaggttttgaaggcaaagtataaaggaaagtcttacagggccacggtggaaattgtcaaaactgctgatcgtgtgacagagttctgccggcaaacctgtatcaagctcgaatgctgtcccaacctgtttggtcctcgaatggtattagacaaatgcagcgagaattgttcagtgctgactaagacaaagtatacccactactatggcaaaaagaaaaacaagagaatcgggaggcccccaggaggccatagtaatctagcctgcgcactcaaaaaggcctccaagcgccggaaaagaaggaagaacgttttcgtccacaaaaagaaacgcagctctgcttcagtggataatacgcctgccggtagtccccaggggagcggcggagaagacgaggatgacccagatgagggcgacgatgactccctgtctgaagggtcgaccagcgagcagcaggatgaacttcaagaggagtccgaaatgtcagagaagaaaagttgttctagctccccgacacagtcagaaattagcacttctttgcctcccgaccgacagcggcgtaagagagagctgaggaccttttccttcagtgatgacgaaaacaagccacccagccctaaagagatccgcattgaggtggcagaacggctccatctggactctaatccattaaagtggtccgtcgcggatgttgtgagatttataaggtcaacagactgcgctcccctggcccgaatcttccttgatcaggagattgacggacaagcattgctcctgctaactctgcctaccgtgcaggaatgcatggatctcaaactgggtccggccatcaagctgtgtcaccacatcgagcgcattaaatttgctttctacgaacagtttgccaactga

SEQ ID NO: 2448 - RNA, 1431 nt, synthetic construct
  misc_feature 1..1431: note = CCDS4550.1 variant
  source 1..1431: mol_type = other RNA
atgagcggctcctctgccagatcaagtcacctgagccagcccgtggtcaagtccgttctcgtgtacaggaacggggaccctttctatgctggacggcgcgtagtgatccatgagaaaaaggtctcttcgtttgaagtgttccttaaagaggttaccggtggcgtgcaagcaccatttggggccgtccgaaatatttacacaccgcgtactggacacagaataaggaagctggatcagatccagtcaggcggtaactatgtggctgggggacaggaagcgttcaaaaagttgaattacttagacattggcgagatcaagaaacggcccatggaagtagttaacacggaggtgaagcctgtcattcatagccgcatcaatgtgagtgccagatttaggaaaccactgcaagagccctgcaccatattcctaatcgcaaacggcgatctcattaatcctgcctcccggctgcttatcccacgcaagacactgaaccagtgggaccacgtgttgcagatggtcactgaaaagattaccctccgatctggggctgttcatagactgtatacactggagggaaagctcgtggaaagcggtgcagagttagagaatggccagttttacgtagccgtggggagggataagttcaaaaagctgccctattccgaacttttgtttgacaaatcaaccatgcggcgtcctttcggacaaaaggctagtagcctgccaccgatcgtcggctctcgcaaatccaagggttcagggaacgatagacacagcaaaagtactgtgggatcttccgacaatagctcgccccagcctctaaagaggaagggcaaaaaggaggatgttaactctgaaaaactcacaaagctgaaacagaatgtgaaacttaagaactcccaggagaccataccaaattcagacgaaggcatttttaaagccggggcggagcggagtgagacgcgaggagcagccgaagtccaagaggatgaagacactcaggtggaggtacccgttgatcagcgccctgctgaaatcgtggacgaggaggaagacggtgagaaggccaacaaagatgcagaacaaaaggaggacttcagcggcatgaacggggatctggaagaggagggaggcagagaagctaccgacgccccagagcaggtcgaagagattttggatcactccgagcagcaggcgaggcccgcccgggtgaatggtgggacagacgaagagaacggcgaggaactccaacaggtcaataacgaactgcagttagtgctggataaagagcgcaagtctcagggagcaggcagcgggcaagacgaggctgatgttgacccgcagagacctcccaggccagaagtgaagatcacttcacctgaggaaaatgagaacaatcagcagaacaaagattacgccgctgtagcctga

SEQ ID NO: 2449 - RNA, 1362 nt, synthetic construct
  misc_feature 1..1362: note = BAA07903 variant
  source 1..1362: mol_type = other RNA
atgagaatccccgtggacgccagcacctccaggcggttcacacctccatctactgctctgtcaccgggcaagatgagtgaggcactcccccttggggcccctgatgcgggagctgccctggcaggtaaattgcgcagcggcgaccgatccatggtcgaagttttagccgatcacccaggggagctggtgcgtacggactctcccaactttctatgctcggtactccctacccattggagatgtaataagacactgccaattgctttcaaagtggtcgcacttggagatgtgcccgacggcactctggttaccgtgatggccggtaacgatgaaaattactcagctgagttgaggaacgccacagcggcaatgaagaatcaggtcgcccggtttaacgacctccgcttcgtggggagaagcggaaggggcaaaagttttaccctgactataacagtattcaccaatcctccacaagttgctacgtatcaccgggccatcaagattactgtggatggcccgcgcgaaccccgaagacataggcagaagctggacgatcagaccaaacctgggtccctctcttttagcgagcggttatccgagctggaacagcttcgtcgcacagcaatgagagtctcaccacaccatcccgctcctactccaaaccccagggccagtttgaatcacagcaccgcgttcaacccgcaacctcagtctcagatgcaggacacacggcaaatccagccctccccaccttggtcatacgatcagagctatcagtacctgggaagtattgcctctccctccgtgcacccagcaacccccatcagccctggtcgagcttcgggcatgacgactctatctgccgagctctcctcacgcctgagtacagctccagaccttaccgcctttagcgacccgagacaattccccgcactgccttccatatctgatccaaggatgcattatcccggggcctttacttacagccctacaccagtgacctcaggaatcggcattggtatgagtgctatggggtccgcgacgcggtatcacacctacttgcccccgccttacccaggaagctctcaggcacagggcggccccttccaagcctcaagtcctagctatcatctctactatggggcttccgccggatcttaccagttttcgatggtcggtggcgaacgcagcccacccagaatcctgcctccctgcacaaatgcatccactgggtcagccttactgaacccaagtctcccgaatcagtctgacgttgtggaggctgagggaagccactccaactcacctaccaatatggcccccagcgcaaggcttgaagaggcggtatggcgtccatattga

SEQ ID NO: 2450 - RNA, 1080 nt, synthetic construct
  misc_feature 1..1080: note = ACI46041 variant
  source 1..1080: mol_type = other RNA
atgcccctggagctcgaactttgccctggcagatgggtcgggggacagcacccatgtttcatcattgccgagataggtcaaaaccatcagggcgacctggatgtggctaagaggatgatccggatggcaaaagaatgcggggccgactgtgcgaagtttcagaaaagcgagttggaatttaagtttaatcgcaaggctttagagcgaccgtacacctccaagcactcttggggaaagacatatggcgagcataaacgtcacctggagttctcacatgatcagtacagagagctacaaaggtatgccgaagaggttggtattttcttcactgcaagtgggatggacgagatggccgtggaatttctccacgagctgaacgtacccttctttaaggtgggaagcggcgatacgaataacttcccttaccttgagaaaaccgctaagaaaggccggccaatggtcatctcctctgggatgcagtcgatggacacaatgaaacaggtgtatcagattgttaagcccctgaatcctaacttttgcttcttgcaatgtacttcagcatacccactccagcccgaagatgtgaatctgcgcgtcatcagcgaatatcagaaactgtttcctgacataccaatcggatacagtggtcacgagaccggcattgccatctccgtggctgccgtagcgctcggggcaaaggttttagagagacatattacactggataaaacctggaagggatctgaccacagcgcctcccttgaaccgggcgagttggctgaactggtgaggtcagtccggctagtggagcgcgccctcggtagtcccactaaacagctgcttccttgcgaaatggcatgtaacgagaagctggggaaaagcgtggtcgctaaggttaagatcccagagggaacaatattgaccatggatatgctcacggtgaaagtaggcgaacccaaggcctaccctccagaggacattttcaatctggtgggcaaaaaggtcttagtgactgttgaagaggatgacaccatcatggaagaactggtggacaaccatgggaaaaagattaagtcttga

SEQ ID NO: 2451 - RNA, 2715 nt, synthetic construct
  misc_feature 1..2715: note = CCDS14652.1 variant
  source 1..2715: mol_type = other RNA
atgcaggccagccccctgcaaacctcccagcctacaccaccggaggaactccacgctgcagcctacgtgttcactaacgacggccagcagatgagatctgatgaggtcaatcttgttgcgacggggcatcaatcaaagaaaaagcacagtaggaaaagcaagcggcattcctcttcgaaacgccgaaagtcaatgagcagttggctggacaagcaggaagatgctgccgtgacccactccatctgcgaggaacgtattaacaatggacagcccgtagcagacaacgtgttgtctacagcccctccatggcccgatgctactatagcacataatatcagagaggagaggatggaaaacggtcagagccggaccgacaaagtcttatccacagcccctccacaactggtgcacatggctgccgcgggcattccctcaatgagtacccgcgatctacacagcactgttacacataatatcagagaggaaaggatggagaacgggcagcctcagccagacaatgtgctctctaccggaccgacgggcctgattaacatggcagccactcccatccctgctatgtccgcccgggatctttatgcaaccgtcacacacaatgtgtgtgagcagaagatggaaaacgtacaaccagctcccgacaatgttctgttgactctccgccctcgaagaataaacatgaccgatacaggtatctcaccaatgagcaccagggacccctacgccacgattacttataatgtgccggaggagaaaatggagaaggggcagcctcagcccgataacatcctgagtacagcgtctaccggactgattaacgtcgccggcgcaggcactccagctatctccacaaatgggctctacagcaccgtgcctcataacgtgtgcgaagagaaaatggagaatgaccaaccccagccaaacaatgtcttatcgacggttcagcccgtgataatttatctgaccgccacaggaatccctggtatgaacactcgggaccagtacgctaccattacacacaatgtatgtgaagaacgtgtggtcaacaatcaaccacttccgtctaacgccttgtccactgtgctgcccggcctagcatatctcgccaccgctgatatgcctgcgatgtcaacacgcgaccagcacgcaaccatcatccataatctgagagaagagaagaaggataacagtcagccaactcccgacaatgttcttagcgccgtgacgcctgaactgattaacttggctggggccggaataccacccatgtccacaagggatcagtacgcaaccgtcaatcaccatgtgcacgaggcccggatggagaacggccaacgaaaacaggacaacgtactctctaatgttctgagcggtttaatcaacatggctggggcctcaattccggcaatgagttcccgcgatctgtacgcgactatcacccatagcgtgagagaagagaagatggaatctggaaaacctcagacagacaaggtcatatcaaatgatgctccacagctcggccacatggccgcaggcgggattcccagtatgagcaccaaagacctttatgccactgtgacacaaaacgtccacgaggaaaggatggagaataaccagcctcagccctcctacgatctgtctacggtgttgccaggactaacctatctgactgttgctggtatccctgccatgtcgacacgggaccagtacgcaaccgtgacacataatgtacacgaggaaaagatcaaaaacggccaagctgccagcgacaatgtcttttccactgtgcccccagcgttcattaacatggccgctaccggggtttcaagtatgtctacgcgcgatcagtatgcagccgtgacccataatatcagagaggaaaagattaacaatagccagccggctcctggaaacatactctccacagcacccccatggctgaggcacatggccgcggccggcatctcaagcactattacccgtgacctttacgtcacagctactcactctgtgcatgaggagaagatgaccaatggtcaacaggcccccgataactccctgagtacggtacctccagggtgcatcaacttgagcggcgcaggaatctcttgtcggtccacacgagacctctatgctaccgtgattcacgatatacaggaagaggaaatggagaatgaccagactccccctgatggctttctgtcaaacagtgacagcccggaattaatcaatatgacagggcattgcatgccacccaacgccctggattcgttctcccacgactttacctctctaagcaaagatgagctcctgtacaagcctgactcaaatgagttcgcagttggaactaaaaactacagtgtctccgccggtgatccacccgtgaccgtgatgtctcttgtcgaaacagttcctaatacgccgcaaattagccccgctatggcgaagaaaatcaacgacgacattaagtatcagttgatgaaggaggtgagaaggtttggccagaattacgaacgcatcttcatactgctcgaggaagtgcaggggtccatgaaagtaaagcggcaatttgtcgagttcaccatcaaagaggccgcaagatttaagaaagtggttctgattcagcagcttgaaaaggctctgaaggagatcgattcacattgtcacttgaggaaagtgaagcacatgcgcaaacgatga

SEQ ID NO: 2452 - RNA, 2403 nt, synthetic construct
  misc_feature 1..2403: note = AAH01058 variant
  source 1..2403: mol_type = other RNA
atgggcagctccaagaaacacagaggggagaaggaagccgctggaaccacagcagccgcgggtactggcggggctacggagcagccccctaggcatcgggaacacaaaaagcataaacaccgctctggaggctcaggtgggagtggaggcgagcgacgtaagagaagcagggaacggggcggggagcgcggatccggtagaaggggcgccgaggcagaagcccggtcttcgacccatgggcgcgagcgatcacaagctgaaccaagcgagagaagggtgaagcgggagaaacgtgacgatggatacgaagcagccgctagttccaagacatctagcggcgacgcctcctcactgagtatcgaggaaactaacaaactccgcgcgaaacttggtctgaaaccgttggaggtcaatgcaattaagaaggaagccgggaccaaagaggagcccgttacagctgatgtgataaaccctatggccttaagacagagggaagaactgcgggaaaagctagcagctgccaaagagaagcgactcctgaatcagaaacttggaaagatcaaaaccctgggcgaagacgatccatggttggacgatactgcggcctggattgagcgcagcagacagctccaaaaggagaaggacctggcagaaaagagggctaagctgctcgaggaaatggatcaggagttcggcgtatctacattagtggaagaggagtttgggcagcggcgccaggacctgtattccgccagagatcttcaaggattgaccgtcgaacacgctatcgactcattcagggagggtgaaacgatgattctgactctaaaagataagggcgtgctccaggaggaggaagacgttctggtgaacgtcaatcttgtggacaaagagcgtgccgaaaagaacgtagagctgcggaagaaaaagcccgattacttgccttatgcagaagacgagagcgttgatgacctcgcccagcagaaaccacgaagtatcctgtctaagtacgatgaggaattagagggggaaagaccccactcctttaggctggagcaaggaggcaccgctgacggtctccgcgaacgggagcttgaggaaataagagcgaaactgaggttgcaggcacagagcctatcgacagtggggcctcgcctggcctctgagtatctcactccagaagagatggtcaccttcaagaagacaaaacgacgggtgaagaaaatccgtaagaaagaaaaggaggtggtcgttagagctgatgacctgcttccgctgggcgatcaaacccaggacggagattttggctccaggttgcgcgggcggggaagaaggcgagtgtcagaggtagaagaggaaaaggagcccgtgcctcagccactccccagtgacgacacgcgcgtcgagaatatggatattagcgacgaagaggaaggtggcgcccctccacccgggtcccctcaggtgctggaggaagatgaggcagagttagaactgcaaaaacagctagagaagggacggagactcaggcagctgcagcaacttcagcagttgcgtgactctggcgaaaaagttgtggagatcgtcaagaaactggaaagccgccagcggggttgggaggaggatgaagacccggagagaaagggggccattgtgttcaacgctacttcagaattttgcaggacactcggcgagatccccacctacggactggccggcaatcgagaagaacaagaggaacttatggatttcgagcgggacgaggagcgcagtgcaaacgggggatccgagagcgatggtgaagagaatataggctggtctactgtaaacctggacgaagagaaacagcagcaggatttttcagcgagtagcacaaccattttggacgaggagccaatcgttaatagagggctcgctgccgcactgttactgtgtcaaaacaagggactactcgagacgaccgtgcagaaggtcgccagggtgaaagctcctaataagtccctgccctctgccgtctattgcattgaagataaaatggcaatcgacgacaagtactcgcggcgagaggaatacagaggcttcacacaggattttaaagagaaggacggttataagccagatgtgaaaatcgaatacgttgacgagactgggcgcaaacttacccccaaggaggctttcaggcaattgagccatcgttttcacggcaagggatccggcaaaatgaagacagaacggagaatgaagaaactggatgaggaagccctcctgaagaaaatgtcaagttctgacactcctttagggaccgtggcgctgcttcaggagaagcagaaagcccagaagacaccatatattgtattgagcggatccggcaagtcaatgaacgctaacaccataactaaatga

SEQ ID NO: 2453 - RNA, 2877 nt, synthetic construct
  misc_feature 1..2877: note = AAF00087 variant
  source 1..2877: mol_type = other RNA
atgagaacccacacaaggggcgcccccagcgtgttctttatctacctgctctgcttcgtctccgcttatattactgacgagaaccctgaagttatgataccatttacgaatgcaaactacgattctcatccgatgctttatttctcacgggccgaggtggcggaactgcagttgcgcgctgccagtagccacgagcatatcgcagcccgattaaccgaagctgtacacacaatgctgtcctctcccctagagtacctccctccatgggaccccaaggattattcggcacgttggaatgagatttttgggaacaatctgggagcccttgctatgttctgtgtgctgtaccctgaaaacatcgaggccagagacatggcgaaagattatatggaaaggatggcagcccaaccatcatggttggtcaaggacgctccctgggatgaggtgcctctcgcccatagcctggttggttttgcaactgcttacgacttcctgtacaattatctcagtaaaacccagcaggagaagtttttagaagtgattgccaacgcgtccggctacatgtatgagacatcttaccggcgcgggtggggattccagtatctgcacaatcaccaaccaaccaactgcatggcccttttgactggcagcctggtcctaatgaatcagggttacctccaggaagcatatctgtggacaaaacaggtgcttaccatcatggagaagtccctggtattgctcagagaagttacggatgggtcactgtacgagggagtggcttacggcagttatactaccaggagcttatttcaatacatgttcctggtccagcggcattttaacataaatcacttcggccatccgtggctcaagcagcacttcgcctttatgtatcgcacaatccttcccgggttccagcgaactgtggctattgccgactctaactacaattggttttatggacctgagtcccaactggtgttcttggataaatttgtcatgagaaacggttcaggcaactggctagcagaccagatcaggcggaatcgtgttgtggaagggccaggaacccccagcaagggccagcgctggtgtacactgcacaccgagttcctctggtacgatggtagtctgaaatctgtacctccacccgactttgggacgccgactcttcattatttcgaagactggggagtggtcacatacggctccgccctgcctgctgagattaacagatcgtttttgagcttcaagtctggcaaactcgggggaagggcgatctacgatatagtgcaccggaataagtataaggactggattaaaggttggcgaaactttaatgcaggccatgaacaccccgatcaaaactccttcacctttgccccaaatggggttcctttcatcactgaggctctgtacggacccaagtatacattctttaacaatgtgttaatgttctcaccagccgtcagtaaaagctgcttttccccctgggtgggccaggtaaccgaggactgttctagcaagtggtcaaaatacaagcatgatctggcagccagttgccagggtcgcgttgtggctgccgaagagaaaaacggggtcgtgttcattagaggcgaaggagtcggcgcatataatcctcagctaaacctcaagaatgtgcaaaggaacctgatccttttgcacccacagctgctcctgcttgttgaccagatccacctgggggaggaatccccgttggagacggcggctagctttttccataatgtggatgtaccctttgaggaaaccgtcgtggacggagttcacggtgccttcattcggcagcgcgatggcctctacaagatgtattggatggacgatacagggtactctgagaaagcaacttttgcctcagtgacctaccctagaggatatccatacaacggcacaaactatgtcaatgtgactatgcatctgaggagtcccataacccgtgctgcctacttattcatcggtcctagcattgacgtacaatcctttacagtgcacggggactctcagcagctggatgttttcatcgcaacctcgaagcacgcttatgccacttacctatggacgggcgaagcgacaggacagagcgcctttgctcaagtcatagcagaccggcataaaattctcttcgatcgaaactccgccatcaagtcaagtatcgtgccagaggtgaaagactatgctgccattgtcgagcagaatctgcagcacttcaagcccgtttttcagcttttggaaaagcaaatcctgtctagagtgaggaacaccgcgagcttccgcaaaactgcagagcggctcctgagattttccgataagaggcagaccgaagaggccattgaccgcatattcgctatctcacagcaacagcagcagcaaagcaaatctaagaaaaatcgacgggccggcaagcgttacaagtttgtggatgcagtaccggacattttcgctcagatcgaagtcaacgagaaaaagatcagacagaaagcccagattttagcacaaaaggagctgcctatagatgaagacgaggaaatgaaagatcttttggactttgccgatgtgacatacgagaagcataagaatgggggactcatcaaaggtaggttcggccaggctcgcatggttaccactacacactcccgggcgccaagtctgagcgcctcttatacgagactatttctgattctcaacatcgcaattttctttgtgatgctggctatgcagcttacctacttccagagggcccaatccttgcatgggcagcgatgtctgtatgccgtcttactcatcgactcatgcatactgctttggctgtacagtagctgttcgcagtcccaatgctga

SEQ ID NO: 2454 - RNA, 2892 nt, synthetic construct
  misc_feature 1..2892: note = AAH93784 variant
  source 1..2892: mol_type = other RNA
atggccaccgctgcagagacaagcgcctccgaacccgaggcggaatctaaggctggccctaaagccgacggggaggaagatgaggtgaaggcagccagaactaggcggaaagtcctgtcacgcgctgttgcagccgctacgtacaagaccatgggaccagcctgggaccagcaagaggaaggtgtgagtgagagcgatggcgacgaatatgcgatggcatcctctgccgagtcgtcaccgggggagtacgaatgggagtatgatgaagaggaagagaaaaaccagctcgagatcgaacgacttgaggaacagctgagcattaatgtatacgactataactgccacgtggatttgatacgtttactgagactagagggagaactcacaaaggtcaggatggctcggcagaagatgagtgagatcttccccctgactgaggaactttggctggagtggttgcatgacgaaatttccatggcccaagatggcctcgaccgcgagcacgtgtacgatctgtttgaaaaagcagttaaggactatatctgtcctaatatttggctggagtacggtcagtactctgtcgggggaatcggccagaaaggcgggctcgagaaggtgagaagcgtgttcgaaagggctttatcctcagtaggactgcatatgaccaaaggtcttgccttgtgggaggcgtatcgggaatttgagagtgccatagttgaggcagctcgcctggaaaaggtgcacagcctattccgaagacagctcgccatcccactgtacgatatggaggctacatttgccgaatatgaggaatggtctgaggaccccattcctgagtccgtcatccaaaactacaataaggcacttcagcagctggaaaaatataagccatacgaggaagccttgctccaggctgaggcgcccaggctggcagaatatcaagcctacattgacttcgagatgaaaatcggcgatcctgctcggatacagttaatttttgagcgtgccctggtggaaaactgcctcgtgccagacctttggatccgctactcacagtatctggatagacaattgaaggtcaaagacctagttctgagcgtgcataatagggcaattcggaactgtccgtggaccgtagccctctggagtcgatacctgcttgctatggagcgccacggggtggatcaccaggtcatctctgtgactttcgaaaaggccctgaatgcaggatttatccaggcgacagactatgttgagatttggcaggcttacttggattatctcagaaggcgggtggacttcaaacaagattccagcaaggaactggaggagttacgcgccgcatttaccagagccctggaatacctaaagcaggaggtcgaagagaggttcaacgagtcgggcgacccctcttgcgtgataatgcagaattgggctcgtatcgaagcccggctctgtaacaatatgcagaaagcacgagagctgtgggattccattatgacgagaggtaacgctaagtatgccaatatgtggcttgaatactacaacttggagagggcgcatggggacactcaacactgccgcaaagccctgcatcgggctgtacagtgtacctcagactatcctgaacacgtttgcgaggtgctcctgacaatggagagaactgaaggaagtcttgaggattgggacatcgcagtccagaagaccgaaacaaggctggcccgcgtgaacgagcagcgaatgaaagctgccgaaaaggaggcagcgttggtccaacaggaggaagagaaggccgaacagcggaaacgtgctagagccgagaagaaagcactcaagaaaaagaagaaaataaggggcccagaaaagcgcggcgctgatgaggacgatgagaaagaatggggagacgatgaggaagaacagcccagcaagcggagaagggtggaaaattccattcctgccgcaggggaaacccaaaacgttgaggtggccgctggtccagcgggcaaatgtgccgcagtagacgtcgaacccccgtctaagcagaaggagaaagctgccagcctgaagcgagatatgcctaaagtgttacacgactcaagtaaggattccatcacggtttttgtgagcaatctgccctactctatgcaggaaccagacactaaactacgccctctcttcgaggcctgcggggaggtcgtgcaaatccggcccattttctcaaacagaggagattttaggggctattgttacgtagagttcaaggaggagaaaagtgctctgcaggcacttgagatggaccgtaagagcgtggaaggtcgcccaatgtttgtttccccctgcgtcgacaagtctaaaaatcctgatttcaaggtgtttcggtattcgaccagcttggagaaacataagctgttcatctccgggctcccattttcatgcacaaaagaggaactggaggaaatttgtaaggcccacggcactgtgaaggacttaagactggtcacaaacagggcgggaaaaccgaagggccttgcttacgttgagtatgaaaatgagagtcaggcctctcaggcagtgatgaaaatggatgggatgaccataaaggagaacatcattaaagtggccatcagcaatccccctcaacgaaaggtaccagaaaagcccgagacgcggaaagctcctggaggtccaatgttgctcccccagacctacggcgcacgcgggaagggaagaacacagctgtccctactgccgagggccctccagcggccttcagcggctgccccacaagcagaaaacggccccgccgctgcccctgcagtcgctgcccccgcggccactgaggcaccaaaaatgagcaatgctgacttcgccaagctgtttcttcgaaaatga

SEQ ID NO: 2455 - RNA, 2283 nt, synthetic construct
  misc_feature 1..2283: note = AAC51668 variant
  source 1..2283: mol_type = other RNA
atgaagacctgggtgaaaatcgtcttcggcgttgccacaagcgctgtgctggcactccttgtaatgtgcattgtgctgagaccctccagggtccacaactctgaggaaaatactatgcgggccttgacgttaaaggacatactgaacgggaccttttcatacaaaacattctttcctaattggatcagtggacaggagtatctacatcaaagcgcggataacaatattgtgctctacaacatcgaaactggtcagtcctataccattctgtctaatcgcacaatgaagtcggttaacgcttcaaattacggccttagcccagaccgacagttcgtgtatctggagagtgattactccaaattgtggcgttattcttacaccgccacttactatatctacgacctcagcaacggggaatttgtcagaggaaatgagctgccgaggcccatacagtatctgtgttggtcccctgtgggctcaaagctcgcatacgtatatcaaaacaatatctacttaaagcagcggccaggtgatccccctttccagattacatttaacgggcgcgagaataaaatcttcaacggcattccagactgggtttatgaagaggaaatgctggccaccaagtacgctctttggtggagtcccaacggaaaatttttggcatacgccgagttcaatgatacggacatccctgtgatagcttatagctactatggcgatgagcagtacccaagaactattaacatcccgtatcccaaggccggggcgaaaaatcctgtcgtgaggatttttatcatcgacaccacatacccagcatatgtgggaccccaagaagtccctgttccagccatgattgcttcttccgattactacttctcatggctgacttgggtgaccgacgagcgggtatgcctacagtggctcaagcgcgtgcagaacgtcagcgtgctgagtatatgtgattttcgagaagactggcagacatgggactgccccaagacccaagagcacatcgaagagtctagaacgggttgggccggcgggttcttcgtttccactccggtgtttagctatgatgcaatttcgtactataaaatcttctctgacaaggatggatacaaacatatacactatattaaggacacagtcgagaatgctatccagatcacctccggcaaatgggaagccattaacatctttagggtgactcaggattcacttttctacagtagcaatgagtttgaagagtatcctggtcggcgtaacatttaccgcatatccatcgggtcttatcccccaagcaagaaatgtgtaacatgccatctgagaaaggaaaggtgtcaatactacaccgcgtcattcagtgactatgccaagtactatgcattggtttgctacggacctggcattcccatctccacgctccacgatggccggaccgaccaggagatcaaaattctggaggaaaataaggagttagaaaacgctctgaaaaatatacagctcccaaaggaggaaatcaaaaagctggaggtggatgagattacactttggtataagatgatcttgccccctcagtttgaccgaagcaaaaagtacccactactgattcaagtctacgggggaccgtgttctcagtcagtgcgcagtgtcttcgccgtgaactggatcagctatctcgcttccaaagaaggtatggttatagccctggtggatggcagagggactgcatttcagggagacaaacttctgtacgccgtatataggaagttgggcgtctacgaggtggaagaccagatcaccgctgttcggaagttcattgagatgggttttatcgatgagaagcgcattgcgatctgggggtggtcttatggcggatacgtgtcgagcctcgcactggcctccggcacagggttattcaaatgcggaatagctgtcgcccccgtgtcaagttgggaatattacgcatctgtatacactgagagatttatgggtctgcctaccaaggacgataatctagaacactataaaaacagcacagtgatggccagggctgagtacttccgtaatgttgactatctcctgattcatggcaccgccgatgacaacgtccacttccaaaactccgcacagatcgcgaaggctcttgtgaatgcccaggtggattttcaggcaatgtggtactcagaccaaaaccatgggttgagcggactgtctactaatcacctctatacgcacatgacacatttcctgaaacagtgtttttcccttagtgattga

SEQ ID NO: 2456 - RNA, 1128 nt, synthetic construct
  misc_feature 1..1128: note = CCDS32839.1 variant
  source 1..1128: mol_type = other RNA
atggacgccctgcagctcgctaacagcgcattcgccgtggatctttttaagcaactgtgcgagaaagaacccttgggcaatgtcttattctcccctatctgtctgtctacctcactaagtctcgcgcaggttggggctaagggagacacagccaacgagattggtcaggtgctgcactttgaaaatgtaaaagatgtgccattcggctttcagactgtcacgagcgacgtgaacaaactttcctctttctactcgctgaaattgataaagagactctatgttgataagtcactgaatctgagcaccgagtttatcagttccacaaaaaggccgtacgcaaaggaactcgagactgtggacttcaaagataagttagaggaaaccaaagggcaaattaacaattctatcaaggacctgacagatggacattttgagaacattcttgccgacaatagcgtcaacgatcagaccaagatcttggtggtaaatgctgcatatttcgttggcaaatggatgaagaaattttccgaatcagagactaaggagtgccccttccgggtgaacaaaacagacaccaagcctgtccagatgatgaatatggaagccacgttttgtatgggtaacatagatagtatcaattgcaaaattatcgagctgccattccagaacaagcacctaagcatgttcattctcctgcccaaggacgtggaagacgagtctactgggcttgaaaagatcgagaagcaactgaactccgagtcattgagccagtggaccaatcctagtacaatggctaacgccaaagtgaagctctctataccaaaatttaaggtcgaaaagatgattgatcccaaagcgtgtctggagaatttaggactgaagcatatcttctccgaagacactagcgatttttcgggcatgtctgagaccaaaggcgttgcactctccaacgtgattcacaaggtatgccttgaaatcacagaggacgggggagattcaatcgaggtgcctggtgcccgcattctgcagcataaagacgaattgaatgctgatcacccattcatatacatcattcgacacaacaagacccgtaatatcatatttttcggcaagttttgtagtccgtga

SEQ ID NO: 2457 - RNA, 1002 nt, synthetic construct
  misc_feature 1..1002: note = AAH06564 variant
  source 1..1002: mol_type = other RNA
atggcctgcagcagacccccttcccagtgtgagccaacctctctgccgcccggccctccagctgggaggcggcacctccccctttcacgccgacgtagagaaatgagtagcaacaaggagcaaaggtccgcagtgttcgtcatcctgtttgccttgattacaatattaatcctgtactcttcaaattcggcgaacgaagttttccattatggaagcctacggggtcgcagtagaaggcctgtgaatctcaaaaagtggtccattactgacggctacgtaccaatcctggggaacaaaacgcttccctctcggtgccaccagtgtgtgattgtcagctcctcaagtcatctgttgggaaccaagctcggccctgagatcgaacgcgctgagtgcacaatacgaatgaatgatgccccaactaccggttatagcgcagacgtggggaacaaaacaacctacagagttgtggcccactcttccgtctttagggtgctgcggcgtccgcaggagttcgtaaatcgcactcccgaaacagtttttatcttctggggacctccatcaaagatgcagaagccccaaggcagcctggtgagagtcattcagagggctggcctcgtgtttcctaacatggaggcatatgccgtgagtccagggcggatgcgacagttcgatgacttatttcgcggagaaaccggtaaagatagagagaagtctcattcctggctgagcacgggctggttcactatggtcatcgctgttgagctttgtgaccacgtgcacgtatacgggatggtgcccccgaattattgctcgcagaggcctcggttgcaacgcatgccctaccattactatgaaccaaaaggacctgatgagtgtgtcacctacattcagaacgaacactctagaaagggcaatcatcacaggtttatcacagagaaacgtgtgttctcctcatgggcccagctgtatggtataacttttagtcaccccagctggacctga

SEQ ID NO: 2458 - RNA, 1071 nt, synthetic construct
  misc_feature 1..1071: note = AAC37586 variant
  source 1..1071: mol_type = other RNA
atgagcccctgcggcagagccaggcggcagacctcccgcggggctatggcagtgctggcctggaagttccctcgaacacgtctcccaatgggagcgtctgctctttgtgtcgttgtgctgtgctggttgtacatctttccggtatatagattacccaacgagaaagaaattgtgcaaggtgtcctgcagcagggcactgcctggaggcggaatcagacggcagcccgcgctttcagaaagcaaatggaggactgttgcgatcctgcacacctatttgccatgaccaaaatgaactcaccaatggggaagagtatgtggtacgacggagagttcctctatagctttacaatagataattccacttactctctgttcccccaggctaccccttttcagcttccactgaaaaagtgtgccgtggttggcaacggtgggatcttgaagaaatcgggatgcggcaggcagattgacgaagcgaatttcgtgatgcggtgtaacctgccccctctctcaagcgaatatacaaaggatgtcggcagtaaatcccaactggtgaccgcaaatccatctatcattcgccagcgatttcagaacctcttatggagcagaaagactttcgtagacaatatgaaaatctacaaccattcctatatatacatgccggccttttcaatgaagacagggaccgagcccagtctgagggtttactatacgcttagcgatgtgggagctaatcagactgtcttgttcgccaaccctaattttctgcggtctatcggtaagttctggaaatcccgtggcattcacgcaaagcgcctatcaaccggactcttcctggtgagcgctgcccttgggctgtgcgaggaagtggcgatctacggcttttggccattcagtgtcaacatgcatgagcaacccatttctcaccattattacgacaatgttttgcctttttccggtttccacgccatgccagaagagtttctccagctgtggtatttacacaaaatcggggcactgagaatgcagctcgatccctgtgaggacacaagccttcaaccgacttcgtga

SEQ ID NO: 2459 - RNA, 1257 nt, synthetic construct
  misc_feature 1..1257: note = BAG50894 variant
  source 1..1257: mol_type = other RNA
atgagaaccaaggccgctggctgcgcagaaaggcggcccctgcagcctcgcacagaagccgcggctgccccagcagggcgagccatgccgagcgagtacacttatgtgaaactccgttccgactgttctagaccctcacttcaatggtacacgagggctcagagtaagatgcggcgccctagcctgttgttaaaagatatcctgaagtgcaccctactcgtcttcggagtttggattctgtatatacttaaactgaactacacaactgaagagtgtgacatgaagaagatgcactatgtggatccagaccatgtaaaaagagcacagaagtacgcccagcaagtgttgcagaaagaatgcaggcccaagtttgctaaaacctccatggccctcctgttcgagcaccggtattctgtcgatctgctcccttttgtgcagaaggcgccaaaggactcggaggcagaatcaaaatacgatccccctttcggttttcgcaagttcagcagtaaagttcagacattactggagcttttgccagaacatgacctgccggagcacctaaaggccaaaacctgtcgaagatgcgtggtcatcggctccgggggcattctccatggactggagcttggtcacactctgaatcaatttgatgtggtaatcaggttgaactctgctcccgttgaagggtacagcgagcacgtgggaaataagacaaccattcggatgacgtatcctgaaggcgccccactctccgacctggagtactattcaaacgatttattcgtcgcagtgctgtttaaaagtgtggacttcaattggctccaggctatggtcaagaaggaaactcttcccttttgggttcgtctgttcttttggaaacaggtggccgagaagatccctttgcagccaaaacatttccgcatactaaaccccgtaatcattaaggagaccgcgttcgatatcctgcaatacagcgaaccgcagtctagattttggggcagggacaaaaatgtgcctacaattggggtcatcgccgtggttctcgcaactcacctgtgtgacgaggtgtcccttgctggattcggttatgatctgaaccagccccggaccccattgcattactttgactcacaatgcatggccgctatgaatttccagacaatgcacaacgtcaccacggaaactaagtttctcctgaagttagtgaaagagggcgtagttaaggatctgagcgggggaatagaccgagagttctga

SEQ ID NO: 2460 - RNA, 1059 nt, synthetic construct
  misc_feature 1..1059: note = EAW56837 variant
  source 1..1059: mol_type = other RNA
atggacttcctgagaaacctctttagccagaccctttccctgggctctcaaaaggagaggttgttagatgaactgacactagagggggtggcccggtacatgcagtcagaacgctgccgacgtgtcatctgtctcgttggagctggtattagtactagcgcaggcatacccgacttcagatccccttctacggggctgtatgataatcttgagaaataccatctgccatatccggaagccatctttgagatttcgtacttcaagaaacaccccgagccatttttcgcgttggctaaggaactctatcctggacagtttaaacccaccatctgccactacttcatgaggctgctgaaggacaagggcctcttactgcggtgttatacacagaacattgatactcttgagcgcatcgccggtttggaacaagaggacctggtggaggcacatgggaccttttacacatcacactgcgtaagcgccagttgtagacatgaataccctctatcctggatgaaagagaagatattctctgaagtgaccccaaaatgcgaggattgtcagagcctcgtcaagcccgacatcgtgtttttcggagaatccctgcctgctaggtttttctcatgcatgcagagtgatttccttaaagttgacctgttgctcgtgatgggcactagcctgcaggtccaaccatttgcatctttaatttccaaggccccgctgtcaacaccccggctccttatcaataaggagaaagctggccagagcgatcctttcctggggatgattatgggattgggtggcgggatggactttgatagtaagaaagcctatcgcgacgtggcgtggctaggagagtgtgaccagggctgcctggcactcgccgaactgcttggttggaagaaagagctggaagatttggtacgaagagagcacgcttctatcgacgcccagtccggggcaggagttccaaaccccagcacctcggcttctcctaagaaatccccacccccggccaaggatgaagcgaggacgactgagcgggagaagcctcaatga

SEQ ID NO: 2461 - RNA, 1170 nt, synthetic construct
  misc_feature 1..1170: note = AAD40850 variant
  source 1..1170: mol_type = other RNA
atggccgagcccgaccctagccacccactggaaacccaggctggcaaggtgcaagaggcacaggattccgactctgattcagaagggggagccgcgggtggcgaggctgacatggatttcctcagaaacctttttagtcagacactgagcttggggtcccagaaagaaaggttactggacgagctaactctcgagggagtcgcccggtacatgcaatctgaacgctgccgacgtgttatctgtctggtgggcgcaggtatttcgacgtcagccgggataccggatttcagaagccccagtaccggactttatgacaatctggagaagtaccatttgccttatccagaagctatctttgagatttcctacttcaaaaagcaccccgagccatttttcgcactcgccaaagaactgtatcctggccagtttaagcccacaatctgccattacttcatgaggctgctcaaggataaaggcttactgcttcggtgttatactcagaacattgacaccttggagcgcatcgctgggctggaacaggaggatctagtagaagcccacggaacattttacacctctcattgcgtgagcgcgtcctgtagacacgagtaccctctctcatggatgaaggagaaaatattcagtgaagtcactccaaagtgcgaggactgtcaaagcctggtgaaaccggatatcgtgtttttcggtgaatctcttcccgcaaggtttttctcctgcatgcagtcagacttcctgaaggttgacttgctcctggtcatgggcaccagcttacaggtgcagccttttgccagtctgatttctaaggctccactctccacaccccggcttctgatcaataaagagaaggccgggcaaagcgatcctttcttgggaatgattatgggcctaggtgggggaatggactttgattcgaaaaaggcatatcgcgacgtagcttggctgggcgaatgtgatcagggctgcctcgccctggcggagcttctggggtggaaaaaggagttggaagacctcgttcgaagagagcacgcctctatcgatgcacagtccggagctggtgtgccaaacccctcaacgagtgccagcccgaaaaagtcccctcccccagctaaggacgaagccaggactaccgagcgggaaaaacctcaatga

SEQ ID NO: 2462 - RNA, 1401 nt, synthetic construct
  misc_feature 1..1401: note = AAH02824 variant
  source 1..1401: mol_type = other RNA
atggccgaggaacaggacctgagcgaggtggaactctcccccgtcggctctgaggaacctagatgcctttcaccagggagtgctccgagcctgggacccgatggtggcgggggaggctccggtttgagggcatctcctgggccaggagagttaggcaaggttaaaaaggagcaacaggacggcgaagccgatgacgataaattccccgtgtgtatccgggaggcggtatcgcaagtgctgtcagggtacgactggaccctagtccctatgccagtgcgcgttaacggagctagcaagagtaaaccccacgtgaagcgacctatgaatgcctttatggtctgggcacaggccgctcgtagaaagctcgcagatcaatatccacatctgcacaacgccgaactttccaaaacactgggtaagttgtggaggctcctgaatgagtctgacaaacggccgttcattgaggaagctgagcgcctgagaatgcagcataagaaagatcaccccgactacaagtatcagcctaggcggcgcaagaacggcaaagccgcgcagggggaagcagagtgcccaggaggcgaagccgagcaaggtgggactgctgccatacaggcacattacaagagcgctcacctcgatcaccgacatcccggagagggctcccctatgtcagacggcaatccagaacaccccagtgggcagagccatggaccgcctacgcccccaaccacacctaaaactgagttacagtctggtaaggccgatcccaaaagagacggcaggtccatgggggaaggaggcaagccacacatcgactttggtaacgtggatattggggagatctcacacgaagtaatgagcaatatggagaccttcgacgttgcggagctggatcaatatcttccccctaacggccatccaggacacgtgagttcttactccgccgcaggctatgggttgggaagcgctctggccgtcgcttcgggtcattctgcctggatttccaaaccgcccggcgtggcactacctacagtgtcaccacccggggtcgacgccaaggctcaggttaagaccgaaactgcgggacctcagggcccaccccactacacagatcaaccgagtaccagccagatcgcatacacgtccctctctctgcctcattatggtagcgcctttccatcaataagtcggccccagttcgactactccgatcaccagcctagcgggccctattacggccactctggacaggcttcaggcctttatagtgcctttagctacatggggccatcccagcgtcctctgtatactgcaatctctgacccctcgccaagcggaccgcagtcccattcacctacccactgggagcagcccgtgtacacaactttgagtcgcccatga

SEQ ID NO: 2463 - RNA, 456 nt, synthetic construct
  misc_feature 1..456: note = AAH32457 variant
  source 1..456: mol_type = other RNA
atgagcatccccttctccaacacccactacaggattcctcagggctttgggaatctgctcgagggacttacaagagaaatactgcgggagcaaccagacaacatcccggccttcgctgcagcctattttgaatctttgttagagaagcgcgagaaaactaatttcgatcccgcggagtggggttcaaaggtggaggaccgattttacaacaatcatgctttcgaagaacaggaacctccagagaaaagtgatcccaagcaggaggaaagccagatttccggcaaagaggaagagacgtctgtcaccatcctggactcgtcagaagaggataaggagaaggaagaggttgccgcagtgaaaattcaagccgcttttcgtgggcacatcgcaagagaagaggccaagaaaatgaagacaaacagcctacagaatgaagagaaagaggaaaacaagtga

SEQ ID NO: 2464 - RNA, 294 nt, synthetic construct
  misc_feature 1..294: note = AAF28420 variant
  source 1..294: mol_type = other RNA
atggacaagcagagctccgccggcggggtgaaaagatctgtcccctgcgattcaaacgaggctaatgaaatgatgcctgagaccccaacaggagacagtgatccgcaacccgcacctaagaaaatgaagactagcgaatcctctacgatcctggttgtgaggtaccggcgcaacttcaaacgaacctcgccagaggaactccttaatgaccacgcccgtgagaacagaattaatcccctgcagatggaggaagaggaatttatggagataatggtagagatccctgcgaagtga

SEQ ID NO: 2465 - RNA, 426 nt, synthetic construct
  misc_feature 1..426: note = AAH62750 variant
  source 1..426: mol_type = other RNA
atggagcagcccaccagctccacaaacggcgaaaagactaaatctccttgcgagtcaaataacaagaaaaatgacgaaatgcaagaggtgccaaacagagtcctggccccggaacagagtctcaagaaaacgaagaccagcgagtaccccatcattttcgtttattaccttaggaaggggaaaaagataaattccaaccagctggagaatgaacagtctcaagagaactcgatcaatcctattcagaaagaagaggatgagggagtggacttgtcagaaggtagcagtaacgaggatgaagacttaggcccatgtgaggggccctccaaggaagataaagacctggattctagcgagggatcctcacaggaggacgaagatctaggcctcagtgagggtagctctcaggactccggggaagattga

SEQ ID NO: 2466 - RNA, 567 nt, synthetic construct
  misc_feature 1..567: note = AAH01003 variant
  source 1..567: mol_type = other RNA
atgaacggcgacgataccttcgccaagagacccagggacgatgctaaagcaagcgagaagcggtccaaagcctttgacgatatcgcgacatacttctctaagaaagaatggaagaagatgaaatattcagagaagattagttacgtgtatatgaaacgcaattacaaggctatgactaaactggggtttaaggtcacgctccctccattcatgtgcaacaagcaggccaccgactttcaaggaaatgatttcgacaacgatcacaatcgacgtatacaggttgaacatccgcagatgacatttggtagacttcacaggatcattcccaaaatcatgcctaagaaaccagcagaggacgaaaacgatagcaagggcgtgtccgaggcctctgggccccagaatgacggaaaacaactgcatcctccaggcaaggctaacatttcggagaaaatcaataagcggtcaggtcccaagcgcgggaaacacgcatggactcatagattgagggaacggaagcagttagtaatatatgaggaaatcagcgatcctgaggaggacgacgaatga

SEQ ID NO: 2467 - RNA, 567 nt, synthetic construct
  misc_feature 1..567: note = AAH16957 variant
  source 1..567: mol_type = other RNA
atgaacggcgacgatgccttcgctagaaggcccaccgtgggggcacagatccctgagaagattcaaaaagcctttgacgatatagcgaagtacttcagcaaagaagagtgggaaaagatgaaggcttccgagaaaatcttttatgtctacatgaagcggaaatatgaagccatgacaaagctgggattcaaagcaactctcccaccgtttatgtgcaataagcgcgccgaggacttccagggtaacgatcttgacaatgatcccaaccgaggcaatcaggttgagcgtcctcagatgacgtttgggagactgcaaggaatttctccaaaaatcatgcccaagaagcctgctgaagagggcaacgactcagaagaggtgccagaggcaagtggtccccagaatgatgggaaagaattgtgtcctccaggaaagccgaccacaagcgagaaaattcacgaaaggtccggccccaagcggggcgagcatgcctggactcaccgcttaagagaaaggaaacagctggtaatctacgaggagatatctgaccctgaagaggatgacgaatga

SEQ ID NO: 2468 - RNA, 567 nt, synthetic construct
  misc_feature 1..567: note = AAC05819 variant
  source 1..567: mol_type = other RNA
atgaacggcgacgataccttcgccagaaggcccacagtgggggctcagatccctgagaagattcaaaaagcatttgacgatatagccaagtacttcagcaaagaagagtgggaaaagatgaaagtctccgagaagatcgtttatgtgtacatgaagcggaaatatgaagcgatgactaagctgggatttaaagctattctcccatctttcatgcgcaataagcgagtaacggactttcagggtaacgatttcgacaatgatccgaaccgtggcaatcaggtgcagagaccccaaatgacctttgggaggcttcagggaatcttccctaaaattatgccaaagaagcccgccgaggagggcaacgtctcaaaagaagtgcctgaggcaagtggtccacagaatgacgggaagcagctgtgccctcccggaaaaccaacaactagcgaaaagatcaacatgatatccggcccgaaacggggcgagcacgcctggacccatcgcttgagagagaggaagcaattagttatctacgaagagatttctgatcccgaagaggacgatgaatga

SEQ ID NO: 2469 - RNA, 567 nt, synthetic construct
  misc_feature 1..567: note = AAC05820 variant
  source 1..567: mol_type = other RNA
atgaacggcgacgatgccttcgctagaaggccccgggacgatgcacagatcagcgagaagctgcgcaaagcctttgacgatattgcgaagtacttctccaaaaaggaatgggagaaaatgaagtcttcagaaaagatagtgtatgtctacatgaaactcaattatgaggttatgaccaaacttgggtttaaggtgacactgcctccattcatgcgaagtaagcgtgctgccgactttcacggaaacgatttcggtaatgacagaaaccataggaatcaagtagaacggccgcagatgacttttggcagcttgcagcgcatcttccccaaaattatgcctaagaagccagcagaggaggaaaacgggttaaaagaggtgcccgaagcctccggacctcagaatgatggcaagcaactgtgcccacccggtaacccttctacgctagagaaaatcaataagacctcggggccaaaaagaggaaagcacgcttggacacataggctccgggagcgcaaacagctggtcgtgtacgaagagatttcagacccggaagaggatgacgaatga

SEQ ID NO: 2470 - RNA, 888 nt, synthetic construct
  misc_feature 1..888: note = CCDS32420.1 variant
  source 1..888: mol_type = other RNA
atggagctgatccaggacaccagcagaccccctctcgaatacgtgaagggcgtcccacttattaaatatttcgccgaggctctggggccgttgcaatcctttcaggcaaggcccgatgacttactgatatctacataccctaagtcaggaactacgtgggttagtcagatcctagatatgatttatcagggtggcgacctcgaaaaatgccaccgggccccaatcttcatgcgcgtgccctttctggagttcaaggcgcctgggattccaagcggaatggaaacccttaaagatacacccgctcctcgactgttgaagactcatctcccactggccctgctcccgcaaaccttactggaccagaaggtaaaagtggtctacgtggcacgtaacgccaaggatgttgctgtgtcctattaccacttttatcatatggcaaaagtccaccccgagcctggcacatgggactctttccttgagaagtttatggtgggtgaagtatcgtacgggtcatggtaccagcatgttcaggagtggtgggaattgagcagaacccacccagtgctgtatctattctacgaggatatgaaagagaatcccaagagggaaatccaaaagatactcgagtttgtcggacggagtctgcctgaagagactgtggacttcgtggtccagcacacatcctttaaagaaatgaagaaaaacccaatgaccaattatacgactgttccccaggagttcatggatcattctatcagcccgtttatgcgcaagggcatggccggcgactggaaaaccacattcactgtggctcagaacgagagattcgatgccgactacgcggaaaagatggcagggtgttccctttcatttaggagtgagctgtga

SEQ ID NO: 2471 - RNA, 3807 nt, synthetic construct
  misc_feature 1..3807: note = CCDS43990.1 variant
  source 1..3807: mol_type = other RNA
atgatcgccgctcccgagattcctaccgacttcaacctgctccaggaaagcgagacacacttttcctctgatactgacttcgaagatatagagggcaagaatcaaaaacaggggaagggaaaaacgtgcaagaaaggtaagaagggcccagcagaaaaagggaagggaggcaacggtgggggaaaaccgccctcaggccctaatagaatgaacggccatcaccagcagaatggggtggagaacatgatgctttttgaggtcgttaagatgggaaaaagtgccatgcaaagcgtggtagacgattggatcgaatcctacaagcatgacagggatattgcgctgttggacttaatcaatttctttattcagtgttctggttgcaagggcgtggtcaccgctgagatgttccggcacatgcagaactcggaaatcatacgcaaaatgacagaggagtttgatgaagactcaggggattatccactgactatggccggaccccagtggaagaaattcaagagcagtttttgtgagttcatcggcgtgctagttcgacaatgccagtactccattatctatgacgaatacatgatggataccgtgatttctctcctgacaggtcttagcgactcccaggtccgtgcatttagacatacctcaactctggccgctatgaaattgatgacagcactcgtgaatgtagccctgaacctgagtatcaatatggacaacacccagaggcaatatgaggctgaacggaataagatgatagggaaacgcgccaacgagagactcgagttactgcttcagaagaggaaggaattgcaggagaatcaagatgaaattgagaacatgatgaacgcgatcttcaaaggagtttttgtgcaccggtaccgcgacgcaattgccgaaatccgagctatctgtattgaggagataggcatctggatgaagatgtatagcgatgccttcctgaatgactcttacctaaaatacgtcggctggacgatgcacgataagcagggggaagtgagactcaaatgcctgactgcacttcagggactgtattacaacaaggagctcaattccaagttggaactgttcacctcaaggtttaaagaccggattgtgagcatgacattagataaggagtatgacgtcgctgttcaggccatcaaactgctcactcttgtgctgcaaagttctgaagaggtattgaccgcggaggattgtgaaaacgtgtaccatctagtctattccgcccaccgtcctgtggcagttgctgccggtgagttcctgtacaagaaactctttagccgcagagacccagaagaggatggcatgatgaagaggcgggggcgacagggacccaatgctaacctggtgaagacacttgtcttctttttcctggagtcggaattgcatgagcacgccgcatatctcgtggactctatgtgggactgcgccaccgaactgttaaaagattgggagtgtatgaactccctgctactcgaagaacctctgtcaggcgaggaagctcttacggaccgccaggagagtgcgttgatagaaattatgctgtgcactatcagacaggcagccgagtgtcacccaccggtaggtagggggacaggcaagcgggttctcaccgctaaagaaaagaaaactcaactggatgaccgcacaaagatcaccgagctttttgccgtggcactgccccagttgctcgccaagtacagcgtcgatgctgagaaagtgacgaatctgttacagctgcctcagtacttcgacctagaaatttataccacaggaagactcgagaagcatctggatgcccttttgaggcaaatccgtaatattgtcgaaaaacacactgacaccgatgtgctggaggcatgctccaagacataccatgcgctctgcaacgaagagtttactatattcaatcgggttgacatctctcgaagccagctgattgatgagttagctgacaaatttaacagactgcttgaagatttcttgcaggagggcgaggagccagacgaggacgatgcctatcaggtgctctcaaccctgaagaggatcacagcatttcacaatgcccatgacctaagtaaatgggatctgttcgcttgtaactacaagctcctgaagaccgggatcgaaaatggagacatgcccgagcaaattgtaatacacgcccttcagtgcactcactatgtcatcttgtggcagctggcaaaaattacggaatccagctctacaaaggaggatttactccgcctgaaaaagcaaatgcgggtgttctgtcagatctgccagcattaccttaccaacgttaacactaccgtgaaagaacaggcttttacaattctgtgtgacatcttgatgatattctcacaccaaatcatgagtggtggcagagatatgctcgagcctctggtctataccccagacagctccctacagtctgagctgctctcgtttattctggatcatgtgttcatcgaacaggacgatgacaataacagcgccgatgggcagcaagaggacgaagcgtccaagattgaggcccttcacaagaggcgcaatttgctggctgcattttgcaaattaatcgtatacactgtggttgaaatgaacacagccgctgacatattcaagcagtacatgaaatattacaatgattatggagacattatcaaggagacgatgtcaaaaacccgacagattgataagatccagtgtgccaagactctcatactgagtcttcaacagctgtttaacgagatgatccaggaaaatggctacaacttcgaccggtctagctccacattttcaggtattaaagagctagcacgtagattcgcgctcacctttgggctggatcaattgaagacaagggaagccatcgctatgctgcacaaagacggcattgagttcgcctttaaggaacccaatccgcagggagagagccatcctcccttaaacctcgcattcctggatatcctttctgagttctccagtaaactgttgcgccaggacaagcggactgtctatgtgtacctcgaaaagtttatgaccttccagatgagcctgagaagggaggatgtgtggctaccactgatgtcttatcgaaattcccttctcgctggcggggacgatgacacgatgtcagtcataagtggaattagctcgcgcggttccaccgttcggtctaaaaagagcaaaccttcaacaggcaagagaaaagtggtggaagggatgcaactgagtttgactgaggagtcctctagctccgactcaatgtggctgagcagggaacagaccttacacacacccgtaatgatgcagactccacagctcaccagtacgatcatgcgtgagcccaagcgcctgcggcctgaagattcttttatgtccgtctacccaatgcaaacagagcatcaccagaccccgcttgactacaacactcaggtgacatggatgctggcccagagacaacaggaagaggcaaggcagcagcaagagcgagccgctatgagctatgttaaattgcggaccaatctccagcatgcgatccgcagaggaacttcgctgatggaagatgacgaggaacccattgtggaggatgtcatgatgtcatctgaaggcaggatcgaggacctaaacgagggtatggatttcgacaccatggatattgacctgcctccaagtaagaatcggcgagaaagaacagagcttaagcccgactttttcgatcctgcctccataatggatgaaagcgtgctcggggtttctatgttttga

SEQ ID NO: 2472 - RNA, 1473 nt, synthetic construct
  misc_feature 1..1473: note = CCDS5615.1 variant
  source 1..1473: mol_type = other RNA
atggagagcatctccatgatgggctctcccaagtcactgagtgaaaccttcctccctaacgggattaatggaataaaagacgccagaaaggtgacagtcggtgttatcggcagcggggattttgctaaatcccttactattaggctgatccggtgcggataccacgtggtaattggctctcgcaacccaaagttcgcatcggagtttttcccgcatgtggtcgacgtgacgcaccatgaagatgccttgaccaaaacaaatatcatatttgttgcgatccaccgagagcattatacttcattatgggacctgcgtcacctactcgtgggtaagattctgatcgatgtcagcaacaatatgagaattaaccagtaccccgaaagtaatgctgagtatcttgcctccctgttccctgactctttgatcgtgaaggggtttaacgtagttagcgcatgggccctccaactgggaccaaaagatgcttccaggcaagtgtacatatgttcaaataacattcaggcacggcagcaggtcatcgagctggcccgccagctcaatttcattcccatcgacttaggcagtctgagctctgctagagaaatcgagaaccttcctttgaggctgtttaccctatggcggggcccagtggtggtcgccatttccctcgcgacattctttttcctgtattcatttgttcgcgatgtgatacacccctacgcacgaaatcagcagagcgacttctataagatccctattgaaatcgtaaacaaaacccttccaatagtggccattactctgttgagtctcgtctacctggctgggttactggccgcagcttaccaactctattacggaacaaagtatagaaggttcccgccctggcttgagacctggctgcagtgccggaaacagttgggtctactgagctttttctttgccatggtgcatgttgcgtactccctctgtctgcctatgcgtcgcagcgagagatatcttttcctgaatatggcctaccagcaagtgcacgcaaacatcgaaaactcgtggaatgaggaagaggtctggaggatcgaaatgtatatttcttttggcatcatgtccttggggctcctgtcattactggctgtgacgagtattccaagcgtatccaacgccctaaattggcgggagttctcttttatacagagcactctcggatacgttgctctgcttatctcaaccttccatgtgttgatttacggctggaagcgagcctttgaggaagagtattaccgcttctatacaccccctaactttgtcctggcactcgtgctgccaagtatcgtcatccttggtaagattatactgttcttgccctgcatctccagaaaactcaagaggattaaaaaggggtgggaaaaatctcagtttctggaggaaggaatgggcggcactatcccgcacgtgtctcctgagcgggttaccgtgatgtga

SEQ ID NO: 2473 - RNA, 777 nt, synthetic construct
  misc_feature 1..777: note = EAW93749 variant
  source 1..777: mol_type = other RNA
atggagagcagaaaggacatcaccaaccaggaagagatttggaaaatgaagcccaggcggaatctggaagataacgactacctccacaaagatacaggcgagacttccatgcttaagcgccctgtgctgttgcatttacaacagacggcccacgctgacgagttcgattgcccatctgaactgcagcatgcacaggagctatttccgcaatggcacctccccataaaaatcgccgcggtcatggcttcactgaccttcctttatacactgttgcgagaagttattcatcctctcgccaccagtcaccagcagtacttttataagatcccaattctggtgatcaataaggtactgcccatggtgagcataactctcttagcactggtctaccttcctggggtgatcgccgctattgttcaggtgcacaacggaacaaaatataagaaattcccacattggttggacaagtggatgctgacccgtaaacaatttggtctactctccctgttctttgcagtccttcacgccatctacactctgtcttatgctatgagaaggtcgtaccggtacaagttgctcaattgggcctatcaacaggtgcagcagaacaaggaggatgcgtggattgaacatgacgtatggcgcatggagatctacgtttcactgggcatagtggggttagcaattctggccctccttgctgtcacaagcatccccagtgtgtccgattctctgacctggagagagttccactatattcaggtgaataacatctga

SEQ ID NO: 2474 - RNA, 1020 nt, synthetic construct
  misc_feature 1..1020: note = AAD15620 variant
  source 1..1020: mol_type = other RNA
atggagagcagaaaggacatcaccaaccaggaggaactgtggaaaatgaagcccaggcggaatctcgaagaggatgactaccttcacaaagatacaggcgaaacttccatgctgaagcgccctgtgttgttacatctgcaccaaacggcccatgctgacgagttcgattgcccatctgagctacagcacacccaggaactctttccgcagtggcatctgcccattaaaatagcagccatcattgcgtcacttacattcctgtatactttgctccgagaggtcatccaccctctggctaccagtcaccaacagtacttttataagattccaatcctggttataaacaaggtgctccccatggtaagcatcacattactggcccttgtgtacttgcctggggtcattgcagccatcgtgcagctgcataatggaaccaaatataagaaattcccacactggctagacaagtggatgctcactcgtaaacagtttggtctgctttccttctttttcgctgttctgcatgcaatttactctttgtcgtatcccatgagaaggtcataccggtacaagctcctgaactgggcctatcaacaggtgcagcagaataaggaagatgcttggatcgagcacgacgtctggcgcatggagatatacgtgagcttaggcattgtagggctggccatcctcgcgcttctggcagttacaagtattccttccgtgtctgatagcttgacctggagagaatttcactatatccaatccaaactaggaatcgtctcactgctcctgggcacgattcatgcccttatattcgcttggaacaagtggatcgacattaaacagtttgtgtggtacactccaccgaccttcatgatcgccgtgtttctgcccatagtcgttttgattttcaagagtatcctcttcctgccttgtttaaggaaaaagatcctgaaaattcggcacggttgggaggatgtgacaaagatcaataagactgaaatttgcagccagctatga

SEQ ID NO: 2475 - RNA, 498 nt, synthetic construct
  misc_feature 1..498: note = CCDS32752.1 variant
  source 1..498: mol_type = other RNA
atgggcgcccccaccctgcctccagcttggcagccgttcctcaaggaccacagaatcagcacatttaaaaactggcccttccttgaggggtgcgcatgtactcctgaaaggatggccgaggcgggatttattcattgcccaacggaaaatgagcccgatctggctcaatgtttcttttgcttcaaggaattggagggttgggagcctgacgatgacccaataggccccgggaccgtggcctacgcatgtaacacatccactttaggaggccggggtgggcgcatcacccgagaagaacacaaaaagcattcttcaggatgcgcctttctgagtgtcaaaaagcagttcgaggagctaacactcggcgagtttctgaaacttgatcgtgaaagagctaagaataagattgcaaaagagaccaacaataagaaaaaggagttcgaagaaactgccgagaaggttaggcgggctatcgagcagctggccgcgatggactga

SEQ ID NO: 2476 - RNA, 429 nt, synthetic construct
  misc_feature 1..429: note = AAC51660 variant
  source 1..429: mol_type = other RNA
atgggcgcccccaccctgcctccagcttggcagccgttcctcaaggaccacagaatcagcacatttaaaaactggcccttccttgaggggtgcgcatgtactcctgaaaggatggccgaggcgggatttattcattgcccaacggaaaatgagcccgatctggctcaatgtttcttttgcttcaaggaattggagggttgggagcctgacgatgacccaatagaagaacacaaaaagcattcctctggctgtgcctttttatcagtgaaaaagcagttcgaggagctgaccctaggggagtttctcaagctggatcgggaacgcgccaaaaacaagatcgcaaaagagacaaataacaagaaaaaggagttcgaagaaactgctaagaaagtccgacgtgcaattgagcagcttgccgctatggactga

SEQ ID NO: 2477 - RNA, 2931 nt, synthetic construct
  misc_feature 1..2931: note = EAW56623 variant
  source 1..2931: mol_type = other RNA
atggagaagcagaaacccttcgccctgtttgtgcctccaagaagctcctcttcacaagtcagtgctgttaagccgcagaccctcggcggggacagcacattctttaaatccttcaacaagtgcactgaagatgactttgagttcccctttgcaaaaacgaatctttctaagaacggagaaaatatcgattcggaccctgccctgcagaaggtgaacttcttgccagtattagaacaggtgggtaattcagattgtcactaccaagaaggcctgaaagacagcgatctagagaacagtgaggggctctccagggtctattctaagctgtacaaagaagcggagaagattaaaaagtggaaggtgagcaccgaagctgagcttcggcagaaagagtccaagctgcaggaaaatcgcaaaataatcgaggcccagcgaaaggcaattcaagaattgcagtttggaaacgagaaagtttcactcaagctggaagagggcatccaggagaataaagacctgattaaggaaaacaatgccacacgtcatctctgcaacttactgaaggagacttgtgctagaagtgcagagaaaaccaagaaatatgagtacgaaagggaggagacacgccaggtgtatatggatcttaataacaatatcgaaaagatgataaccgccttcgaggaattgcgggtccaagctgagaacagcagactggaaatgcactttaaactaaaggaggactacgagaagatccagcatctcgaacaggagtataaaaaggaaattaacgataaagagaagcaagtgtctctgcttctgatccagattactgagaaagaaaataagatgaaggacttgacattcctcctggaggaatccagggataaagtaaaccagttagaggaaaagaccaaactgcagtcagagaatctcaagcaaagcatcgagaaacagcaccatcttacgaaggaactggaggacataaaggttagtttgcagcggtctgtgtccactcagaaagccctagaagaggacctgcaaattgcgaccaagacaatctgccagctcactgaagagaaagagacccagatggaagagagcaacaaggcacgcgccgctcactcgtttgtcgtgacagagttcgaaaccacggtgtgttctctggaggaacttctgcgaactgagcagcaaagattggagaaaaatgaagatcagctcaagattctgacaatggaattacagaaaaagtcctcagagctggaggaaatgaccaagctaactaacaataaagaggtcgaactcgaggaactgaagaaagttcttggtgagaaggagacattgctgtacgaaaacaaacagttcgagaagatcgccgaggaactcaaggggaccgaacaagagctgatcggacttctgcaggcaagggagaaagaagtgcacgacttggagattcagctcacggctataaccacaagtgaacaatactatagcaaggaggtaaaagatctgaagactgaattagagaatgagaaactgaagaacaccgaactaacatcccattgcaataagctctctctggagaacaaagaacttactcaggagaccagcgacatgacattggagctgaagaatcagcaggaagatatcaacaataacaaaaagcaagaggaacggatgctcaaacagattgagaacctgcaggaaaccgagactcagttacgtaatgagctggaatacgtgcgcgaggaacttaagcaaaagagagacgaggtcaaatgtaagttggataaatcagaagagaactgcaataacctcaggaaacaggtggagaataaaaacaagtatatcgaggaactgcagcaggaaaataaagccctaaagaagaaaggcacggcggagagtaagcaactgaacgtttacgaaataaaagtgaataagctcgagctggagcttgaatccgccaaacagaagtttggcgagattacagacacctatcagaaggaaatcgaggataaaaagatcagcgaggaaaacttgctggaggaagtcgagaaagcaaaggtgattgctgacgaagccgtaaaattacaaaaggagatcgataagcggtgtcagcacaaaattgctgagatggttgccctcatggaaaagcataaacaccagtacgacaagataatcgaggaacgagactctgagctggggctttataaatcaaaggaacaggagcaaagtagcctgcgcgcatccttggagattgaactctctaatctgaaggccgagctactgtcggtgaaaaagcagctcgaaatcgagagagaagagaaagagaagctgaaaagggaagctaaggagaacactgcgacccttaaggagaaaaaggataaaaagacacagaccttcttgctggaaactcccgagatctactggaaattagacagcaaggcagtcccttcccagacagtgtcacggaattttacgagtgtcgatcacggaatttctaaagacaagcgcgattacctctggaccagcgccaagaacactctgtccacaccacttcccaaggcttataccgtgaagacacctactaaaccaaagctgcaacagagagaaaatctaaacataccgatcgaggaaagcaaaaagaagaggaaaatggccttcgagtttgacattaactcagattcttccgaaaccacggacctcctgagtatggttagcgaggaggaaaccttgaagacactgtaccgtaataacaatccccctgcatctcatttatgcgtgaaaactccaaagaaagccccctcctcactcaccacacctggtagtactctgaagttcggcgctatccggaagatgcgagaggatagatgggccgtaattgcaaaaatggacaggaagaagaaacttaaagaagcggagaagctgtttgtctga

SEQ ID NO: 2478 - RNA, 2931 nt, synthetic construct
  misc_feature 1..2931: note = AAI44020 variant
  source 1..2931: mol_type = other RNA
atggagaagcagaagcccttcgccctgtttgtgcctccaagaagctcctcttcacaagtcagtgctgttaagccgcagaccctcggcggggacagcacattctttaaatccttcaacaagtgcactgaagatgactttgagttcccctttgcaaaaacgaacctttctaagaacggagaaaatatcgattcggaccctgccctgcagaaggtgaacttcttgccagtatttgaacaggtgggtaattcagattgtcactaccaagaaggcttaaaagacagcgatctggagaacagtgaggggctatccagggtctattctaagctctacaaagaagcggagaagattaaaaagtggaaggtgagcaccgaagctgagctgcggcagaaagagtccaaacttcaggaaaatcgcaaaataatcgaggcccagcgaaaggcaattcaagaactgcagttcggaaacgagaaagtttcattgaagctcgaagagggcatccaggagaataaagacctgattaaggaaaacaatgccacacgtcatctgtgcaacctcttaaaggagacttgtgctagaagtgcagaaaagaccaagaaatatgagtacgaaagggaggagacacgccaggtgtatatggatctgaatagcaacatcgaaaagatgataaccgcctttgaggaacttcgggtccaagctgaaaattctagattggaaatgcacttcaaactgaaggaggactacgagaagatccagcatctagaacaggagtataaaaaggaaattaacgataaagagaagcaagtgtccctcctgcttatccagattactgagaaagaaaacaagatgaaggacctgacatttttgctcgaggaatcaagggataaagtaaatcagctggaggaaaagaccaaattacagagcgagaacctgaagcaaagtatcgagaaacagcaccatctcacgaaggaacttgaggacataaaggtttctctgcagcggtccgtgagcactcagaaagccttggaagaggacctacaaattgcgaccaagacaatctgccagctgactgaagagaaagagacccagatggaagagtcgaataaggcacgcgccgctcactctttcgtcgtgacagagttcgagaccacggtgtgttccctcgaggagctgcttcgaactgagcagcaaagactggaaaagaacgaggatcagttgaagattctcacaatggaactgcagaaaaagtcaagtgagttagaggaaatgaccaagctgactaataacaaagaggtcgaactagaggaactcaagaaagttctgggtgagaaggagacacttttgtacgaaaataaacagtttgagaagatcgccgaggaactgaaggggaccgaacaagagctcatcggactgcttcaggcaagggagaaagaagtgcacgacctggagattcagttgacggctataaccacaagcgaacaatactattccaaggaggtaaaagatctcaagactgaactggagaacgagaaattaaagaataccgaactgacatctcattgcaacaagctaagcctcgagaataaagaactgactcaggagacctcagacatgacacttgagttgaagaaccagcaggaagatatcaataacaataaaaagcaagaggaacggatgctgaaacagattgagaacctccaggaaaccgagactcagctgcgtaacgagttagaatacgtgcgcgaggaactgaagcaaaagagagacgaggtcaaatgtaaacttgataaaagtgaagagaattgcaacaatttgaggaaacaggtggagaacaaaaataagtatatcgaggaactccagcaggaaaacaaagccctgaagaagaaaggcacggcggagtccaagcaactaaatgtttacgaaataaaagtgaacaagctggagctcgagctggaaagcgccaaacagaagttcggcgagattacagacacctatcagaaggaaatcgaggataaaaagatctctgaggaaaatcttttggaggaagtcgagaaagcaaaggtgattgctgacgaagccgtaaaactgcaaaaggagatcgataagcggtgtcagcacaaaattgctgagatggttgccttaatggaaaagcataaacaccagtacgacaagataatcgaggaacgagactcagagctcgggctgtataaaagtaaggaacaggagcaaagctcccttcgcgcatctctggagattgaattgtcgaacctcaaggccgagctgctaagcgtgaaaaagcagctggaaatcgagagagaagagaaagagaagctcaaaagggaagctaaggagaatactgcgaccctgaaggaaaagaaggataaaaagacacagacctttcttttggagactcccgagatctactggaaactggactccaaggcagtcccttcacagacagtgagtcggaacttcacgtctgtcgatcacggaattagcaaagacaagcgcgattacttatggacctccgccaagaatactctctcaacaccactgcccaaggcttataccgtgaagacacctactaaaccaaaacttcaacagagagaaaacctgaatataccgatcgaggaaagcaaaaagaagaggaaaatggcctttgagttcgacattaactctgattccagtgaaaccacggacctactcagcatggtttctgaggaggaaaccctgaagacattgtaccgtaacaataatccccctgcatcccatctgtgcgtgaaaactccaaagaaagccccctcaagtttaaccacacctggtagcactctcaagtttggcgctatccggaagatgcgagaggatagatgggccgtaattgcaaaaatggacaggaagaaaaagctgaaagaagcggagaaacttttcgtctga

SEQ ID NO: 2479 - RNA, 2931 nt, synthetic construct; identical to SEQ ID NO: 2477
  misc_feature 1..2931: note = AAI26267 variant
  source 1..2931: mol_type = other RNA

SEQ ID NO: 2480 - RNA, 330 nt, synthetic construct
  misc_feature 1..330: note = AAI05300 variant
  source 1..330: mol_type = other RNA
atggagaagcagaaacccttcgccctgtttgtgcctccaagaagctcctcttcacaagtcagtgctgttaagccgcagaccctcggcggggacagcacattctttaaatccttcaacaagtgcactgaagatgactttgagttcccctttgcaaaaacgaatctttctaagaacggagaaaatatcgattcggaccctgccctgcagaacgtgaatttcttgccagtattagaacaggtgggtaactcagattgtcactaccaagagggcctgaaggacagcgatctagagaatagtgaggggctctccagggtctattctaaactgtga

SEQ ID NO: 2481 - RNA, 1467 nt, synthetic construct
  misc_feature 1..1467: note = BAF56181 variant
  source 1..1467: mol_type = other RNA
atgagcgtggccttcgctgcacccagacagaggggcaagggggagatcacccctgccgcgattcagaaaatgctggacgataacaatcacctcatacaatgcatcatggactcccagaacaagggaaaaacatctgaatgttcacagtaccaacagatgcttcatactaatctggtctatttggctacgattgccgatagtaaccagaatatgcagagcttactgccagcaccgcccacccaaaacatgcctatgggtccaggcgggatgaatcagtccggaccccctccaccccctcggtctcacaacatgccatcggacggcatggttggtgggggaccgcccgcccctcatatgcagaatcagatgaacggccaaatgccaggccccaatcacatgcctatgcaggggccaggacccaaccagctaaatatgacaaactcaagcatgaatatgccgagttcctctcatggtagcatgggcgggtacaaccactccgtgccttcaagtcaaagcatgcccgtacagaaccagatgactatgtctcagggacaaccaatgggcaattatggtcctcgccccaacatgtccatgcagccaaatcaggggcccatgatgcaccagcaacctccatcacagcagtacaacatgccgcagggaggcggccaacattatcaggggcagcagccccctatgggaatgatgggtcaagtgaatcagggcaaccacatgatggggcagcgacaaatcccaccctaccgtcctccacagcagggacccccgcagcaatatagcggccaggaggattactacggtgaccagtatagtcatgggggccagggacctccagaaggcatgaatcaacagtactatcccgatgggcacaacgactacggatatcagcagccttcttaccccgagcaaggttatgatagaccatacgaagactccagccagcactactatgagggcggaaattcgcagtacgggcaacagcaggatgcttatcagggccctcccccacaacagggttacccgcctcagcagcaacagtatcccgggcagcagggctacccaggacaacagcagggctatgggccctctcagggaggtcctggcccacaataccccaactaccctcaggggcagggacaacagtatggcggttacaggccgacccagccagggccccctcagccaccccaacagcggccttatggctacgaccagattatgccgaagaaacccgcagaggatgaaaatgactccaagggagtctcagaggccagtggcccacagaacgacgggaagcaactccatcctcccggaaaagctaatatcagcgaaaagataaacaaacgctccggcccaaagagaggtaaacacgcctggacacataggctgcgggagcgcaagcagcttgtgatctatgaggaaatttctgatcctgaggaagacgatgagtga

SEQ ID NO: 2482 - RNA, 1374 nt, synthetic construct
  misc_feature 1..1374: note = BAF56182 variant
  source 1..1374: mol_type = other RNA
atgagcgtggccttcgctgcacccagacagaggggcaagggggagatcacccctgccgcgattcagaaaatgctggacgataacaatcacctcatacaatgcatcatggactcccagaacaagggaaaaacatctgaatgttcacagtaccaacagatgcttcatactaatctggtctatttggctacgattgccgatagtaaccagaatatgcagagcttactgccagcaccgcccacccaaaacatgcctatgggtccaggcgggatgaatcagtccggaccccctccaccccctcggtctcacaacatgccatcggacggcatggttggtgggggaccgcccgcccctcatatgcagaatcagatgaacggccaaatgccaggccccaatcacatgcctatgcaggggccaggacccaaccagctaaatatgacaaactcaagcatgaatatgccgagttcctctcatggtagcatgggcgggtacaaccactccgtgccttcaagtcaaagcatgcccgtacagaaccagatgactatgtctcagggacaaccaatgggcaattatggtcctcgccccaacatgtccatgcagccaaatcaggggcccatgatgcaccagcaacctccatcacagcagtacaacatgccgcagggaggcggccaacattatcaggggcagcagccccctatgggaatgatgggtcaagtgaatcagggcaaccacatgatggggcagcgacaaatcccaccctaccgtcctccacagcagggacccccgcagcaatatagcggccaggaggattactacggtgaccagtatagtcatgggggccagggacctccagaaggcatgaatcaacagtactatcccgatgggaactctcagtacggacagcaacaggacgcttatcagggtcctcccccacaacagggctaccctccccagcagcaacagtatccagggcagcagggatacccgggccaacagcagggttacgggccttcccagggcggacccggcccacaatatcccaattaccctcaggggcagggacagcaatatggtggctacagaccaacccagcccgggcctccgcagccaccccaacagaggccttatggatacgatcagattatgccaaagaaacccgcagaggacgaaaacgatagcaagggcgtctcggaggcctctggtcctcagaatgacgggaagcaactccacccgcccggcaaagctaacatctccgagaagataaataaacggtcaggaccaaagcgcggcaaacacgcctggacacatagactgagggaacggaagcagcttgtgatctatgaggaaattagtgatcctgaggaggacgacgaatga

SEQ ID NO: 2483 - RNA, 1467 nt, synthetic construct
  misc_feature 1..1467: note = BAF56183 variant
  source 1..1467: mol_type = other RNA
atgagcgtggccttcgctgcacccagacagaggggcaagggggagatcacccctgccgcgattcagaaaatgctggacgataacaatcacctcatacaatgcatcatggactcccagaacaagggaaaaacatctgaatgctcacagtaccaacagatgcttcatactaatctggtctatttggctacgattgccgatagtaaccagaatatgcagagcttactgccagcaccgcccacccaaaacatgcctatgggtccaggcgggatgaatcagtccggaccccctccaccccctcggtctcacaacatgccatcggacggcatggttggtgggggaccgcccgcccctcatatgcagaatcagatgaacggccaaatgccaggccccaatcacatgcctatgcaggggccaggacccaaccagctaaatatgacaaactcaagcatgaatatgccgagttcctctcatggtagcatgggcgggtacaaccactccgtgccttcaagtcaaagcatgcccgtacagaaccagatgactatgtctcagggacaaccaatgggcaattatggtcctcgccccaacatgtccatgcagccaaatcaggggcccatgatgcaccagcaacctccatcacagcagtacaacatgccgcagggaggcggccaacattatcaggggcagcagccccctatgggaatgatgggtcaagtgaatcagggcaaccacatgatggggcagcgacaaatcccaccctaccgtcctccacagcagggacccccgcagcaatatagcggccaggaggattactacggtgaccagtatagtcatgggggccagggacctccagaaggcatgaatcaacagtactatcccgatgggcacaacgactacggatatcagcagccttcttaccccgagcaaggttatgatagaccatacgaagactccagccagcactactatgagggcggaaattcgcagtacgggcaacagcaggatgcttatcagggccctcccccacaacagggttacccgcctcagcagcaacagtatcccgggcagcagggctacccaggacaacagcagggctatgggccctctcagggaggtcctggcccacaataccccaactaccctcaggggcagggacaacagtatggcggttacaggccgacccagccagggccccctcagccaccccaacagcggccttatggctacgaccagattatgccgaagaaacccgcagaggaaggaaatgattccgaggaagtcccagaggcctcaggccctcagaacgacgggaaggagctctgtcccccaggaaagcctacaaccagtgagaaaatccatgaacgcagcggccccaagagaggtgaacacgcttggactcataggctgcgggagcgcaaacaacttgtgatatatgaagagatctccgacccagaggaagatgacgagtga

SEQ ID NO: 2484 - RNA, 1374 nt, synthetic construct
  misc_feature 1..1374: note = BAF56184 variant
  source 1..1374: mol_type = other RNA
atgagcgtggccttcgctgcacccagacagaggggcaagggggagatcacccctgccgcgattcagaaaatgctggacgataacaatcacctcatacaatgcatcatggactcccagaacaagggaaaaacatctgaatgctcacagtaccaacagatgcttcatactaatctggtctatttggctacgattgccgatagtaaccagaatatgcagagcttactgccagcaccgcccacccaaaacatgcctatgggtccaggcgggatgaatcagtccggaccccctccaccccctcggtctcacaacatgccatcggacggcatggttggtgggggaccgcccgcccctcatatgcagaatcagatgaacggccaaatgccaggccccaatcacatgcctatgcaggggccaggacccaaccagctaaatatgacaaactcaagcatgaatatgccgagttcctctcatggtagcatgggcgggtacaaccactccgtgccttcaagtcaaagcatgcccgtacagaaccagatgactatgtctcagggacaaccaatgggcaattatggtcctcgccccaacatgtccatgcagccaaatcaggggcccatgatgcaccagcaacctccatcacagcagtacaacatgccgcagggaggcggccaacattatcaggggcagcagccccctatgggaatgatgggtcaagtgaatcagggcaaccacatgatggggcagcgacaaatcccaccctaccgtcctccacagcagggacccccgcagcaatatagcggccaggaggattactacggtgaccagtatagtcatgggggccagggacctccagaaggcatgaatcaacagtactatcccgatgggaactctcagtacggacagcaacaggacgcttatcagggtcctcccccacaacagggctaccctccccagcagcaacagtatccagggcagcagggatacccgggccaacagcagggttacgggccttcccagggcggacccggcccacaatatcccaattaccctcaggggcagggacagcaatatggtggctacagaccaacccagcccgggcctccgcagccaccccaacagaggccttatggatacgatcagattatgccaaagaaacccgcagaggaaggcaacgacagcgaggaggtccctgaagcctcgggtccgcagaatgatgggaaggagctctgtcccccaggcaagcctacaacctctgagaaaatccacgaacggtccggacccaagcgcggcgagcacgcttggactcatagactgagggaacggaaacaacttgtgatatatgaggaaatctcagacccagaggaagatgacgagtga

SEQ ID NO: 2485 - RNA, 336 nt, synthetic construct
  misc_feature 1..336: note = AAI05590 variant
  source 1..336: mol_type = other RNA
atgaagaccaacgacacatacatgaaattcagctggctgactgtgcccgagaagtccctcgataaagagcacagatgcatcgtcaggcatgagaataacaagaatggcgttgaccaggaaattatatttcctccaatcaaaacggatgtgattaccatggacccgaaggataactgttctaaggacgccaatgatacacttctgttgcaattaactaacacctcagcttattacatgtatctgctactcctgcttaaaagtgtagtgtacttcgcaatcattacatgctgtctgttgcggcgcaccgccttttgctgtaatggggaaaagagctga

SEQ ID NO: 2486 - RNA, 177 nt, synthetic construct
  misc_feature 1..177: note = AAG29337 variant
  source 1..177: mol_type = other RNA
atgcagatgtttccccctagcccactgttcttctttctccaacttctgaagcagtcctctagaaggttggagcacaccttcgtgtttttacggaacttctcactgatgctactccgctacatcggcaaaaagcgacgtgccacaagattttgggacccgaggcgggggactccctga

SEQ ID NO: 2487 - RNA, 1131 nt, synthetic construct
  misc_feature 1..1131: note = AAF26776 variant
  source 1..1131: mol_type = other RNA
atggccaacagcgctaataccaacacagtgcccaagctgtacagatccgtcatcgaggacgttattaatgatgtgagggacatattcctcgatgacggcgtagatgaacaggtgcttatggagctgaaaactttgtgggaaaacaagttaatgcaatctcgggcagtcgacgggtttcactcagaggaacagcagctgctactccaggtgcaacagcagcatcagcctcaacagcagcagcaccatcaccatcaccaccatcaacaggcccagccacaacagacggttccgcagcaggcgcaaacccaacaggtgctgatccccgctagtcagcaggccacagcacctcaggtcattgtgccagatagcaaacttatccagcacatgaatgcctccaacatgtctgctgcagccactgctgccaccctggcgttgcccgcaggagtaacacctgttcagcaaattctcaccaattcgggtcagctgctccaggtggtccgcgccgctaacggcgcccagtatatcttccaaccacagcagtcagtggtgctccaacagcaggtcataccccagatgcaacctgggggagttcaggcaccagtgatccagcaggtattagctccgctgcccggcggtattagccctcaaactggggtgatcattcagccacagcagatcctttttacaggaaataagacccaagtcatacccacgactgtggccgcgcctaccccagcccaggcacagattacagctactggccaacagcagccccaggcccaaccggctcagacccaggcccctttggttctacaggtggacggcacaggggataccagttccgaggaggacgaagatgaggaagaggactacgatgacgacgaggaagaggataaagaaaaggacggagcagaggatggtcaagtcgaagaggagcccctgaactctgaagacgatgtgagcgacgaggaaggccaggagctgttcgatacggaaaatgtagttgtgtgccagtatgacaagatccatcgatccaaaaacaagtggaaatttcacctgaaggatgggattatgaatcttaacggacgtgactacatcttctcaaaagccatcggcgatgctgagtggtga

SEQ ID NO: 2488 - RNA, 1173 nt, synthetic construct
  misc_feature 1..1173: note = AAH00125 variant
  source 1..1173: mol_type = other RNA
atgccccctagcggcctgagactccttctgttgttactgccactactctggctgcttgtgctgaccccggggaggcccgccgctggattgtccacatgcaagactatcgacatggagctcgtcaaacggaagcgcattgaagcaatacgaggtcagatcctgtctaaactgcgtctcgcctcacctccaagtcaaggcgaggttccccctgggccattacccgaagcggtgctggctctttacaacagcacgagagatagggtagccggagagtccgcagaacctgagccagagccggaagccgactattacgctaaggaggtgacccgggtcttgatggtggaaacacacaatgagatttatgataaattcaagcagtctactcattcgatctacatgtttttcaacacctcagagctgcgcgaagcagttcccgagcctgtgctactcagcagagccgaactgaggcttctgcggttgaagctcaaagtcgagcagcacgtggaactgtatcagaagtacagtaataactcctggcgctatttatctaatcgactgctcgctccaagcgactcccccgagtggctttcatttgatgtaacaggcgttgtgagacaatggctgagtaggggtggggagattgaaggattccggttgagcgcccattgttcttgcgactcccgtgataacaccctacaggtcgacatcaatggctttactacaggccgcagaggggatctggcgaccatacacggaatgaacaggcctttcctcctgcttatggcaacgccactggagcgggcccagcatttgcagtcaagccgacaccgcagagctctcgacactaattactgttttagttctaccgagaaaaactgctgtgtgaggcaactgtacatcgatttccggaaggacttaggttggaaatggattcacgaacccaagggctatcatgccaatttttgcctggggccgtgtccttacatctggtccctagatacacagtatagcaaggtgctcgcactgtacaaccagcacaatcccggagcttcggccgcgccatgctgtgtccctcaggcccttgaacccttgccaattgtttattacgtgggccgcaaacccaaggtagagcaactgtctaacatgatcgtgagatcctgcaaatgttcatga

SEQ ID NO: 2489 - RNA, 1704 nt, synthetic construct
  misc_feature 1..1704: note = AAT70724 variant
  source 1..1704: mol_type = other RNA
atgggcagagggctgctcaggggactttggcccctgcacatcgtgttgtggacccggattgccagcacaatacctccacatgtccagaagtccgttaacaatgacatgatcgtgactgataacaatggtgctgtaaaattcccgcaattatgcaagttttgtgacgtgcgcttctctacgtgcgataaccagaaatcatgtatgagtaattgcagcattacctccatctgtgagaagccccaggaagtctgcgtggcagtttggcgtaaaaacgacgagaatattacactggaaactgtgtgtcacgatcctaagctaccataccatgactttatcctcgaggatgccgcgtctcccaagtgcataatgaaagaaaagaaaaagcctggcgagaccttctttatgtgttcgtgctcaagcgacgagtgtaacgataatatcattttcagtgaagagtataacacatccaatccagacctgcttctggtcatctttcaggtgaccgggatttctttgctgccccctctcggagtagctatcagcgttataattatcttctactgctatcgagtgaacagacaacagaaactgtcctcaacttgggaaacaggcaagaccaggaagctcatggagtttagtgagcactgcgccattatcttagaagatgaccggagcgatatctcttccacgtgtgcaaataacattaatcataacactgagctgcttccaatagaattggacaccctggtcggtaaagggcgcttcgccgaggtgtacaaggctaaactaaagcagaacacatcagaacagtttgagactgtggcagtcaaaatcttcccgtatgaggaatacgccagctggaagaccgagaaagacatttttagtgatatcaatctcaagcacgaaaacatactgcaattccttacagctgaggaaagaaagaccgagctgggaaaacagtattggttgattacggccttccacgcgaagggcaatctccaggagtacctgactaggcatgttatctcttgggaagacttacggaaactgggctccagcctcgcacgcgggatcgcccaccttcattcggatcacacaccctgcggacgacctaagatgccaattgtgcacagagacctgaaatcttccaacatcttggtaaagaatgatctaacctgttgcctgtgtgactttggtctctcactgaggcttgatcccactctgagtgtggacgatttggctaacagcggccaggtcgggacagcccggtacatggcacctgaggtgctcgaatcccgtatgaatctggagaacgttgaatctttcaagcaaaccgacgtgtatagcatggctttagtcctgtgggagatgacgtcacgctgcaatgccgtgggagaggtaaaagattacgaaccaccctttggcagtaaggttagagagcatccgtgtgtggaatccatgaaagacaacgtcctaagggaccggggtcgacctgagattcccagcttctggctcaatcaccaggggatacagatggtgtgcgagaccctgacagaatgttgggatcatgacccagaggcgcgccttactgcccaatgcgtcgcagaaagattttctgagttggaacacctggataggctctcaggacggagttgtagcgaggagaagatccctgaagacggctccctgaacaccacaaaatga

SEQ ID NO: 2490 - RNA, 2055 nt, synthetic construct
  misc_feature 1..2055: note = BAG35778 variant
  source 1..2055: mol_type = other RNA
atgatggacgccagcaaggagctgcaagtgctccacatcgatttccttaaccaagacaatgctgtctcccatcacacctgggaatttcagacatcttcacccgttttcagaaggggccaggtgtttcatctgcggttggtattaaaccagcctccacaaagttaccaccagctgaaactagagttcagcactgggccgaatccctccattgcaaagcatacgctcgtggtcctggatcctcgcaccccatctgaccactataactggcaggccacacttcagaatgaatcgggaaaagaggtgactgttgcggtgacctcaagccccaacgctatactgggtaagtaccaattgaatgtcaaaacaggcaaccacatcctcaagagtgaagagaatattctgtatctgctctttaacccttggtgcaaggaggatatggtgttcatgccagacgaagatgagcgaaaagaatacatcttaaatgacaccgggtgtcattatgtaggagccgcacgttccattaagtgcaaaccctggaactttggccagttcgagaagaatgttctggattgttgcatctctcttttgactgagagctccctgaaacctacagacagaagggatccagtgctagtctgtcgggccatgtgcgctatgatgtcatttgaaaagggtcagggggtgctcataggaaactggaccggcgactacgagggcgggacggcaccgtataagtggactggaagtgcccccatcctgcagcaatactacaataccaaacaggctgtgtgtttcggtcagtgctgggtctttgccggcattcttacaactgttctgcgcgcgttggggatccctgcaagaagcgtgaccggattcgattctgcccacgacacagaaaggaacctcaccgtagacacgtatgtgaacgagaatggcgaaaagattacttccatgacacatgattcagtctggaactttcacgtgtggaccgacgcttggatgaaacggccagatctgcccaagggttacgacgggtggcaagccgttgatgcaactcctcaggagcgcagccagggagtgttctgttgcggcccaagtcccttaacagctatccgaaaaggcgacatattcattgtctatgataccagatttgtgttctctgaggtaaatggggacaggctgatctggctcgttaagatggtgaacggacaggaggaacttcacgtcatttccatggaaacgaccagcatcggtaaaaatatctcgacaaaggccgtgggccaagatcggcgtcgcgacattacttacgagtataagtacccggaagggtcttccgaggagagacaggtcatggatcatgcgtttctgttgctatcaagtgaaagggagcaccggcgacctgtgaaagaaaacttcctgcatatgagcgttcagtccgacgacgtgctcctgggaaattctgtaaactttaccgtcatacttaagcgcaaaacagccgcactgcagaatgtgaacatcttgggcagcttcgagctccaactgtatactggtaagaaaatggctaagttatgtgatctgaataagacctcacagattcaggggcaggttagtgaagtgacactaaccctcgactccaaaacttacatcaacagcctggccatacttgatgacgagcccgtcattagaggctttatcatcgctgagattgtggaatctaaggagatcatggcctcagaagtattcacgagttttcaatacccagagttcagcattgagttgcctaatacaggaaggataggccagctgctcgtgtgcaactgcatctttaaaaataccctggcaattccccttactgatgttaagttctccctggaatctttggggatctcgagcctccagacctccgaccacggaacagtccagccaggtgagaccatccaatcacagattaaatgtactcccataaagacaggccctaagaaatttatcgtgaagctgagttctaaacaggtgaaggaaattaacgcccagaaaatcgtcttaattacgaagtga

SEQ ID NO: 2491 - RNA, 3375 nt, synthetic construct
  misc_feature 1..3375: note = CCDS6519.1 variant
  source 1..3375: mol_type = other RNA
atggacagcctggcctccctcgtgctttgcggcgtctctctgttgttatcagggaccgttgagggagctatggatctgatcctaattaacagtctccccctggtgagcgacgcagaaacatcccttacttgtatagcctctggttggagacctcacgagccaatcacgattggcagggatttcgaagcgctgatgaatcagcatcaagacccgttggaggtaacccaggatgtgacacgggaatgggctaagaaagtcgtgtggaagcgcgagaaagcctcgaagatcaacggggcatacttttgcgagggacgagttcgtggcgaagccattagaatcaggactatgaaaatgcggcagcaggcttcattcctccccgcaaccctgacaatgaccgtggacaagggtgataatgtcaacatcagctttaagaaagtgctgataaaggaggaagacgccgtaatttataaaaatgggagtttcatccactccgttcctcgccatgaggtgccagatattctcgaggtccacttaccccatgctcaacctcaggacgccggagtgtactctgcgagatatatcggcggcaacctgtttactagcgcattcacaaggcttatagtgcggcgctgtgaagcccagaagtgggggccagagtgcaatcacttgtgtaccgcttgcatgaacaatggagtctgtcacgaagatacgggtgagtgcatttgtccccctggctttatggggcgaacttgcgaaaaagcctgtgagctgcataccttcggaagaacatgcaaggagaggtgctccggccaggaaggttgtaagtcatacgtgttttgcctaccagacccgtatgggtgtagttgcgcaactggatggaaaggcctccaatgtaacgaggcttgccaccccggcttctacgggcctgattgtaagctgcggtgcagctgtaataacggagaaatgtgcgaccgttttcagggttgtctttgctctccaggctggcaggggctgcagtgcgagcgcgaaggaatccaaagaatgacccccaaaattgttgacttgcctgatcatatcgaggtaaattccggcaagttcaacccaatctgtaaagcctcaggttggcccctcccgacaaatgaggaaatgaccctggtgaagcctgacgggacggtcttacaccccaaagattttaaccacactgaccatttcagcgtggcgattttcacaatacacaggatcctgccacctgatagtggcgtttgggtgtgctctgtcaacaccgtggccggaatggtagagaagccctttaatatttccgttaaggtgctcccaaaaccccttaacgcacctaatgtcatcgacactggccataacttcgctgtgataaatattagctcggaaccatattttggggatggaccgatcaagtctaaaaagctgttgtacaaacccgtcaaccactacgaggcctggcagcatatccaggtgacaaatgaaattgttaccctaaactatctggagcctcggacggagtacgaactctgtgtgcaactggtacgacgcggtgagggcggggaaggacacccaggccccgtcagaaggttcaccacagcttccatcggtcttcctccaccccgggggctgaatttgctcccgaagtcacagactaccctgaacttaacatggcagcctatttttccaagtagcgaggacgatttctatgtggaggttgaacgcagatccgtgcagaagtctgaccaacagaatataaaagtccccggcaacctgactagcgtgctactcaataacctgcaccctagggagcagtacgtagtgcgtgcccgggttaataccaaggcacagggagaatggtcagaggatcttacagcctggaccttgagtgacatcctgcccccacaacctgaaaacattaaaatctccaacatcactcatagctctgctgtcatttcatggacgatactcgacggctatagtatcagctccattacaatccgatacaaggtgcaggggaaaaatgaggatcagcacgtggacgtcaagattaagaacgcgaccatcactcagtatcaactgaaaggacttgagcccgaaaccgcataccaggttgatatatttgccgagaataacatcggttcttcgaatccagctttcagccatgaactggtgacattgccggagtcccaggcccctgcagacctcggcgggggaaagatgctgttaattgccatcctgggctcagctggtatgacctgcctaactgtgctcctggcctttcttattatcttgcagctgaaaagagcaaacgtacaaaggcgcatggcgcaggctttccagaatgtccgggaagaacccgccgtgcaatttaacagtgggacactcgcactgaatagaaaggttaaaaacaatccagatcccacgatataccctgtgttagactggaacgatattaagttccaggacgtcatcggcgagggaaattttggccaggtgctgaaggccaggattaaaaaggatgggcttcgcatggacgctgccatcaaacgaatgaaggaatatgcatctaaagatgaccaccgggatttcgctggagagttggaagttctctgtaagctgggccaccatccaaacataatcaatctactgggtgcctgcgagcaccgtgggtacctctatctggcgattgaatacgctccccatggaaaccttttggacttcctgagaaaaagcagggtgttagagaccgaccctgcctttgcaatcgccaactccactgcttcaacactcagctctcagcaactgcttcacttcgccgcagatgtagcgcgcggcatggactatctgtcccagaagcagtttattcatcgggatttggccgctagaaatatcctcgtcggtgagaactacgtggccaagatagcagacttcggcctgagtagggggcaggaagtgtatgtcaaaaagaccatgggacgactaccggttcgctggatggctattgagagcctgaattactctgtgtacacaactaactccgatgtatggtcatatggcgtgctcctgtgggaaatcgtcagtcttgggggaaccccatactgtggcatgacgtgcgccgagttgtatgagaaactgccccaaggttaccggttagaaaagcctctcaattgtgacgatgaggtgtatgacctgatgagacagtgctggagggaaaaaccatacgagcgtcccagctttgcacagatccttgtttcgctgaaccgcatgctagaggagcggaagacctatgtgaatacaactctctacgagaagttcacctacgccgggattgattgttccgctgaagaggcggcctga

SEQ ID NO: 2492 - RNA, 1791 nt, synthetic construct
  misc_feature 1..1791: note = BAF84950 variant
  source 1..1791: mol_type = other RNA
atggccgacgctgaggcaagagccgagttccccgaggaagcgaggcctgatcggggcaccctccaggtgctgcaagacatggctagccgccttcgaatccactccattcgtgccacatgctctacttcaagtgggcatccaacgagctgttcctcttcgtcagagataatgagcgtcctgtttttctacatcatgagatataagcagagtgatccggaaaaccccgacaatgataggtttgttttggcaaaacggttatccttcgtggacgtagccaccggatggctgggtcagggcctaggggtggcttgcggaatggcatacacaggcaagtattttgatcgcgcctcttacagagtcttctgtctcatgagcgacggtgagtcctcagaggggagtgtgtgggaagctatggcctttgcgagctattactctctggataaccttgttgcaattttcgacgtgaataggctgggacactccggcgccttgcctgctgagcattgcatcaacatttatcagcggcgctgtgaagcctttggctggaatacttacgtcgtggatgggcgagacgtagaggcactctgccaagttttctggcaggcttcacaggtgaaacacaagccaaccgccgtcgtggcgaaaacatttaagggaagaggtacccccagcatcgaggatgccgaaagttggcatgcaaagcctatgccaagggagcgggctgacgccataatcaaactgattgaatctcagatccaaacttcccgtaacctggacccccagcctccaattgaggatagcccggaagtgaatatcacagacgtccgcatgacctcgccccctgattacagagttggcgacaagatagctacgaggaaagcctgtgggctcgcattagccaagctgggatatgctaacaatcgggtggtagtgcttgatggcgacactcgatactctaccttctccgagatttttaacaaagagtatccagaacgcttcatcgagtgcttcatggcggaacagaatatggtctcagtggcattgggttgtgccagtagagggaggacaattgcttttgccagcactttcgcagcctttctgacccgggctttcgatcacatccgcatcggaggcctagccgagtccaacattaatataatcggctctcactgcggggttagcgtgggagacgatggtgcatcacagatggcgctcgaagacattgctatgtttagaacaatccccaagtgtaccatattctaccctacggatgccgtcagtactgagcatgcagtggccctggctgccaacgcaaagggcatgtgctttattaggacaacccgtccagagactatggtaatctatacaccccaagaacggttcgagatcgggcaggctaaagttcttcgacactgcgtgtccgacaaggtcaccgtgattggagccggcatcacggtctacgaagcgctggccgctgcagacgagttgagcaaacaggatatttttataagagtgatcgacctcttcaccattaagccgctggatgttgccacaatcgtgtcttcagctaaagccactgaaggtaggatcattaccgtagaggaccattatcctcaagggggcataggagaggcagtctgtgcggccgtgagtatggatcccgacatccaggttcacagcttagctgtgtccggcgtcccacagtctgggaagtcggaagaactgctcgatatgtacggaattagcgcccgccacatcattgtggcagtaaaatgcatgcttctgaattga

SEQ ID NO: 2493 - RNA, 861 nt, synthetic construct
  misc_feature 1..861: note = EAW88722 variant
  source 1..861: mol_type = other RNA
atggccgaggacggcgaagaggctgagttccactttgcagccctgtacatcagcgggcagtggcccagactcagggcggataccgaccttcaacggctgggatcctctgctatggccccttcacgcaagttctttgtgggtggcaactggaaaatgaatgggcgaaagcagagtttgggagaattaattggcacactgaacgcagccaaagtcccagctgatactgaagttgtgtgcgcaccgcccacggcctatatagacttcgctcgtcagaagctagatcctaaaatcgccgtagcggcacagaattgttacaaggtgaccaacggtgcctttacaggggagattagcccaggaatgatcaaggactgcggcgctacttgggtcgtgctcggccattccgagagaaggcacgttttcggggaatctgatgagctgattggacaaaaagtggcccatgcacttgctgaaggtctgggcgtcatcgcctgtataggggagaagttggacgagcgggaagcgggaatcaccgagaaagtggtatttgaacagacaaaggttattgccgataatgtgaaagactggtcgaaggtcgtgctcgcatatgagcccgtgtgggctatcggcaccggtaagactgccacacctcagcaggctcaagaagtccacgagaaactgcgcgggtggctgaagtcaaacgttagcgatgccgtggcacagagtaccagaattatctacggaggctccgtaacgggcgccacttgcaaagagctcgcttctcagccagacgtggatgggttcttagtcggaggtgcgagcctgaagcccgaatttgtggacataattaatgcaaaacagtga

SEQ ID NO: 2494 - RNA, 357 nt, synthetic construct
  misc_feature 1..357: note = CAA72108 variant
  source 1..357: mol_type = other RNA
atgcccctggtggtcgccgttatcttctttagcctctgggtgttcgctcttggccagctggagcaacctgaaatttccatatctagaccagcaaacaagtcagcccacatcagttggaaagcgagcattcaggggttttcctctaagatcattcattggtactggcagaaaccgaataagggattggagtatttactgcacgtattcctaaccatctcggctcaggactgctcaggtggcaaaacaaagaagctcgaagtgagcaaaaacgcccatacgagtacttccaccctgaagataaaatttcttgagaaggaagatgaggtcgtgtaccactgtgcatgctggatcaggcat

SEQ ID NO: 2495 - RNA, 414 nt, synthetic construct
  misc_feature 1..414: note = EAL23985 variant
  source 1..414: mol_type = other RNA
atgctgagcctccttcacacctccacactggccgtgttgggcgctttatgcgtctacggggcaggacatctggagcagccccaaatctcttcaactaagacgctaagtaaaaccgccagactcgaatgtgttgtgagcggtattacaatatccgcgacttctgtatattggtacagggagcggcctggcgaagtgatccagttcctggtctcgatttcatatgacgggaccgtgcgcaaggagagcggaatcccaagtggcaaatttgaagttgatcgtattccggagacatccacctctactcttacaatccacaacgtggagaagcaggacatagctacctactattgcgccctgtgggaagtccatagctcccgacagttcgagccctcacacagtatcaatgtgtactga

SEQ ID NO: 2496 - RNA, 366 nt, synthetic construct
  misc_feature 1..366: note = CAA30181 variant
  source 1..366: mol_type = other RNA
atgctgagcctccttcacacctccacactggccgtgttgggcgctttatgcgtctacggggcaggacatctggagcagccccaaatctcttcaactaagacgctaagtaaaaccgccagactcgaatgtgttgtgagcggtattacaatatccgcgacttctgtatattggtacagggagcggcctggcgaagtgatccagttcctggtctcgatttcatatgacgggaccgtgcgcaaggagagcggaatcccaagtggcaaatttgaagttgatcgaatcccggagacatccacctctactcttacaattcacaacgtggagaagcaggacatagctacctactattgcgccctgtgggaagtc

SEQ ID NO: 2497 - RNA, 366 nt, synthetic construct
  misc_feature 1..366: note = CAA33345 variant
  source 1..366: mol_type = other RNA
atgctgagcctccttcacacctccacactggccgtgttgggcgctttatgcgtctacggggcaggacatctggagcagccccaaatctcttcaactaagacgctaagtaaaaccgccagactcgaatgtgttgtgagcggtattaagatatccgcgacatctgtatattggtacagggagcggcctggcgaagtgatccagttcctggtctcgatttcatatgacgggactgtgcgcaaagagagcggaatcccaagtggcaagtttgaagttgatcgaatcccggagacctccacatctacccttactattcacaacgtggagaaacaggacatagctacatactattgcgccctgtgggaagtc

SEQ ID NO: 2498 - RNA, 2382 nt, synthetic construct
  misc_feature 1..2382: note = AAA93251 variant
  source 1..2382: mol_type = other RNA
atgatggccgctctgtaccccagcaccgacctctccggcgcatcttcaagtagccttccttcctctccatcgtcaagcagtccgaacgaggtgatggccctgaaggatgtcagagaagttaaagaggaaaatacattgaacgagaagttattcctgctagcgtgcgacaaaggggattattacatggtgaagaaaatcctcgaagaaaattcctctggagacctgaacattaattgtgtagatgtgcttggtaggaacgctgtcactataacgatcgagaatgaaaacctggacattttgcagctcctgctggattatggctgccaaagcgccgacgcactcttagtggccatcgattccgaggttgtgggggctgtcgacattctgcttaatcaccggcccaagcgctcaagtcgacctaccatcgtgaagttgatggaacgtatacagaacccagagtacagcacaactatggatgtagcacccgttatcctggccgctcatagaaataactatgagattctaaccatgctcctgaaacaggacgtgtctcttcctaagccacacgccgtcggatgtgaatgcacactgtgttccgcgaaaaataagaaagattcattgaggcatagccggtttcgcctcgacatctacagatgcctggcaagtcccgccttaattatgctgaccgaggaagaccctatcctcagggctttcgagctttctgccgatctgaaggaattgtccctagtggaggtggagtttcggaacgactatgaggagctggcacgccagtgtaagatgttcgctaaagatctcctggcccaagcgcgaaatagcagagaacttgaggtcatactgaaccacacttcgtctgacgaaccattggataagaggggcctcctggaggagcggatgaacttatcccgtctgaaactagccattaagtacaatcagaaagaatttgtttcacagagtaactgccagcaattcctcaatacagtgtggtttggtcagatgagcgggtaccgcagaaagccgacctgtaaaaagatcatgacggtactgactgtgggaattttctggcccgtcctttccttgtgctatctgatcgcacctaagtctcagtttggcaggatcattcataccccattcatgaaatttataatccacggcgctagctacttcacatttctcctgcttctgaacttgtattcactcgtgtacaatgaggacaagaaaaacactatggggcccgccctggaacggattgattatttactgatcctatggataattggaatgatctggagtgacatcaagcgactctggtacgagggtctggaagatttccttgaggagtcccgcaatcagttgagcttcgttatgaactctctgtatctcgctacctttgccctgaaagtggtcgcacacaataagttccatgactttgccgatagaaaggactgggacgctttccaccctacattagtggcggaaggcctgtttgcattcgccaacgtactttcatacttgaggctctttttcatgtacaccacgagtagcattctggggccactacaaatctccatgggacagatgctgcaggattttggcaaattcctcggtatgtttctgcttgttttgttctcttttactattgggctgacacaattatatgacaagggatacacctcgaaagagcagaaggattgtgtgggcatattctgcgaacagcagagcaatgacactttccattcctttatcggcacatgcttcgctctcttttggtatattttctcactggcccacgtcgcaatctttgtgacccggttcagttacggggaggagcttcaatcttttgtcggagccgtgatcgttggtacgtataacgtggtagtcgtgattgttctgaccaaattgctcgtggctatgctgcacaagagcttccagctaatagccaatcatgaagataaggagtggaaatttgcacgcgcgaagctgtggctctcctacttcgacgataaatgtacactgcccccgccttttaacatcattccctcaccaaagactatctgctatatgattagctctctttccaaatggatctgtagtcacaccagcaagggcaaggtcaaaagacaaaattctttgaaggaatggaggaacctgaaacagaagcgtgacgagaactaccagaaagtgatgtgctgtttagtacatcggtacctcacatccatgcgacagaagatgcagtcaactgatcaggctaccgtggaaaatctgaacgagcttagacaagacctgagtaaattcaggaatgagatacgcgatctactcgggtttcggacaagcaagtatgccatgttctaccctagaaactga

SEQ ID NO: 2499 - RNA, 3315 nt, synthetic construct
  misc_feature 1..3315: note = AAZ73614 variant
  source 1..3315: mol_type = other RNA
atgagcttcagagccgctaggctgtccatgcggaaccgccgaaatgacaccctcgattctacacgtactctttactcaagtgcaagcagatccacggacctgtcttattcggagtcagatttggtgaactttatccaggccaatttcaagaaaagggaatgcgtctttttcaccaaggacagcaaagcgacagagaacgtttgtaagtgcggctacgctcaaagtcagcacatggaagggactcagattaatcagtccgagaaatggaactataagaagcataccaaagaatttcccacagatgccttcggagacatacaatttgagaccttaggtaagaaaggcaagtacatccggctgtcttgtgatactgacgcagagattctatatgaactcctgacacagcactggcatcttaaaacccctaatctggtgatcagcgtaactgggggagccaagaacttcgctttgaagccacgcatgagaaaaatcttttccaggctcatttacatagcacagtcaaagggcgcctggatcctgacgggtgggacccactatggactgatgaaatacattggcgaggtggtccgggataatacaatcagtcgcagctctgaagagaacattgtggctatcggcatagccgcgtgggggatggtttccaatcgagacactctcattagaaactgcgatgcagagggatacttcttagcccagtatctgatggacgattttaccagggacccgctttacatcttggacaataaccatacacaccttctactcgtggataatggttgtcacggccatcccaccgtcgaagctaagctgcggaaccaacttgagaaatatatttcagaacgtacgatccaggacagcaactacgggggaaagatccctattgtgtgcttcgcccagggcggtgggaaagagactctgaaggcaataaatacaagtatcaagaacaaaattccatgtgtagttgtggaaggatctggccagatcgctgatgtcatagcctccttggtggaggtggaggacgcgctcaccagctcggccgtcaaggaaaaactggttcgctttttacccagaactgtgtctaggctgcctgaggaagagacagaatcctggattaagtggctcaaagagatccttgagtgctcacacctgttgaccgtaatcaagatggaagaggcaggcgatgaaattgtgagtaatgctatcagctatgccctatacaaggctttctccacgtctgagcaagacaaagataactggaatgggcagctgaagctcctgcttgaatggaaccagctggacttggccaatgatgagattttcaccaacgaccggcgatgggagagcgcagatctccaagaagtcatgtttacagccctgataaaagaccgcccaaagttcgtgagattatttctggagaatggactaaacctcaggaaattcctgactcatgacgttcttaccgaattgttttcaaatcacttcagtacactggtgtatcggaacctccagatcgctaaaaattcctacaacgatgcgctgcttacttttgtctggaagctggtggcaaatttccgcagaggttttaggaaggaggaccgtaacggccgggatgagatggacattgaattgcacgatgtaagccccatcacccgacatcctctccaggccctgttcatctgggctattttacagaacaagaaagagctgtctaaggttatatgggaacaaacaagagggtgtaccctagccgcactcggagcctcaaaactgcttaagactttggctaaggtgaaaaatgacatcaacgccgcaggcgagagtgaggaactggcgaatgagtacgaaacgagggctgtcgagctctttacagaatgctatagctccgatgaggacctggccgaacagttactggtgtactcttgtgaggcatggggtgggtcgaactgccttgagttggccgtcgaagctaccgatcagcacttcattgcccagccaggcgtgcaaaattttctcagcaagcagtggtatggagagatctcccgcgacactaaaaactggaagattatcctgtgcctattcataatcccgctggttggctgtgggttcgtgtcatttcggaaaaagcccgtagataaacataagaagctcctgtggtactatgtcgcattctttaccagtcctttcgtggtgttttcttggaatgttgtcttctacattgcttttcttttgctgttcgcctatgtgttactcatggactttcacagcgtaccacatccccctgaactggtgctttactccctggttttcgtcttgttttgcgatgaggtgagacagtggtacgtgaacggagtcaattatttcacagacctctggaacgttatggacaccctgggtctattttacttcatcgcgggcattgtgttcaggctgcactcaagcaataaatcttccctctatagtgggcgcgtgatcttttgtctggattacataattttcactcttcgattgatccacatttttacagtaagccggaacctgggaccaaagatcataatgttacagcgtatgctcatcgacgtcttctttttcctgtttcttttcgccgtgtggatggttgcttttggcgtggcaagacaaggtattctgaggcagaatgaacagcgctggcggtggatcttcagatctgtcatttatgagccctacctagccatgtttggccaggtgccgtccgatgttgacgggacgacctatgatttcgctcattgcactttcacaggaaacgagtcaaaacctctctgtgtggaactggacgagcacaatttgcccaggtttccagaatggatcaccatacctctggtatgcatttacatgttaagtacaaacatcctcctggtcaaccttctggtggccatgttcggctacactgtggggaccgtccaagagaataacgatcaggtttggaagtttcagcgatatttcttggtgcaagagtactgtagccgcctcaatatcccctttccattcattgtatttgcatatttctacatggtggtcaaaaagtgctttaagtgttgctgtaaagaaaagaacatggagtcgtccgtgtgctgcttcaaaaatgaagacaacgagacgctggcgtgggaaggagttatgaaggagaattatctagtgaaaatcaacaccaaggccaatgatacatctgaggaaatgcggcatagatttaggcagctggacactaagctgaacgatctcaaaggtctgttgaaggagattgctaataaaataaagtga

SEQ ID NO: 2500 - RNA, 2097 nt, synthetic construct
  misc_feature 1..2097: note = AAK13079 variant
  source 1..2097: mol_type = other RNA
atgatgagaagcaggtccaagtctccccggcgcccttcaccaaccgcccgaggcgctaactgcgacgtggagctgctcaaaacaactacgcgtgatagagaggaacttaagtgtatgctggaaaaatacgagaggcacttggcagaaatccaggggaatgtcaaggttttaaaaagtgagcgggacaagattttcctgctatatgagcaagcccaggaagagataacccgcctcagaagggaaatgatgaagtcctgcaaatccccgaagtctacaactgcgcatgctatcctgcggcgcgtggagaccgagcgagatgtagcctttacagaccttagaaggatgaccactgaacgggattcgctgcgtgagcgcttgaaaattgcacaggaaacagccttcaacgagaaggctcacctcgaacagagaatcgaggagctggaatgtaccgtgcataatctggacgatgagaggatggaacaaatgtcaaacatgacgctcatgaaagagactattagcaccgtcgaaaaggagatgaagagtttagcacggaaagccatggacacagagtccgaactgggacgacagaaggctgagaataactctcttcgcttgctgtacgaaaatactgagaaagatctaagcgacacccagagacacctcgccaagaaaaagtatgaactgcagcttacacaagagaaaatcatgtgcctggatgagaagatagacaactttaccaggcagaatatcgcgcagcgggaagagatttccatcttgggtggcacgctcaacgatctggcaaaggaaaaagagtgtttacaggcctgcctggacaagaaatcagagaatattgctagtctcggggaaagccttgccatgaaggagaaaactatctctggaatgaagaacataattgcagaaatggagcaagctagccgccagtgtacagaagccctgatcgtgtgcgagcaggacgtttcaagaatgaggcgtcaattggatgagaccaatgacgaactagcgcagattgcccgggagcgagatatcctggcacatgacaacgataatctccaggaacagttcgctaaggccaaacaagagaaccaggctctgagcaagaaacttaacgacactcacaatgaactgaacgatatcaagcagaaagtgcaggacacaaatttggaggtcaacaagctcaagaatattctgaaaagtgaggaatctgagaacagacaaatgatggaacagttaaggaaggccaatgaggatgcagaaaactgggagaataaagcccgccagtccgaggctgacaacaataccctgaagctagaactcataacggcggaggcagaaggcaaccggctgaaagagaaggtggatagccttaatagagaggtagaacagcacttgaacgccgagaggtcgtacaagtctcaaatctccaccctgcataaatcagttgtgaagatggaagaggaactccagaaagtccagtttgagaaggtgagtgctctggccgaccttagctccacacgcgagctgtgtattaaattggactctagcaaggaactcctgaatcgacagttagtggcaaaagatcaagagatcgaaatgcgggagaacgaactggactcagcccacagtgagatagagctactccgttcccagatggctaacgaaagaattagcatgcagaatctggaggcccttttggtcgcaaacagggataaggaatatcaatctcagatcgcgctgcaggagaaggaatcagagatccagctcctgaaagagcatttatgcctggctgaaaataagatggccattcaaagtcgcgacgttgcacagttccggaacgtggtaactcagcttgaggccgatttggacatcaccaaaagacagctcggtacagaaaggtttgagcgagagcgcgctgtgcaagaactgcggagacagaattacagctccaacgcctatcacatgtcttcgactatgaagcccaataccaaatgtcacagccctgagagggcacatcaccgttccccagatcgcgggctagaccggtcactggaagagaacctctgctacagagatttctga

SEQ ID NO: 2501 - RNA, 927 nt, synthetic construct
  misc_feature 1..927: note = CCDS48205.1 variant
  source 1..927: mol_type = other RNA
atgagacccgagggcagcctgacctacagggtgcctgaacggctccgccaggggttctgcggagtcggtcgagccgctcaagcacttgtttgtgcctccgcgaaggagggcacagcttttcgtatggaagccgtgcaggagggggcagccggagtagaatctgagcaggctgcactgggcgaggaagccgtgttgttactggacgatatcatggctgaggtcgaagtggttgccgaggaggaaggtctagtggagagaagggaagaggcgcagcgggcacaacaggccgtcccagggccgggacccatgactcctgaatcagctccagaggagctcctggccgtgcaggtagaacttgagcccgttaacgcacaggctcgcaaagccttcagtagacaaagggaaaagatggagcggcgccgaaaacctcacctggacagaaggggcgcggtgattcagagcgtcccaggcttttgggccaatgtgatagcaaaccatccccagatgtccgctttgatcacggatgaagacgaggatatgctctcttatatggtgtcgctggaggtcggggaagagaagcaccctgttcatctgtgcaaaattatgttattctttcggtcaaatccatacttccagaacaaggtgatcaccaaggaatatctcgtaaatattacagagtaccgtgccagccacagtactccgatcgaatggtatcccgactacgaggtggaggcttatcgcagaaggcatcacaactcctctctgaactttttcaattggtttagcgatcacaatttcgccggatccaacaaaatagcagaaatcctttgtaaggacttgtggcggaatcctctgcaatactacaaacgaatgaagccacccgaggaaggtaccgagacatcaggcgatagtcagctactcagctga

SEQ ID NO: 2502 - RNA, 369 nt, synthetic construct
  misc_feature 1..369: note = M13231.1 variant
  source 1..369: mol_type = other RNA
atgagatgggccctgctcgtgcttctggctttcttgagccccgcatcccagaagtcttcaaacttagagggcaggaccaaaagtgtcacacggcaaactgggagctccgccgaaatcacgtgcgacctgaccgttacaaatactttttacattcactggtatctacatcaggagggaaaggcgcctcagcgcctcctgtactatgatgtgtctaccgctcgagacgtacttgaatcgggtctgtcaccaggcaaatactatacacacaccccgcgtagatggagctggatattgaggctccagaacctgatcgagaatgatagtggggtgtactattgtgccacttgggaccggcaaaagctgctctga

SEQ ID NO: 2503 - RNA, 804 nt, synthetic construct
  misc_feature 1..804: note = CCDS12619.1 variant
  source 1..804: mol_type = other RNA
atgggcgccagacagatccaaaccagctcctctcagacatcaccagaggaagctatggggactcctaggattcagcatctgctcatacttctggtgttgggagcaagtttactgacgagcggtctagagctctactgccagaagggcctgtccatgaccgtcgaagccgacccagcgaacatgttcaattggacaactgaggaagttgagacctgtgataaaggggctctttgccaagagacaatcctgattatcaaggccggaaccgaaactgcaattttggccacaaaaggctgtatcccggagggtgaagaggctataaccatcgtgcagcactcttcgccccctgggctcattgtaacgtcatatagcaactactgcgaggacagtttttgtaatgataaggactccctgtctcagttctgggaatttagcgagactaccgcatccacagtgtcaactaccctgcactgcccaacatgtgtcgccctcggaacctgcttcagtgctcccagcttaccttgtccaaacggcacgactcggtgctatcagggcaaactggaaatcacagggggaggtattgagtcttccgtggaagttaagggctgtaccgccatgatcgggtgccgccttatgtcaggaatattggcggtgggccccatgtttgtccgagaggcatgccctcatcaactgctaactcagccacgtaagacagagaatggtgccacctgtctcccgattcccgtgtgggggctgcagcttctgttgcctctcctgttacccagcttcatccactttagttga

SEQ ID NO: 2504 - RNA, 1590 nt, synthetic construct
  misc_feature 1..1590: note = AHZ44440 variant
  source 1..1590: mol_type = other RNA
atgctgctcgccgtgctttactgcctgttgtggagcttccagacctccgctggccactttcccagagcatgtgtctcttcaaagaacttaatggagaaagaatgctgtcctccatggagtggggacaggagcccgtgcggacaactgtccggtcggggctcttgtcagaatatcctactctcgaacgcccccttggggcctcagttcccatttacaggagttgatgaccgcgagtcatggcccagcgtgttctataatcgaacttgccagtgtagtggcaactttatgggtttcaattgcgggaactgtaagtttggattctggggccctaattgcacggaacgtagacttctggtaaggcggaacatttttgatttgtccgcgccagagaaagacaagttctttgcttacctcaccctggccaaacatacaatatctagcgattatgtgatccccattggcacttacgggcaaatgaagaatggatccacccctatgttcaacgacatcaatatttatgatctgtttgtctggatgcactactatgtgtcaatggacgcactcttaggtggcagtgaaatctggcgcgatatagacttcgcccatgaggctccagcattcctgccgtggcacagactttttctgctgaggtgggagcaggaaatccagaagctaacaggggatgagaacttcaccattccctactgggactggcgggatgccgaaaaatgtgacatctgcactgacgagtacatgggaggccagcatcctacaaatccaaacctcctgagccccgcttcctttttctcttcatggcaaattgtttgcagccgccttgaggaatataatagtcaccagtctctgtgtaacggtacccctgaggggccattgcgaagaaaccccggaaatcacgataagtccaggacgccgcggctccctagctcggccgacgtggaattttgcctgtctttaactcagtacgagtccggctcaatggataaagcggcaaacttcagttttcgtaataccctggaaggcttcgccagccccctcacagggatcgctgacgcctcccagtctagcatgcataacgcacttcacatatatatgaatggaactatgtcacaagtccagggtagtgctaacgatccaatttttctgttgcatcacgccttcgtggactccatctttgagcagtggctacgcagacacaggcctctgcaagaggtataccccgaagcgaatgccccaattcggcataaccgagagagctatatggttcccttcatccctctctaccgcaatggcgactttttcatctcttcaaaggatctggggtatgattacagttaccttcaggacagcgatccagactccttccaggactatattaaatcttacctggaacaggcatcgagaatatggagctggttgctcggagctgccatggtgggcgctgtcctgaccgccttactggcaggtctagtgtccctcctgtgtaggcacaagcggaagcaacttccggaggaaaaacagcccttgctgatggagaaggaggattatcattcactctaccagagtcacctgtga

SEQ ID NO: 2505 - RNA, 1590 nt, synthetic construct
  misc_feature 1..1590: note = AGV39051 variant
  source 1..1590: mol_type = other RNA
atgctgctcgccgtgctttactgcctgttgtggagcttccagacctccgctggccactttcccagagcatgtgtctcttcaaagaacttaatggagaaagaatgctgtcctccatggagtggggacaggagcccgtgcggacaactgtccggtcggggctcttgtcagaatatcctactctcgaacgcccccttggggcctcagttcccatttacaggagttgatgaccgcgagtcatggcccagcgtgttctataatcgaacttgccagtgtagtggcaactttatgggtttcaattgcgggaactgtaagtttggattctggggccctaattgcacggaacgtagacttctggtaaggcggaacatttttgatttgtccgcgccagagaaagacaagttctttgcttacctcaccctggccaaacatacaatatctagcgattatgtgatccccattggcacttacgggcaaatgaagaatggatccacccctatgttcaacgacatcaatatttatgatctgtttgtctggatgcactactatgtgtcaatggacgcactcttaggtggcagtgaaatctggcgcgatatagacttcgcccatgaggctccagcattcctgccgtggcacagactttttctgctgaggtgggagcaggaaatccagaagctaacaggggatgagaacttcaccattccctactgggactggcgggatgccgaaaaatgtgacatctgcactgacgagtacatgggaggccagcatcctacaaatccaaacctcctgagccccgcttcctttttctcttcatggcaaattgtttgcagccgccttgaggaatataatagtcaccagtctctgtgtaacggtacccctgaggggccattgcgaagaaaccccggaaatcacgataagtccaggacgccgcggctccctagctcggccgacgtggaattttgcctgtctttaactcagtacgagtccggctcaatggataaagcggcaaacttcagttttcgtaataccctggaaggcttcgccagccccctcacagggatcgctgacgcctcccagtctagcatgcataacgcacttcacatatatatgaatggaactatgtcacaagtccagggtagtgctaacgatccaatttttctgttgcatcacgccttcgtggactccatctttgagcagtggctacgcagacacaggcctctgcaagaggtataccccgaagcgaatgccccaattggccataaccgggagagctatatggttcccttcatccctctctaccgaaatggggactttttcatctcttcaaaggatctgggatatgattacagttaccttcaggacagcgatccagactccttccaggactatattaaatcttacctggaacaggcatcgcgcatatggagctggttgctcggcgctgccatggtgggtgctgtcctgaccgccttactggcagggctagtgtccctcctgtgtagacacaagaggaagcaacttccggaggaaaaacagcccttgctgatggagaaggaggattatcattcactctaccagagtcacctgtga

SEQ ID NO: 2506 - RNA, 1590 nt, synthetic construct
  misc_feature 1..1590: note = AGV39049 variant
  source 1..1590: mol_type = other RNA
atgctgctcgccgtgctttactgcctgttgtggagcttccagacctccgctggccactttcccagagcatgtgtctcttcaaagaacttaatggagaaagaatgctgtcctccatggagtggggacaggagcccgtgcggacaactgtccggtcggggctcttgtcagaatatcctactctcgaacgcccccttggggcctcagttcccatttacaggagttgatgaccgcgagtcatggcccagcgtgttctataatcgaacttgccagtgtagtggcaactttatgggtttcaattgcgggaactgtaagtttggattctggggccctaattgcacggaacgtagacttctggtaaggcggaacatttttgatttgtccgcgccagagaaagacaagttctttgcttacctcaccctggccaaacatacaatatctagcgattatgtgatccccattggcacttacgggcaaatgaagaatggatccacccctatgttcaacgacatcaatatttatgatctgtttgtctggatgcactactatgtgtcaatggacgcactcttaggtggcagtgaaatctggcgcgatatagacttcgcccatgaggctccagcattcctgccgtggcacagactttttctgctgaggtgggagcaggaaatccagaagctaacaggggatgagaacttcaccattccctactgggactggcgggatgccgaaaaatgtgacatctgcactgacgagtacatgggaggccagcatcctacaaatccaaacctcctgagccccgcttcctttttctcttcatggcaaattgtttgcagccgccttgaggaatataatagtcaccagtctctgtgtaacggtacccctgaggggccattgcgaagaaaccccggaaatcacgataagtccaggacgccgcggctccctagctcggccgacgtggaattttgcctgtctttaactcagtacgagtccggctcaatggataaagcggcaaacttcagttttcgtaataccctggaaggcttcgccagccccctcacagggatcgctgacgcctcccagtctagcatgcataacgcacttcacatatatatgaatggaactatgtcacaagtccagggtagtgctaacgatccaatttttctgttgcatcacgccttcgtggactccatctttgagcagtggctacaacgccacagacctctgcaggaggtataccccgaagcgaatgccccaattggccataacagggagagctatatggttcccttcatccctctctaccggaatggggactttttcatctcttcaaaggatctgggatatgattacagttaccttcaggacagcgatccagactccttccaggactatattaaatcttacctggaacaagcatcgcgaatatggagctggttgctcggcgctgccatggtgggtgctgtcctgaccgccttactggcagggctagtgtccctcctgtgtcgccacaagagaaagcagcttccggaggaaaaacagcccttgctgatggagaaggaggattatcattcactctaccagagtcacctgtga

SEQ ID NO: 2507 - RNA, 1590 nt, synthetic construct
  misc_feature 1..1590: note = AGV39050 variant
  source 1..1590: mol_type = other RNA
atgctgctcgccgtgctttactgcctgttgtggagcttccagacctccgctggccactttcccagagcatgtgtctcttcaaagaacttaatggagaaagaatgctgtcctccatggagtggggacaggagcccgtgcggacaactgtccggtcggggctcttgtcagaatatcctactctcgaacgcccccttggggcctcagttcccatttacaggagttgatgaccgcgagtcatggcccagcgtgttctataatcgaacttgccagtgtagtggcaactttatgggtttcaattgcgggaactgtaagtttggattctggggccctaattgcacggaacgtagacttctggtaaggcggaacatttttgatttgtccgcgccagagaaagacaagttctttgcttacctcaccctggccaaacatacaatatctagcgattatgtgatccccattggcacttacgggcaaatgaagaatggatccacccctatgttcaacgacatcaatatttatgatctgtttgtctggatgcactactatgtgtcaatggacgcactcttaggtggctacgaaatctggcgcgatatagacttcgcccatgaggctccagcattcctgccgtggcacagactttttctgctgaggtgggagcaggaaatccagaagctaacaggggatgagaacttcaccattccctactgggactggcgggatgccgaaaaatgtgacatctgcactgacgagtatatgggaggccagcatcctacaaatccaaacctcctgagtcccgctagctttttctcttcctggcaaattgtttgctcacgccttgaggaatacaatagccaccagagtctgtgtaacggtacccctgaggggccattgcgaagaaaccccggaaatcacgataagtctaggacgccgcggctcccttccagcgccgacgtggaattttgcctgtcgttaactcagtatgagtctggctccatggataaagcggcaaacttctcatttcgtaataccctggaaggcttcgccagtcccctcacagggatcgctgacgccagccagtcctctatgcataacgcacttcacatatacatgaatggaactatgagccaagtccagggttcagctaacgatccaatttttctgttgcatcacgccttcgtggacagtatctttgagcagtggctacgcagacacaggcctctgcaagaggtatatcccgaagcgaatgccccaattggccataaccgggagtcctacatggttcccttcatccctctctatcgaaatggggactttttcatcagctctaaggatctgggatacgattactcatatcttcaggacagtgatccagacagcttccaggactacattaaatcctatctggaacaggcatctcgcatatggtcgtggttgctcggcgctgccatggtgggtgctgtcctgaccgccttactggcagggctagtgagcctcctgtgtagacacaagaggaagcaacttccggaggaaaaacagcccttgctgatggagaaggaggattaccattccctctatcagtcacacctgtga

SEQ ID NO: 2508 - RNA, 714 nt, synthetic construct
  misc_feature 1..714: note = CAA04137 variant
  source 1..714: mol_type = other RNA
atgagccccctgtggtggggcttcctcctttcctgcctggggtgtaagatcttgcctggagcccagggtcaatttccaagagtgtgcatgaccgtcgactctttagttaacaaagagtgttgcccgaggctgggcgctgaatcagcaaatgtgtgtgggagtcagcagggacggggccagtgcacagaggtacgcgccgatactcgaccctggagcggtccttacattctacgtaaccaagacgatagagaactctggccaaggaagttctttcaccggacgtgtaaatgcaccgggaatttcgcgggatataactgtggcgactgcaagtttggctggacagggcccaattgtgagcgcaaaaagcctccagtgataagacagaacatccattccctgtctccccaggaaagggagcagttccttggagctctggatttggccaagaaacgggtccaccctgactacgtgattactacccaacattgggttggtctcctgggcccaaatgggacacagccgcagtttgcaaactgctcggtgtatgatttctttgtctggctgcactactattcagtgcgcgacaccctcttaggaggcttctttccctggctgaaggtatactattaccgattcgttatcggtcttagagtgtggcagtgggaggtcattagctgcaaattgatcaagagggccactacacggcaaccttga

SEQ ID NO: 2509 - RNA, 1590 nt, synthetic construct; identical to SEQ ID NO: 2505
  misc_feature 1..1590: note = AAA61242 variant
  source 1..1590: mol_type = other RNA

SEQ ID NO: 2510 - RNA, 1590 nt, synthetic construct
  misc_feature 1..1590: note = AGV39054 variant
  source 1..1590: mol_type = other RNA
atgctgctcgccgtgctttactgcctgttgtggagcttccagacctccgctggccactttcccagagcatgtgtctcttcaaagaacttaatggagaaagaatgctgtcctccatggagtggggacaggagcccgtgcggacaactgtccggtcggggctcttgtcagaatatcctactctcgaacgcccccttggggcctcagttcccatttacaggagttgatgaccgcgagtcatggcccagcgtgttctataatcgaacttgccagtgtagtggcaactttatgggtttcaattgcgggaactgtaagtttggattctggggccctaattgcacggaacgtagacttctggtaaggcggaacatttttgatttgtccgcgccagagaaagacaagttctttgcttacctcaccctggccaaacatacaatatctagcgattatgtgatccccattggcacttacgggcaaatgaagaatggatccacccctatgttcaacgacatcaatatttatgatctgtttgtctggatgcactactatgtgtcaatggacgcactcttaggtggcagtgaaatctggcgcgatatagacttcgcccatgaggctccagcattcctgccgtggcacagactttttctgctgaggtgggagcaggaaatccagaagctaacaggggatgagaacttcaccattccctactgggactggcgggatgccgaaaaatgtgacatctgcactgacgagtacgttggaggccagcatcctacaaatccaaacctcctgagccccgcttcctttttctcttcatggcaaattgtgtgcagccgccttgaggaatataatagtcaccagtctctgtgtaacggtacccctgaggggccattgcgaagaaaccccggaaatcacgataagtccaggacgccgcggctccctagctcggccgacgtcgaattttgcctgtctttaactcagtacgagtccggctcaatggataaagcggcaaacttcagttttcgtaataccctggaaggcttcgccagccccctcacagggatcgctgacgcctcccagtctagcatgcataacgcacttcacatatatatgaatggaactatgtcacaagtgcagggtagtgctaacgatccaatttttctgttgcatcacgccttcgtagactccatctttgagcagtggctacgcagacacaggcctctgcaagaggtttaccccgaagcgaatgccccaattggccataaccgggagagctatatggtgcccttcatccctctctaccgaaatggggactttttcatctcttcaaaggatctgggatatgattacagttaccttcaggacagcgatccagactccttccaggactatattaaatcttacctggaacaggcatcgcgcatatggagctggttgctcggcgctgccatggtcggtgctgtgctgaccgccttactggcagggctagtgtccctcctgtgtagacacaagaggaagcaacttccggaggaaaaacagcccttgctgatggagaaggaggattatcattcactctaccagagtcacctgtga

SEQ ID NO: 2511 - RNA, 1590 nt, synthetic construct
  misc_feature 1..1590: note = AGV39162 variant
  source 1..1590: mol_type = other RNA
atgctgctcgccgtgctttactgcctgttgtggagcttccagacctccgctggccactttcccagagcatgtgtctcttcaaagaacttaatggagaaagaatgctgtcctccatggagtggggacaggagcccgtgcggacaactgtccggtcggggctcttgtcagaatatcctactctcgaacgcccccttggggcctcagttcccatttacaggagttgatgaccgcgagtcatggcccagcgtgttctataatcgaacttgccagtgtagtggcaactttatgggtttcaattgcgggaactgtaagtttggattctggggccctaattgcacggaacgtagacttctggtaaggcggaacatttttgatttgtccgcgccagagaaagacaagttctttgcttacctcaccctggccaaacatacaatatctagcgattatgtgatccccattggcacttacgggcaaatgaagaatggatccacccctatgttcaacgacatcaatatttatgatctgtttgtctggatgcactactatgtgtcaatggacgcactcttaggtggcagtgaaatctggcgcgatatagacttcgcccatgaggctccagcattcctgccgtggcacagactttttctgctgaggtgggagcaggaaatccagaagctaacaggggatgagaacttcaccattccctactgggactggcgggatgccgaaaaatgtgacatctgcactgacgagtacatgggaggccagcatcctacaaatccaaacctcctgagccccgcttcctttttctcttcatggcaaattgtttgcagccgccttgaggaatataatagtcaccagtctctgtgtaacggtacccctgaggggccattgcgaagaaaccccggaaatcacgataagtccaggacgccgcggctccctagctcggccgacgtggaattttgcctgtctttaactcagtacgagtccggctcaatggataaagcggcaaacttcagttttcgtaataccctggaaggcttcgccagccccctcacagggatcgctgacgcctcccagtctagcatgcataacgcacttcacatatatatgaatggaactatgtcacaagtccagggtagtgctaacgatccaatttttctgttgcatcacgccttcgtggactccatctttgagcagtggctacgcagacacaggctgctccaagaggtataccctgaagcgaatgcccccattggccataaccgggagagctatatggttccattcatccccctgtaccgaaatggggactttttcatctcttcaaaggatcttggatatgattacagttacctgcaggacagcgatcctgactccttccaggactatattaaatcttacttggaacaggcatcgcgcatatggagctggctcctgggcgctgccatggtgggtgctgtcttaaccgccctgctagcagggctcgtgtccctgctttgtagacacaagaggaagcaattgccagaggaaaaacagccgctgctcatggagaaggaggattatcattcactgtaccagagtcacctttga

SEQ ID NO: 2512 - RNA, 1590 nt, synthetic construct
  misc_feature 1..1590: note = AGV39086 variant
  source 1..1590: mol_type = other RNA
atgctgctcgccgtgctttactgcctgttgtggagcttccagacctccgctggccactttcccagagcatgtgtctcttcaaagaacttaatggagaaagaatgctgtcctccatggagtggggacaggagcccgtgcggacaactgtccggtcggggctcttgtcagaatatcctactctcgaacgcccccttggggcctcagttcccatttacaggagttgatgaccgcgagtcatggcccagcgtgttctataatcgaacttgccagtgtagtggcaactttatgggtttcaattgcgggaactgtaagtttggattctggggccctaattgcacggaacgtagacttctggtaaggcggaacatttttgatttgtccgcgccagagaaagacaagttctttgcttacctcaccctggccaaacatacaatatctagcgattatgtgatccccattggcacttacgggcaaatgaagaatggatccacccctatgttcaacgacatcaatatttatgatctgtttgtctggatgcactactatgtgtcaatggacgcactcttaggtggcagtgaaatctggcgcgatatagacttcgcccatgaggctccagcattcctgccgtggcacagactttttctgctgaggtgggagcaggaaatccagaagctaacaggggatgagaacttcaccattccctactgggactggcgggatgccgaaaaatgtgacatctgcactgacgagtacatgggaggccagcatcctacaaatccaaacctcctgagccccgcttcctttttctcttcatggcaaattgtttgcagccgccttgaggaatataatagtcaccagtctctgtgtaacggtacccctgaggggccattgcgaagaaaccccggaaatcacgataagtccaggacgccgcggctccctagctcggccgacgtggaattttgcctgtctttaactcagtacgagtccggctcaatggataaagcggcaaacttcagttttcgtaataccctggaaggcttcgccagccccctcacagggatcgctgacgcctcccagtctagcatgcataacgcacttcacatatatatgaatggaactatgtcacaagtccagggtagtgctaacgatccaatttttctgttgcatcacgccttcgtggactccatgtttgagcagtggctacgcagacacaggcctctgcaagaggtataccccgaagcgaatgccccaatcggccataaccgggagagctatatggttcccttcattcctctctaccgaaatggggactttttcatctcttcaaaggatctgggatatgattacagttaccttcaggacagcgatccagactccttccaggactatatcaaatcttacctggaacaggcatcgcgcatttggagctggttgctcggcgctgccatggtgggtgctgtcctgaccgccttactggcagggctagtgtccctcctgtgtagacacaagaggaagcaacttccggaggaaaaacagcccttgctgatggagaaggaggattatcattcactctaccagagtcacctgtga

SEQ ID NO: 2513 - RNA, 1614 nt, synthetic construct
  misc_feature 1..1614: note = AAC15468 variant
  source 1..1614: mol_type = other RNA
atgagcgcccccaagctgctctcccttggctgcatcttctttcctctgttgttattccagcaagctagagcacagtttccaaggcagtgtgccaccgtggaggcgctgcggtctgggatgtgctgtccggacctatcacccgtcagtggacctggtacagatcgctgcggcagctcctctgggcgaggacgttgtgaagctgttactgccgactcgagaccacactcaccccagtaccctcatgatggcagggacgatcgggaggtgtggccactccgcttctttaacagaacgtgccactgtaatggtaacttcagcgggcataattgcggaacctgtaggcccggctggcggggcgcagcctgcgaccaacgcgtactgattgtgcgaagaaaccttctggatttgagtaaagaagagaagaatcactttgtcagggctctcgacatggcaaaacggacaactcatcctctgttcgtgatagccacccgtcgctccgaagagatcctggggccagatggaaacacaccgcagtttgagaatatttctatctataactacttcgtttggacccactattacagcgtgaagaaaacttttctcggtgtcggccaggaatccttcggggaggtggacttttcacacgaaggacccgctttcttaacatggcatagatatcatctgcttaggttggagaaggatatgcaggagatgctgcaagaacctagtttcagcctaccatactggaattttgccaccggcaagaacgtatgtgacatttgcacggatgacctcatgggttctcggtccaatttcgactcaactctgatcagccccaacagtgtgttttctcagtggcgagttgtctgcgattcccttgaggactatgataccctggggacattgtgtaatagcactgaagacggacctatacgcagaaacccagcgggcaatgtggcaaggcccatggtgcagcggctcccggagcctcaggatgtcgcccaatgcctggaagttggcttattcgacacacccccattttactcgaactctaccaactccttccgcaataccgtggaggggtactcagatcctacgggaaaatatgaccccgctgtaagaagtctgcacaacctcgcccacctttttctgaatggtactggcgggcagacacacttgagcccaaacgatcccatcttcgtgctactgcatacctttactgacgcagtcttcgatgagtggctcaggcgttacaatgctgacatttccacatttcctctggaaaacgccccaatcggacacaatcggcagtataacatggtgccgttctggccccctgttaccaatacggagatgtttgtgaccgcgccagacaaccttggctacacatatgaaattcaatggccctctcgagagttcagcgtccctgaaatcatagccattgcagtggtaggtgctctgttgctcgttgccctgatcttcgggactgcttcatacttaattagagccaggcgcagtatggatgaggcaaatcagccactgctaaccgaccagtatcagtgttacgccgaggaatacgagaagctccaaaaccccaatcagtccgtggtctga

SEQ ID NO: 2514 - RNA, 1560 nt, synthetic construct
  misc_feature 1..1560: note = AAA20870 variant
  source 1..1560: mol_type = other RNA
atgagccccctgtggtggggcttcctcctttcctgcctggggtgtaagatcttgcctggagcccagggtcaatttccaagagtgtgcatgaccgtcgactctttagttaacaaagagtgttgcccgaggctgggcgctgaatcagcaaatgtgtgtgggagtcagcagggacggggccagtgcacagaggtacgcgccgatactcgaccctggagcggtccttacattctacgtaaccaagacgatagagaactctggccaaggaagttctttcaccggacgtgtaaatgcaccgggaatttcgcgggatataactgtggcgactgcaagtttggctggacagggcccaattgtgagcgcaaaaagcctccagtgataagacagaacatccattccctgtctccccaggaaagggagcagttccttggagctctggatttggccaagaaacgggtccaccctgactacgtgattactacccaacattggctcggtctgctgggcccaaatgggacacagccgcagtttgcaaactgctcggtttatgatttctttgtgtggctccactactattcagtccgcgacaccttactgggacccggccgaccttacagagccatcgatttcagccatcagggtccagcttttgtgacttggcacaggtatcaccttttgtgcctggagcgggacctacaacgtctcattgggaatgaaagtttcgcactgccctactggaactttgccacaggacgcaatgagtgtgatgtatgcaccgaccagcttttcggcgctgccagacctgatgacccaacgctgatctccaggaactctcggttcagctcctgggaaactgtttgtgactcattggatgactacaatcatctcgtgaccctgtgcaacggcacatatgaggggttactgcgacgcaatcagatgggaagaaacagtatgaagctccccactcttaaagatataagggactgtctgagcttgcaaaagtttgataacccgcctttctttcaaaattctaccttctcctttcggaacgcgctagagggtttcgacaaagcagatggcacactggactcacaggtcatgagcctccacaatctggtgcatagttttcttaacgggaccaatgccctgccccactctgctgccaacgatccaatcttcgtggtcttgcactcctttacggacgcaattttcgatgaatggatgaagcgctttaatcctcccgctgacgcctggccacaggagctcgcgcccatcggacataacagaatgtacaatatggttcctttctttccaccggtgactaacgaggaactgttcttaacaagcgaccagctgggctattcgtacgccattgatctacccgtatctgtggaagagacccctggttggccaactacactcctggtcgtgatggggacccttgttgcattggtgggcctgttcgtcctcctggcttttcttcagtataggcgtctgcggaagggatacacgcccttgatggagacccacctctcctcaaaacgatatacagaagaggcctga

SEQ ID NO: 2515 - RNA, 456 nt, synthetic construct
  misc_feature 1..456: note = CCDS7679.1 variant
  source 1..456: mol_type = other RNA
atgagaaggctgctccttgtgaccagcctggtcgttgtgttgttatgggaggccggcgctgtacccgcacctaaagtgccaatcaaaatgcaggtcaagcactggccgtccgaacaagaccccgagaaagcctggggagcgcgggtggttgaacctccagagaaggatgaccagctggtggtcctattccccgtgcagaaacctaagctcctgacaactgaagagaagccacgcgggcagggtcgaggccccattcttcctgggacgaaggcttggatggagaccgaagatacactgggacatgtattgtctccagagccggaccacgattcactctaccatccccctccagaagaggaccaaggcgaggaacgtcccagactgtgggttatgcctaaccaccaggtgctgctcggtccagaggaagatcaggaccatatatatcacccccagtga

SEQ ID NO: 2516 - RNA, 525 nt, synthetic construct
  misc_feature 1..525: note = ACF47598 variant
  source 1..525: mol_type = other RNA
atggtgagctactgggacaccggcgtcctgctctgcgcccttctgtcctgtttgttactgacagggtcttcaagtggaagcaagctaaaagatcccgagctctccctgaagggtactcagcacatcatgcaagctggccagacgcttcatctgcagtgcagaggggaagcagcccacaaatggtctttgcctgagatggtttcgaaggaatcagagaggctcagcattaccaaaagtgcgtgtggacggaacggcaagcagttctgctccacactgactctgaataccgctcaagccaaccatacaggtttttattcttgtaagtacctcgcagtgccaaccagcaaaaagaaagaaactgagtccgccatatatatcttcatttcagacacagggcgcccgtttgtagagatgtacagtgaaatccccgagattatccacatgaccgaaggacgagagttagtgataccttgccgtgtcacgagcccaaatatcactgtgaccctgaagaaaaagaaggcttga

SEQ ID NO: 2517 - RNA, 750 nt, synthetic construct
  misc_feature 1..750: note = BAR92607 variant
  source 1..750: mol_type = other RNA
atgggcagcgacgtgagagatctgaacgccctccttcccgctgtcccttccctgggagggggtggcgggtgcgcattgccagtttctggagccgcgcagtgggctccggtgttagacttcgcaccccctggcgcctcagcctacggtagtctagggggaccagctccccctccagcaccccctccaccgccccctccaccccctcacagctttatcaagcaagagccatcctggggcggcgccgaaccccatgaggaacagtgtctgtctgctttcaccgtacacttttcggggcagttcacaggaactgccggtgcgtgcaggtatggcccgtttgggcctcccccaccttcacaggcaagcagtggacaagcccggatgttccccaatgctccatacctcccctcctgtctggagtctcagcctgccattcgcaaccagggctatagcacggtgacctttgatggtacaccatcctacgggcatactccgtcacaccatgcagctcagttccccaatcacagttttaaacacgaagaccctatgggacaacagggcagccttggcgagcagcagtattctgtcccaccccctgtgtacgggtgccataccccaacagattcctgtaccggatcacaagccctgttgctccgaactccctatagcagtgacaacctgtaccagatgacatctcagctggagtgcatgacctggaatcaaatgaacctcggtgcgacgttaaagggctga

SEQ ID NO: 2518 - RNA, 1350 nt, synthetic construct
  misc_feature 1..1350: note = AAA61299 variant
  source 1..1350: mol_type = other RNA
atgggcagcgacgtgagagatctgaacgccctccttcccgctgtcccttccctgggagggggtggcgggtgcgcattgccagtttctggagccgcgcagtgggctccggtgttagacttcgcaccccctggcgcctcagcctacggtagtctagggggaccagctccccctccagcaccccctccaccgccccctccaccccctcacagctttatcaagcaagagccatcctggggcggcgccgaaccccatgaggaacagtgtctgtctgctttcaccgtacacttttcggggcagttcacaggaactgccggtgcgtgcaggtatggcccgtttgggcctcccccaccttcacaggcaagcagtggacaagcccggatgttccccaatgctccatacctcccctcctgtctggagtctcagcctgccattcgcaaccagggctatagcacggtgacctttgatggtacaccatcctacgggcatactccgtcacaccatgcagctcagttccccaatcacagttttaaacacgaagaccctatgggacaacagggcagccttggcgagcagcagtattctgtcccaccccctgtgtacgggtgccataccccaacagattcctgtaccggatcacaagccctgttgctccgaactccctatagcagtgacaacctgtaccagatgacatctcagctggagtgcatgacctggaatcaaatgaacctcggtgcgacgttaaagggcgttgccgcagggtccagctcgtctgtgaaatggactgaaggacagtccaatcactcaaccggctacgagagtgataaccatacaactccgatactgtgtggtgctcagtatcgtatccacacccacggggtcttcagaggcattcaggacgtgaggcgggtacctggagttgccccaacacttgtgcgcagcgcttccgaaacctctgagaagagaccctttatgtgcgcctaccctggctgtaataaaaggtatttcaagttgagccatctgcaaatgcactcacggaagcatacgggggagaaaccctaccagtgcgattttaaggactgtgaacgccgattcagtagatccgatcagctaaaaaggcaccagcggcgtcatactggagtcaagccattccaatgcaaaacatgccagcgcaagtttagcagatctgaccacctcaagacccacactaggacacataccggtaaaacgtcagagaagcctttcagttgtcggtggcccagctgccagaaaaagtttgcacgatccgatgaactggtgcgccaccataacatgcaccagagaaatatgaccaaacttcaactggccttgtga

SEQ ID NO: 2519 - RNA, 279 nt, synthetic construct
  misc_feature 1..279: note = AAA63269 variant
  source 1..279: mol_type = other RNA
atgcagagaaggggccaacccctggagaaccacgtggccctcatccattggcagagcgctgggattcctgcatccaaggtccacaattactgcaacatgaaaaagtctcggcttggacgctcacgagccgttcgtataagtcagccactgttgagcccgagaaggtgtcccttacatctgaccgaacggggtgcgggcctactccagcctcaaccacaggggcccgtgcgcacacctggaccaccctccggctctcaccctgctgccgcagacaattga

SEQ ID NO: 2520 - RNA, 246 nt, synthetic construct
  misc_feature 1..246: note = AAP35763 variant
  source 1..246: mol_type = other RNA
atggagagccccaagaaaaagaaccagcaactgaaagtgggcatcctccaccttgggtccagacagaagaaaattaggatacagctgcggtctcagtgcgccacctggaaggtcatctgtaagtcatgcattagtcaaacacctggaatcaatttggacttaggtagcggcgttaaagtgaagattatcccaaaagaggaacattgtaagatgccggaagctggggaggaacagccccaggtatga

SEQ ID NO: 2521 - RNA, 1098 nt, synthetic construct
  misc_feature 1..1098: note = AAA59652 variant
  source 1..1098: mol_type = other RNA
atggccgtgatggcccccagaaccctgctgctgctgctgagcggcgccctggccctgacccagacctgggccggcagccacagcatgagatacttcttcaccagcgtgagcagacccggcagaggcgagcccagattcatcgccgtgggctacgtggacgacacccagttcgtgagattcgacagcgacgccgccagccagaagatggagcccagagccccctggatcgagcaggagggccccgagtactgggaccaggagaccagaaacatgaaggcccacagccagaccgacagagccaacctgggcaccctgagaggctactacaaccagagcgaggacggcagccacaccatccagatcatgtacggctgcgacgtgggccccgacggcagattcctgagaggctacagacaggacgcctacgacggcaaggactacatcgccctgaacgaggacctgagaagctggaccgccgccgacatggccgcccagatcaccaagagaaagtgggaggccgtgcacgccgccgagcagagaagagtgtacctggagggcagatgcgtggacggcctgagaagatacctggagaacggcaaggagaccctgcagagaaccgacccccccaagacccacatgacccaccaccccatcagcgaccacgaggccaccctgagatgctgggccctgggcttctaccccgccgagatcaccctgacctggcagagagacggcgaggaccagacccaggacaccgagctggtggagaccagacccgccggcgacggcaccttccagaagtgggccgccgtggtggtgcccagcggcgaggagcagagatacacctgccacgtgcagcacgagggcctgcccaagcccctgaccctgagatgggagctgagcagccagcccaccatccccatcgtgggcatcatcgccggcctggtgctgctgggcgccgtgatcaccggcgccgtggtggccgccgtgatgtggagaagaaagagcagcgacagaaagggcggcagctacacccaggccgccagcagcgacagcgcccagggcagcgacgtgagcctgaccgcctgcaaggtgtga

SEQ ID NO: 2522 - RNA, 1098 nt, synthetic construct
  misc_feature 1..1098: note = AAA59606 variant
  source 1..1098: mol_type = other RNA
atggccgtgatggcccccagaaccctggtgctgctgctgagcggcgccctggccctgacccagacctgggccggcagccacagcatgagatacttcttcaccagcgtgagcagacccggcagaggcgagcccagattcatcgccgtgggctacgtggacgacacccagttcgtgagattcgacagcgacgccgccagccagagaatggagcccagagccccctggatcgagcaggagggccccgagtactgggacggcgagaccagaaaggtgaaggcccacagccagacccacagagtggacctgggcaccctgagaggctactacaaccagagcgaggccggcagccacaccgtgcagagaatgtacggctgcgacgtgggcagcgactggagattcctgagaggctaccaccagtacgcctacgacggcaaggactacatcgccctgaaggaggacctgagaagctggaccgccgccgacatggccgcccagaccaccaagcacaagtgggaggccgcccacgtggccgagcagctgagagcctacctggagggcacctgcgtggagtggctgagaagatacctggagaacggcaaggagaccctgcagagaaccgacgcccccaagacccacatgacccaccacgccgtgagcgaccacgaggccaccctgagatgctgggccctgagcttctaccccgccgagatcaccctgacctggcagagagacggcgaggaccagacccaggacaccgagctggtggagaccagacccgccggcgacggcaccttccagaagtgggccgccgtggtggtgcccagcggccaggagcagagatacacctgccacgtgcagcacgagggcctgcccaagcccctgaccctgagatgggagcccagcagccagcccaccatccccatcgtgggcatcatcgccggcctggtgctgttcggcgccgtgatcaccggcgccgtggtggccgccgtgatgtggagaagaaagagcagcgacagaaagggcggcagctacagccaggccgccagcagcgacagcgcccagggcagcgacgtgagcctgaccgcctgcaaggtgtga

SEQ ID NO: 2523 - RNA, 1263 nt, synthetic construct
  misc_feature 1..1263: note = AAH37161 variant
  source 1..1263: mol_type = other RNA
atgcccggcggctgcagcagaggccccgccgccggcgacggcagactgagactggccagactggccctggtgctgctgggctgggtgagcagcagcagccccaccagcagcgccagcagcttcagcagcagcgcccccttcctggccagcgccgtgagcgcccagccccccctgcccgaccagtgccccgccctgtgcgagtgcagcgaggccgccagaaccgtgaagtgcgtgaacagaaacctgaccgaggtgcccaccgacctgcccgcctacgtgagaaacctgttcctgaccggcaaccagctggccgtgctgcccgccggcgccttcgccagaagaccccccctggccgagctggccgccctgaacctgagcggcagcagactggacgaggtgagagccggcgccttcgagcacctgcccagcctgagacagctggacctgagccacaaccccctggccgacctgagccccttcgccttcagcggcagcaacgccagcgtgagcgcccccagccccctggtggagctgatcctgaaccacatcgtgccccccgaggacgagagacagaacagaagcttcgagggcatggtggtggccgccctgctggccggcagagccctgcagggcctgagaagactggagctggccagcaaccacttcctgtacctgcccagagacgtgctggcccagctgcccagcctgagacacctggacctgagcaacaacagcctggtgagcctgacctacgtgagcttcagaaacctgacccacctggagagcctgcacctggaggacaacgccctgaaggtgctgcacaacggcaccctggccgagctgcagggcctgccccacatcagagtgttcctggacaacaacccctgggtgtgcgactgccacatggccgacatggtgacctggctgaaggagaccgaggtggtgcagggcaaggacagactgacctgcgcctaccccgagaagatgagaaacagagtgctgctggagctgaacagcgccgacctggactgcgaccccatcctgccccccagcctgcagaccagctacgtgttcctgggcatcgtgctggccctgatcggcgccatcttcctgctggtgctgtacctgaacagaaagggcatcaagaagtggatgcacaacatcagagacgcctgcagagaccacatggagggctaccactacagatacgagatcaacgccgaccccagactgaccaacctgagcagcaacagcgacgtgtga

SEQ ID NO: 2524 - RNA, 1632 nt, synthetic construct
  misc_feature 1..1632: note = AAH33010 variant
  source 1..1632: mol_type = other RNA
atgagaaagcccgccgccggcttcctgcccagcctgctgaaggtgctgctgctgcccctggcccccgccgccgcccaggacagcacccaggccagcacccccggcagccccctgagccccaccgagtacgagagattcttcgccctgctgacccccacctggaaggccgagaccacctgcagactgagagccacccacggctgcagaaaccccaccctggtgcagctggaccagtacgagaaccacggcctggtgcccgacggcgccgtgtgcagcaacctgccctacgccagctggttcgagagcttctgccagttcacccactacagatgcagcaaccacgtgtactacgccaagagagtgctgtgcagccagcccgtgagcatcctgagccccaacaccctgaaggagatcgaggccagcgccgaggtgagccccaccaccatgaccagccccatcagcccccacttcaccgtgaccgagagacagaccttccagccctggcccgagagactgagcaacaacgtggaggagctgctgcagagcagcctgagcctgggcggccaggagcaggcccccgagcacaagcaggagcagggcgtggagcacagacaggagcccacccaggagcacaagcaggaggagggccagaagcaggaggagcaggaggaggagcaggaggaggagggcaagcaggaggagggccagggcaccaaggagggcagagaggccgtgagccagctgcagaccgacagcgagcccaagttccacagcgagagcctgagcagcaaccccagcagcttcgcccccagagtgagagaggtggagagcacccccatgatcatggagaacatccaggagctgatcagaagcgcccaggagatcgacgagatgaacgagatctacgacgagaacagctactggagaaaccagaaccccggcagcctgctgcagctgccccacaccgaggccctgctggtgctgtgctacagcatcgtggagaacacctgcatcatcacccccaccgccaaggcctggaagtacatggaggaggagatcctgggcttcggcaagagcgtgtgcgacagcctgggcagaagacacatgagcacctgcgccctgtgcgacttctgcagcctgaagctggagcagtgccacagcgaggccagcctgcagagacagcagtgcgacaccagccacaagacccccttcgtgagccccctgctggccagccagagcctgagcatcggcaaccaggtgggcagccccgagagcggcagattctacggcctggacctgtacggcggcctgcacatggacttctggtgcgccagactggccaccaagggctgcgaggacgtgagagtgagcggctggctgcagaccgagttcctgagcttccaggacggcgacttccccaccaagatctgcgacaccgactacatccagtaccccaactactgcagcttcaagagccagcagtgcctgatgagaaacagaaacagaaaggtgagcagaatgagatgcctgcagaacgagacctacagcgccctgagccccggcaagagcgaggacgtggtgctgagatggagccaggagttcagcaccctgaccctgggccagttcggctga

SEQ ID NO: 2525 - RNA, 1830 nt, synthetic construct
  misc_feature 1..1830: note = AAB58754 variant
  source 1..1830: mol_type = other RNA
atgaagtgggtggagagcatcttcctgatcttcctgctgaacttcaccgagagcagaaccctgcacagaaacgagtacggcatcgccagcatcctggacagctaccagtgcaccgccgagatcagcctggccgacctggccaccatcttcttcgcccagttcgtgcaggaggccacctacaaggaggtgagcaagatggtgaaggacgccctgaccgccatcgagaagcccaccggcgacgagcagagcagcggctgcctggagaaccagctgcccgccttcctggaggagctgtgccacgagaaggagatcctggagaagtacggccacagcgactgctgcagccagagcgaggagggcagacacaactgcttcctggcccacaagaagcccacccccgccagcatccccctgttccaggtgcccgagcccgtgaccagctgcgaggcctacgaggaggacagagagaccttcatgaacaagttcatctacgagatcgccagaagacaccccttcctgtacgcccccaccatcctgctgtgggccgccagatacgacaagatcatccccagctgctgcaaggccgagaacgccgtggagtgcttccagaccaaggccgccaccgtgaccaaggagctgagagagagcagcctgctgaaccagcacgcctgcgccgtgatgaagaacttcggcaccagaaccttccaggccatcaccgtgaccaagctgagccagaagttcaccaaggtgaacttcaccgagatccagaagctggtgctggacgtggcccacgtgcacgagcactgctgcagaggcgacgtgctggactgcctgcaggacggcgagaagatcatgagctacatctgcagccagcaggacaccctgagcaacaagatcaccgagtgctgcaagctgaccaccctggagagaggccagtgcatcatccacgccgagaacgacgagaagcccgagggcctgagccccaacctgaacagattcctgggcgacagagacttcaaccagttcagcagcggcgagaagaacatcttcctggccagcttcgtgcacgagtacagcagaagacacccccagctggccgtgagcgtgatcctgagagtggccaagggctaccaggagctgctggagaagtgcttccagaccgagaaccccctggagtgccaggacaagggcgaggaggagctgcagaagtacatccaggagagccaggccctggccaagagaagctgcggcctgttccagaagctgggcgagtactacctgcagaacgccttcctggtggcctacaccaagaaggccccccagctgaccagcagcgagctgatggccatcaccagaaagatggccgccaccgccgccacctgctgccagctgagcgaggacaagctgctggcctgcggcgagggcgccgccgacatcatcatcggccacctgtgcatcagacacgagatgacccccgtgaaccccggcgtgggccagtgctgcaccagcagctacgccaacagaagaccctgcttcagcagcctggtggtggacgagacctacgtgccccccgccttcagcgacgacaagttcatcttccacaaggacctgtgccaggcccagggcgtggccctgcagaccatgaagcaggagttcctgatcaacctggtgaagcagaagccccagatcaccgaggagcagctggaggccgtgatcgccgacttcagcggcctgctggagaagtgctgccagggccaggagcaggaggtgtgcttcgccgaggagggccagaagctgatcagcaagaccagagccgccctgggcgtgtga

SEQ ID NO: 2526 - RNA, 2565 nt, synthetic construct
  misc_feature 1..2565: note = AAI26251 variant
  source 1..2565: mol_type = other RNA
atgatggcctacagcgacaccaccatgatgagcgacgacatcgactggctgagaagccacagaggcgtgtgcaaggtggacctgtacaaccccgagggccagcaggaccaggacagaaaggtgatctgcttcgtggacgtgagcaccctgaacgtggaggacaaggactacaaggacgccgccagcagcagcagcgagggcaacctgaacctgggcagcctggaggagaaggagatcatcgtgatcaaggacaccgagaagaaggaccagagcaagaccgagggcagcgtgtgcctgttcaagcaggcccccagcgaccccgtgagcgtgctgaactggctgctgagcgacctgcagaagtacgccctgggcttccagcacgccctgagccccagcaccagcacctgcaagcacaaggtgggcgacaccgagggcgagtaccacagagccagcagcgagaactgctacagcgtgtacgccgaccaggtgaacatcgactacctgatgaacagaccccagaacctgagactggagatgaccgccgccaagaacaccaacaacaaccagagccccagcgccccccccgccaagccccccagcacccagagagccgtgatcagccccgacggcgagtgcagcatcgacgacctgagcttctacgtgaacagactgagcagcctggtgatccagatggcccacaaggagatcaaggagaagctggagggcaagagcaagtgcctgcaccacagcatctgccccagccccggcaacaaggagagaatcagccccagaacccccgccagcaagatcgccagcgagatggcctacgaggccgtggagctgaccgccgccgagatgagaggcaccggcgaggagagcagagagggcggccagaagagcttcctgtacagcgagctgagcaacaagagcaagagcggcgacaagcagatgagccagagagagagcaaggagttcgccgacagcatcagcaagggcctgatggtgtacgccaaccaggtggccagcgacatgatggtgagcctgatgaagaccctgaaggtgcacagcagcggcaagcccatccccgccagcgtggtgctgaagagagtgctgctgagacacaccaaggagatcgtgagcgacctgatcgacagctgcatgaagaacctgcacaacatcaccggcgtgctgatgaccgacagcgacttcgtgagcgccgtgaagagaaacctgttcaaccagtggaagcagaacgccaccgacatcatggaggccatgctgaagagactggtgagcgccctgatcggcgaggagaaggagaccaagagccagagcctgagctacgccagcctgaaggccggcagccacgaccccaagtgcagaaaccagagcctggagttcagcaccatgaaggccgagatgaaggagagagacaagggcaagatgaagagcgacccctgcaagagcctgaccagcgccgagaaggtgggcgagcacatcctgaaggagggcctgaccatctggaaccagaagcagggcaacagctgcaaggtggccaccaaggcctgcagcaacaaggacgagaagggcgagaagatcaacgccagcaccgacagcctggccaaggacctgatcgtgagcgccctgaagctgatccagtaccacctgacccagcagaccaagggcaaggacacctgcgaggaggactgccccggcagcaccatgggctacatggcccagagcacccagtacgagaagtgcggcggcggccagagcgccaaggccctgagcgtgaagcagctggagagccacagagcccccggccccagcacctgccagaaggagaaccagcacctggacagccagaagatggacatgagcaacatcgtgctgatgctgatccagaagctgctgaacgagaaccccttcaagtgcgaggacccctgcgagggcgagaacaagtgcagcgagcccagagccagcaaggccgccagcatgagcaacagaagcgacaaggccgaggagcagtgccaggagcaccaggagctggactgcaccagcggcatgaagcaggccaacggccagttcatcgacaagctggtggagagcgtgatgaagctgtgcctgatcatggccaagtacagcaacgacggcgccgccctggccgagctggaggagcaggccgccagcgccaacaagcccaacttcagaggcaccagatgcatccacagcggcgccatgccccagaactaccaggacagcctgggccacgaggtgatcgtgaacaaccagtgcagcaccaacagcctgcagaagcagctgcaggccgtgctgcagtggatcgccgccagccagttcaacgtgcccatgctgtacttcatgggcgacaaggacggccagctggagaagctgccccaggtgagcgccaaggccgccgagaagggctacagcgtgggcggcctgctgcaggaggtgatgaagttcgccaaggagagacagcccgacgaggccgtgggcaaggtggccagaaagcagctgctggactggctgctggccaacctgtga

SEQ ID NO: 2527 - RNA, 1251 nt, synthetic construct
  misc_feature 1..1251: note = BAG61782 variant
  source 1..1251: mol_type = other RNA
atggtggactaccacgccgccaaccagagctaccagtacggccccagcagcgccggcaacggcgccggcggcggcggcagcatgggcgactacatggcccaggaggacgactgggacagagacctgctgctggaccccgcctgggagaagcagcagagaaagaccttcaccgcctggtgcaacagccacctgagaaaggccggcacccagatcgagaacatcgacgaggacttcagagacggcctgaagctgatgctgctgctggaggtgatcagcggcgagagactgcccaagcccgagagaggcaagatgagagtgcacaagatcaacaacgtgaacaaggccctggacttcatcgccagcaagggcgtgaagctggtgagcatcggcgccgaggagatcgtggacggcaacgccaagatgaccctgggcatgatctggaccatcatcctgagattcgccatccaggacatcagcgtggaggagaccagcgccaaggagggcctgctgctgtggtgccagagaaagaccgccccctacaagaacgtgaacgtgcagaacttccacatcagctggaaggacggcctggccttcaacgccctgatccacagacacagacccgagctgatcgagtacgacaagctgagaaaggacgaccccgtgaccaacctgaacaacgccttcgaggtggccgagaagtacctggacatccccaagatgctggacgccgaggacatcgtgaacaccgccagacccgacgagaaggccatcatgacctacgtgagcagcttctaccacgccttcagcggcgcccagaaggccgagaccgccgccaacagaatctgcaaggtgctggccgtgaaccaggagaacgagcacctgatggaggactacgagaagctggccagcgacctgctggagtggatcagaagaaccatcccctggctggaggacagagtgccccagaagaccatccaggagatgcagcagaagctggaggacttcagagactacagaagagtgcacaagccccccaaggtgcaggagaagtgccagctggagatcaacttcaacaccctgcagaccaagctgagactgagcaacagacccgccttcatgcccagctggagaagcagagccagcagcagccccaccagcacctgcgccgccagcagccccgccagacccatgctgtggggccccggcagcagacccagatggagaagaagcggcgccagccccctgagatga

SEQ ID NO: 2528 - RNA, 1689 nt, synthetic construct
  misc_feature 1..1689: note = BAG65349 variant
  source 1..1689: mol_type = other RNA
atggtggactaccacgccgccaaccagagctaccagtacggccccagcagcgccggcaacggcgccggcggcggcggcagcatgggcgactacatggcccaggaggacgactgggacagagacctgctgctggaccccgcctgggagaagcagcagagaaagaccttcaccgcctggtgcaacagccacctgagaaaggccggcacccagatcgagaacatcgacgaggacttcagagacggcctgaagctgatgctgctgctggaggtgatcagcggcgagagactgcccaagcccgagagaggcaagatgagagtgcacaagatcaacaacgtgaacaaggccctggacttcatcgccagcaagggcgtgaagctggtgagcatcggcgccgaggagatcgtggacggcaacgccaagatgaccctgggcatgatctggaccatcatcctgagattcgccatccaggacatcagcgtggaggagaccagcgccaaggagggcctgctgctgtggtgccagagaaagaccgccccctacaagaacgtgaacgtgcagaacttccacatcagctggaaggacggcctggccttcaacgccctgatccacagacacagacccgagctgatcgagtacgacaagctgagaaaggacgaccccgtgaccaacctgaacaacgccttcgaggtggccgagaagtacctggacatccccaagatgctggacgccgaggacatcgtgaacaccgccagacccgacgagaaggccatcatgacctacgtgagcagcttctaccacgccttcagcggcgcccagaaggccgagaccgccgccaacagaatctgcaaggtgctggccgtgaaccaggagaacgagcacctgatggaggactacgagaagctggccagcgacctgctggagtggatccagagaaccatcccctggctggaggacagagtgccccagaaggccatccaggagatgcagcagaagctggaggacttcagagactacagaagagtgcacaagccccccaaggtgcaggagaagtgccagctggagatcaacttcaacaccctgcagaccaagctgagactgagcaacagacccgccttcatgcccagcgagggcaagatggtgagcgacatcaacaacggctggcagcacctggagcaggccgagaagggctacgaggagtggctgctgaacgagatcagaagactggagagactggaccacctggccgagaagttcagacagaaggccagcatccacgaggcctggaccgacggcaaggaggccatgctgaagcacagagactacgagaccgccaccctgagcgacatcaaggccctgatcagaaagcacgaggccttcgagagcgacctggccgcccaccaggacagagtggagcagatcgccgccatcgcccaggagctgaacgagctggactactacgacagccacaacgtgaacacccccgacggcctgcaggagggccccggccagccccacagccccatcccccccctgtgcatctacgccaagcacagcctgcagagcagcggcgtgggcggctgggccggcagaggctggggcagactgagccccctgagcctgtgcggcctggccagaagattccccagacccggctggggcgacctgggccccgccctgctggtgtggtga

SEQ ID NO: 2529 - RNA, 2736 nt, synthetic construct
  misc_feature 1..2736: note = AAH05033 variant
  source 1..2736: mol_type = other RNA
atggtggactaccacgccgccaaccagagctaccagtacggccccagcagcgccggcaacggcgccggcggcggcggcagcatgggcgactacatggcccaggaggacgactgggacagagacctgctgctggaccccgcctgggagaagcagcagagaaagaccttcaccgcctggtgcaacagccacctgagaaaggccggcacccagatcgagaacatcgacgaggacttcagagacggcctgaagctgatgctgctgctggaggtgatcagcggcgagagactgcccaagcccgagagaggcaagatgagagtgcacaagatcaacaacgtgaacaaggccctggacttcatcgccagcaagggcgtgaagctggtgagcatcggcgccgaggagatcgtggacggcaacgccaagatgaccctgggcatgatctggaccatcatcctgagattcgccatccaggacatcagcgtggaggagaccagcgccaaggagggcctgctgctgtggtgccagagaaagaccgccccctacaagaacgtgaacgtgcagaacttccacatcagctggaaggacggcctggccttcaacgccctgatccacagacacagacccgagctgatcgagtacgacaagctgagaaaggacgaccccgtgaccaacctgaacaacgccttcgaggtggccgagaagtacctggacatccccaagatgctggacgccgaggacatcgtgaacaccgccagacccgacgagaaggccatcatgacctacgtgagcagcttctaccacgccttcagcggcgcccagaaggccgagaccgccgccaacagaatctgcaaggtgctggccgtgaaccaggagaacgagcacctgatggaggactacgagaagctggccagcgacctgctggagtggatcagaagaaccatcccctggctggaggacagagtgccccagaagaccatccaggagatgcagcagaagctggaggacttcagagactacagaagagtgcacaagccccccaaggtgcaggagaagtgccagctggagatcaacttcaacaccctgcagaccaagctgagactgagcaacagacccgccttcatgcccagcgagggcaagatggtgagcgacatcaacaacggctggcagcacctggagcaggccgagaagggctacgaggagtggctgctgaacgagatcagaagactggagagactggaccacctggccgagaagttcagacagaaggccagcatccacgaggcctggaccgacggcaaggaggccatgctgaagcacagagactacgagaccgccaccctgagcgacatcaaggccctgatcagaaagcacgaggccttcgagagcgacctggccgcccaccaggacagagtggagcagatcgccgccatcgcccaggagctgaacgagctggactactacgacagccacaacgtgaacaccagatgccagaagatctgcgaccagtgggacgccctgggcagcctgacccacagcagaagagaggccctggagaagaccgagaagcagctggaggccatcgaccagctgcacctggagtacgccaagagagccgcccccttcaacaactggatggagagcgccatggaggacctgcaggacatgttcatcgtgcacaccatcgaggagatcgagggcctgatcagcgcccacgaccagttcaagagcaccctgcccgacgccgacagagagagagaggccatcctggccatccacaaggaggcccagagaatcgccgagagcaaccacatcaagctgagcggcagcaacccctacaccaccgtgaccccccagatcatcaacagcaagtgggagaaggtgcagcagctggtgcccaagagagaccacgccctgctggaggagcagagcaagcagcagagcaacgagcacctgagaagacagttcgccagccaggccaacgtggtgggcccctggatccagaccaagatggaggagatcggcagaatcagcatcgagatgaacggcaccctggaggaccagctgagccacctgaagcagtacgagagaagcatcgtggactacaagcccaacctggacctgctggagcagcagcaccagctgatccaggaggccctgatcttcgacaacaagcacaccaactacaccatggagcacatcagagtgggctgggagcagctgctgaccaccatcgccagaaccatcaacgaggtggagaaccagatcctgaccagagacgccaagggcatcagccaggagcagatgcaggagttcagagccagcttcaaccacttcgacaaggaccacggcggcgccctgggccccgaggagttcaaggcctgcctgatcagcctgggctacgacgtggagaacgacagacagggcgaggccgagttcaacagaatcatgagcctggtggaccccaaccacagcggcctggtgaccttccaggccttcatcgacttcatgagcagagagaccaccgacaccgacaccgccgaccaggtgatcgccagcttcaaggtgctggccggcgacaagaacttcatcaccgccgaggagctgagaagagagctgccccccgaccaggccgagtactgcatcgccagaatggccccctaccagggccccgacgccgtgcccggcgccctggactacaagagcttcagcaccgccctgtacggcgagagcgacctgtga

SEQ ID NO: 2530 - RNA, 597 nt, synthetic construct
  misc_feature 1..597: note = EAX10817 variant
  source 1..597: mol_type = other RNA
atggccctgcagggcatcagcgtgatggagctgagcggcctggcccccggccccttctgcgccatggtgctggccgacttcggcgccagagtggtgagagtggacagacccggcagcagatacgacgtgagcagactgggcagaggcaagagaagcctggtgctggacctgaagcagcccagaggcgccgccgtgctgagaagactgtgcaagagaagcgacgtgctgctggagcccttcagaagaggcgtgatggagaagctgcagctgggccccgagatcctgcagagagagaaccccagactgatctacgccagactgagcggcttcggccagagcggcagcttctgcagactggccggccacgacatcaactacctggccctgagcggcggcagaaacagcatcttcaagttcttcagcgtggagaacagcgagatcgagagcgtgggcagcaccagcagaaccgagcacgtgggctggtggagcaccttcctgtacgacctgcaggacagcagatggggcatccacggctgctggagcaacagaacccccgtgctgagagccgccgaccagagaacctggaccaaggtgtga

SEQ ID NO: 2531 - RNA, 597 nt, synthetic construct
  misc_feature 1..597: note = BAF85677 variant
  source 1..597: mol_type = other RNA
atggccctgcagggcatcagcgtggtggagctgagcggcctggcccccggccccttctgcgccatggtgctggccgacttcggcgccagagtggtgagagtggacagacccggcagcagatacgacgtgagcagactgggcagaggcaagagaagcctggtgctggacctgaagcagcccagaggcgccgccgtgctgagaagactgtgcaagagaagcgacgtgctgctggagcccttcagaagaggcgtgatggagaagctgcagctgggccccgagatcctgcagagagagaaccccagactgatctacgccagactgagcggcttcggccagagcggcagcttctgcagactggccggccacgacatcaactacctggccctgagcggcggcagaaacagcatcttcaagttcttcagcgtggagaacagcgagatcgagagcgtgggcagcaccagcagaaccgagcacgtgggctggtggagcaccttcctgtacgacctgcaggacagcagatggggcatccacggctgctggagcaacagaacccccttcctgagagccgccgaccagagaacctggaccaaggtgtga

SEQ ID NO: 2532 - RNA, 2763 nt, synthetic construct
  misc_feature 1..2763: note = EAX05380 variant
  source 1..2763: mol_type = other RNA
atggaggtgcagctgggcctgggcagagtgtaccccagaccccccagcaagacctacagaggcgccttccagaacctgttccagagcgtgagagaggtgatccagaaccccggccccagacaccccgaggccgccagcgccgccccccccggcgccagcctgctgctgctgcagcagcagcagcagcagcagcagcagcagcagcagcagcagcagcagcagcagcagcagcagcagcaggagaccagccccagacagcagcagcagcagcagggcgaggacggcagcccccaggcccacagaagaggccccaccggctacctggtgctggacgaggagcagcagcccagccagccccagagcgccctggagtgccaccccgagagaggctgcgtgcccgagcccggcgccgccgtggccgccagcaagggcctgccccagcagctgcccgccccccccgacgaggacgacagcgccgcccccagcaccctgagcctgctgggccccaccttccccggcctgagcagctgcagcgccgacctgaaggacatcctgagcgaggccagcaccatgcagctgctgcagcagcagcagcaggaggccgtgagcgagggcagcagcagcggcagagccagagaggccagcggcgcccccaccagcagcaaggacaactacctgggcggcaccagcaccatcagcgacaacgccaaggagctgtgcaaggccgtgagcgtgagcatgggcctgggcgtggaggccctggagcacctgagccccggcgagcagctgagaggcgactgcatgtacgcccccctgctgggcgtgccccccgccgtgagacccaccccctgcgcccccctggccgagtgcaagggcagcctgctggacgacagcgccggcaagagcaccgaggacaccgccgagtacagccccttcaagggcggctacaccaagggcctggagggcgagagcctgggctgcagcggcagcgccgccgccggcagcagcggcaccctggagctgcccagcaccctgagcctgtacaagagcggcgccctggacgaggccgccgcctaccagagcagagactactacaacttccccctggccctggccggccccccccccccccccccccccccccacccccacgccagaatcaagctggagaaccccctggactacggcagcgcctgggccgccgccgccgcccagtgcagatacggcgacctggccagcctgcacggcgccggcgccgccggccccggcagcggcagccccagcgccgccgccagcagcagctggcacaccctgttcaccgccgaggagggccagctgtacggcccctgcggcggcggcggcggcggcggcggcggcggcggcggcggcggcggcggcggcggcggcggcggcggcggcgaggccggcgccgtggccccctacggctacaccagacccccccagggcctggccggccaggagagcgacttcaccgcccccgacgtgtggtaccccggcggcatggtgagcagagtgccctaccccagccccacctgcgtgaagagcgagatgggcccctggatggacagctacagcggcccctacggcgacatgagactggagaccgccagagaccacgtgctgcccatcgactactacttccccccccagaagacctgcctgatctgcggcgacgaggccagcggctgccactacggcgccctgacctgcggcagctgcaaggtgttcttcaagagagccgccgagggcaagcagaagtacctgtgcgccagcagaaacgactgcaccatcgacaagttcagaagaaagaactgccccagctgcagactgagaaagtgctacgaggccggcatgaccctgggcgccagaaagctgaagaagctgggcaacctgaagctgcaggaggagggcgaggccagcagcaccaccagccccaccgaggagaccacccagaagctgaccgtgagccacatcgagggctacgagtgccagcccatcttcctgaacgtgctggaggccatcgagcccggcgtggtgtgcgccggccacgacaacaaccagcccgacagcttcgccgccctgctgagcagcctgaacgagctgggcgagagacagctggtgcacgtggtgaagtgggccaaggccctgcccggcttcagaaacctgcacgtggacgaccagatggccgtgatccagtacagctggatgggcctgatggtgttcgccatgggctggagaagcttcaccaacgtgaacagcagaatgctgtacttcgcccccgacctggtgttcaacgagtacagaatgcacaagagcagaatgtacagccagtgcgtgagaatgagacacctgagccaggagttcggctggctgcagatcaccccccaggagttcctgtgcatgaaggccctgctgctgttcagcatcatccccgtggacggcctgaagaaccagaagttcttcgacgagctgagaatgaactacatcaaggagctggacagaatcatcgcctgcaagagaaagaaccccaccagctgcagcagaagattctaccagctgaccaagctgctggacagcgtgcagcccatcgccagagagctgcaccagttcaccttcgacctgctgatcaagagccacatggtgagcgtggacttccccgagatgatggccgagatcatcagcgtgcaggtgcccaagatcctgagcggcaaggtgaagcccatctacttccacacccagtga

SEQ ID NO: 2533 - RNA, 1239 nt, synthetic construct
  misc_feature 1..1239: note = AAH64630 variant
  source 1..1239: mol_type = other RNA
atggcccccgtggagcacgtggtggccgacgccggcgccttcctgagacacgccgccctgcaggacatcggcaagaacatctacaccatcagagaggtggtgaccgagatcagagacaaggccaccagaagaagactggccgtgctgccctacgagctgagattcaaggagcccctgcccgagtacgtgagactggtgaccgagttcagcaagaagaccggcgactaccccagcctgagcgccaccgacatccaggtgctggccctgacctaccagctggaggccgagttcgtgggcgtgagccacctgaagcaggagccccagaaggtgaaggtgagcagcagcatccagcaccccgagacccccctgcacatcagcggcttccacctgccctacaagcccaagcccccccaggagaccgagaagggccacagcgcctgcgagcccgagaacctggagttcagcagcttcatgttctggagaaaccccctgcccaacatcgaccacgagctgcaggagctgctgatcgacagaggcgaggacgtgcccagcgaggaggaggaggaggaggagaacggcttcgaggacagaaaggacgacagcgacgacgacggcggcggctggatcacccccagcaacatcaagcagatccagcaggagctggagcagtgcgacgtgcccgaggacgtgagagtgggctgcctgaccaccgacttcgccatgcagaacgtgctgctgcagatgggcctgcacgtgctggccgtgaacggcatgctgatcagagaggccagaagctacatcctgagatgccacggctgcttcaagaccaccagcgacatgagcagagtgttctgcagccactgcggcaacaagaccctgaagaaggtgagcgtgaccgtgagcgacgacggcaccctgcacatgcacttcagcagaaaccccaaggtgctgaaccccagaggcctgagatacagcctgcccacccccaagggcggcaagtacgccatcaacccccacctgaccgaggaccagagattcccccagctgagactgagccagaaggccagacagaagaccaacgtgttcgcccccgactacatcgccggcgtgagccccttcgtggagaacgacatcagcagcagaagcgccaccctgcaggtgagagacagcaccctgggcgccggcagaagaagactgaaccccaacgccagcagaaagaagttcgtgaagaagagatga

SEQ ID NO: 2534 - RNA, 984 nt, synthetic construct
  misc_feature 1..984: note = AAH69102 variant
  source 1..984: mol_type = other RNA
atgcagatgcccgccatgatgagcctgctgctggtgagcgtgggcctgatggaggccctgcaggcccagagccaccccatcaccagaagagacctgttcagccaggagatccagctggacatggccctggccagcttcgacgaccagtacgccggctgcgccgccgccatgaccgccgccctgcccgacctgaaccacaccgagttccaggccaaccaggtgtacgccgacagctggaccctggccagcagccagtggcaggagagacaggccagatggcccgagtggagcctgagccccaccagacccagccccccccccctgggcttcagagacgagcacggcgtggccctgctggcctacaccgccaacagccccctgcacaaggagttcaacgccgccgtgagagaggccggcagaagcagagcccactacctgcaccacttcagcttcaagaccctgcacttcctgctgaccgaggccctgcagctgctgggcagcggccagagaccccccagatgccaccaggtgttcagaggcgtgcacggcctgagattcagacccgccggccccagagccaccgtgagactgggcggcttcgccagcgccagcctgaagcacgtggccgcccagcagttcggcgaggacaccttcttcggcatctggacctgcctgggcgcccccatcaagggctacagcttcttccccggcgaggaggaggtgctgatcccccccttcgagaccttccaggtgatcaacgccagcagactggcccagggccccgccagaatctacctgagagccctgggcaagcacagcacctacaactgcgagtacatcaaggacaagaagtgcaagagcggcccctgccacctggacaacagcgccatgggccagagccccctgagcgccgtgtggagcctgctgctgctgctgtggttcctggtggtgagagccttccccgacggccccggcctgctgtga

SEQ ID NO: 2535 - RNA, 1035 nt, synthetic construct
  misc_feature 1..1035: note = AAH09751 variant
  source 1..1035: mol_type = other RNA
atggcccagaaggagaacagctacccctggccctacggcagacagaccgcccccagcggcctgagcaccctgccccagagagtgctgagaaaggagcccgtgacccccagcgccctggtgctgatgagcagaagcaacgtgcagcccaccgccgcccccggccagaaggtgatggagaacagcagcggcacccccgacatcctgaccagacacttcaccatcgacgacttcgagatcggcagacccctgggcaagggcaagttcggcaacgtgtacctggccagagagaagaagagccacttcatcgtggccctgaaggtgctgttcaagagccagatcgagaaggagggcgtggagcaccagctgagaagagagatcgagatccaggcccacctgcaccaccccaacatcctgagactgtacaactacttctacgacagaagaagaatctacctgatcctggagtacgcccccagaggcgagctgtacaaggagctgcagaagagctgcaccttcgacgagcagagaaccgccaccatcatggaggagctggccgacgccctgatgtactgccacggcaagaaggtgatccacagagacatcaagcccgagaacctgctgctgggcctgaagggcgagctgaagatcgccgacttcggctggagcgtgcacgcccccagcctgagaagaaagaccatgtgcggcaccctggactacctgccccccgagatgatcgagggcagaatgcacaacgagaaggtggacctgtggtgcatcggcgtgctgtgctacgagctgctggtgggcaacccccccttcgagagcgccagccacaacgagacctacagaagaatcgtgaaggtggacctgaagttccccgccagcgtgcccatgggcgcccaggacctgatcagcaagctgctgagacacaaccccagcgagagactgcccctggcccaggtgagcgcccacccctgggtgagagccaacagcagaagagtgctgccccccagcgccctgcagagcgtggcctga

SEQ ID NO: 2536 - RNA, 360 nt, synthetic construct
  misc_feature 1..360: note = AAD48083 variant
  source 1..360: mol_type = other RNA
atgagcagaagcgtggccctggccgtgctggccctgctgagcctgagcggcctggaggccatccagagaacccccaagatccaggtgtacagcagacaccccgccgagaacggcaagagcaacttcctgaactgctacgtgagcggcttccaccccagcgacatcgaggtggacctgctgaagaacggcgagagaatcgagaaggtggagcacagcgacctgagcttcagcaaggactggagcttctacctgctgtactacaccgagttcacccccaccgagaaggacgagtacgcctgcagagtgaaccacgtgaccctgagccagcccaagatcgtgaagtgggacagagacatgtga

SEQ ID NO: 2537 - RNA, 1137 nt, synthetic construct
  misc_feature 1..1137: note = AAH28058 variant
  source 1..1137: mol_type = other RNA
atgagaatgctggtgagcggcagaagagtgaagaagtggcagctgatcatccagctgttcgccacctgcttcctggccagcctgatgttcttctgggagcccatcgacaaccacatcgtgagccacatgaagagctacagctacagatacctgatcaacagctacgacttcgtgaacgacaccctgagcctgaagcacaccagcgccggccccagataccagtacctgatcaaccacaaggagaagtgccaggcccaggacgtgctgctgctgctgttcgtgaagaccgcccccgagaactacgacagaagaagcggcatcagaagaacctggggcaacgagaactacgtgagaagccagctgaacgccaacatcaagaccctgttcgccctgggcacccccaaccccctggagggcgaggagctgcagagaaagctggcctgggaggaccagagatacaacgacatcatccagcaggacttcgtggacagcttctacaacctgaccctgaagctgctgatgcagttcagctgggccaacacctactgcccccacgccaagttcctgatgaccgccgacgacgacatcttcatccacatgcccaacctgatcgagtacctgcagagcctggagcagatcggcgtgcaggacttctggatcggcagagtgcacagaggcgccccccccatcagagacaagagcagcaagtactacgtgagctacgagatgtaccagtggcccgcctaccccgactacaccgccggcgccgcctacgtgatcagcggcgacgtggccgccaaggtgtacgaggccagccagaccctgaacagcagcctgtacatcgacgacgtgttcatgggcctgtgcgccaacaagatcggcatcgtgccccaggaccacgtgttcttcagcggcgagggcaagaccccctaccacccctgcatctacgagaagatgatgaccagccacggccacctggaggacctgcaggacctgtggaagaacgccaccgaccccaaggtgaagaccatcagcaagggcttcttcggccagatctactgcagactgatgaagatcatcctgctgtgcaagatcagctacgtggacacctacccctgcagagccgccttcatctga

SEQ ID NO: 2538 - RNA, 1602 nt, synthetic construct
  misc_feature 1..1602: note = AAA35516 variant
  source 1..1602: mol_type = other RNA
atgtggctgggcagaagagccctgtgcgccctggtgctgctgctggcctgcgccagcctgggcctgctgtacgccagcaccagagacgcccccggcctgagactgcccctggccccctgggcccccccccagagccccagaagacccgagctgcccgacctggcccccgagcccagatacgcccacatccccgtgagaatcaaggagcaggtggtgggcctgctggcctggaacaactgcagctgcgagagcagcggcggcggcctgcccctgcccttccagaagcaggtgagagccatcgacctgaccaaggccttcgaccccgccgagctgagagccgccagcgccaccagagagcaggagttccaggccttcctgagcagaagccagagccccgccgaccagctgctgatcgcccccgccaacagccccctgcagtaccccctgcagggcgtggaggtgcagcccctgagaagcatcctggtgcccggcctgagcctgcaggccgccagcggccaggaggtgtaccaggtgaacctgaccgccagcctgggcacctgggacgtggccggcgaggtgaccggcgtgaccctgaccggcgagggccaggccgacctgaccctggtgagccccggcctggaccagctgaacagacagctgcagctggtgacctacagcagcagaagctaccagaccaacaccgccgacaccgtgagattcagcaccgagggccacgaggccgccttcaccatcagaatcagacacccccccaaccccagactgtacccccccggcagcctgccccagggcgcccagtacaacatcagcgccctggtgaccatcgccaccaagaccttcctgagatacgacagactgagagccctgatcaccagcatcagaagattctaccccaccgtgaccgtggtgatcgccgacgacagcgacaagcccgagagagtgagcggcccctacgtggagcactacctgatgcccttcggcaagggctggttcgccggcagaaacctggccgtgagccaggtgaccaccaagtacgtgctgtgggtggacgacgacttcgtgttcaccgccagaaccagactggagagactggtggacgtgctggagagaacccccctggacctggtgggcggcgccgtgagagagatcagcggcttcgccaccacctacagacagctgctgagcgtggagcccggcgcccccggcctgggcaactgcctgagacagagaagaggcttccaccacgagctggtgggcttccccggctgcgtggtgaccgacggcgtggtgaacttcttcctggccagaaccgacaaggtgagagaggtgggcttcgaccccagactgagcagagtggcccacctggagttcttcctggacggcctgggcagcctgagagtgggcagctgcagcgacgtggtggtggaccacgccagcaagctgaagctgccctggaccagcagagacgccggcgccgagacctacgccagatacagataccccggcagcctggacgagagccagatggccaagcacagactgctgttcttcaagcacagactgcagtgcatgaccagccagtga

SEQ ID NO: 2539 - RNA, 849 nt, synthetic construct
  misc_feature 1..849: note = AAH74729 variant
  source 1..849: mol_type = other RNA
atggccagcctgggccagatcctgttctggagcatcatcagcatcatcatcatcctggccggcgccatcgccctgatcatcggcttcggcatcagcggcagacacagcatcaccgtgaccaccgtggccagcgccggcaacatcggcgaggacggcatcctgagctgcaccttcgagcccgacatcaagctgagcgacatcgtgatccagtggctgaaggagggcgtgctgggcctggtgcacgagttcaaggagggcaaggacgagctgagcgagcaggacgagatgttcagaggcagaaccgccgtgttcgccgaccaggtgatcgtgggcaacgccagcctgagactgaagaacgtgcagctgaccgacgccggcacctacaagtgctacatcatcaccagcaagggcaagggcaacgccaacctggagtacaagaccggcgccttcagcatgcccgaggtgaacgtggactacaacgccagcagcgagaccctgagatgcgaggcccccagatggttcccccagcccaccgtggtgtgggccagccaggtggaccagggcgccaacttcagcgaggtgagcaacaccagcttcgagctgaacagcgagaacgtgaccatgaaggtggtgagcgtgctgtacaacgtgaccatcaacaacacctacagctgcatgatcgagaacgacatcgccaaggccaccggcgacatcaaggtgaccgagagcgagatcaagagaagaagccacctgcagctgctgaacagcaaggccagcctgtgcgtgagcagcttcttcgccatcagctgggccctgctgcccctgagcccctacctgatgctgaagtga

SEQ ID NO: 2540 - RNA, 132 nt, synthetic construct
  misc_feature 1..132: note = AAC50123 variant
  source 1..132: mol_type = other RNA
atggccgccagagccgtgttcctggccctgagcgcccagctgctgcaggccagactgatgaaggaggagagccccgtggtgagctggagactggagcccgaggacggcaccgccctgtgcttcatcttctga

SEQ ID NO: 2541 - RNA, 1158 nt, synthetic construct
  misc_feature 1..1158: note = AAN40694 variant
  source 1..1158: mol_type = other RNA
atggccgccgccctgttcgtgctgctgggcttcgccctgctgggcacccacggcgccagcggcgccgccggcttcgtgcaggcccccctgagccagcagagatgggtgggcggcagcgtggagctgcactgcgaggccgtgggcagccccgtgcccgagatccagtggtggttcgagggccagggccccaacgacacctgcagccagctgtgggacggcgccagactggacagagtgcacatccacgccacctaccaccagcacgccgccagcaccatcagcatcgacaccctggtggaggaggacaccggcacctacgagtgcagagccagcaacgaccccgacagaaaccacctgaccagagcccccagagtgaagtgggtgagagcccaggccgtggtgctggtgctggagcccggcaccgtgttcaccaccgtggaggacctgggcagcaagatcctgctgacctgcagcctgaacgacagcgccaccgaggtgaccggccacagatggctgaagggcggcgtggtgctgaaggaggacgccctgcccggccagaagaccgagttcaaggtggacagcgacgaccagtggggcgagtacagctgcgtgttcctgcccgagcccatgggcaccgccaacatccagctgcacggcccccccagagtgaaggccgtgaagagcagcgagcacatcaacgagggcgagaccgccatgctggtgtgcaagagcgagagcgtgccccccgtgaccgactgggcctggtacaagatcaccgacagcgaggacaaggccctgatgaacggcagcgagagcagattcttcgtgagcagcagccagggcagaagcgagctgcacatcgagaacctgaacatggaggccgaccccggccagtacagatgcaacggcaccagcagcaagggcagcgaccaggccatcatcaccctgagagtgagaagccacctggccgccctgtggcccttcctgggcatcgtggccgaggtgctggtgctggtgaccatcatcttcatctacgagaagagaagaaagcccgaggacgtgctggacgacgacgacgccggcagcgcccccctgaagagcagcggccagcaccagaacgacaagggcaagaacgtgagacagagaaacagcagctga

SEQ ID NO: 2542 - RNA, 720 nt, synthetic construct
  misc_feature 1..720: note = ABX60202 variant
  source 1..720: mol_type = other RNA
atggcccacgccggcagaaccggctacgacaacagagagatcgtgatgaagtacatccactacaagctgagccagagaggctacgagtgggacgccggcgacgtgggcgccgccccccccggcgccgcccccgcccccggcatcttcagcagccagcccggccacaccccccaccccgccgccagcagagaccccgtggccagaaccagccccctgcagacccccgccgcccccggcgccgccgccggccccgccctgagccccgtgccccccgtggtgcacctgaccctgagacaggccggcgacgacttcagcagaagatacagaagagacttcgccgagatgagcagccagctgcacctgacccccttcaccgccagaggcagattcgccaccgtggtggaggagctgttcagagacggcgtgaactggggcagaatcgtggccttcttcgagttcggcggcgtgatgtgcgtggagagcgtgaacagagagatgagccccctggtggacaacatcgccctgtggatgaccgagtacctgaacagacacctgcacacctggatccaggacaacggcggctgggacgccttcgtggagctgtacggccccagcatgagacccctgttcgacttcagctggctgagcctgaagaccctgctgagcctggccctggtgggcgcctgcatcaccctgggcgcctacctgagccacaagtga

SEQ ID NO: 2543 - RNA, 1290 nt, synthetic construct
  misc_feature 1..1290: note = ABX82700 variant
  source 1..1290: mol_type = other RNA
atggtggaccccgtgggcttcgccgaggcctggaaggcccagttccccgacagcgagccccccagaatggagctgagaagcgtgggcgacatcgagcaggagctggagagatgcaaggccagcatcagaagactggagcaggaggtgaaccaggagagattcagaatgatctacctgcagaccctgctggccaaggagaagaagagctacgacagacagagatggggcttcagaagagccgcccaggcccccgacggcgccagcgagcccagagccagcgccagcagaccccagcccgcccccgccgacggcgccgaccccccccccgccgaggagcccgaggccagacccgacggcgagggcagccccggcaaggccagacccggcaccgccagaagacccggcgccgccgccagcggcgagagagacgacagaggcccccccgccagcgtggccgccctgagaagcaacttcgagagaatcagaaagggccacggccagcccggcgccgacgccgagaagcccttctacgtgaacgtggagttccaccacgagagaggcctggtgaaggtgaacgacaaggaggtgagcgacagaatcagcagcctgggcagccaggccatgcagatggagagaaagaagagccagcacggcgccggcagcagcgtgggcgacgccagcagacccccctacagaggcagaagcagcgagagcagctgcggcgtggacggcgactacgaggacgccgagctgaaccccagattcctgaaggacaacctgatcgacgccaacggcggcagcagacccccctggccccccctggagtaccagccctaccagagcatctacgtgggcggcatgatggagggcgagggcaagggccccctgctgagaagccagagcaccagcgagcaggagaagagactgacctggcccagaagaagctacagccccagaagcttcgaggactgcggcggcggctacacccccgactgcagcagcaacgagaacctgaccagcagcgaggaggacttcagcagcggccagagcagcagagtgagccccagccccaccacctacagaatgttcagagacaagagcagaagccccagccagaacagccagcagagcttcgacagcagcagcccccccaccccccagtgccacaagagacacagacactgccccgtggtggtgagcgaggccaccatcgtgggcgtgagaaagaccggccagatctggcccaacgacggcgagggcgccttccacggcgacgccgacggcggctga

SEQ ID NO: 2544 - RNA, 1665 nt, synthetic construct
  misc_feature 1..1665: note = ABX82703 variant
  source 1..1665: mol_type = other RNA
atggtggaccccgtgggcttcgccgaggcctggaaggcccagttccccgacagcgagccccccagaatggagctgagaagcgtgggcgacatcgagcaggagctggagagatgcaaggccagcatcagaagactggagcaggaggtgaaccaggagagattcagaatgatctacctgcagaccctgctggccaaggagaagaagagctacgacagacagagatggggcttcagaagagccgcccaggcccccgacggcgccagcgagcccagagccagcgccagcagaccccagcccgcccccgccgacggcgccgaccccccccccgccgaggagcccgaggccagacccgacggcgagggcagccccggcaaggccagacccggcaccgccagaagacccggcgccgccgccagcggcgagagagacgacagaggcccccccgccagcgtggccgccctgagaagcaacttcgagagaatcagaaagggccacggccagcccggcgccgacgccgagaagcccttctacgtgaacgtggagttccaccacgagagaggcctggtgaaggtgaacgacaaggaggtgagcgacagaatcagcagcctgggcagccaggccatgcagatggagagaaagaagagccagcacggcgccggcagcagcgtgggcgacgccagcagacccccctacagaggcagaagcagcgagagcagctgcggcgtggacggcgactacgaggacgccgagctgaaccccagattcctgaaggacaacctgatcgacgccaacggcggcagcagacccccctggccccccctggagtaccagccctaccagagcatctacgtgggcggcatgatggagggcgagggcaagggccccctgctgagaagccagagcaccagcgagcaggagaagagactgacctggcccagaagaagctacagccccagaagcttcgaggactgcggcggcggctacacccccgactgcagcagcaacgagaacctgaccagcagcgaggaggacttcagcagcggccagagcagcagagtgagccccagccccaccacctacagaatgttcagagacaagagcagaagccccagccagaacagccagcagagcttcgacagcagcagcccccccaccccccagtgccacaagagacacagacactgccccgtggtggtgagcgaggccaccatcgtgggcgtgagaaagaccggccagatctggcccaacgacggcgagggcgccttccacggcgacgccgacggcagcttcggcaccccccccggctacggctgcgccgccgacagagccgaggagcagagaagacaccaggacggcctgccctacatcgacgacagccccagcagcagcccccacctgagcagcaagggcagaggcagcagagacgccctggtgagcggcgccctggagagcaccaaggccagcgagctggacctggagaagggcctggagatgagaaagtgggtgctgagcggcatcctggccagcgaggagacctacctgagccacctggaggccctgctgctgcccatgaagcccctgaaggccgccgccaccaccagccagcccgtgctgaccagccagcagatcgagaccatcttcttcaaggtgcccgacctgctgtga

SEQ ID NO: 2545 - RNA, 1545 nt, synthetic construct
  misc_feature 1..1545: note = ABX82704 variant
  source 1..1545: mol_type = other RNA
atggtggaccccgtgggcttcgccgaggcctggaaggcccagttccccgacagcgagccccccagaatggagctgagaagcgtgggcgacatcgagcaggagctggagagatgcaaggccagcatcagaagactggagcaggaggtgaaccaggagagattcagaatgatctacctgcagaccctgctggccaaggagaagaagagctacgacagacagagatggggcttcagaagagccgcccaggcccccgacggcgccagcgagcccagagccagcgccagcagaccccagcccgcccccgccgacggcgccgaccccccccccgccgaggagcccgaggccagacccgacggcgagggcagccccggcaaggccagacccggcaccgccagaagacccggcgccgccgccagcggcgagagagacgacagaggcccccccgccagcgtggccgccctgagaagcaacttcgagagaatcagaaagggccacggccagcccggcgccgacgccgagaagcccttctacgtgaacgtggagttccaccacgagagaggcctggtgaaggtgaacgacaaggaggtgagcgacagaatcagcagcctgggcagccaggccatgcagatggagagaaagaagagccagcacggcgccggcagcagcgtgggcgacgccagcagacccccctacagaggcagaagcagcgagagcagctgcggcgtggacggcgactacgaggacgccgagctgaaccccagattcctgaaggacaacctgatcgacgccaacggcggcagcagacccccctggccccccctggagtaccagccctaccagagcatctacgtgggcggcatgatggagggcgagggcaagggccccctgctgagaagccagagcaccagcgagcaggagaagagactgacctggcccagaagaagctacagccccagaagcttcgaggactgcggcggcggctacacccccgactgcagcagcaacgagaacctgaccagcagcgaggaggacttcagcagcggccagagcagcagagtgagccccagccccaccacctacagaatgttcagagacaagagcagaagccccagccagaacagccagcagagcttcgacagcagcagcccccccaccccccagtgccacaagagacacagacactgccccgtggtggtgagcgaggccaccatcgtgggcgtgagaaagaccggccagatctggcccaacgacggcgagggcgccttccacggcgacgccgacggcagcttcggcaccccccccggctacggctgcgccgccgacagagccgaggagcagagaagacaccaggacggcctgccctacatcgacgacagccccagcagcagcccccacctgagcagcaagggcagaggcagcagagacgccctggtgagcggcgccctggagagcaccaaggccagcgagctggacctggagaagggcctggagatgagaaagtgggtgctgagcggcatcctggccagcgaggagatcaccctgtga

SEQ ID NO: 2546 - RNA, 1326 nt, synthetic construct
  misc_feature 1..1326: note = ABX82705 variant
  source 1..1326: mol_type = other RNA
atggtggaccccgtgggcttcgccgaggcctggaaggcccagttccccgacagcgagccccccagaatggagctgagaagcgtgggcgacatcgagcaggagctggagagatgcaaggccagcatcagaagactggagcaggaggtgaaccaggagagattcagaatgatctacctgcagaccctgctggccaaggagaagaagagctacgacagacagagatggggcttcagaagagccgcccaggcccccgacggcgccagcgagcccagagccagcgccagcagaccccagcccgcccccgccgacggcgccgaccccccccccgccgaggagcccgaggccagacccgacggcgagggcagccccggcaaggccagacccggcaccgccagaagacccggcgccgccgccagcggcgagagagacgacagaggcccccccgccagcgtggccgccctgagaagcaacttcgagagaatcagaaagggccacggccagcccggcgccgacgccgagaagcccttctacgtgaacgtggagttccaccacgagagaggcctggtgaaggtgaacgacaaggaggtgagcgacagaatcagcagcctgggcagccaggccatgcagatggagagaaagaagagccagcacggcgccggcagcagcgtgggcgacgccagcagacccccctacagaggcagaagcagcgagagcagctgcggcgtggacggcgactacgaggacgccgagctgaaccccagattcctgaaggacaacctgatcgacgccaacggcggcagcagacccccctggccccccctggagtaccagccctaccagagcatctacgtgggcggcatgatggagggcgagggcaagggccccctgctgagaagccagagcaccagcgagcaggagaagagactgacctggcccagaagaagctacagccccagaagcttcgaggactgcggcggcggctacacccccgactgcagcagcaacgagaacctgaccagcagcgaggaggacttcagcagcggccagagcagcagagtgagccccagccccaccacctacagaatgttcagagacaagagcagaagccccagccagaacagccagcagagcttcgacagcagcagcccccccaccccccagtgccacaagagacacagacactgccccgtggtggtgagcgaggccaccatcgtgggcgtgagaaagaccggccagatctggcccaacgacggcgagggcgccttccacggcgacgccgacggcagcctggagctgcagggcaagcccagcagatggacccagtga

SEQ ID NO: 2547 - RNA, 1575 nt, synthetic construct
  misc_feature 1..1575: note = ABX82706 variant
  source 1..1575: mol_type = other RNA
atggtggaccccgtgggcttcgccgaggcctggaaggcccagttccccgacagcgagccccccagaatggagctgagaagcgtgggcgacatcgagcaggagctggagagatgcaaggccagcatcagaagactggagcaggaggtgaaccaggagagattcagaatgatctacctgcagaccctgctggccaaggagaagaagagctacgacagacagagatggggcttcagaagagccgcccaggcccccgacggcgccagcgagcccagagccagcgccagcagaccccagcccgcccccgccgacggcgccgaccccccccccgccgaggagcccgaggccagacccgacggcgagggcagccccggcaaggccagacccggcaccgccagaagacccggcgccgccgccagcggcgagagagacgacagaggcccccccgccagcgtggccgccctgagaagcaacttcgagagaatcagaaagggccacggccagcccggcgccgacgccgagaagcccttctacgtgaacgtggagttccaccacgagagaggcctggtgaaggtgaacgacaaggaggtgagcgacagaatcagcagcctgggcagccaggccatgcagatggagagaaagaagagccagcacggcgccggcagcagcgtgggcgacgccagcagacccccctacagaggcagaagcagcgagagcagctgcggcgtggacggcgactacgaggacgccgagctgaaccccagattcctgaaggacaacctgatcgacgccaacggcggcagcagacccccctggccccccctggagtaccagccctaccagagcatctacgtgggcggcatgatggagggcgagggcaagggccccctgctgagaagccagagcaccagcgagcaggagaagagactgacctggcccagaagaagctacagccccagaagcttcgaggactgcggcggcggctacacccccgactgcagcagcaacgagaacctgaccagcagcgaggaggacttcagcagcggccagagcagcagagtgagccccagccccaccacctacagaatgttcagagacaagagcagaagccccagccagaacagccagcagagcttcgacagcagcagcccccccaccccccagtgccacaagagacacagacactgccccgtggtggtgagcgaggccaccatcgtgggcgtgagaaagaccggccagatctggcccaacgacggcgagggcgccttccacggcgacgccgacggcagcttcggcaccccccccggctacggctgcgccgccgacagagccgaggagcagagaagacaccaggacggcctgccctacatcgacgacagccccagcagcagcccccacctgagcagcaagggcagaggcagcagagacgccctggtgagcggcgccctggagagcaccaaggccagcgagctggacctggagaagggcctggagatgagaaagtgggaccccgtgaagatgacccccaccttcagcctgcactgcatgatcctgtggcccgtggagatcaccctgtga

SEQ ID NO: 2548 - RNA, 1398 nt, synthetic construct
  misc_feature 1..1398: note = ABX82707 variant
  source 1..1398: mol_type = other RNA
atggtggaccccgtgggcttcgccgaggcctggaaggcccagttccccgacagcgagccccccagaatggagctgagaagcgtgggcgacatcgagcaggagctggagagatgcaaggccagcatcagaagactggagcaggaggtgaaccaggagagattcagaatgatctacctgcagaccctgctggccaaggagaagaagagctacgacagacagagatggggcttcagaagagccgcccaggcccccgacggcgccagcgagcccagagccagcgccagcagaccccagcccgcccccgccgacggcgccgaccccccccccgccgaggagcccgaggccagacccgacggcgagggcagccccggcaaggccagacccggcaccgccagaagacccggcgccgccgccagcggcgagagagacgacagaggcccccccgccagcgtggccgccctgagaagcaacttcgagagaatcagaaagggccacggccagcccggcgccgacgccgagaagcccttctacgtgaacgtggagttccaccacgagagaggcctggtgaaggtgaacgacaaggaggtgagcgacagaatcagcagcctgggcagccaggccatgcagatggagagaaagaagagccagcacggcgccggcagcagcgtgggcgacgccagcagacccccctacagaggcagaagcagcgagagcagctgcggcgtggacggcgactacgaggacgccgagctgaaccccagattcctgaaggacaacctgatcgacgccaacggcggcagcagacccccctggccccccctggagtaccagccctaccagagcatctacgtgggcggcatgatggagggcgagggcaagggccccctgctgagaagccagagcaccagcgagcaggagaagagactgacctggcccagaagaagctacagccccagaagcttcgaggactgcggcggcggctacacccccgactgcagcagcaacgagaacctgaccagcagcgaggaggacttcagcagcggccagagcagcagagtgagccccagccccaccacctacagaatgttcagagacaagagcagaagccccagccagaacagccagcagagcttcgacagcagcagcccccccaccccccagtgccacaagagacacagacactgccccgtggtggtgagcgaggccaccatcgtgggcgtgagaaagaccggccagatctggcccaacgacggcgagggcgccttccacggcgagcaccccggcgccgccgaggaggtgttccagaagctgctgcccgacatcagaggcgccgccgacgccgaccagctggtgtgcgagacccccgactgcccccagcacagcgccgaccaccagtga

SEQ ID NO: 2549 - RNA, 1377 nt, synthetic construct
  misc_feature 1..1377: note = ABX82709 variant
  source 1..1377: mol_type = other RNA
atggtggaccccgtgggcttcgccgaggcctggaaggcccagttccccgacagcgagccccccagaatggagctgagaagcgtgggcgacatcgagcaggagctggagagatgcaaggccagcatcagaagactggagcaggaggtgaaccaggagagattcagaatgatctacctgcagaccctgctggccaaggagaagaagagctacgacagacagagatggggcttcagaagagccgcccaggcccccgacggcgccagcgagcccagagccagcgccagcagaccccagcccgcccccgccgacggcgccgaccccccccccgccgaggagcccgaggccagacccgacggcgagggcagccccggcaaggccagacccggcaccgccagaagacccggcgccgccgccagcggcgagagagacgacagaggcccccccgccagcgtggccgccctgagaagcaacttcgagagaatcagaaagggccacggccagcccggcgccgacgccgagaagcccttctacgtgaacgtggagttccaccacgagagaggcctggtgaaggtgaacgacaaggaggtgagcgacagaatcagcagcctgggcagccaggccatgcagatggagagaaagaagagccagcacggcgccggcagcagcgtgggcgacgccagcagacccccctacagaggcagaagcagcgagagcagctgcggcgtggacggcgactacgaggacgccgagctgaaccccagattcctgaaggacaacctgatcgacgccaacggcggcagcagacccccctggccccccctggagtaccagccctaccagagcatctacgtgggcggcatgatggagggcgagggcaagggccccctgctgagaagccagagcaccagcgagcaggagaagagactgacctggcccagaagaagctacagccccagaagcttcgaggactgcggcggcggctacacccccgactgcagcagcaacgagaacctgaccagcagcgaggaggacttcagcagcggccagagcagcagagtgagccccagccccaccacctacagaatgttcagagacaagagcagaagccccagccagaacagccagcagagcttcgacagcagcagcccccccaccccccagtgccacaagagacacagacactgccccgtggtggtgagcgaggccaccatcgtgggcgtgagaaagaccggccagatctggcccaacgacggcgagggcgccttccacggcgacgccgacggcagcttcggcaccccccccggctactgctgcctgtgcctgcccgcctggcccagcggctgcaccgccgccaccgccagagtgaccagaagctga

SEQ ID NO: 2550 - RNA, 1365 nt, synthetic construct
  misc_feature 1..1365: note = ABX82710 variant
  source 1..1365: mol_type = other RNA
atggtggaccccgtgggcttcgccgaggcctggaaggcccagttccccgacagcgagccccccagaatggagctgagaagcgtgggcgacatcgagcaggagctggagagatgcaaggccagcatcagaagactggagcaggaggtgaaccaggagagattcagaatgatctacctgcagaccctgctggccaaggagaagaagagctacgacagacagagatggggcttcagaagagccgcccaggcccccgacggcgccagcgagcccagagccagcgccagcagaccccagcccgcccccgccgacggcgccgaccccccccccgccgaggagcccgaggccagacccgacggcgagggcagccccggcaaggccagacccggcaccgccagaagacccggcgccgccgccagcggcgagagagacgacagaggcccccccgccagcgtggccgccctgagaagcaacttcgagagaatcagaaagggccacggccagcccggcgccgacgccgagaagcccttctacgtgaacgtggagttccaccacgagagaggcctggtgaaggtgaacgacaaggaggtgagcgacagaatcagcagcctgggcagccaggccatgcagatggagagaaagaagagccagcacggcgccggcagcagcgtgggcgacgccagcagacccccctacagaggcagaagcagcgagagcagctgcggcgtggacggcgactacgaggacgccgagctgaaccccagattcctgaaggacaacctgatcgacgccaacggcggcagcagacccccctggccccccctggagtaccagccctaccagagcatctacgtgggcggcatgatggagggcgagggcaagggccccctgctgagaagccagagcaccagcgagcaggagaagagactgacctggcccagaagaagctacagccccagaagcttcgaggactgcggcggcggctacacccccgactgcagcagcaacgagaacctgaccagcagcgaggaggacttcagcagcggccagagcagcagagtgagccccagccccaccacctacagaatgttcagagacaagagcagaagccccagccagaacagccagcagagcttcgacagcagcagcccccccaccccccagtgccacaagagacacagacactgccccgtggtggtgagcgaggccaccatcgtgggcgtgagaaagaccggccagatctggcccaacgacggcgagggcgccttccacggcgacgccgacggcagcttcggcaccccccccggctacggctgcgccgccggcagacccccccacctgaccgagctgcccgtgcagcaccagtga

SEQ ID NO: 2551 - RNA, 1404 nt, synthetic construct
  misc_feature 1..1404: note = ABX82711 variant
  source 1..1404: mol_type = other RNA
atggtggaccccgtgggcttcgccgaggcctggaaggcccagttccccgacagcgagccccccagaatggagctgagaagcgtgggcgacatcgagcaggagctggagagatgcaaggccagcatcagaagactggagcaggaggtgaaccaggagagattcagaatgatctacctgcagaccctgctggccaaggagaagaagagctacgacagacagagatggggcttcagaagagccgcccaggcccccgacggcgccagcgagcccagagccagcgccagcagaccccagcccgcccccgccgacggcgccgaccccccccccgccgaggagcccgaggccagacccgacggcgagggcagccccggcaaggccagacccggcaccgccagaagacccggcgccgccgccagcggcgagagagacgacagaggcccccccgccagcgtggccgccctgagaagcaacttcgagagaatcagaaagggccacggccagcccggcgccgacgccgagaagcccttctacgtgaacgtggagttccaccacgagagaggcctggtgaaggtgaacgacaaggaggtgagcgacagaatcagcagcctgggcagccaggccatgcagatggagagaaagaagagccagcacggcgccggcagcagcgtgggcgacgccagcagacccccctacagaggcagaagcagcgagagcagctgcggcgtggacggcgactacgaggacgccgagctgaaccccagattcctgaaggacaacctgatcgacgccaacggcggcagcagacccccctggccccccctggagtaccagccctaccagagcatctacgtgggcggcatgatggagggcgagggcaagggccccctgctgagaagccagagcaccagcgagcaggagaagagactgacctggcccagaagaagctacagccccagaagcttcgaggactgcggcggcggctacacccccgactgcagcagcaacgagaacctgaccagcagcgaggaggacttcagcagcggccagagcagcagagtgagccccagccccaccacctacagaatgttcagagacaagagcagaagccccagccagaacagccagcagagcttcgacagcagcagcccccccaccccccagtgccacaagagacacagacactgccccgtggtggtgagcgaggccaccatcgtgggcgtgagaaagaccggccagatctggcccaacgacggcgagggcgccttccacggcgacgccgtgctgaagaccgaggtgccccaccagggcgtgagaagagccagactgagcctggaggccctgggcgaggaccccagcttcctgttccccgccagcgacggccccagacacagcagcacctggtga

SEQ ID NO: 2552 - RNA, 1542 nt, synthetic construct
  misc_feature 1..1542: note = ABX82712 variant
  source 1..1542: mol_type = other RNA
atggtggaccccgtgggcttcgccgaggcctggaaggcccagttccccgacagcgagccccccagaatggagctgagaagcgtgggcgacatcgagcaggagctggagagatgcaaggccagcatcagaagactggagcaggaggtgaaccaggagagattcagaatgatctacctgcagaccctgctggccaaggagaagaagagctacgacagacagagatggggcttcagaagagccgcccaggcccccgacggcgccagcgagcccagagccagcgccagcagaccccagcccgcccccgccgacggcgccgaccccccccccgccgaggagcccgaggccagacccgacggcgagggcagccccggcaaggccagacccggcaccgccagaagacccggcgccgccgccagcggcgagagagacgacagaggcccccccgccagcgtggccgccctgagaagcaacttcgagagaatcagaaagggccacggccagcccggcgccgacgccgagaagcccttctacgtgaacgtggagttccaccacgagagaggcctggtgaaggtgaacgacaaggaggtgagcgacagaatcagcagcctgggcagccaggccatgcagatggagagaaagaagagccagcacggcgccggcagcagcgtgggcgacgccagcagacccccctacagaggcagaagcagcgagagcagctgcggcgtggacggcgactacgaggacgccgagctgaaccccagattcctgaaggacaacctgatcgacgccaacggcggcagcagacccccctggccccccctggagtaccagccctaccagagcatctacgtgggcggcatgatggagggcgagggcaagggccccctgctgagaagccagagcaccagcgagcaggagaagagactgacctggcccagaagaagctacagccccagaagcttcgaggactgcggcggcggctacacccccgactgcagcagcaacgagaacctgaccagcagcgaggaggacttcagcagcggccagagcagcagagtgagccccagccccaccacctacagaatgttcagagacaagagcagaagccccagccagaacagccagcagagcttcgacagcagcagcccccccaccccccagtgccacaagagacacagacactgccccgtggtggtgagcgaggccaccatcgtgggcgtgagaaagaccggccagatctggcccaacgacggcgagggcgccttccacggcgacgccgacggcagcttcggcaccccccccggctacggctgcgccgccgacagagccgaggagcagagaagacaccaggacggcctgccctacatcgacgacagccccagcagcagcccccacctgagcagcaagggcagaggcagcagagacgccctggtgagcggcgccctggagagcaccaaggccagcgagctggaccccgtgaagatgacccccaccttcagcctgcactgcatgatcctgtggcccgtggagatcaccctgtga

SEQ ID NO: 2553 - RNA, 1221 nt, synthetic construct
  misc_feature 1..1221: note = ABX82714 variant
  source 1..1221: mol_type = other RNA
atggtggaccccgtgggcttcgccgaggcctggaaggcccagttccccgacagcgagccccccagaatggagctgagaagcgtgggcgacatcgagcaggagctggagagatgcaaggccagcatcagaagactggagcaggaggtgaaccaggagagattcagaatgatctacctgcagaccctgctggccaaggagaagaagagctacgacagacagagatggggcttcagaagagccgcccaggcccccgacggcgccagcgagcccagagccagcgccagcagaccccagcccgcccccgccgacggcgccgaccccccccccgccgaggagcccgaggccagacccgacggcgagggcagccccggcaaggccagacccggcaccgccagaagacccggcgccgccgccagcggcgagagagacgacagaggcccccccgccagcgtggccgccctgagaagcaacttcgagagaatcagaaagggccacggccagcccggcgccgacgccgagaagcccttctacgtgaacgtggagttccaccacgagagaggcctggtgaaggtgaacgacaaggaggtgagcgacagaatcagcagcctgggcagccaggccatgcagatggagagaaagaagagccagcacggcgccggcagcagcgtgggcgacgccagcagacccccctacagaggcagaagcagcgagagcagctgcggcgtggacggcgactacgaggacgccgagctgaaccccagattcctgaaggacaacctgatcgacgccaacggcggcagcagacccccctggccccccctggagtaccagccctaccagagcatctacgtgggcggcatgatggagggcgagggcaagggccccctgctgagaagccagagcaccagcgagcaggagaagagactgacctggcccagaagaagctacagccccagaagcttcgaggactgcggcggcggctacacccccgactgcagcagcaacgagaacctgaccagcagcgaggaggacttcagcagcggccagagcagcagagtgagccccagccccaccacctacagaatgttcagagacaagagcagaagccccagccagaacagccagcagagcttcgacagcagcagcccccccaccccccagtgccacaagagacacagacactgccccgtggtggtgagcgaggccaccagcggccagtga

SEQ ID NO: 2554 - RNA, 2346 nt, synthetic construct
  misc_feature 1..2346: note = AAH58926 variant
  source 1..2346: mol_type = other RNA
atggccacccaggccgacctgatggagctggacatggccatggagcccgacagaaaggccgccgtgagccactggcagcagcagagctacctggacagcggcatccacagcggcgccaccaccaccgcccccagcctgagcggcaagggcaaccccgaggaggaggacgtggacaccagccaggtgctgtacgagtgggagcagggcttcagccagagcttcacccaggagcaggtggccgacatcgacggccagtacgccatgaccagagcccagagagtgagagccgccatgttccccgagaccctggacgagggcatgcagatccccagcacccagttcgacgccgcccaccccaccaacgtgcagagactggccgagcccagccagatgctgaagcacgccgtggtgaacctgatcaactaccaggacgacgccgagctggccaccagagccatccccgagctgaccaagctgctgaacgacgaggaccaggtggtggtgaacaaggccgccgtgatggtgcaccagctgagcaagaaggaggccagcagacacgccatcatgagaagcccccagatggtgagcgccatcgtgagaaccatgcagaacaccaacgacgtggagaccgccagatgcaccgccggcaccctgcacaacctgagccaccacagagagggcctgctggccatcttcaagagcggcggcatccccgccctggtgaagatgctgggcagccccgtggacagcgtgctgttctacgccatcaccaccctgcacaacctgctgctgcaccaggagggcgccaagatggccgtgagactggccggcggcctgcagaagatggtggccctgctgaacaagaccaacgtgaagttcctggccatcaccaccgactgcctgcagatcctggcctacggcaaccaggagagcaagctgatcatcctggccagcggcggcccccaggccctggtgaacatcatgagaacctacacctacgagaagctgctgtggaccaccagcagagtgctgaaggtgctgagcgtgtgcagcagcaacaagcccgccatcgtggaggccggcggcatgcaggccctgggcctgcacctgaccgaccccagccagagactggtgcagaactgcctgtggaccctgagaaacctgagcgacgccgccaccaagcaggagggcatggagggcctgctgggcaccctggtgcagctgctgggcagcgacgacatcaacgtggtgacctgcgccgccggcatcctgagcaacctgacctgcaacaactacaagaacaagatgatggtgtgccaggtgggcggcatcgaggccctggtgagaaccgtgctgagagccggcgacagagaggacatcaccgagcccgccatctgcgccctgagacacctgaccagcagacaccaggaggccgagatggcccagaacgccgtgagactgcactacggcctgcccgtggtggtgaagctgctgcacccccccagccactggcccctgatcaaggccaccgtgggcctgatcagaaacctggccctgtgccccgccaaccacgcccccctgagagagcagggcgccatccccagactggtgcagctgctggtgagagcccaccaggacacccagagaagaaccagcatgggcggcacccagcagcagttcgtggagggcgtgagaatggaggagatcgtggagggctgcaccggcgccctgcacatcctggccagagacgtgcacaacagaatcgtgatcagaggcctgaacaccatccccctgttcgtgcagctgctgtacagccccatcgagaacatccagagagtggccgccggcgtgctgtgcgagctggcccaggacaaggaggccgccgaggccatcgaggccgagggcgccaccgcccccctgaccgagctgctgcacagcagaaacgagggcgtggccacctacgccgccgccgtgctgttcagaatgagcgaggacaagccccaggactacaagaagagactgagcgtggagctgaccagcagcctgttcagaaccgagcccatggcctggaacgagaccgccgacctgggcctggacatcggcgcccagggcgagcccctgggctacagacaggacgaccccagctacagaagcttccacagcggcggctacggccaggacgccctgggcatggaccccatgatggagcacgagatgggcggccaccaccccggcgccgactaccccgtggacggcctgcccgacctgggccacgcccaggacctgatggacggcctgccccccggcgacagcaaccagctggcctggttcgacaccgacctgtga

SEQ ID NO: 2555 - RNA, 1692 nt, synthetic construct
  misc_feature 1..1692: note = AAI21007 variant
  source 1..1692: mol_type = other RNA
atggacgtgggcgagctgctgagctaccagcccaacagaggcaccaagagacccagagacgacgaggaggaggagcagaagatgagaagaaagcagaccggcaccagagagagaggcagatacagagaggaggagatgaccgtggtggaggaggccgacgacgacaagaagagactgctgcagatcatcgacagagacggcgaggaggaggaggaggaggaggagcccctggacgagagcagcgtgaagaagatgatcctgaccttcgagaagagaagctacaagaaccaggagctgagaatcaagttccccgacaaccccgagaagttcatggagagcgagctggacctgaacgacatcatccaggagatgcacgtggtggccaccatgcccgacctgtaccacctgctggtggagctgaacgccgtgcagagcctgctgggcctgctgggccacgacaacaccgacgtgagcatcgccgtggtggacctgctgcaggagctgaccgacatcgacaccctgcacgagagcgaggagggcgccgaggtgctgatcgacgccctggtggacggccaggtggtggccctgctggtgcagaacctggagagactggacgagagcgtgaaggaggaggccgacggcgtgcacaacaccctggccatcgtggagaacatggccgagttcagacccgagatgtgcaccgagggcgcccagcagggcctgctgcagtggctgctgaagagactgaaggccaagatgcccttcgacgccaacaagctgtactgcagcgaggtgctggccatcctgctgcaggacaacgacgagaacagagagctgctgggcgagctggacggcatcgacgtgctgctgcagcagctgagcgtgttcaagagacacaaccccagcaccgccgaggagcaggagatgatggagaacctgttcgacagcctgtgcagctgcctgatgctgagcagcaacagagagagattcctgaagggcgagggcctgcagctgatgaacctgatgctgagagagaagaagatcagcagaagcagcgccctgaaggtgctggaccacgccatgatcggccccgagggcaccgacaactgccacaagttcgtggacatcctgggcctgagaaccatcttccccctgttcatgaagagccccagaaagatcaagaaggtgggcaccaccgagaaggagcacgaggagcacgtgtgcagcatcctggccagcctgctgagaaacctgagaggccagcagagaaccagactgctgaacaagttcaccgagaacgacagcgagaaggtggacagactgatggagctgcacttcaagtacctgggcgccatgcaggtggccgacaagaagatcgagggcgagaagcacgacatggtgagaagaggcgagatcatcgacaacgacaccgaggaggagttctacctgagaagactggacgccggcctgttcgtgctgcagcacatctgctacatcatggccgagatctgcaacgccaacgtgccccagatcagacagagagtgcaccagatcctgaacatgagaggcagcagcatcaagatcgtgagacacatcatcaaggagtacgccgagaacatcggcgacggcagaagccccgagttcagagagaacgagcagaagagaatcctgggcctgctggagaacttctga

SEQ ID NO: 2556 - RNA, 1833 nt, synthetic construct
  misc_feature 1..1833: note = CCDS4772.1 variant
  source 1..1833: mol_type = other RNA
atggagaccgcccccaagcccggcaaggacgtgccccccaagaaggacaagctgcagaccaagagaaagaagcccagaagatactgggaggaggagaccgtgcccaccaccgccggcgccagccccggcccccccagaaacaagaagaacagagagctgagaccccagagacccaagaacgcctacatcctgaagaagagcagaatcagcaagaagccccaggtgcccaagaagcccagagagtggaagaaccccgagagccagagaggcctgagcggcacccaggaccccttccccggccccgcccccgtgcccgtggaggtggtgcagaagttctgcagaatcgacaagagcagaaagctgccccacagcaaggccaagaccagaagcagactggaggtggccgaggccgaggaggaggagaccagcatcaaggccgccagaagcgagctgctgctggccgaggagcccggcttcctggagggcgaggacggcgaggacaccgccaagatctgccaggccgacatcgtggaggccgtggacatcgccagcgccgccaagcacttcgacctgaacctgagacagttcggcccctacagactgaactacagcagaaccggcagacacctggccttcggcggcagaagaggccacgtggccgccctggactgggtgaccaagaagctgatgtgcgagatcaacgtgatggaggccgtgagagacatcagattcctgcacagcgaggccctgctggccgtggcccagaacagatggctgcacatctacgacaaccagggcatcgagctgcactgcatcagaagatgcgacagagtgaccagactggagttcctgcccttccacttcctgctggccaccgccagcgagaccggcttcctgacctacctggacgtgagcgtgggcaagatcgtggccgccctgaacgccagagccggcagactggacgtgatgagccagaacccctacaacgccgtgatccacctgggccacagcaacggcaccgtgagcctgtggagccccgccatgaaggagcccctggccaagatcctgtgccacagaggcggcgtgagagccgtggccgtggacagcaccggcacctacatggccaccagcggcctggaccaccagctgaagatcttcgacctgagaggcacctaccagcccctgagcaccagaaccctgccccacggcgccggccacctggccttcagccagagaggcctgctggtggccggcatgggcgacgtggtgaacatctgggccggccagggcaaggccagcccccccagcctggagcagccctacctgacccacagactgagcggccccgtgcacggcctgcagttctgccccttcgaggacgtgctgggcgtgggccacaccggcggcatcaccagcatgctggtgcccggcgccggcgagcccaacttcgacggcctggagagcaacccctacagaagcagaaagcagagacaggagtgggaggtgaaggccctgctggagaaggtgcccgccgagctgatctgcctggaccccagagccctggccgaggtggacgtgatcagcctggagcagggcaagaaggagcagatcgagagactgggctacgacccccaggccaaggcccccttccagcccaagcccaagcagaagggcagaagcagcaccgccagcctggtgaagagaaagagaaaggtgatggacgaggagcacagagacaaggtgagacagagcctgcagcagcagcaccacaaggaggccaaggccaagcccaccggcgccagacccagcgccctggacagattcgtgagatga

SEQ ID NO: 2557 - RNA, 897 nt, synthetic construct
  misc_feature 1..897: note = AAG37878 variant
  source 1..897: mol_type = other RNA
atgggccccaaggacagcgccaagtgcctgcacagaggcccccagcccagccactgggccgccggcgacggccccacccaggagagatgcggccccagaagcctgggcagccccgtgctgggcctggacacctgcagagcctgggaccacgtggacggccagatcctgggccagctgagacccctgaccgaggaggaggaggaggagggcgccggcgccaccctgagcagaggccccgccttccccggcatgggcagcgaggagctgagactggccagcttctacgactggcccctgaccgccgaggtgccccccgagctgctggccgccgccggcttcttccacaccggccaccaggacaaggtgagatgcttcttctgctacggcggcctgcagagctggaagagaggcgacgacccctggaccgagcacgccaagtggttccccagctgccagttcctgctgagaagcaagggcagagacttcgtgcacagcgtgcaggagacccacagccagctgctgggcagctgggacccctgggaggagcccgaggacgccgcccccgtggcccccagcgtgcccgccagcggctaccccgagctgcccacccccagaagagaggtgcagagcgagagcgcccaggagcccggcggcgtgagccccgccgaggcccagagagcctggtgggtgctggagccccccggcgccagagacgtggaggcccagctgagaagactgcaggaggagagaacctgcaaggtgtgcctggacagagccgtgagcatcgtgttcgtgccctgcggccacctggtgtgcgccgagtgcgcccccggcctgcagctgtgccccatctgcagagcccccgtgagaagcagagtgagaaccttcctgagctga

SEQ ID NO: 2558 - RNA, 2280 nt, synthetic construct
  misc_feature 1..2280: note = EAW60925 variant
  source 1..2280: mol_type = other RNA
atggacctgagcgccctgagagtggaggaggtgcagaacgtgatcaacgccatgcagaagatcctggagtgccccatctgcctggagctgatcaaggagcccgtgagcaccaagtgcgaccacatcttctgcaagttctgcatgctgaagctgctgaaccagaagaagggccccagccagtgccccctgtgcaagaacgacatcaccaagagaagcctgcaggagagcaccagattcagccagctggtggaggagctgctgaagatcatctgcgccttccagctggacaccggcctggagtacgccaacagctacaacttcgccaagaaggagaacaacagccccgagcacctgaaggacgaggtgagcatcatccagagcatgggctacagaaacagagccaagagactgctgcagagcgagcccgagaaccccagcctgcaggagaccagcctgagcgtgcagctgagcaacctgggcaccgtgagaaccctgagaaccaagcagagaatccagccccagaagaccagcgtgtacatcgagctgggcagcgacagcagcgaggacaccgtgaacaaggccacctactgcagcgtgggcgaccaggagctgctgcagatcaccccccagggcaccagagacgagatcagcctggacagcgccaagaaggccgcctgcgagttcagcgagaccgacgtgaccaacaccgagcaccaccagcccagcaacaacgacctgaacaccaccgagaagagagccgccgagagacaccccgagaagtaccagggcgaggccgccagcggctgcgagagcgagaccagcgtgagcgaggactgcagcggcctgagcagccagagcgacatcctgaccacccagcagagagacaccatgcagcacaacctgatcaagctgcagcaggagatggccgagctggaggccgtgctggagcagcacggcagccagcccagcaacagctaccccagcatcatcagcgacagcagcgccctggaggacctgagaaaccccgagcagagcaccagcgagaaggtgctgaccagccagaagagcagcgagtaccccatcagccagaaccccgagggcctgagcgccgacaagttcgaggtgagcgccgacagcagcaccagcaagaacaaggagcccggcgtggagagaagcagccccagcaagtgccccagcctggacgacagatggtacatgcacagctgcagcggcagcctgcagaacagaaactaccccagccaggaggagctgatcaaggtggtggacgtggaggagcagcagctggaggagagcggcccccacgacctgaccgagaccagctacctgcccagacaggacctggagggcaccccctacctggagagcggcatcagcctgttcagcgacgaccccgagagcgaccccagcgaggacagagcccccgagagcgccagagtgggcaacatccccagcagcaccagcgccctgaaggtgccccagctgaaggtggccgagagcgcccagagccccgccgccgcccacaccaccgacaccgccggctacaacgccatggaggagagcgtgagcagagagaagcccgagctgaccgccagcaccgagagagtgaacaagagaatgagcatggtggtgagcggcctgacccccgaggagttcatgctggtgtacaagttcgccagaaagcaccacatcaccctgaccaacctgatcaccgaggagaccacccacgtggtgatgaagaccgacgccgagttcgtgtgcgagagaaccctgaagtacttcctgggcatcgccggcggcaagtgggtggtgagctacttctgggtgacccagagcatcaaggagagaaagatgctgaacgagcacgacttcgaggtgagaggcgacgtggtgaacggcagaaaccaccagggccccaagagagccagagagagccaggacagaaagatcttcagaggcctggagatctgctgctacggccccttcaccaacatgcccaccgaccagctggagtggatggtgcagctgtgcggcgccagcgtggtgaaggagctgagcagcttcaccctgggcaccggcgtgcaccccatcgtggtggtgcagcccgacgcctggaccgaggacaacggcttccacgccatcggccagatgtgcgaggcccccgtggtgaccagagagtgggtgctggacagcgtggccctgtaccagtgccaggagctggacacctacctgatcccccagatcccccacagccactactga

SEQ ID NO: 2559 - RNA, 2160 nt, synthetic construct
  misc_feature 1..2160: note = EAW60922 variant
  source 1..2160: mol_type = other RNA
atggacctgagcgccctgagagtggaggaggtgcagaacgtgatcaacgccatgcagaagatcctggagtgccccatctgcctggagctgatcaaggagcccgtgagcaccaagtgcgaccacatcttctgcaagttctgcatgctgaagctgctgaaccagaagaagggccccagccagtgccccctgtgcaagaacgacatcaccaagagaagcctgcaggagagcaccagattcagccagctggtggaggagctgctgaagatcatctgcgccttccagctggacaccggcctggagtacgccaacagctacaacttcgccaagaaggagaacaacagccccgagcacctgaaggacgaggtgagcatcatccagagcatgggctacagaaacagagccaagagactgctgcagagcgagcccgagaaccccagcctgcaggagaccagcctgagcgtgcagctgagcaacctgggcaccgtgagaaccctgagaaccaagcagagaatccagccccagaagaccagcgtgtacatcgagctggccgcctgcgagttcagcgagaccgacgtgaccaacaccgagcaccaccagcccagcaacaacgacctgaacaccaccgagaagagagccgccgagagacaccccgagaagtaccagggcgaggccgccagcggctgcgagagcgagaccagcgtgagcgaggactgcagcggcctgagcagccagagcgacatcctgaccacccagcagagagacaccatgcagcacaacctgatcaagctgcagcaggagatggccgagctggaggccgtgctggagcagcacggcagccagcccagcaacagctaccccagcatcatcagcgacagcagcgccctggaggacctgagaaaccccgagcagagcaccagcgagaaggccgtgctgaccagccagaagagcagcgagtaccccatcagccagaaccccgagggcctgagcgccgacaagttcgaggtgagcgccgacagcagcaccagcaagaacaaggagcccggcgtggagagaagcagccccagcaagtgccccagcctggacgacagatggtacatgcacagctgcagcggcagcctgcagaacagaaactaccccagccaggaggagctgatcaaggtggtggacgtggaggagcagcagctggaggagagcggcccccacgacctgaccgagaccagctacctgcccagacaggacctggagggcaccccctacctggagagcggcatcagcctgttcagcgacgaccccgagagcgaccccagcgaggacagagcccccgagagcgccagagtgggcaacatccccagcagcaccagcgccctgaaggtgccccagctgaaggtggccgagagcgcccagagccccgccgccgcccacaccaccgacaccgccggctacaacgccatggaggagagcgtgagcagagagaagcccgagctgaccgccagcaccgagagagtgaacaagagaatgagcatggtggtgagcggcctgacccccgaggagttcatgctggtgtacaagttcgccagaaagcaccacatcaccctgaccaacctgatcaccgaggagaccacccacgtggtgatgaagaccgacgccgagttcgtgtgcgagagaaccctgaagtacttcctgggcatcgccggcggcaagtgggtggtgagctacttctgggtgacccagagcatcaaggagagaaagatgctgaacgagcacgacttcgaggtgagaggcgacgtggtgaacggcagaaaccaccagggccccaagagagccagagagagccaggacagaaagatcttcagaggcctggagatctgctgctacggccccttcaccaacatgcccaccgaccagctggagtggatggtgcagctgtgcggcgccagcgtggtgaaggagctgagcagcttcaccctgggcaccggcgtgcaccccatcgtggtggtgcagcccgacgcctggaccgaggacaacggcttccacgccatcggccagatgtgcgaggcccccgtggtgaccagagagtgggtgctggacagcgtggccctgtaccagtgccaggagctggacacctacctgatcccccagatcccccacagccactactga

SEQ ID NO: 2560 - RNA, 2166 nt, synthetic construct
  misc_feature 1..2166: note = EAW60923 variant
  source 1..2166: mol_type = other RNA
atggacctgagcgccctgagagtggaggaggtgcagaacgtgatcaacgccatgcagaagatcctggagtgccccatctgcctggagctgatcaaggagcccgtgagcaccaagtgcgaccacatcttctgcaagttctgcatgctgaagctgctgaaccagaagaagggccccagccagtgccccctgtgcaagaacgacatcaccaagagaagcctgcaggagagcaccagattcagccagctggtggaggagctgctgaagatcatctgcgccttccagctggacaccggcctggagtacgccaacagctacaacttcgccaagaaggagaacaacagccccgagcacctgaaggacgaggtgagcatcatccagagcatgggctacagaaacagagccaagagactgctgcagagcgagcccgagaaccccagcctgcaggagaccagcctgagcgtgcagctgagcaacctgggcaccgtgagaaccctgagaaccaagcagagaatccagccccagaagaccagcgtgtacatcgagctgggcagcgacagcagcgaggacaccgtgaacaaggccacctactgcagcgtgggcgaccaggagctgctgcagatcaccccccagggcaccagagacgagatcagcctggacagcgccaagaagggcgaggccgccagcggctgcgagagcgagaccagcgtgagcgaggactgcagcggcctgagcagccagagcgacatcctgaccacccagcagagagacaccatgcagcacaacctgatcaagctgcagcaggagatggccgagctggaggccgtgctggagcagcacggcagccagcccagcaacagctaccccagcatcatcagcgacagcagcgccctggaggacctgagaaaccccgagcagagcaccagcgagaaggccgtgctgaccagccagaagagcagcgagtaccccatcagccagaaccccgagggcctgagcgccgacaagttcgaggtgagcgccgacagcagcaccagcaagaacaaggagcccggcgtggagagaagcagccccagcaagtgccccagcctggacgacagatggtacatgcacagctgcagcggcagcctgcagaacagaaactaccccagccaggaggagctgatcaaggtggtggacgtggaggagcagcagctggaggagagcggcccccacgacctgaccgagaccagctacctgcccagacaggacctggagggcaccccctacctggagagcggcatcagcctgttcagcgacgaccccgagagcgaccccagcgaggacagagcccccgagagcgccagagtgggcaacatccccagcagcaccagcgccctgaaggtgccccagctgaaggtggccgagagcgcccagagccccgccgccgcccacaccaccgacaccgccggctacaacgccatggaggagagcgtgagcagagagaagcccgagctgaccgccagcaccgagagagtgaacaagagaatgagcatggtggtgagcggcctgacccccgaggagttcatgctggtgtacaagttcgccagaaagcaccacatcaccctgaccaacctgatcaccgaggagaccacccacgtggtgatgaagaccgacgccgagttcgtgtgcgagagaaccctgaagtacttcctgggcatcgccggcggcaagtgggtggtgagctacttctgggtgacccagagcatcaaggagagaaagatgctgaacgagcacgacttcgaggtgagaggcgacgtggtgaacggcagaaaccaccagggccccaagagagccagagagagccaggacagaaagatcttcagaggcctggagatctgctgctacggccccttcaccaacatgcccaccgaccagctggagtggatggtgcagctgtgcggcgccagcgtggtgaaggagctgagcagcttcaccctgggcaccggcgtgcaccccatcgtggtggtgcagcccgacgcctggaccgaggacaacggcttccacgccatcggccagatgtgcgaggcccccgtggtgaccagagagtgggtgctggacagcgtggccctgtaccagtgccaggagctggacacctacctgatcccccagatcccccacagccactactga

SEQ ID NO: 2561 - RNA, 36 nt, synthetic construct
  misc_feature 1..36: note = AIC83575 variant
  source 1..36: mol_type = other RNA
atggacctgagcgccctgagagtggaggaggtgtga

SEQ ID NO: 2562 - RNA, 522 nt, synthetic construct
  misc_feature 1..522: note = ABC59810 variant
  source 1..522: mol_type = other RNA
atggacgccgagttcgtgtgcgagagaaccctgaagtacttcctgggcatcgccggcggcaagtgggtggtgagctacttctgggtgacccagagcatcaaggagagaaagatgctgaacgagcacgacttcgaggtgagaggcgacgtggtgaacggcagaaaccaccagggccccaagagagccagagagagccaggacagaaagatcttcagaggcctggagatctgctgctacggccccttcaccaacatgcccaccgaccagctggagtggatggtgcagctgtgcggcgccagcgtggtgaaggagctgagcagcttcaccctgggcaccggcgtgcaccccatcgtggtggtgcagcccgacgcctggaccgaggacaacggcttccacgccatcggccagatgtgcgaggcccccgtggtgaccagagagtgggtgctggacagcgtggccctgtaccagtgccaggagctggacacctacctgatcccccagatcccccacagccactactga

SEQ ID NO: 2563 - RNA, 1065 nt, synthetic construct
  misc_feature 1..1065: note = ABC88652 variant
  source 1..1065: mol_type = other RNA
atgcacagctgcagcggcagcctgcagaacagaaactaccccagccaggaggagctgatcaaggtggtggacgtggaggagcagcagctggaggagagcggcccccacgacctgaccgagaccagctacctgcccagacaggacctggagggcaccccctacctggagagcggcatcagcctgttcagcgacgaccccgagagcgaccccagcgaggacagagcccccgagagcgccagagtgggcaacatccccagcagcaccagcgccctgaaggtgccccagctgaaggtggccgagagcgcccagggccccgccgccgcccacaccaccgacaccgccggctacaacgccatggaggagagcgtgagcagagagaagcccgagctgaccgccagcaccgagagagtgaacaagagaatgagcatggtggtgagcggcctgacccccgaggagttcatgctggtgtacaagttcgccagaaagcaccacatcaccctgaccaacctgatcaccgaggagaccacccacgtggtgatgaagaccgacgccgagttcgtgtgcgagagaaccctgaagtacttcctgggcatcgccggcggcaagtgggtggtgagctacttctgggtgacccagagcatcaaggagagaaagatgctgaacgagcacgacttcgaggtgagaggcgacgtggtgaacggcagaaaccaccagggccccaagagagccagagagagccaggacagaaagatcttcagaggcctggagatctgctgctacggccccttcaccaacatgcccaccgaccagctggagtggatggtgcagctgtgcggcgccagcgtggtgaaggagctgagcagcttcaccctgggcaccggcgtgcaccccatcgtggtggtgcagcccgacgcctggaccgaggacaacggcttccacgccatcggccagatgtgcgagacccccgtggtgaccagagagtgggtgctggacagcgtggccctgtaccagtgccaggagctggacacctacctgatcccccagatcccccacagccactactga

SEQ ID NO: 2564 - RNA, 2043 nt, synthetic construct
  misc_feature 1..2043: note = EAW60939 variant
  source 1..2043: mol_type = other RNA
atggacctgagcgccctgagagtggaggaggtgcagaacgtgatcaacgccatgcagaagatcctggagtgccccatctgcctggagctgatcaaggagcccgtgagcaccaagtgcgaccacatcttctgcaagttctgcatgctgaagctgctgaaccagaagaagggccccagccagtgccccctgtgcaagaacgacatcaccaagagaagcctgcaggagagcaccagattcagccagctggtggaggagctgctgaagatcatctgcgccttccagctggacaccggcctggagtacgccaacagctacaacttcgccaagaaggagaacaacagccccgagcacctgaaggacgaggtgagcatcatccagagcatgggctacagaaacagagccaagagactgctgcagagcgagcccgagaaccccagcctgcaggagaccagcctgagcgtgcagctgagcaacctgggcaccgtgagaaccctgagaaccaagcagagaatccagccccagaagaccagcgtgtacatcgagctgggcgaggccgccagcggctgcgagagcgagaccagcgtgagcgaggactgcagcggcctgagcagccagagcgacatcctgaccacccagcagagagacaccatgcagcacaacctgatcaagctgcagcaggagatggccgagctggaggccgtgctggagcagcacggcagccagcccagcaacagctaccccagcatcatcagcgacagcagcgccctggaggacctgagaaaccccgagcagagcaccagcgagaaggccgtgctgaccagccagaagagcagcgagtaccccatcagccagaaccccgagggcctgagcgccgacaagttcgaggtgagcgccgacagcagcaccagcaagaacaaggagcccggcgtggagagaagcagccccagcaagtgccccagcctggacgacagatggtacatgcacagctgcagcggcagcctgcagaacagaaactaccccagccaggaggagctgatcaaggtggtggacgtggaggagcagcagctggaggagagcggcccccacgacctgaccgagaccagctacctgcccagacaggacctggagggcaccccctacctggagagcggcatcagcctgttcagcgacgaccccgagagcgaccccagcgaggacagagcccccgagagcgccagagtgggcaacatccccagcagcaccagcgccctgaaggtgccccagctgaaggtggccgagagcgcccagagccccgccgccgcccacaccaccgacaccgccggctacaacgccatggaggagagcgtgagcagagagaagcccgagctgaccgccagcaccgagagagtgaacaagagaatgagcatggtggtgagcggcctgacccccgaggagttcatgctggtgtacaagttcgccagaaagcaccacatcaccctgaccaacctgatcaccgaggagaccacccacgtggtgatgaagaccgacgccgagttcgtgtgcgagagaaccctgaagtacttcctgggcatcgccggcggcaagtgggtggtgagctacttctgggtgacccagagcatcaaggagagaaagatgctgaacgagcacgacttcgaggtgagaggcgacgtggtgaacggcagaaaccaccagggccccaagagagccagagagagccaggacagaaagatcttcagaggcctggagatctgctgctacggccccttcaccaacatgcccaccgaccagctggagtggatggtgcagctgtgcggcgccagcgtggtgaaggagctgagcagcttcaccctgggcaccggcgtgcaccccatcgtggtggtgcagcccgacgcctggaccgaggacaacggcttccacgccatcggccagatgtgcgaggcccccgtggtgaccagagagtgggtgctggacagcgtggccctgtaccagtgccaggagctggacacctacctgatcccccagatcccccacagccactactga

SEQ ID NO: 2565 - RNA, 546 nt, synthetic construct
  misc_feature 1..546: note = AAC72302 variant
  source 1..546: mol_type = other RNA
atgctgctggagcccggcagaggctgctgcgccctggccatcctgctggccatcgtggacatccagagcggcggctgcatcaacatcaccagcagcgccagccaggagggcaccagactgaacctgatctgcaccgtgtggcacaagaaggaggaggccgagggcttcgtggtgttcctgtgcaaggacagaagcggcgactgcagccccgagaccagcctgaagcagctgagactgaagagagaccccggcatcgacggcgtgggcgagatcagcagccagctgatgttcaccatcagccaggtgacccccctgcacagcggcacctaccagtgctgcgccagaagccagaagagcggcatcagactgcagggccacttcttcagcatcctgttcaccgagaccggcaactacaccgtgaccggcctgaagcagagacagcacctggagttcagccacaacgagggcaccctgagcagcggcttcctgcaggagaaggtgtgggtgatgctggtgaccagcctggtggccctgcaggccctgtga

SEQ ID NO: 2566 - RNA, 639 nt, synthetic construct
  misc_feature 1..639: note = BAG58223 variant
  source 1..639: mol_type = other RNA
atgctgctgagcgtgtacttcaaggagcagttcctggacggcgacggctggaccagcagatggatcgagagcaagcacaagagcgacttcggcaagttcgtgctgagcagcggcaagttctacggcgacgaggagaaggacaagggcctgcagaccagccaggacgccagattctacgccctgagcgccagcttcgagcccttcagcaacaagggccagaccctggtggtgcagttcaccgtgaagcacgagcagaacatcgactgcggcggcggctacgtgaagctgttccccaacagcctggaccagaccgacatgcacggcgacagcgagtacaacatcatgttcggccccgacatctgcggccccggcaccaagaaggtgcacgtgatcttcaactacaagggcaagaacgtgctgatcaacaaggacatcagatgcaaggacgacgagttcacccacctgtacaccctgatcgtgagacccgacaacacctacgaggtgaagatcgacaacagccaggtggagagcggcagcctggaggacgactgggacttcctgccccccaagaagatcaaggaccccgacgccagcaagcccgaggactgggacgagagagccaagatcgacgacccctga

SEQ ID NO: 2567 - RNA, 891 nt, synthetic construct
  misc_feature 1..891: note = BAG65301 variant
  source 1..891: mol_type = other RNA
atgcacggcgacagcgagtacaacatcatgttcggccccgacatctgcggccccggcaccaagaaggtgcacgtgatcttcaactacaagggcaagaacgtgctgatcaacaaggacatcagatgcaaggacgacgagttcacccacctgtacaccctgatcgtgagacccgacaacacctacgaggtgaagatcgacaacagccaggtggagagcggcagcctggaggacgactgggacttcctgccccccaagaagatcaaggaccccgacgccagcaagcccgaggactgggacgagagagccaagatcgacgaccccaccgacagcaagcccgaggactgggacaagcccgagcacatccccgaccccgacgccaagaagcccgaggactgggacgaggagatggacggcgagtgggagccccccgtgatccagaaccccgagtacaagggcgagtggaagcccagacagatcgacaaccccgactacaagggcacctggatccaccccgagatcgacaaccccgagtacagccccgaccccagcatctacgcctacgacaacttcggcgtgctgggcctggacctgtggcaggtgaagagcggcaccatcttcgacaacttcctgatcaccaacgacgaggcctacgccgaggagttcggcaacgagacctggggcgtgaccaaggccgccgagaagcagatgaaggacaagcaggacgaggagcagagactgaaggaggaggaggaggacaagaagagaaaggaggaggaggaggccgaggacaaggaggacgacgaggacaaggacgaggacgaggaggacgaggaggacaaggaggaggacgaggaggaggacgtgcccggccaggccaaggacgagctgtga

SEQ ID NO: 2568 - RNA, 1254 nt, synthetic construct
  misc_feature 1..1254: note = AAA36582 variant
  source 1..1254: mol_type = other RNA
atgctgctgagcgtgcccctgctgctgggcctgctgggcctggccgtggccgagcccgccgtgtacttcaaggagcagttcctggacggcgacggctggaccagcagatggatcgagagcaagcacaagagcgacttcggcaagttcgtgctgagcagcggcaagttctacggcgacgaggagaaggacaagggcctgcagaccagccaggacgccagattctacgccctgagcgccagcttcgagcccttcagcaacaagggccagaccctggtggtgcagttcaccgtgaagcacgagcagaacatcgactgcggcggcggctacgtgaagctgttccccaacagcctggaccagaccgacatgcacggcgacagcgagtacaacatcatgttcggccccgacatctgcggccccggcaccaagaaggtgcacgtgatcttcaactacaagggcaagaacgtgctgatcaacaaggacatcagatgcaaggacgacgagttcacccacctgtacaccctgatcgtgagacccgacaacacctacgaggtgaagatcgacaacagccaggtggagagcggcagcctggaggacgactgggacttcctgccccccaagaagatcaaggaccccgacgccagcaagcccgaggactgggacgagagagccaagatcgacgaccccaccgacagcaagcccgaggactgggacaagcccgagcacatccccgaccccgacgccaagaagcccgaggactgggacgaggagatggacggcgagtgggagccccccgtgatccagaaccccgagtacaagggcgagtggaagcccagacagatcgacaaccccgactacaagggcacctggatccaccccgagatcgacaaccccgagtacagccccgaccccagcatctacgcctacgacaacttcggcgtgctgggcctggacctgtggcaggtgaagagcggcaccatcttcgacaacttcctgatcaccaacgacgaggcctacgccgaggagttcggcaacgagacctggggcgtgaccaaggccgccgagaagcagatgaaggacaagcaggacgaggagcagagactgaaggaggaggaggaggacaagaagagaaaggaggaggaggaggccgaggacaaggaggacgacgaggacaaggacgaggacgaggaggacgaggaggacaaggaggaggacgaggaggaggacgtgcccggccaggccaaggacgagctgtga

SEQ ID NO: 2569 - RNA, 1155 nt, synthetic construct
  misc_feature 1..1155: note = BAB71655 variant
  source 1..1155: mol_type = other RNA
atggccagagccctggtgcagctgtgggccatctgcatgctgagagtggccctggccaccgtgtacttccaggaggagttcctggacggcgagcactggagaaacagatggctgcagagcaccaacgacagcagattcggccacttcagactgagcagcggcaagttctacggccacaaggagaaggacaagggcctgcagaccacccagaacggcagattctacgccatcagcgccagattcaagcccttcagcaacaagggcaagaccctggtgatccagtacaccgtgaagcacgagcagaagatggactgcggcggcggctacatcaaggtgttccccgccgacatcgaccagaagaacctgaacggcaagagccagtactacatcatgttcggccccgacatctgcggcttcgacatcaagaaggtgcacgtgatcctgcacttcaagaacaagtaccacgagaacaagaagctgatcagatgcaaggtggacggcttcacccacctgtacaccctgatcctgagacccgacctgagctacgacgtgaagatcgacggccagagcatcgagagcggcagcatcgagtacgactggaacctgaccagcctgaagaaggagaccagccccgccgagagcaaggactgggagcagaccaaggacaacaaggcccaggactgggagaagcacttcctggacgccagcaccagcaagcagagcgactggaacggcgacctggacggcgactggcccgcccccatgctgcagaagcccccctaccaggacggcctgaagcccgagggcatccacaaggacgtgtggctgcacagaaagatgaagaacaccgactacctgacccagtacgacctgagcgagttcgagaacatcggcgccatcggcctggagctgtggcaggtgagaagcggcaccatcttcgacaacttcctgatcaccgacgacgaggagtacgccgacaacttcggcaaggccacctggggcgagaccaagggccccgagagagagatggacgccatccaggccaaggaggagatgaagaaggccagagaggaggaggaggaggagctgctgagcggcaagatcaacagacacgagcactacttcaaccagttccacagaagaaacgagctgtga

SEQ ID NO: 2570 - RNA, 330 nt, synthetic construct
  misc_feature 1..330: note = CAA10193 variant
  source 1..330: mol_type = other RNA
atgctgatggcccaggaggccctggccttcctgatggcccagggcgccatgctggccgcccaggagagaagagtgcccagagccgccgaggtgcccggcgcccagggccagcagggccccagaggcagagaggaggcccccagaggcgtgagaatggccgtgcccctgctgagaagaatggagggcgcccccgccggccccggcggcagaaccgccgcctgcttcagctgcaccagcagatgcctgagcagaagaccctggaagagaagctggagcgccggcagctgccccggcatgccccacctgagccccgaccagggcagattctga

SEQ ID NO: 2571 - RNA, 1440 nt, synthetic construct
  misc_feature 1..1440: note = CAA66853 variant
  source 1..1440: mol_type = other RNA
atggacttcagcagaaacctgtacgacatcggcgagcagctggacagcgaggacctggccagcctgaagttcctgagcctggactacatcccccagagaaagcaggagcccatcaaggacgccctgatgctgttccagagactgcaggagaagagaatgctggaggagagcaacctgagcttcctgaaggagctgctgttcagaatcaacagactggacctgctgatcacctacctgaacaccagaaaggaggagatggagagagagctgcagacccccggcagagcccagatcagcgcctacagagtgatgctgtaccagatcagcgaggaggtgagcagaagcgagctgagaagcttcaagttcctgctgcaggaggagatcagcaagtgcaagctggacgacgacatgaacctgctggacatcttcatcgagatggagaagagagtgatcctgggcgagggcaagctggacatcctgaagagagtgtgcgcccagatcaacaagagcctgctgaagatcatcaacgactacgaggagttcagcaaggagagaagcagcagcctggagggcagccccgacgagttcagcaacggcgaggagctgtgcggcgtgatgaccatcagcgacagccccagagagcaggacagcgagagccagaccctggacaaggtgtaccagatgaagagcaagcccagaggctactgcctgatcatcaacaaccacaacttcgccaaggccagagagaaggtgcccaagctgcacagcatcagagacagaaacggcacccacctggacgccggcgccctgaccaccaccttcgaggagctgcacttcgagatcaagccccacgacgactgcaccgtggagcagatctacgagatcctgaagatctaccagctgatggaccacagcaacatggactgcttcatctgctgcatcctgagccacggcgacaagggcatcatctacggcaccgacggccaggaggcccccatctacgagctgaccagccagttcaccggcctgaagtgccccagcctggccggcaagcccaaggtgttcttcatccaggcctgccagggcgacaactaccagaagggcatccccgtggagaccgacagcgaggagcagccctacctggagatggacctgagcagcccccagaccagatacatccccgacgaggccgacttcctgctgggcatggccaccgtgaacaactgcgtgagctacagaaaccccgccgagggcacctggtacatccagagcctgtgccagagcctgagagagagatgccccagaggcgacgacatcctgaccatcctgaccgaggtgaactacgaggtgagcaacaaggacgacaagaagaacatgggcaagcagatgccccagcccaccttcaccctgagaaagaagctggtgttccccagcgactga

SEQ ID NO: 2572 - RNA, 1569 nt, synthetic construct
  misc_feature 1..1569: note = CCDS2340.1 variant
  source 1..1569: mol_type = other RNA
atgaagagccagggccagcactggtacagcagcagcgacaagaactgcaaggtgagcttcagagagaagctgctgatcatcgacagcaacctgggcgtgcaggacgtggagaacctgaagttcctgtgcatcggcctggtgcccaacaagaagctggagaagagcagcagcgccagcgacgtgttcgagcacctgctggccgaggacctgctgagcgaggaggaccccttcttcctggccgagctgctgtacatcatcagacagaagaagctgctgcagcacctgaactgcaccaaggaggaggtggagagactgctgcccaccagacagagagtgagcctgttcagaaacctgctgtacgagctgagcgagggcatcgacagcgagaacctgaaggacatgatcttcctgctgaaggacagcctgcccaagaccgagatgaccagcctgagcttcctggccttcctggagaagcagggcaagatcgacgaggacaacctgacctgcctggaggacctgtgcaagaccgtggtgcccaagctgctgagaaacatcgagaagtacaagagagagaaggccatccagatcgtgaccccccccgtggacaaggaggccgagagctaccagggcgaggaggagctggtgagccagaccgacgtgaagaccttcctggaggccctgccccaggagagctggcagaacaagcacgccggcagcaacggcaacagagccaccaacggcgcccccagcctggtgagcagaggcatgcagggcgccagcgccaacaccctgaacagcgagaccagcaccaagagagccgccgtgtacagaatgaacagaaaccacagaggcctgtgcgtgatcgtgaacaaccacagcttcaccagcctgaaggacagacagggcacccacaaggacgccgagatcctgagccacgtgttccagtggctgggcttcaccgtgcacatccacaacaacgtgaccaaggtggagatggagatggtgctgcagaagcagaagtgcaaccccgcccacgccgacggcgactgcttcgtgttctgcatcctgacccacggcagattcggcgccgtgtacagcagcgacgaggccctgatccccatcagagagatcatgagccacttcaccgccctgcagtgccccagactggccgagaagcccaagctgttcttcatccaggcctgccagggcgaggagatccagcccagcgtgagcatcgaggccgacgccctgaaccccgagcaggcccccaccagcctgcaggacagcatccccgccgaggccgacttcctgctgggcctggccaccgtgcccggctacgtgagcttcagacacgtggaggagggcagctggtacatccagagcctgtgcaaccacctgaagaagctggtgcccagacacgaggacatcctgagcatcctgaccgccgtgaacgacgacgtgagcagaagagtggacaagcagggcaccaagaagcagatgccccagcccgccttcaccctgagaaagaagctggtgttccccgtgcccctggacgccctgagcctgtga

SEQ ID NO: 2573 - RNA, 1020 nt, synthetic construct
  misc_feature 1..1020: note = EAW65632 variant
  source 1..1020: mol_type = other RNA
atgtggcagctgtgggccagcctgtgctgcctgctggtgctggccaacgccagaagcagacccagcttccaccccctgagcgacgagctggtgaactacgtgaacaagagaaacaccacctggcaggccggccacaacttctacaacgtggacatgagctacctgaagagactgtgcggcaccttcctgggcggccccaagcccccccagagagtgatgttcaccgaggacctgaagctgcccgccagcttcgacgccagagagcagtggccccagtgccccaccatcaaggagatcagagaccagggcagctgcggcagctgctgggccttcggcgccgtggaggccatcagcgacagaatctgcatccacaccaacgcccacgtgagcgtggaggtgagcgccgaggacctgctgacctgctgcggcagcatgtgcggcgacggctgcaacggcggctaccccgccgaggcctggaacttctggaccagaaagggcctggtgagcggcggcctgtacgagagccacgtgggctgcagaccctacagcatccccccctgcgagcaccacgtgaacggcagcagacccccctgcaccggcgagggcgacacccccaagtgcagcaagatctgcgagcccggctacagccccacctacaagcaggacaagcactacggctacaacagctacagcgtgagcaacagcgagaaggacatcatggccgagatctacaagaacggccccgtggagggcgccttcagcgtgtacagcgacttcctgctgtacaagagcggcgtgtaccagcacgtgaccggcgagatgatgggcggccacgccatcagaatcctgggctggggcgtggagaacggcaccccctactggctggtggccaacagctggaacaccgactggggcgacaacggcttcttcaagatcctgagaggccaggaccactgcggcatcgagagcgaggtggtggccggcatccccagaaccgaccagtactgggagaagatctga

SEQ ID NO: 2574 - RNA, 1020 nt, synthetic construct; identical to SEQ ID NO: 2573
  misc_feature 1..1020: note = AAC37547 variant
  source 1..1020: mol_type = other RNA

SEQ ID NO: 2575 - RNA, 1002 nt, synthetic construct
  misc_feature 1..1002: note = EAW62731 variant
  source 1..1002: mol_type = other RNA
atgaaccccaccctgatcctggccgccttctgcctgggcatcgccagcgccaccctgaccttcgaccacagcctggaggcccagtggaccaagtggaaggccatgcacaacagactgtacggcatgaacgaggagggctggagaagagccgtgtgggagaagaacatgaagatgatcgagctgcacaaccaggagtacagagagggcaagcacagcttcaccatggccatgaacgccttcggcgacatgaccagcgaggagttcagacaggtgatgaacggcttccagaacagaaagcccagaaagggcaaggtgttccaggagcccctgttctacgaggcccccagaagcgtggactggagagagaagggctacgtgacccccgtgaagaaccagggccagtgcggcagctgctgggccttcagcgccaccggcgccctggagggccagatgttcagaaagaccggcagactgatcagcctgagcgagcagaacctggtggactgcagcggcccccagggcaacgagggctgcaacggcggcctgatggactacgccttccagtacgtgcaggacaacggcggcctggacagcgaggagagctacccctacgaggccaccgaggagagctgcaagtacaaccccaagtacagcgtggccaacgacaccggcttcgtggacatccccaagcaggagaaggccctgatgaaggccgtggccaccgtgggccccatcagcgtggccatcgacgccggccacgagagcttcctgttctacaaggagggcatctacttcgagcccgactgcagcagcgaggacatggaccacggcgtgctggtggtgggctacggcttcgagagcaccgagagcgacaacaacaagtactggctggtgaagaacagctggggcgaggagtggggcatgggcggctacgtgaagatggccaaggacagaagaaaccactgcggcatcgccagcgccgccagctaccccaccgtgtga

SEQ ID NO: 2576 - RNA, 1002 nt, synthetic construct; identical to SEQ ID NO: 2575
  misc_feature 1..1002: note = AAA66974 variant
  source 1..1002: mol_type = other RNA

SEQ ID NO: 2577 - RNA, 456 nt, synthetic construct
  misc_feature 1..456: note = AAG17239 variant
  source 1..456: mol_type = other RNA
atggactacgccttccagtacgtgcaggacaacggcggcctggacagcgaggagagctacccctacgaggccaccgaggagagctgcaagtacaaccccaagtacagcgtggccaacgacaccggcttcgtggacatccccaagcaggagaaggccctgatgaaggccgtggccaccgtgggccccatcagcgtggccatcgacgccggccacgagagcttcctgttctacaaggagggcatctacttcgagcccgactgcagcagcgaggacatggaccacggcgtgctggtggtgggctacggcttcgagagcaccgagagcgacaacaacaagtactggctggtgaagaacagctggggcgaggagtggggcatgggcggctacgtgaagatggccaaggacagaagaaaccactgcggcatcgccagcgccgccagctaccccaccgtgtga

SEQ ID NO: 2578 - RNA, 984 nt, synthetic construct
  misc_feature 1..984: note = AAA51932 variant
  source 1..984: mol_type = other RNA
atgctgttcctgctgctgcccctgctggccgtgctgcccggcgacggcaacgccgacggcctgaaggagcccctgagcttccacgtgacctggatcgccagcttctacaaccacagctggaagcagaacctggtgagcggctggctgagcgacctgcagacccacacctgggacagcaacagcagcaccatcgtgttcctgtgcccctggagcagaggcaacttcagcaacgaggagtggaaggagctggagaccctgttcagaatcagaaccatcagaagcttcgagggcatcagaagatacgcccacgagctgcagttcgagtaccccttcgagatccaggtgaccggcggctgcgagctgcacagcggcaaggtgagcggcagcttcctgcagctggcctaccagggcagcgacttcgtgagcttccagaacaacagctggctgccctaccccgtggccggcaacatggccaagcacttctgcaaggtgctgaaccagaaccagcacgagaacgacatcacccacaacctgctgagcgacacctgccccagattcatcctgggcctgctggacgccggcaaggcccacctgcagagacaggtgaagcccgaggcctggctgagccacggccccagccccggccccggccacctgcagctggtgtgccacgtgagcggcttctaccccaagcccgtgtgggtgatgtggatgagaggcgagcaggagcagcagggcacccagagaggcgacatcctgcccagcgccgacggcacctggtacctgagagccaccctggaggtggccgccggcgaggccgccgacctgagctgcagagtgaagcacagcagcctggagggccaggacatcgtgctgtactgggagcaccacagcagcgtgggcttcatcatcctggccgtgatcgtgcccctgctgctgctgatcggcctggccctgtggttcagaaagagatgcttctgctga

SEQ ID NO: 2579 - RNA, 1002 nt, synthetic construct
  misc_feature 1..1002: note = AAA51939 variant
  source 1..1002: mol_type = other RNA
atgctgctgctgcccttccagctgctggccgtgctgttccccggcggcaacagcgagcacgccttccagggccccaccagcttccacgtgatccagaccagcagcttcaccaacagcacctgggcccagacccagggcagcggctggctggacgacctgcagatccacggctgggacagcgacagcggcaccgccatcttcctgaagccctggagcaagggcaacttcagcgacaaggaggtggccgagctggaggagatcttcagagtgtacatcttcggcttcgccagagaggtgcaggacttcgccggcgacttccagatgaagtaccccttcgagatccagggcatcgccggctgcgagctgcacagcggcggcgccatcgtgagcttcctgagaggcgccctgggcggcctggacttcctgagcgtgaagaacgccagctgcgtgcccagccccgagggcggcagcagagcccagaagttctgcgccctgatcatccagtaccagggcatcatggagaccgtgagaatcctgctgtacgagacctgccccagatacctgctgggcgtgctgaacgccggcaaggccgacctgcagagacaggtgaagcccgaggcctggctgagcagcggccccagccccggccccggcagactgcagctggtgtgccacgtgagcggcttctaccccaagcccgtgtgggtgatgtggatgagaggcgagcaggagcagcagggcacccagctgggcgacatcctgcccaacgccaactggacctggtacctgagagccaccctggacgtggccgacggcgaggccgccggcctgagctgcagagtgaagcacagcagcctggagggccaggacatcatcctgtactggagaaaccccaccagcatcggcagcatcgtgctggccatcatcgtgcccagcctgctgctgctgctgtgcctggccctgtggtacatgagaagaagaagctaccagaacatcccctga

SEQ ID NO: 2580 - RNA, 1002 nt, synthetic construct
  misc_feature 1..1002: note = AAI26466 variant
  source 1..1002: mol_type = other RNA
atgctgttcctgcagttcctgctgctggccctgctgctgcccggcggcgacaacgccgacgccagccaggagcacgtgagcttccacgtgatccagatcttcagcttcgtgaaccagagctgggccagaggccagggcagcggctggctggacgagctgcagacccacggctgggacagcgagagcggcaccatcatcttcctgcacaactggagcaagggcaacttcagcaacgaggagctgagcgacctggagctgctgttcagattctacctgttcggcctgaccagagagatccaggaccacgccagccaggactacagcaagtaccccttcgaggtgcaggtgaaggccggctgcgagctgcacagcggcaagagccccgagggcttcttccaggtggccttcaacggcctggacctgctgagcttccagaacaccacctgggtgcccagccccggctgcggcagcctggcccagagcgtgtgccacctgctgaaccaccagtacgagggcgtgaccgagaccgtgtacaacctgatcagaagcacctgccccagattcctgctgggcctgctggacgccggcaagatgtacgtgcacagacaggtgagacccgaggcctggctgagcagcagacccagcctgggcagcggccagctgctgctggtgtgccacgccagcggcttctaccccaagcccgtgtgggtgacctggatgagaaacgagcaggagcagctgggcaccaagcacggcgacatcctgcccaacgccgacggcacctggtacctgcaggtgatcctggaggtggccagcgaggagcccgccggcctgagctgcagagtgagacacagcagcctgggcggccaggacatcatcctgtactggggccaccacttcagcatgaactggatcgccctggtggtgatcgtgcccctggtgatcctgatcgtgctggtgctgtggttcaagaagcactgcagctaccaggacatcctgtga

SEQ ID NO: 2581 - RNA, 1008 nt, synthetic construct
  misc_feature 1..1008: note = AAA59672 variant
  source 1..1008: mol_type = other RNA
atgggctgcctgctgttcctgctgctgtgggccctgctgcaggcctggggcagcgccgaggtgccccagagactgttccccctgagatgcctgcagatcagcagcttcgccaacagcagctggaccagaaccgacggcctggcctggctgggcgagctgcagacccacagctggagcaacgacagcgacaccgtgagaagcctgaagccctggagccagggcaccttcagcgaccagcagtgggagaccctgcagcacatcttcagagtgtacagaagcagcttcaccagagacgtgaaggagttcgccaagatgctgagactgagctaccccctggagctgcaggtgagcgccggctgcgaggtgcaccccggcaacgccagcaacaacttcttccacgtggccttccagggcaaggacatcctgagcttccagggcaccagctgggagcccacccaggaggcccccctgtgggtgaacctggccatccaggtgctgaaccaggacaagtggaccagagagaccgtgcagtggctgctgaacggcacctgcccccagttcgtgagcggcctgctggagagcggcaagagcgagctgaagaagcaggtgaagcccaaggcctggctgagcagaggccccagccccggccccggcagactgctgctggtgtgccacgtgagcggcttctaccccaagcccgtgtgggtgaagtggatgagaggcgagcaggagcagcagggcacccagcccggcgacatcctgcccaacgccgacgagacctggtacctgagagccaccctggacgtggtggccggcgaggccgccggcctgagctgcagagtgaagcacagcagcctggagggccaggacatcgtgctgtactggggcggcagctacaccagcatgggcctgatcgccctggccgtgctggcctgcctgctgttcctgctgatcgtgggcttcaccagcagattcaagagacagaccagctaccagggcgtgctgtga

SEQ ID NO: 2582 - RNA, 1167 nt, synthetic construct
  misc_feature 1..1167: note = EAW52830 variant
  source 1..1167: mol_type = other RNA
atgctgctgctgttcctgctgttcgagggcctgtgctgccccggcgagaacaccgccgccccccaggccctgcagagctaccacctggccgccgaggagcagctgagcttcagaatgctgcagaccagcagcttcgccaaccacagctgggcccacagcgagggcagcggctggctgggcgacctgcagacccacggctgggacaccgtgctgggcaccatcagattcctgaagccctggagccacggcaacttcagcaagcaggagctgaagaacctgcagagcctgttccagctgtacttccacagcttcatccagatcgtgcaggccagcgccggccagttccagctggagtaccccttcgagatccagatcctggccggctgcagaatgaacgccccccagatcttcctgaacatggcctaccagggcagcgacttcctgagcttccagggcatcagctgggagcccagccccggcgccggcatcagagcccagaacatctgcaaggtgctgaacagatacctggacatcaaggagatcctgcagagcctgctgggccacacctgccccagattcctggccggcctgatggaggccggcgagagcgagctgaagagaaaggtgaagcccgaggcctggctgagctgcggccccagccccggccccggcagactgcagctggtgtgccacgtgagcggcttctaccccaagcccgtgtgggtgatgtggatgagaggcgagcaggagcagagaggcacccagagaggcgacgtgctgcccaacgccgacgagacctggtacctgagagccaccctggacgtggccgccggcgaggccgccggcctgagctgcagagtgaagcacagcagcctgggcggccacgacctgatcatccactggggcggctacagcatcttcctgatcctgatctgcctgaccgtgatcgtgaccctggtgatcctggtggtggtggacagcagactgaagaagcagagcagcaacaagaacatcctgagcccccacacccccagccccgtgttcctgatgggcgccaacacccaggacaccaagaacagcagacaccagttctgcctggcccaggtgagctggatcaagaacagagtgctgaagaagtggaagaccagactgaaccagctgtggtga

SEQ ID NO: 2583 - RNA, 894 nt, synthetic construct
  misc_feature 1..894: note = AAA35581 variant
  source 1..894: mol_type = other RNA
atgaccacccccagaaacagcgtgaacggcaccttccccgccgagcccatgaagggccccatcgccatgcagagcggccccaagcccctgttcagaagaatgagcagcctggtgggccccacccagagcttcttcatgagagagagcaagaccctgggcgccgtgcagatcatgaacggcctgttccacatcgccctgggcggcctgctgatgatccccgccggcatctacgcccccatctgcgtgaccgtgtggtaccccctgtggggcggcatcatgtacatcatcagcggcagcctgctggccgccaccgagaagaacagcagaaagtgcctggtgaagggcaagatgatcatgaacagcctgagcctgttcgccgccatcagcggcatgatcctgagcatcatggacatcctgaacatcaagatcagccacttcctgaagatggagagcctgaacttcatcagagcccacaccccctacatcaacatctacaactgcgagcccgccaaccccagcgagaagaacagccccagcacccagtactgctacagcatccagagcctgttcctgggcatcctgagcgtgatgctgatcttcgccttcttccaggagctggtgatcgccggcatcgtggagaacgagtggaagagaacctgcagcagacccaagagcaacatcgtgctgctgagcgccgaggagaagaaggagcagaccatcgagatcaaggaggaggtggtgggcctgaccgagaccagcagccagcccaagaacgaggaggacatcgagatcatccccatccaggaggaggaggaggaggagaccgagaccaacttccccgagcccccccaggaccaggagagcagccccatcgagaacgacagcagcccctga

SEQ ID NO: 2584 - RNA, 1989 nt, synthetic construct
  misc_feature 1..1989: note = AAC18956 variant
  source 1..1989: mol_type = other RNA
atggagagcaagaccgagaagtggatggagagaatccacctgaacgtgagcgagagacccttccccccccacatccagctgccccccgagatccaggagagccaggaggtgaccctgacctgcctgctgaacttcagctgctacggctaccccatccagctgcagtggctgctggagggcgtgcccatgagacaggccgccgtgaccagcaccagcctgaccatcaagagcgtgttcaccagaagcgagctgaagttcagcccccagtggagccaccacggcaagatcgtgacctgccagctgcaggacgccgacggcaagttcctgagcaacgacaccgtgcagctgaacgtgaagcacacccccaagctggagatcaaggtgacccccagcgacgccatcgtgagagagggcgacagcgtgaccatgacctgcgaggtgagcagcaccaaccccgagtacaccaccgtgagctggctgaaggacggcaccagcctgaagaagcagaacaccttcaccctgaacctgagagaggtgaccaaggaccagagcggcaagtactgctgccaggtgagcaacgacgtgggccccggcagaagcgaggaggtgttcctgcaggtgcagtacgcccccgagcccagcaccgtgcagatcctgcacagccccgccgtggagggcagccaggtggagttcctgtgcatgagcctggccaaccccctgcccaccaactacacctggtaccacaacggcaaggagatgcagggcagaaccgaggagaaggtgcacatccccaagatcctgccctggcacgccggcacctacagctgcgtggccgagaacatcctgggcaccggccagagaggccccggcgccgagctggacgtgcagtacccccccaagaaggtgaccaccgtgatccagaaccccatgcccatcagagagggcgacaccgtgaccctgagctgcaactacaacagcagcaaccccagcgtgaccagatacgagtggaagccccacggcgcctgggaggagcccagcctgggcgtgctgaagatccagaaggtgggctgggacaacaccaccatcgcctgcgccagatgcaacagctggtgcagctgggccagccccgtggccctgaacgtgcagtacgcccccagagacgtgagagtgagaaagatcaagcccctgagcgagatccacagcggcaacagcgtgagcctgcagtgcgacttcagcagcagccaccccaaggaggtgcagttcttctgggagaagaacggcagactgctgggcaaggagagccagctgaacttcgacagcatcagccccgaggacgccggcagctacagctgctgggtgaacaacagcatcggccagaccgccagcaaggcctggaccctggaggtgctgtacgcccccagaagactgagagtgagcatgagccccggcgaccaggtgatggagggcaagagcgccaccctgagatgcgagagcgacgccaacccccccgtgagccactacacctggttcgactggaacaaccagagcctgccctaccacagccagaagctgagactggagcccgtgaaggtgcagcacagcggcgcctactggtgccagggcaccaacagcgtgggcaagggcagaagccccctgagcaccctgaccgtgtactacagccccgagaccatcggcagaagagtggccgtgggcctgggcagctgcctggccatcctgatcctggccatctgcggcctgaagctgcagagaagagacgccgagagcagcgagatgcagagaccccccagaacctgcgacgacaccgtgacctacagcgccctgcacaagagacaggtgggcgactacgagaacgtgatccccgacttccccgaggacgagggcatccactacagcgagctgatccagttcggcgtgggcgagagaccccaggcccaggagaacgtggactacgtgatcctgaagcactga

SEQ ID NO: 2585 - RNA, 2544 nt, synthetic construct
  misc_feature 1..2544: note = AAB06448 variant
  source 1..2544: mol_type = other RNA
atgcacctgctgggcccctggctgctgctgctggtgctggagtacctggccttcagcgacagcagcaagtgggtgttcgagcaccccgagaccctgtacgcctgggagggcgcctgcgtgtggatcccctgcacctacagagccctggacggcgacctggagagcttcatcctgttccacaaccccgagtacaacaagaacaccagcaagttcgacggcaccagactgtacgagagcaccaaggacggcaaggtgcccagcgagcagaagagagtgcagttcctgggcgacaagaacaagaactgcaccctgagcatccaccccgtgcacctgaacgacagcggccagctgggcctgagaatggagagcaagaccgagaagtggatggagagaatccacctgaacgtgagcgagagacccttccccccccacatccagctgccccccgagatccaggagagccaggaggtgaccctgacctgcctgctgaacttcagctgctacggctaccccatccagctgcagtggctgctggagggcgtgcccatgagacaggccgccgtgaccagcaccagcctgaccatcaagagcgtgttcaccagaagcgagctgaagttcagcccccagtggagccaccacggcaagatcgtgacctgccagctgcaggacgccgacggcaagttcctgagcaacgacaccgtgcagctgaacgtgaagcacacccccaagctggagatcaaggtgacccccagcgacgccatcgtgagagagggcgacagcgtgaccatgacctgcgaggtgagcagcagcaaccccgagtacaccaccgtgagctggctgaaggacggcaccagcctgaagaagcagaacaccttcaccctgaacctgagagaggtgaccaaggaccagagcggcaagtactgctgccaggtgagcaacgacgtgggccccggcagaagcgaggaggtgttcctgcaggtgcagtacgcccccgagcccagcaccgtgcagatcctgcacagccccgccgtggagggcagccaggtggagttcctgtgcatgagcctggccaaccccctgcccaccaactacacctggtaccacaacggcaaggagatgcagggcagaaccgaggagaaggtgcacatccccaagatcctgccctggcacgccggcacctacagctgcgtggccgagaacatcctgggcaccggccagagaggccccggcgccgagctggacgtgcagtacccccccaagaaggtgaccaccgtgatccagaaccccatgcccatcagagagggcgacaccgtgaccctgagctgcaactacaacagcagcaaccccagcgtgaccagatacgagtggaagccccacggcgcctgggaggagcccagcctgggcgtgctgaagatccagaacgtgggctgggacaacaccaccatcgcctgcgccgcctgcaacagctggtgcagctgggccagccccgtggccctgaacgtgcagtacgcccccagagacgtgagagtgagaaagatcaagcccctgagcgagatccacagcggcaacagcgtgagcctgcagtgcgacttcagcagcagccaccccaaggaggtgcagttcttctgggagaagaacggcagactgctgggcaaggagagccagctgaacttcgacagcatcagccccgaggacgccggcagctacagctgctgggtgaacaacagcatcggccagaccgccagcaaggcctggaccctggaggtgctgtacgcccccagaagactgagagtgagcatgagccccggcgaccaggtgatggagggcaagagcgccaccctgacctgcgagagcgacgccaacccccccgtgagccactacacctggttcgactggaacaaccagagcctgccctaccacagccagaagctgagactggagcccgtgaaggtgcagcacagcggcgcctactggtgccagggcaccaacagcgtgggcaagggcagaagccccctgagcaccctgaccgtgtactacagccccgagaccatcggcagaagagtggccgtgggcctgggcagctgcctggccatcctgatcctggccatctgcggcctgaagctgcagagaagatggaagagaacccagagccagcagggcctgcaggagaacagcagcggccagagcttcttcgtgagaaacaagaaggtgagaagagcccccctgagcgagggcccccacagcctgggctgctacaaccccatgatggaggacggcatcagctacaccaccctgagattccccgagatgaacatccccagaaccggcgacgccgagagcagcgagatgcagagacccccccccgactgcgacgacaccgtgacctacagcgccctgcacaagagacaggtgggcgactacgagaacgtgatccccgacttccccgaggacgagggcatccactacagcgagctgatccagttcggcgtgggcgagagaccccaggcccaggagaacgtggactacgtgatcctgaagcactga

SEQ ID NO: 2586 - RNA, 2544 nt, synthetic construct; identical to SEQ ID NO: 2585
  misc_feature 1..2544: note = ABK41939 variant
  source 1..2544: mol_type = other RNA

SEQ ID NO: 2587 - RNA, 1605 nt, synthetic construct
  misc_feature 1..1605: note = CAE47548 variant
  source 1..1605: mol_type = other RNA
atgctgagaagaagaggcagccccggcatgggcgtgcacgtgggcgccgccctgggcgccctgtggttctgcctgaccggcgccctggaggtgcaggtgcccgaggaccccgtggtggccctggtgggcaccgacgccaccctgtgctgcagcttcagccccgagcccggcttcagcctggcccagctgaacctgatctggcagctgaccgacaccaagcagctggtgcacagcttcgccgagggccaggaccagggcagcgcctacgccaacagaaccgccctgttccccgacctgctggcccagggcaacgccagcctgagactgcagagagtgagagtggccgacgagggcagcttcacctgcttcgtgagcatcagagacttcggcagcgccgccgtgagcctgcaggtggccgccccctacagcaagcccagcatgaccctggagcccaacaaggacctgagacccggcgacaccgtgaccatcacctgcagcagctaccagggctaccccgaggccgaggtgttctggcaggacggccagggcgtgcccctgaccggcaacgtgaccaccagccagatggccaacgagcagggcctgttcgacgtgcacagcatcctgagagtggtgctgggcgccaacggcacctacagctgcctggtgagaaaccccgtgctgcagcaggacgcccacagcagcgtgaccatcaccccccagagaagccccaccggcgccgtggaggtgcaggtgcccgaggaccccgtggtggccctggtgggcaccgacgccaccctgagatgcagcttcagccccgagcccggcttcagcctggcccagctgaacctgatctggcagctgaccgacaccaagcagctggtgcacagcttcaccgagggcagagaccagggcagcgcctacgccaacagaaccgccctgttccccgacctgctggcccagggcaacgccagcctgagactgcagagagtgagagtggccgacgagggcagcttcacctgcttcgtgagcatcagagacttcggcagcgccgccgtgagcctgcaggtggccgccccctacagcaagcccagcatgaccctggagcccaacaaggacctgagacccggcgacaccgtgaccatcacctgcagcagctacagaggctaccccgaggccgaggtgttctggcaggacggccagggcgtgcccctgaccggcaacgtgaccaccagccagatggccaacgagcagggcctgttcgacgtgcacagcgtgctgagagtggtgctgggcgccaacggcacctacagctgcctggtgagaaaccccgtgctgcagcaggacgcccacggcagcgtgaccatcaccggccagcccatgaccttcccccccgaggccctgtgggtgaccgtgggcctgagcgtgtgcctgatcgccctgctggtggccctggccttcgtgtgctggagaaagatcaagcagagctgcgaggaggagaacgccggcgccgaggaccaggacggcgagggcgagggcagcaagaccgccctgcagcccctgaagcacagcgacagcaaggaggacgacggccaggagatcgcctga

SEQ ID NO: 2588 - RNA, 639 nt, synthetic construct
  misc_feature 1..639: note = BAG57312 variant
  source 1..639: mol_type = other RNA
atgcccctgctgctgctgctgcccctgctgtgggccgacctgacccacagacccaagatcctgatccccggcaccctggagcccggccacagcaagaacctgacctgcagcgtgagctgggcctgcgagcagggcaccccccccatcttcagctggctgagcgccgcccccaccagcctgggccccagaaccacccacagcagcgtgctgatcatcacccccagaccccaggaccacggcaccaacctgacctgccaggtgaagttcgccggcgccggcgtgaccaccgagagaaccatccagctgaacgtgacctacgtgccccagaaccccaccaccggcatcttccccggcgacggcagcggcaagcaggagaccagagccggcgtggtgcacggcgccatcggcggcgccggcgtgaccgccctgctggccctgtgcctgtgcctgatcttcttcatcgtgaagacccacagaagaaaggccgccagaaccgccgtgggcagaaacgacacccaccccaccaccggcagcgccagccccgtgagcgacggcgccagctggcaccccgtgtgccccgccgacaccagcagccagtgcggcccccccagctgccccatccagcacttccagaactga

SEQ ID NO: 2589 - RNA, 1095 nt, synthetic construct
  misc_feature 1..1095: note = AAK83654 variant
  source 1..1095: mol_type = other RNA
atgcccctgctgctgctgctgcccctgctgtgggccggcgccctggccatggaccccaacttctggctgcaggtgcaggagagcgtgaccgtgcaggagggcctgtgcgtgctggtgccctgcaccttcttccaccccatcccctactacgacaagaacagccccgtgcacggctactggttcagagagggcgccatcatcagcagagacagccccgtggccaccaacaagctggaccaggaggtgcaggaggagacccagggcagattcagactgctgggcgaccccagcagaaacaactgcagcctgagcatcgtggacgccagaagaagagacaacggcagctacttcttcagaatggagagaggcagcaccaagtacagctacaagagcccccagctgagcgtgcacgtgaccgacctgacccacagacccaagatcctgatccccggcaccctggagcccggccacagcaagaacctgacctgcagcgtgagctgggcctgcgagcagggcaccccccccatcttcagctggctgagcgccgcccccaccagcctgggccccagaaccacccacagcagcgtgctgatcatcacccccagaccccaggaccacggcaccaacctgacctgccaggtgaagttcgccggcgccggcgtgaccaccgagagaaccatccagctgaacgtgacctacgtgccccagaaccccaccaccggcatcttccccggcgacggcagcggcaagcaggagaccagagccggcgtggtgcacggcgccatcggcggcgccggcgtgaccgccctgctggccctgtgcctgtgcctgatcttcttcatcgtgaagacccacagaagaaaggccgccagaaccgccgtgggcagaaacgacacccaccccaccaccggcagcgccagccccaagcaccagaagaagagcaagctgcacggccccaccgagaccagcagctgcagcggcgccgcccccaccgtggagatggacgaggagctgcactacgccagcctgaacttccacggcatgaaccccagcaaggacaccagcaccgagtacagcgaggtgagaacccagtga

SEQ ID NO: 2590 - RNA, 1095 nt, synthetic construct; identical to SEQ ID NO: 2589
  misc_feature 1..1095: note = CAD36509 variant
  source 1..1095: mol_type = other RNA

SEQ ID NO: 2591 - RNA, 624 nt, synthetic construct
  misc_feature 1..624: note = AAA52295 variant
  source 1..624: mol_type = other RNA
atgcagagcggcacccactggagagtgctgggcctgtgcctgctgagcgtgggcgtgtggggccaggacggcaacgaggagatgggcggcatcacccagaccccctacaaggtgagcatcagcggcaccaccgtgatcctgacctgcccccagtaccccggcagcgagatcctgtggcagcacaacgacaagaacatcggcggcgacgaggacgacaagaacatcggcagcgacgaggaccacctgagcctgaaggagttcagcgagctggagcagagcggctactacgtgtgctaccccagaggcagcaagcccgaggacgccaacttctacctgtacctgagagccagagtgtgcgagaactgcatggagatggacgtgatgagcgtggccaccatcgtgatcgtggacatctgcatcaccggcggcctgctgctgctggtgtactactggagcaagaacagaaaggccaaggccaagcccgtgaccagaggcgccggcgccggcggcagacagagaggccagaacaaggagagacccccccccgtgcccaaccccgactacgagcccatcagaaagggccagagagacctgtacagcggcctgaaccagagaagaatctga

SEQ ID NO: 2592 - RNA, 495 nt, synthetic construct
  misc_feature 1..495: note = AAH25703 variant
  source 1..495: mol_type = other RNA
atgaagtggaaggccctgttcaccgccgccatcctgcaggcccagctgcccatcaccgaggcccagagcttcggcctgctggaccccaagctgtgctacctgctggacggcatcctgttcatctacggcgtgatcctgaccgccctgttcctgagagtgaagttcagcagaagcgccgacgcccccgcctaccagcagggccagaaccagctgtacaacgagctgaacctgggcagaagagaggagtacgacgtgctggacaagagaagaggcagagaccccgagatgggcggcaagccccagagaagaaagaacccccaggagggcctgtacaacgagctgcagaaggacaagatggccgaggcctacagcgagatcggcatgaagggcgagagaagaagaggcaagggccacgacggcctgtaccagggcctgagcaccgccaccaaggacacctacgacgccctgcacatgcaggccctgccccccagatga

SEQ ID NO: 2593 - RNA, 2229 nt, synthetic construct
  misc_feature 1..2229: note = CCDS7897.1 variant
  source 1..2229: mol_type = other RNA
atggacaagttctggtggcacgccgcctggggcctgtgcctggtgcccctgagcctggcccagatcgacctgaacatcacctgcagattcgccggcgtgttccacgtggagaagaacggcagatacagcatcagcagaaccgaggccgccgacctgtgcaaggccttcaacagcaccctgcccaccatggcccagatggagaaggccctgagcatcggcttcgagacctgcagatacggcttcatcgagggccacgtggtgatccccagaatccaccccaacagcatctgcgccgccaacaacaccggcgtgtacatcctgaccagcaacaccagccagtacgacacctactgcttcaacgccagcgccccccccgaggaggactgcaccagcgtgaccgacctgcccaacgccttcgacggccccatcaccatcaccatcgtgaacagagacggcaccagatacgtgcagaagggcgagtacagaaccaaccccgaggacatctaccccagcaaccccaccgacgacgacgtgagcagcggcagcagcagcgagagaagcagcaccagcggcggctacatcttctacaccttcagcaccgtgcaccccatccccgacgaggacagcccctggatcaccgacagcaccgacagaatccccgccaccaccctgatgagcaccagcgccaccgccaccgagaccgccaccaagagacaggagacctgggactggttcagctggctgttcctgcccagcgagagcaagaaccacctgcacaccaccacccagatggccggcaccagcagcaacaccatcagcgccggctgggagcccaacgaggagaacgaggacgagagagacagacacctgagcttcagcggcagcggcatcgacgacgacgaggacttcatcagcagcaccatcagcaccacccccagagccttcgaccacaccaagcagaaccaggactggacccagtggaaccccagccacagcaaccccgaggtgctgctgcagaccaccaccagaatgaccgacgtggacagaaacggcaccaccgcctacgagggcaactggaaccccgaggcccacccccccctgatccaccacgagcaccacgaggaggaggagaccccccacagcaccagcaccatccaggccacccccagcagcaccaccgaggagaccgccacccagaaggagcagtggttcggcaacagatggcacgagggctacagacagacccccaaggaggacagccacagcaccaccggcaccgccgccgccagcgcccacaccagccaccccatgcagggcagaaccacccccagccccgaggacagcagctggaccgacttcttcaaccccatcagccaccccatgggcagaggccaccaggccggcagaagaatggacatggacagcagccacagcatcaccctgcagcccaccgccaaccccaacaccggcctggtggaggacctggacagaaccggccccctgagcatgaccacccagcagagcaacagccagagcttcagcaccagccacgagggcctggaggaggacaaggaccaccccaccaccagcaccctgaccagcagcaacagaaacgacgtgaccggcggcagaagagaccccaaccacagcgagggcagcaccaccctgctggagggctacaccagccactacccccacaccaaggagagcagaaccttcatccccgtgaccagcgccaagaccggcagcttcggcgtgaccgccgtgaccgtgggcgacagcaacagcaacgtgaacagaagcctgagcggcgaccaggacaccttccaccccagcggcggcagccacaccacccacggcagcgagagcgacggccacagccacggcagccaggagggcggcgccaacaccaccagcggccccatcagaaccccccagatccccgagtggctgatcatcctggccagcctgctggccctggccctgatcctggccgtgtgcatcgccgtgaacagcagaagaagatgcggccagaagaagaagctggtgatcaacagcggcaacggcgccgtggaggacagaaagcccagcggcctgaacggcgaggccagcaagagccaggagatggtgcacctggtgaacaaggagagcagcgagacccccgaccagttcatgaccgccgacgagaccagaaacctgcagaacgtggacatgaagatcggcgtgtga

SEQ ID NO: 2594 - RNA, 2100 nt, synthetic construct
  misc_feature 1..2100: note = XM_006718388.1 variant
  source 1..2100: mol_type = other RNA
atggacaagttctggtggcacgccgcctggggcctgtgcctggtgcccctgagcctggcccagatcgacctgaacatcacctgcagattcgccggcgtgttccacgtggagaagaacggcagatacagcatcagcagaaccgaggccgccgacctgtgcaaggccttcaacagcaccctgcccaccatggcccagatggagaaggccctgagcatcggcttcgagacctgcagatacggcttcatcgagggccacgtggtgatccccagaatccaccccaacagcatctgcgccgccaacaacaccggcgtgtacatcctgaccagcaacaccagccagtacgacacctactgcttcaacgccagcgccccccccgaggaggactgcaccagcgtgaccgacctgcccaacgccttcgacggccccatcaccatcaccatcgtgaacagagacggcaccagatacgtgcagaagggcgagtacagaaccaaccccgaggacatctaccccagcaaccccaccgacgacgacgtgagcagcggcagcagcagcgagagaagcagcaccagcggcggctacatcttctacaccttcagcaccgtgcaccccatccccgacgaggacagcccctggatcaccgacagcaccgacagaatccccgccaccaccctgatgagcaccagcgccaccgccaccgagaccgccaccaagagacaggagacctgggactggttcagctggctgttcctgcccagcgagagcaagaaccacctgcacaccaccacccagatggccggcaccagcagcaacaccatcagcgccggctgggagcccaacgaggagaacgaggacgagagagacagacacctgagcttcagcggcagcggcatcgacgacgacgaggacttcatcagcagcaccatcagcaccacccccagagccttcgaccacaccaagcagaaccaggactggacccagtggaaccccagccacagcaaccccgaggtgctgctgcagaccaccaccagaatgaccgacgtggacagaaacggcaccaccgcctacgagggcaactggaaccccgaggcccacccccccctgatccaccacgagcaccacgaggaggaggagaccccccacagcaccagcaccaccgccagcgcccacaccagccaccccatgcagggcagaaccacccccagccccgaggacagcagctggaccgacttcttcaaccccatcagccaccccatgggcagaggccaccaggccggcagaagaatggacatggacagcagccacagcatcaccctgcagcccaccgccaaccccaacaccggcctggtggaggacctggacagaaccggccccctgagcatgaccacccagcagagcaacagccagagcttcagcaccagccacgagggcctggaggaggacaaggaccaccccaccaccagcaccctgaccagcagcaacagaaacgacgtgaccggcggcagaagagaccccaaccacagcgagggcagcaccaccctgctggagggctacaccagccactacccccacaccaaggagagcagaaccttcatccccgtgaccagcgccaagaccggcagcttcggcgtgaccgccgtgaccgtgggcgacagcaacagcaacgtgaacagaagcctgagcggcgaccaggacaccttccaccccagcggcggcagccacaccacccacggcagcgagagcgacggccacagccacggcagccaggagggcggcgccaacaccaccagcggccccatcagaaccccccagatccccgagtggctgatcatcctggccagcctgctggccctggccctgatcctggccgtgtgcatcgccgtgaacagcagaagaagatgcggccagaagaagaagctggtgatcaacagcggcaacggcgccgtggaggacagaaagcccagcggcctgaacggcgaggccagcaagagccaggagatggtgcacctggtgaacaaggagagcagcgagacccccgaccagttcatgaccgccgacgagaccagaaacctgcagaacgtggacatgaagatcggcgtgtga

SEQ ID NO: 2595 - RNA, 1377 nt, synthetic construct
  misc_feature 1..1377: note = AAA35572 variant
  source 1..1377: mol_type = other RNA
atgaacagaggcgtgcccttcagacacctgctgctggtgctgcagctggccctgctgcccgccgccacccagggcaagaaggtggtgctgggcaagaagggcgacaccgtggagctgacctgcaccgccagccagaagaagagcatccagttccactggaagaacagcaaccagatcaagatcctgggcaaccagggcagcttcctgaccaagggccccagcaagctgaacgacagagccgacagcagaagaagcctgtgggaccagggcaacttccccctgatcatcaagaacctgaagatcgaggacagcgacacctacatctgcgaggtggaggaccagaaggaggaggtgcagctgctggtgttcggcctgaccgccaacagcgacacccacctgctgcagggccagagcctgaccctgaccctggagagcccccccggcagcagccccagcgtgcagtgcagaagccccagaggcaagaacatccagggcggcaagaccctgagcgtgagccagctggagctgcaggacagcggcacctggacctgcaccgtgctgcagaaccagaagaaggtggagttcaagatcgacatcgtggtgctggccttccagaaggccagcagcatcgtgtacaagaaggagggcgagcaggtggagttcagcttccccctggccttcaccgtggagaagctgaccggcagcggcgagctgtggtggcaggccgagagagccagcagcagcaagagctggatcaccttcgacctgaagaacaaggaggtgagcgtgaagagagtgacccaggaccccaagctgcagatgggcaagaagctgcccctgcacctgaccctgccccaggccctgccccagtacgccggcagcggcaacctgaccctggccctggaggccaagaccggcaagctgcaccaggaggtgaacctggtggtgatgagagccacccagctgcagaagaacctgacctgcgaggtgtggggccccaccagccccaagctgatgctgagcctgaagctggagaacaaggaggccaaggtgagcaagagagagaaggccgtgtgggtgctgaaccccgaggccggcatgtggcagtgcctgctgagcgacagcggccaggtgctgctggagagcaacatcaaggtgctgcccacctggagcacccccgtgcagcccatggccctgatcgtgctgggcggcgtggccggcctgctgctgttcatcggcctgggcatcttcttctgcgtgagatgcagacacagaagaagacaggccgagagaatgagccagatcaagagactgctgagcgagaagaagacctgccagtgcccccacagattccagaagacctgcagccccatctga

SEQ ID NO: 2596 - RNA, 186 nt, synthetic construct
  misc_feature 1..186: note = CAA44323 variant
  source 1..186: mol_type = other RNA
atgaagagattcctgttcctgctgctgaccatcagcctgctggtgatggtgcagatccagaccggcctgagcggccagaacgacaccagccagaccagcagccccagcgccagcagcaacatcagcggcggcatcttcctgttcttcgtggccaacgccatcatccacctgttctgcttcagctga

SEQ ID NO: 2597 - RNA, 186 nt, synthetic construct
  misc_feature 1..186: note = AAP35780 variant
  source 1..186: mol_type = other RNA
atgaagagattcctgttcctgctgctgaccatcagcctgctggtgatggtgcagatccagaccggcctgagcggccagaacgacaccagccagaccagcagccccagcgccagcagcagcatgagcggcggcatcttcctgttcttcgtggccaacgccatcatccacctgttctgcttcagctga

SEQ ID NO: 2598 - RNA, 186 nt, synthetic construct; identical to SEQ ID NO: 2596
  misc_feature 1..186: note = ACS44650 variant
  source 1..186: mol_type = other RNA

SEQ ID NO: 2599 - RNA, 954 nt, synthetic construct
  misc_feature 1..954: note = EAW93489 variant
  source 1..954: mol_type = other RNA
atgaccgtggccagacccagcgtgcccgccgccctgcccctgctgggcgagctgcccagactgctgctgctggtgctgctgtgcctgcccgccgtgtggggcgactgcggcctgccccccgacgtgcccaacgcccagcccgccctggagggcagaaccagcttccccgaggacaccgtgatcacctacaagtgcgaggagagcttcgtgaagatccccggcgagaaggacagcgtgatctgcctgaagggcagccagtggagcgacatcgaggagttctgcaaccagaagagctgccccaaccccggcgagatcagaaacggccagatcgacgtgcccggcggcatcctgttcggcgccaccatcagcttcagctgcaacaccggctacaagctgttcggcagcaccagcagcttctgcctgatcagcggcagcagcgtgcagtggagcgaccccctgcccgagtgcagagagatctactgccccgcccccccccagatcgacaacggcatcatccagggcgagagagaccactacggctacagacagagcgtgacctacgcctgcaacaagggcttcaccatgatcggcgagcacagcatctactgcaccgtgaacaacgacgagggcgagtggagcggccccccccccgagtgcagaggcaagagcctgaccagcaaggtgccccccaccgtgcagaagcccaccaccgtgaacgtgcccaccaccgaggtgagccccaccagccagaagaccaccaccaagaccaccacccccaacgcccaggccaccagaagcacccccgtgagcagaaccaccaagcacttccacgagaccacccccaacaagggcagcggcaccaccagcggcaccaccagactgctgagcggccacacctgcttcaccctgaccggcctgctgggcaccctggtgaccatgggcctgctgacctga

SEQ ID NO: 2600 - RNA, 882 nt, synthetic construct
  misc_feature 1..882: note = EAW93497 variant
  source 1..882: mol_type = other RNA
atgatcggcgagcacagcatctactgcaccgtgaacaacgacgagggcgagtggagcggccccccccccgagtgcagaggcaagagcctgaccagcaaggtgccccccaccgtgcagaagcccaccaccgtgaacgtgcccaccaccgaggtgagccccaccagccagaagaccaccaccaagaccaccacccccaacgcccagggcaccgagacccccagcgtgctgcagaagcacaccaccgagaacgtgagcgccaccagaaccccccccaccccccagaagcccaccaccgtgaacgtgcccgccaccatcgtgacccccaccccccagaagcccaccaccatcaacgtgcccgccaccggcgtgagcagcaccccccagagacacaccatcgtgaacgtgagcgccaccggcaccctgcccaccctgcagaagcccaccagagccaacgacagcgccaccaagagccccgccgccgcccagaccagcttcatcagcaagaccctgagcaccaagacccccagcgccgcccagaaccccatgatgaccaacgccagcgccacccaggccaccctgaccgcccagaagttcaccaccgccaaggtggccttcacccagagccccagcgccgccagaaagagcaccaacgtgcacagccccgtgaccaacggcctgaagagcacccagagattccccagcgcccacatcaccgccaccagaagcacccccgtgagcagaaccaccaagcacttccacgagaccacccccaacaagggcagcggcaccaccagcggcaccaccagactgctgagcggccacacctgcttcaccctgaccggcctgctgggcaccctggtgaccatgggcctgctgacctga

SEQ ID NO: 2601 - RNA, 804 nt, synthetic construct
  misc_feature 1..804: note = EAW93493 variant
  source 1..804: mol_type = other RNA
atgatcggcgagcacagcatctactgcaccgtgaacaacgacgagggcgagtggagcggccccccccccgagtgcagaggcaagagcctgaccagcaaggtgccccccaccgtgcagaagcccaccaccgtgaacgtgcccaccaccgaggtgagccccaccagccagaagaccaccaccaagaccaccacccccaacgcccagggcaccgagacccccagcgtgctgcagaagcacaccaccgagaacgtgagcgccaccagaaccccccccaccccccagaagcccaccaccgtgaacgtgcccgccaccatcgtgacccccaccccccagaagcccaccaccatcaacgtgcccgccaccggcgtgagcagcaccccccagagacacaccatcgtgaacgtgagcgccaccggcaccctgcccaccctgcagaagcccaccagagccaacgacagcgccaccaagagccccgccgccgcccagaccagcttcatcagcaagaccctgagcaccaagacccccagcgccgcccagaaccccatgatgaccaacgccagcgccacccaggccaccctgaccgcccagaagttcaccaccgccaaggtggccttcacccagagccccagcgccgcccccaccagaagcacccccgtgagcagaaccaccaagcacttccacgagaccacccccaacaagggcagcggcaccaccagcggcaccaccagactgctgagcggccacacctgcttcaccctgaccggcctgctgggcaccctggtgaccatgggcctgctgacctga

SEQ ID NO: 2602 - RNA, 1146 nt, synthetic construct
  misc_feature 1..1146: note = AAA52168 variant
  source 1..1146: mol_type = other RNA
atgaccgtggccagacccagcgtgcccgccgccctgcccctgctgggcgagctgcccagactgctgctgctggtgctgctgtgcctgcccgccgtgtggggcgactgcggcctgccccccgacgtgcccaacgcccagcccgccctggagggcagaaccagcttccccgaggacaccgtgatcacctacaagtgcgaggagagcttcgtgaagatccccggcgagaaggacagcgtgatctgcctgaagggcagccagtggagcgacatcgaggagttctgcaacagaagctgcgaggtgcccaccagactgaacagcgccagcctgaagcagccctacatcacccagaactacttccccgtgggcaccgtggtggagtacgagtgcagacccggctacagaagagagcccagcctgagccccaagctgacctgcctgcagaacctgaagtggagcaccgccgtggagttctgcaagaagaagagctgccccaaccccggcgagatcagaaacggccagatcgacgtgcccggcggcatcctgttcggcgccaccatcagcttcagctgcaacaccggctacaagctgttcggcagcaccagcagcttctgcctgatcagcggcagcagcgtgcagtggagcgaccccctgcccgagtgcagagagatctactgccccgcccccccccagatcgacaacggcatcatccagggcgagagagaccactacggctacagacagagcgtgacctacgcctgcaacaagggcttcaccatgatcggcgagcacagcatctactgcaccgtgaacaacgacgagggcgagtggagcggccccccccccgagtgcagaggcaagagcctgaccagcaaggtgccccccaccgtgcagaagcccaccaccgtgaacgtgcccaccaccgaggtgagccccaccagccagaagaccaccaccaagaccaccacccccaacgcccaggccaccagaagcacccccgtgagcagaaccaccaagcacttccacgagaccacccccaacaagggcagcggcaccaccagcggcaccaccagactgctgagcggccacacctgcttcaccctgaccggcctgctgggcaccctggtgaccatgggcctgctgacctga

SEQ ID NO: 2603 - RNA, 2577 nt, synthetic construct
  misc_feature 1..2577: note = CCDS73385.1 variant
  source 1..2577: mol_type = other RNA
atgctgcagaccaaggacctgatctggaccctgttcttcctgggcaccgccgtgagcctgcaggtggacatcgtgcccagccagggcgagatcagcgtgggcgagagcaagttcttcctgtgccaggtggccggcgacgccaaggacaaggacatcagctggttcagccccaacggcgagaagctgacccccaaccagcagagaatcagcgtggtgtggaacgacgacagcagcagcaccctgaccatctacaacgccaacatcgacgacgccggcatctacaagtgcgtggtgaccggcgaggacggcagcgagagcgaggccaccgtgaacgtgaagatcttccagaagctgatgttcaagaacgcccccaccccccaggagttcagagagggcgaggacgccgtgatcgtgtgcgacgtggtgagcagcctgccccccaccatcatctggaagcacaagggcagagacgtgatcctgaagaaggacgtgagattcatcgtgctgagcaacaactacctgcagatcagaggcatcaagaagaccgacgagggcacctacagatgcgagggcagaatcctggccagaggcgagatcaacttcaaggacatccaggtgatcgtgaacgtgccccccaccatccaggccagacagaacatcgtgaacgccaccgccaacctgggccagagcgtgaccctggtgtgcgacgccgagggcttccccgagcccaccatgagctggaccaaggacggcgagcagatcgagcaggaggaggacgacgagaagtacatcttcagcgacgacagcagccagctgaccatcaagaaggtggacaagaacgacgaggccgagtacatctgcatcgccgagaacaaggccggcgagcaggacgccaccatccacctgaaggtgttcgccaagcccaagatcacctacgtggagaaccagaccgccatggagctggaggagcaggtgaccctgacctgcgaggccagcggcgaccccatccccagcatcacctggagaaccagcaccagaaacatcagcagcgaggagaaggccagctggaccagacccgagaagcaggagaccctggacggccacatggtggtgagaagccacgccagagtgagcagcctgaccctgaagagcatccagtacaccgacgccggcgagtacatctgcaccgccagcaacaccatcggccaggacagccagagcatgtacctggaggtgcagtacgcccccaagctgcagggccccgtggccgtgtacacctgggagggcaaccaggtgaacatcacctgcgaggtgttcgcctaccccagcgccaccatcagctggttcagagacggccagctgctgcccagcagcaactacagcaacatcaagatctacaacacccccagcgccagctacctggaggtgacccccgacagcgagaacgacttcggcaactacaactgcaccgccgtgaacagaatcggccaggagagcctggagttcatcctggtgcaggccgacacccccagcagccccagcatcgaccaggtggagccctacagcagcaccgcccaggtgcagttcgacgagcccgaggccaccggcggcgtgcccatcctgaagtacaaggccgagtggagagccgtgggcgaggaggtgtggcacagcaagtggtacgacgccaaggaggccagcatggagggcatcgtgaccatcgtgggcctgaagcccgagaccacctacgccgtgagactggccgccctgaacggcaagggcctgggcgagatcagcgccgccagcgagttcaagacccagcccgtgcagggcgagcccagcgcccccaagctggagggccagatgggcgaggacggcaacagcatcaaggtgaacctgatcaagcaggacgacggcggcagccccatcagacactacctggtgagatacagagccctgagcagcgagtggaagcccgagatcagactgcccagcggcagcgaccacgtgatgctgaagagcctggactggaacgccgagtacgaggtgtacgtggtggccgagaaccagcagggcaagagcaaggccgcccacttcgtgttcagaaccagcgcccagcccaccgccatccccgccaacggcagccccaccagcggcctgagcaccggcgccatcgtgggcatcctgatcgtgatcttcgtgctgctgctggtggtggtggacatcacctgctacttcctgaacaagtgcggcctgttcatgtgcatcgccgtgaacctgtgcggcaaggccggccccggcgccaagggcaaggacatggaggagggcaaggccgccttcagcaaggacgagagcaaggagcccatcgtggaggtgagaaccgaggaggagagaacccccaaccacgacggcggcaagcacaccgagcccaacgagaccacccccctgaccgagcccgagaagggccccgtggaggccaagcccgagtgccaggagaccgagaccaagcccgcccccgccgaggtgaagaccgtgcccaacgacgccacccagaccaaggagaacgagagcaaggcctga

SEQ ID NO: 2604 - RNA, 867 nt, synthetic construct
  misc_feature 1..867: note = ABK41933 variant
  source 1..867: mol_type = other RNA
atgggccacaccagaagacagggcaccagccccagcaagtgcccctacctgaacttcttccagctgctggtgctggccggcctgagccacttctgcagcggcgtgatccacgtgaccaaggaggtgaaggaggtggccaccctgagctgcggccacaacgtgagcgtggaggagctggcccagaccagaatctactggcagaaggagaagaagatggtgctgaccatgatgagcggcgacatgaacatctggcccgagtacaagaacagaaccatcttcgacatcaccaacaacctgagcatcgtgatcctggccctgagacccagcgacgagggcacctacgagtgcgtggtgctgaagtacgagaaggacgccttcaagagagagcacctggccgaggtgaccctgagcgtgaaggccgacttccccacccccagcatcagcgacttcgagatccccaccagcaacatcagaagaatcatctgcagcaccagcggcggcttccccgagccccacctgagctggctggagaacggcgaggagctgaacgccatcaacaccaccgtgagccaggaccccgagaccgagctgtacgccgtgagcagcaagctggacttcaacatgaccaccaaccacagcttcatgtgcctgatcaagtacggccacctgagagtgaaccagaccttcaactggaacaccaccaagcaggagcacttccccgacaacctgctgcccagctgggccatcaccctgatcagcgtgaacggcatcttcgtgatctgctgcctgacctactgcttcgcccccagatgcagagagagaagaagaaacgagagactgagaagagagagcgtgagacccgtgtga

SEQ ID NO: 2605 - RNA, 867 nt, synthetic construct; identical to SEQ ID NO: 2604
  misc_feature 1..867: note = AAA36045 variant
  source 1..867: mol_type = other RNA

SEQ ID NO: 2606 - RNA, 990 nt, synthetic construct
  misc_feature 1..990: note = CCDS3009.1 variant
  source 1..990: mol_type = other RNA
atggacccccagtgcaccatgggcctgagcaacatcctgttcgtgatggccttcctgctgagcggcgccgcccccctgaagatccaggcctacttcaacgagaccgccgacctgccctgccagttcgccaacagccagaaccagagcctgagcgagctggtggtgttctggcaggaccaggagaacctggtgctgaacgaggtgtacctgggcaaggagaagttcgacagcgtgcacagcaagtacatgggcagaaccagcttcgacagcgacagctggaccctgagactgcacaacctgcagatcaaggacaagggcctgtaccagtgcatcatccaccacaagaagcccaccggcatgatcagaatccaccagatgaacagcgagctgagcgtgctggccaacttcagccagcccgagatcgtgcccatcagcaacatcaccgagaacgtgtacatcaacctgacctgcagcagcatccacggctaccccgagcccaagaagatgagcgtgctgctgagaaccaagaacagcaccatcgagtacgacggcgtgatgcagaagagccaggacaacgtgaccgagctgtacgacgtgagcatcagcctgagcgtgagcttccccgacgtgaccagcaacatgaccatcttctgcatcctggagaccgacaagaccagactgctgagcagccccttcagcatcgagctggaggacccccagcccccccccgaccacatcccctggatcaccgccgtgctgcccaccgtgatcatctgcgtgatggtgttctgcctgatcctgtggaagtggaagaagaagaagagacccagaaacagctacaagtgcggcaccaacaccatggagagagaggagagcgagcagaccaagaagagagagaagatccacatccccgagagaagcgacgaggcccagagagtgttcaagagcagcaagaccagcagctgcgacaagagcgacacctgcttctga

SEQ ID NO: 2607 - RNA, 708 nt, synthetic construct
  misc_feature 1..708: note = AAA59674 variant
  source 1..708: mol_type = other RNA
atggccctgcccgtgaccgccctgctgctgcccctggccctgctgctgcacgccgccagacccagccagttcagagtgagccccctggacagaacctggaacctgggcgagaccgtggagctgaagtgccaggtgctgctgagcaaccccaccagcggctgcagctggctgttccagcccagaggcgccgccgccagccccaccttcctgctgtacctgagccagaacaagcccaaggccgccgagggcctggacacccagagattcagcggcaagagactgggcgacaccttcgtgctgaccctgagcgacttcagaagagagaacgagggctactacttctgcagcgccctgagcaacagcatcatgtacttcagccacttcgtgcccgtgttcctgcccgccaagcccaccaccacccccgcccccagaccccccacccccgcccccaccatcgccagccagcccctgagcctgagacccgaggcctgcagacccgccgccggcggcgccgtgcacaccagaggcctggacttcgcctgcgacatctacatctgggcccccctggccggcacctgcggcgtgctgctgctgagcctggtgatcaccctgtactgcaaccacagaaacagaagaagagtgtgcaagtgccccagacccgtggtgaagagcggcgacaagcccagcctgagcgccagatacgtgtga

SEQ ID NO: 2608 - RNA, 2472 nt, synthetic construct
  misc_feature 1..2472: note = EAW57688 variant
  source 1..2472: mol_type = other RNA
atgaccgtgctgcaggagcccgtgcaggccgccatctggcaggccctgaaccactacgcctacagagacgccgtgttcctggccgagagactgtacgccgaggtgcacagcgaggaggccctgttcctgctggccacctgctactacagaagcggcaaggcctacaaggcctacagactgctgaagggccacagctgcaccaccccccagtgcaagtacctgctggccaagtgctgcgtggacctgagcaagctggccgagggcgagcagatcctgagcggcggcgtgttcaacaagcagaagagccacgacgacatcgtgaccgagttcggcgacagcgcctgcttcaccctgagcctgctgggccacgtgtactgcaagaccgacagactggccaagggcagcgagtgctaccagaagagcctgagcctgaaccccttcctgtggagccccttcgagagcctgtgcgagatcggcgagaagcccgaccccgaccagaccttcaagttcaccagcctgcagaacttcagcaactgcctgcccaacagctgcaccacccaggtgcccaaccacagcctgagccacagacagcccgagaccgtgctgaccgagaccccccaggacaccatcgagctgaacagactgaacctggagagcagcaacagcaagtacagcctgaacaccgacagcagcgtgagctacatcgacagcgccgtgatcagccccgacaccgtgcccctgggcaccggcaccagcatcctgagcaagcaggtgcagaacaagcccaagaccggcagaagcctgctgggcggccccgccgccctgagccccctgacccccagcttcggcatcctgcccctggagacccccagccccggcgacggcagctacctgcagaactacaccaacaccccccccgtgatcgacgtgcccagcaccggcgcccccagcaagaagagcgtggccagaatcggccagaccggcaccaagagcgtgttcagccagagcggcaacagcagagaggtgacccccatcctggcccagacccagagcagcggcccccagaccagcaccaccccccaggtgctgagccccaccatcaccagcccccccaacgccctgcccagaagaagcagcagactgttcaccagcgacagcagcaccaccaaggagaacagcaagaagctgaagatgaagttcccccccaagatccccaacagaaagaccaagagcaagaccaacaagggcggcatcacccagcccaacatcaacgacagcctggagatcaccaagctggacagcagcatcatcagcgagggcaagatcagcaccatcaccccccagatccaggccttcaacctgcagaaggccgccgccggcctgatgagcctgctgagagagatgggcaagggctacctggccctgtgcagctacaactgcaaggaggccatcaacatcctgagccacctgcccagccaccactacaacaccggctgggtgctgtgccagatcggcagagcctacttcgagctgagcgagtacatgcaggccgagagaatcttcagcgaggtgagaagaatcgagaactacagagtggagggcatggagatctacagcaccaccctgtggcacctgcagaaggacgtggccctgagcgtgctgagcaaggacctgaccgacatggacaagaacagccccgaggcctggtgcgccgccggcaactgcttcagcctgcagagagagcacgacatcgccatcaagttcttccagagagccatccaggtggaccccaactacgcctacgcctacaccctgctgggccacgagttcgtgctgaccgaggagctggacaaggccctggcctgcttcagaaacgccatcagagtgaaccccagacactacaacgcctggtacggcctgggcatgatctactacaagcaggagaagttcagcctggccgagatgcacttccagaaggccctggacatcaacccccagagcagcgtgctgctgtgccacatcggcgtggtgcagcacgccctgaagaagagcgagaaggccctggacaccctgaacaaggccatcgtgatcgaccccaagaaccccctgtgcaagttccacagagccagcgtgctgttcgccaacgagaagtacaagagcgccctgcaggagctggaggagctgaagcagatcgtgcccaaggagagcctggtgtacttcctgatcggcaaggtgtacaagaagctgggccagacccacctggccctgatgaacttcagctgggccatggacctggaccccaagggcgccaacaaccagatcaaggaggccatcgacaagagatacctgcccgacgacgaggagcccatcacccaggaggagcagatcatgggcaccgacgagagccaggagagcagcatgaccgacgccgacgacacccagctgcacgccgccgagagcgacgagttctga

SEQ ID NO: 2609 - RNA, 2475 nt, synthetic construct
  misc_feature 1..2475: note = AAB34378 variant
  source 1..2475: mol_type = other RNA
atgaccgtgctgcaggagcccgtgcaggccgccatctggcaggccctgaaccactacgcctacagagacgccgtgttcctggccgagagactgtacgccgaggtgcacagcgaggaggccctgttcctgctggccacctgctactacagaagcggcaaggcctacaaggcctacagactgctgaagggccacagctgcaccaccccccagtgcaagtacctgctggccaagtgctgcgtggacctgagcaagctggccgagggcgagcagatcctgagcggcggcgtgttcaacaagcagaagagccacgacgacatcgtgaccgagttcggcgacagcgcctgcttcaccctgagcctgctgggccacgtgtactgcaagaccgacagactggccaagggcagcgagtgctaccagaagagcctgagcctgaaccccttcctgtggagccccttcgagagcctgtgcgagatcggcgagaagcccgaccccgaccagaccttcaagttcaccagcctgcagaacttcagcaactgcctgcccaacagctgcaccacccaggtgcccaaccacagcctgagccacagacagcccgagaccgtgctgaccgagaccccccaggacaccatcgagctgaacagactgaacctggagagcagcaacagcaagtacagcctgaacaccgacagcagcgtgagctacatcgacagcgccgtgatcagccccgacaccgtgcccctgggcaccggcaccagcatcctgagcaagcaggtgcagaacaagcccaagaccggcagaagcctgctgggcggccccgccgccctgagccccctgacccccagcttcggcatcctgcccctggagacccccagccccggcgacggcagctacctgcagaactacaccaacaccccccccgtgatcgacgtgcccagcaccggcgcccccagcaagaagagcgtggccagaatcggccagaccggcaccaagagcgtgttcagccagagcggcaacagcagagaggtgacccccatcctggcccagacccagagcagcggcccccagaccagcaccaccccccaggtgctgagccccaccatcaccagcccccccaacgccctgcccagaagaagcagcagactgttcaccagcgacagcagcaccaccaaggagaacagcaagaagctgaagatgaagttcccccccaagatccccaacagaaagaccaagagcaagaccaacaagggcggcatcacccagcccaacatcaacgacagcctggagatcaccaagctggacagcagcatcatcagcgagggcaagatcagcaccatcaccccccagatccaggccttcaacctgcagaaggccgccgccgagggcctgatgagcctgctgagagagatgggcaagggctacctggccctgtgcagctacaactgcaaggaggccatcaacatcctgagccacctgcccagccaccactacaacaccggctgggtgctgtgccagatcggcagagcctacttcgagctgagcgagtacatgcaggccgagagaatcttcagcgaggtgagaagaatcgagaactacagagtggagggcatggagatctacagcaccaccctgtggcacctgcagaaggacgtggccctgagcgtgctgagcaaggacctgaccgacatggacaagaacagccccgaggcctggtgcgccgccggcaactgcttcagcctgcagagagagcacgacatcgccatcaagttcttccagagagccatccaggtggaccccaactacgcctacgcctacaccctgctgggccacgagttcgtgctgaccgaggagctggacaaggccctggcctgcttcagaaacgccatcagagtgaaccccagacactacaacgcctggtacggcctgggcatgatctactacaagcaggagaagttcagcctggccgagatgcacttccagaaggccctggacatcaacccccagagcagcgtgctgctgtgccacatcggcgtggtgcagcacgccctgaagaagagcgagaaggccctggacaccctgaacaaggccatcgtgatcgaccccaagaaccccctgtgcaagttccacagagccagcgtgctgttcgccaacgagaagtacaagagcgccctgcaggagctggaggagctgaagcagatcgtgcccaaggagagcctggtgtacttcctgatcggcaaggtgtacaagaagctgggccagacccacctggccctgatgaacttcagctgggccatggacctggaccccaagggcgccaacaaccagatcaaggaggccatcgacaagagatacctgcccgacgacgaggagcccatcacccaggaggagcagatcatgggcaccgacgagagccaggagagcagcatgaccgacgccgacgacacccagctgcacgccgccgagagcgacgagttctga

SEQ ID NO: 2610 - RNA, 1788 nt, synthetic construct
  misc_feature 1..1788: note = AAA51947 variant
  source 1..1788: mol_type = other RNA
atgagagtgctgctggccgccctgggcctgctgttcctgggcgccctgagagccttcccccaggacagacccttcgaggacacctgccacggcaaccccagccactactacgacaaggccgtgagaagatgctgctacagatgccccatgggcctgttccccacccagcagtgcccccagagacccaccgactgcagaaagcagtgcgagcccgactactacctggacgaggccgacagatgcaccgcctgcgtgacctgcagcagagacgacctggtggagaagaccccctgcgcctggaacagcagcagagtgtgcgagtgcagacccggcatgttctgcagcaccagcgccgtgaacagctgcgccagatgcttcttccacagcgtgtgccccgccggcatgatcgtgaagttccccggcaccgcccagaagaacaccgtgtgcgagcccgccagccccggcgtgagccccgcctgcgccagccccgagaactgcaaggagcccagcagcggcaccatcccccaggccaagcccacccccgtgagccccgccaccagcagcgccagcaccatgcccgtgagaggcggcaccagactggcccaggaggccgccagcaagctgaccagagcccccgacagccccagcagcgtgggcagacccagcagcgaccccggcctgagccccacccagccctgccccgagggcagcggcgactgcagaaagcagtgcgagcccgactactacctggacgaggccggcagatgcaccgcctgcgtgagctgcagcagagacgacctggtggagaagaccccctgcgcctggaacagcagcagaacctgcgagtgcagacccggcatgatctgcgccaccagcgccaccaacagctgcgccagatgcgtgccctaccccatctgcgccgccgagaccgtgaccaagccccaggacatggccgagaaggacaccaccttcgaggccccccccctgggcacccagcccgactgcaaccccacccccgagaacggcgaggcccccgccagcaccagccccacccagagcctgctggtggacagccaggccagcaagaccctgcccatccccaccagcgcccccgtggccctgagcagcaccggcaagcccgtgctggacgccggccccgtgctgttctgggtgatcctggtgctggtggtggtggtgggcagcagcgccttcctgctgtgccacagaagagcctgcagaaagagaatcagacagaagctgcacctgtgctaccccgtgcagaccagccagcccaagctggagctggtggacagcagacccagaagaagcagcacccagctgagaagcggcgccagcgtgaccgagcccgtggccgaggagagaggcctgatgagccagcccctgatggagacctgccacagcgtgggcgccgcctacctggagagcctgcccctgcaggacgccagccccgccggcggccccagcagccccagagacctgcccgagcccagagtgagcaccgagcacaccaacaacaagatcgagaagatctacatcatgaaggccgacaccgtgatcgtgggcaccgtgaaggccgagctgcccgagggcagaggcctggccggccccgccgagcccgagctggaggaggagctggaggccgaccacaccccccactaccccgagcaggagaccgagccccccctgggcagctgcagcgacgtgatgctgagcgtggaggaggagggcaaggaggaccccctgcccaccgccgccagcggcaagtga

SEQ ID NO: 2611 - RNA, 912 nt, synthetic construct
  misc_feature 1..912: note = EAW97060 variant
  source 1..912: mol_type = other RNA
atggccaccagcagatacgagcccgtggccgagatcggcgtgggcgcctacggcaccgtgtacaaggccagagacccccacagcggccacttcgtggccctgaagagcgtgagagtgcccaacggcggcggcggcggcggcggcctgcccatcagcaccgtgagagaggtggccctgctgagaagactggaggccttcgagcaccccaacgtggtgagactgatggacgtgtgcgccaccagcagaaccgacagagagatcaaggtgaccctggtgttcgagcacgtggaccaggacctgagaacctacctggacaaggcccccccccccggcctgcccgccgagaccatcaaggacctgatgagacagttcctgagaggcctggacttcctgcacgccaactgcatcgtgcacagagacctgaagcccgagaacatcctggtgaccagcggcggcaccgtgaagctggccgacttcggcctggccagaatctacagctaccagatggccctgacccccgtggtggtgaccctgtggtacagagcccccgaggtgctgctgcagagcacctacgccacccccgtggacatgtggagcgtgggctgcatcttcgccgagatgttcagaagaaagcccctgttctgcggcaacagcgaggccgaccagctgggcaagatcttcgacctgatcggcctgccccccgaggacgactggcccagagacgtgagcctgcccagaggcgccttcccccccagaggccccagacccgtgcagagcgtggtgcccgagatggaggagagcggcgcccagctgctgctggagatgctgaccttcaacccccacaagagaatcagcgccttcagagccctgcagcacagctacctgcacaaggacgagggcaaccccgagtga

SEQ ID NO: 2612 - RNA, 912 nt, synthetic construct; identical to SEQ ID NO: 2611
  misc_feature 1..912: note = AAA35673 variant
  source 1..912: mol_type = other RNA

SEQ ID NO: 2613 - RNA, 690 nt, synthetic construct
  misc_feature 1..690: note = AAB50213 variant
  source 1..690: mol_type = other RNA
atggacgtgtgcgccaccagcagaaccgacagagagatcaaggtgaccctggtgttcgagcacgtggaccaggacctgagaacctacctggacaaggcccccccccccggcctgcccgccgagaccatcaaggacctgatgagacagttcctgagaggcctggacttcctgcacgccaactgcatcgtgcacagagacctgaagcccgagaacatcctggtgaccagcggcggcaccgtgaagctggccgacttcggcctggccagaatctacagctaccagatggccctgacccccgtggtggtgaccctgtggtacagagcccccgaggtgctgctgcagagcacctacgccacccccgtggacatgtggagcgtgggctgcatcttcgccgagatgttcagaagaaagcccctgttctgcggcaacagcgaggccgaccagctgggcaagatcttcgacctgatcggcctgccccccgaggacgactggcccagagacgtgagcctgcccagaggcgccttcccccccagaggccccagacccgtgcagagcgtggtgcccgagatggaggagagcggcgcccagctgctgctggagatgctgaccttcaacccccacaagagaatcagcgccttcagagccctgcagcacagctacctgcacaaggacgagggcaaccccgagtga

SEQ ID NO: 2614 - RNA, 336 nt, synthetic construct
  misc_feature 1..336: note = AAH15669 variant
  source 1..336: mol_type = other RNA
atggccaccagcagatacgagcccgtggccgagatcggcgtgggcgcctacggcaccgtgtacaaggccagagacccccacagcggccacttcgtggccctgaagagcgtgagagtgcccaacggcggcggcggcggcggcggcctgcccatcagcaccgtgagagaggtggccctgctgagaagactggaggccttcgagcaccccaacgtggtgagactgatggacgtgtgcgccaccagcagaaccgacagagagatcaagagatgcttcgtggagagcctgagcagcgtggagaccctgaagcccaccagctgggccaagagcctgacctga

SEQ ID NO: 2615 - RNA, 429 nt, synthetic construct
  misc_feature 1..429: note = ACY78326 variant
  source 1..429: mol_type = other RNA
atggagcccgccgccggcagcagcatggagcccagcgccgactggctggccaccgccgccgccagaggcagagtggaggaggtgagagccctgctggaggccggcgccctgcccaacgcccccaacagctacggcagaagacccatccaggtgatgatgatgggcagcgccagagtggccgagctgctgctgctgcacggcgccgagcccaactgcgccgaccccgccaccctgaccagacccgtgcacgacgccgccagagagggcttcctggacaccctggtggtgctgcacagagccggcgccccctgcgccatgcccggcgccgtgtgcccctggacctggctgagaagctgggccatcgccatgagccacggcacctgcgccagactgagaggcgcccccgaggccgtgaccatgcccgcctga

SEQ ID NO: 2616 - RNA, 351 nt, synthetic construct
  misc_feature 1..351: note = EAW58598 variant
  source 1..351: mol_type = other RNA
atggagcccgccgccggcagcagcatggagcccagcgccgactggctggccaccgccgccgccagaggcagagtggaggaggtgagagccctgctggaggccggcgccctgcccaacgcccccaacagctacggcagaagacccatccaggtgggcagaggcagcgccgccggcgccggcgacggcggcagactgtggagaaccaagttcgccggcgagctggagagcggcagcgccagcatcctgagaaagaagggcagactgcccggcgagttcagcgagggcgtgtgcaaccacagacccccccccggcgacgccctgggcgcctgggaggccaaggaggaggagtga

SEQ ID NO: 2617 - RNA, 471 nt, synthetic construct
  misc_feature 1..471: note = AFN61598 variant
  source 1..471: mol_type = other RNA
atggagcccgccgccggcagcagcatggagcccagcgccgactggctggccaccgccgccgccagaggcagagtggaggaggtgagagccctgctggaggccggcgccctgcccaacgcccccaacagctacggcagaagacccatccaggtgatgatgatgggcagcgccagagtggccgagctgctgctgctgcacggcgccgagcccaactgcgccgaccccgccaccctgaccagacccgtgcacgacgccgccagagagggcttcctggacaccctggtggtgctgcacagagccggcgccagactggacgtgagagacgcctggggcagactgcccgtggacctggccgaggagctgggccacagagacgtggccagatacctgagagccgccgccggcggcaccagaggcagcaaccacgccagaatcgacgccgccgagggccccagcgacatccccgactga

SEQ ID NO: 2618 - RNA, 327 nt, synthetic construct
  misc_feature 1..327: note = CCQ43815 variant
  source 1..327: mol_type = other RNA
atggaggtgatgatgatgggcagcgccagagtggccgagctgctgctgctgcacggcgccgagcccaactgcgccgaccccgccaccctgaccagacccgtgcacgacgccgccagagagggcttcctggacaccctggtggtgctgcacagagccggcgccagactggacgtgagagacgcctggggcagactgcccgtggacctggccgaggagctgggccacagagacgtggccagatacctgagagccgccgccggcggcaccagaggcagcaaccacgccagaatcgacgccgccgagggccccagcgacatccccgactga

SEQ ID NO: 2619 - RNA, 399 nt, synthetic construct
  misc_feature 1..399: note = AAA82236 variant
  source 1..399: mol_type = other RNA
atggtgagaagattcctggtgaccctgagaatcagaagagcctgcggcccccccagagtgagagtgttcgtggtgcacatccccagactgaccggcgagtgggccgcccccggcgcccccgccgccgtggccctggtgctgatgctgctgagaagccagagactgggccagcagcccctgcccagaagacccggccacgacgacggccagagacccagcggcggcgccgccgccgcccccagaagaggcgcccagctgagaagacccagacacagccaccccaccagagccagaagatgccccggcggcctgcccggccacgccggcggcgccgcccccggcagaggcgccgccggcagagccagatgcctgggccccagcgccagaggccccggctga

SEQ ID NO: 2620 - RNA, 2109 nt, synthetic construct
  misc_feature 1..2109: note = CCDS12584.1 variant
  source 1..2109: mol_type = other RNA
atggagagccccagcgcccccccccacagatggtgcatcccctggcagagactgctgctgaccgccagcctgctgaccttctggaacccccccaccaccgccaagctgaccatcgagagcacccccttcaacgtggccgagggcaaggaggtgctgctgctggtgcacaacctgccccagcacctgttcggctacagctggtacaagggcgagagagtggacggcaacagacagatcatcggctacgtgatcggcacccagcaggccacccccggccccgcctacagcggcagagagatcatctaccccaacgccagcctgctgatccagaacatcatccagaacgacaccggcttctacaccctgcacgtgatcaagagcgacctggtgaacgaggaggccaccggccagttcagagtgtaccccgagctgcccaagcccagcatcagcagcaacaacagcaagcccgtggaggacaaggacgccgtggccttcacctgcgagcccgagacccaggacgccacctacctgtggtgggtgaacaaccagagcctgcccgtgagccccagactgcagctgagcaacggcaacagaaccctgaccctgttcaacgtgaccagaaacgacaccgccagctacaagtgcgagacccagaaccccgtgagcgccagaagaagcgacagcgtgatcctgaacgtgctgtacggccccgacgcccccaccatcagccccctgaacaccagctacagaagcggcgagaacctgaacctgagctgccacgccgccagcaacccccccgcccagtacagctggttcgtgaacggcaccttccagcagagcacccaggagctgttcatccccaacatcaccgtgaacaacagcggcagctacacctgccaggcccacaacagcgacaccggcctgaacagaaccaccgtgaccaccatcaccgtgtacgccgagccccccaagcccttcatcaccagcaacaacagcaaccccgtggaggacgaggacgccgtggccctgacctgcgagcccgagatccagaacaccacctacctgtggtgggtgaacaaccagagcctgcccgtgagccccagactgcagctgagcaacgacaacagaaccctgaccctgctgagcgtgaccagaaacgacgtgggcccctacgagtgcggcatccagaacgagctgagcgtggaccacagcgaccccgtgatcctgaacgtgctgtacggccccgacgaccccaccatcagccccagctacacctactacagacccggcgtgaacctgagcctgagctgccacgccgccagcaacccccccgcccagtacagctggctgatcgacggcaacatccagcagcacacccaggagctgttcatcagcaacatcaccgagaagaacagcggcctgtacacctgccaggccaacaacagcgccagcggccacagcagaaccaccgtgaagaccatcaccgtgagcgccgagctgcccaagcccagcatcagcagcaacaacagcaagcccgtggaggacaaggacgccgtggccttcacctgcgagcccgaggcccagaacaccacctacctgtggtgggtgaacggccagagcctgcccgtgagccccagactgcagctgagcaacggcaacagaaccctgaccctgttcaacgtgaccagaaacgacgccagagcctacgtgtgcggcatccagaacagcgtgagcgccaacagaagcgaccccgtgaccctggacgtgctgtacggccccgacacccccatcatcagcccccccgacagcagctacctgagcggcgccaacctgaacctgagctgccacagcgccagcaaccccagcccccagtacagctggagaatcaacggcatcccccagcagcacacccaggtgctgttcatcgccaagatcacccccaacaacaacggcacctacgcctgcttcgtgagcaacctggccaccggcagaaacaacagcatcgtgaagagcatcaccgtgagcgccagcggcaccagccccggcctgagcgccggcgccaccgtgggcatcatgatcggcgtgctggtgggcgtggccctgatctga

SEQ ID NO: 2621 - RNA, 1035 nt, synthetic construct
  misc_feature 1..1035: note = AAA51739 variant
  source 1..1035: mol_type = other RNA
atgggcccccccagcgcccccccctgcagactgcacgtgccctggaaggaggtgctgctgaccgccagcctgctgaccttctggaacccccccaccaccgccaagctgaccatcgagagcacccccttcaacgtggccgagggcaaggaggtgctgctgctggcccacaacctgccccagaacagaatcggctacagctggtacaagggcgagagagtggacggcaacagcctgatcgtgggctacgtgatcggcacccagcaggccacccccggccccgcctacagcggcagagagaccatctaccccaacgccagcctgctgatccagaacgtgacccagaacgacaccggcttctacaccctgcaggtgatcaagagcgacctggtgaacgaggaggccaccggccagttccacgtgtaccccgagctgcccaagcccagcatcagcagcaacaacagcaaccccgtggaggacaaggacgccgtggccttcacctgcgagcccgaggtgcagaacaccacctacctgtggtgggtgaacggccagagcctgcccgtgagccccagactgcagctgagcaacggcaacatgaccctgaccctgctgagcgtgaagagaaacgacgccggcagctacgagtgcgagatccagaaccccgccagcgccaacagaagcgaccccgtgaccctgaacgtgctgtacggccccgacggccccaccatcagccccagcaaggccaactacagacccggcgagaacctgaacctgagctgccacgccgccagcaacccccccgcccagtacagctggttcatcaacggcaccttccagcagagcacccaggagctgttcatccccaacatcaccgtgaacaacagcggcagctacatgtgccaggcccacaacagcgccaccggcctgaacagaaccaccgtgaccatgatcaccgtgagcggcagcgcccccgtgctgagcgccgtggccaccgtgggcatcaccatcggcgtgctggccagagtggccctgatctga

SEQ ID NO: 2622 - RNA, 1173 nt, synthetic construct
  misc_feature 1..1173: note = AAB04533 variant
  source 1..1173: mol_type = other RNA
atgggcgccaccaccatggaccagaagagcctgtgggccggcgtggtggtgctgctgctgctgcagggcggcagcgcctacaagctggtgtgctacttcaccaactggagccaggacagacaggagcccggcaagttcacccccgagaacatcgaccccttcctgtgcagccacctgatctacagcttcgccagcatcgagaacaacaaggtgatcatcaaggacaagagcgaggtgatgctgtaccagaccatcaacagcctgaagaccaagaaccccaagctgaagatcctgctgagcatcggcggctacctgttcggcagcaagggcttccaccccatggtggacagcagcaccagcagactggagttcatcaacagcatcatcctgttcctgagaaaccacaacttcgacggcctggacgtgagctggatctaccccgaccagaaggagaacacccacttcaccgtgctgatccacgagctggccgaggccttccagaaggacttcaccaagagcaccaaggagagactgctgctgaccgccggcgtgagcgccggcagacagatgatcgacaacagctaccaggtggagaagctggccaaggacctggacttcatcaacctgctgagcttcgacttccacggcagctgggagaagcccctgatcaccggccacaacagccccctgagcaagggctggcaggacagaggccccagcagctactacaacgtggagtacgccgtgggctactggatccacaagggcatgcccagcgagaaggtggtgatgggcatccccacctacggccacagcttcaccctggccagcgccgagaccaccgtgggcgcccccgccagcggccccggcgccgccggccccatcaccgagagcagcggcttcctggcctactacgagatctgccagttcctgaagggcgccaagatcaccagactgcaggaccagcaggtgccctacgccgtgaagggcaaccagtgggtgggctacgacgacgtgaagagcatggagaccaaggtgcagttcctgaagaacctgaacctgggcggcgccatgatctggagcatcgacatggacgacttcaccggcaagagctgcaaccagggcccctaccccctggtgcaggccgtgaagagaagcctgggcagcctgtga

SEQ ID NO: 2623 - RNA, 2832 nt, synthetic construct
  misc_feature 1..2832: note = AAD40367 variant
  source 1..2832: mol_type = other RNA
atgacccagagaagcatcgccggccccatctgcaacctgaagttcgtgaccctgctggtggccctgagcagcgagctgcccttcctgggcgccggcgtgcagctgcaggacaacggctacaacggcctgctgatcgccatcaacccccaggtgcccgagaaccagaacctgatcagcaacatcaaggagatgatcaccgaggccagcttctacctgttcaacgccaccaagagaagagtgttcttcagaaacatcaagatcctgatccccgccacctggaaggccaacaacaacagcaagatcaagcaggagagctacgagaaggccaacgtgatcgtgaccgactggtacggcgcccacggcgacgacccctacaccctgcagtacagaggctgcggcaaggagggcaagtacatccacttcacccccaacttcctgctgaacgacaacctgaccgccggctacggcagcagaggcagagtgttcgtgcacgagtgggcccacctgagatggggcgtgttcgacgagtacaacaacgacaagcccttctacatcaacggccagaaccagatcaaggtgaccagatgcagcagcgacatcaccggcatcttcgtgtgcgagaagggcccctgcccccaggagaactgcatcatcagcaagctgttcaaggagggctgcaccttcatctacaacagcacccagaacgccaccgccagcatcatgttcatgcagagcctgagcagcgtggtggagttctgcaacgccagcacccacaaccaggaggcccccaacctgcagaaccagatgtgcagcctgagaagcgcctgggacgtgatcaccgacagcgccgacttccaccacagcttccccatgaacggcaccgagctgccccccccccccaccttcagcctggtgcaggccggcgacaaggtggtgtgcctggtgctggacgtgagcagcaagatggccgaggccgacagactgctgcagctgcagcaggccgccgagttctacctgatgcagatcgtggagatccacaccttcgtgggcatcgccagcttcgacagcaagggcgagatcagagcccagctgcaccagatcaacagcaacgacgacagaaagctgctggtgagctacctgcccaccaccgtgagcgccaagaccgacatcagcatctgcagcggcctgaagaagggcttcgaggtggtggagaagctgaacggcaaggcctacggcagcgtgatgatcctggtgaccagcggcgacgacaagctgctgggcaactgcctgcccaccgtgctgagcagcggcagcaccatccacagcatcgccctgggcagcagcgccgcccccaacctggaggagctgagcagactgaccggcggcctgaagttcttcgtgcccgacatcagcaacagcaacagcatgatcgacgccttcagcagaatcagcagcggcaccggcgacatcttccagcagcacatccagctggagagcaccggcgagaacgtgaagccccaccaccagctgaagaacaccgtgaccgtggacaacaccgtgggcaacgacaccatgttcctggtgacctggcaggccagcggcccccccgagatcatcctgttcgaccccgacggcagaaagtactacaccaacaacttcatcaccaacctgaccttcagaaccgccagcctgtggatccccggcaccgccaagcccggccactggacctacaccctgaacaacacccaccacagcctgcaggccctgaaggtgaccgtgaccagcagagccagcaacagcgccgtgccccccgccaccgtggaggccttcgtggagagagacagcctgcacttcccccaccccgtgatgatctacgccaacgtgaagcagggcttctaccccatcctgaacgccaccgtgaccgccaccgtggagcccgagaccggcgaccccgtgaccctgagactgctggacgacggcgccggcgccgacgtgatcaagaacgacggcatctacagcagatacttcttcagcttcgccgccaacggcagatacagcctgaaggtgcacgtgaaccacagccccagcatcagcacccccgcccacagcatccccggcagccacgccatgtacgtgcccggctacaccgccaacggcaacatccagatgaacgcccccagaaagagcgtgggcagaaacgaggaggagagaaagtggggcttcagcagagtgagcagcggcggcagcttcagcgtgctgggcgtgcccgccggcccccaccccgacgtgttccccccctgcaagatcatcgacctggaggccgtgaaggtggaggaggagctgaccctgagctggaccgcccccggcgaggacttcgaccagggccaggccaccagctacgagatcagaatgagcaagagcctgcagaacatccaggacgacttcaacaacgccatcctggtgaacaccagcaagagaaacccccagcaggccggcatcagagagatcttcaccttcagcccccagatcagcaccaacggccccgagcaccagcccaacggcgagacccacgagagccacagaatctacgtggccatcagagccatggacagaaacagcctgcagagcgccgtgagcaacatcgcccaggcccccctgttcatcccccccaacagcgaccccgtgcccgccagagactacctgatcctgaagggcgtgctgaccgccatgggcctgatcggcatcatctgcctgatcatcgtggtgacccaccacaccctgagcagaaagaagagagccgacaagaaggagaacggcaccaagctgctgtga

SEQ ID NO: 2624 - RNA, 708 nt, synthetic construct
  misc_feature 1..708: note = AAF82135 variant
  source 1..708: mol_type = other RNA
atggaggaggagacccacaccgacgccaagatcagagccgagaacggcaccggcagcagccccagaggccccggctgcagcctgagacacttcgcctgcgagcagaacctgctgagcagacccgacggcagcgccagcttcctgcagggcgacaccagcgtgctggccggcgtgtacggccccgccgaggtgaaggtgagcaaggagatcttcaacaaggccaccctggaggtgatcctgagacccaagatcggcctgcccggcgtggccgagaagagcagagagagactgatcagaaacacctgcgaggccgtggtgctgggcaccctgcaccccagaaccagcatcaccgtggtgctgcaggtggtgagcgacgccggcagcctgctggcctgctgcctgaacgccgcctgcatggccctggtggacgccggcgtgcccatgagagccctgttctgcggcgtggcctgcgccctggacagcgacggcaccctggtgctggaccccaccagcaagcaggagaaggaggccagagccgtgctgaccttcgccctggacagcgtggagagaaagctgctgatgagcagcaccaagggcctgtacagcgacaccgagctgcagcagtgcctggccgccgcccaggccgccagccagcacgtgttcagattctacagagagagcctgcagagaagatacagcaagagctga

SEQ ID NO: 2625 - RNA, 1752 nt, synthetic construct
  misc_feature 1..1752: note = CCDS6312.1 variant
  source 1..1752: mol_type = other RNA
atggaggtggccgccaactgcagcctgagagtgaagagacccctgctggaccccagattcgagggctacaagctgagcctggagcccctgccctgctaccagctggagctggacgccgccgtggccgaggtgaagctgagagacgaccagtacaccctggagcacatgcacgccttcggcatgtacaactacctgcactgcgacagctggtaccaggacagcgtgtactacatcgacaccctgggcagaatcatgaacctgaccgtgatgctggacaccgccctgggcaagcccagagaggtgttcagactgcccaccgacctgaccgcctgcgacaacagactgtgcgccagcatccacttcagcagcagcacctgggtgaccctgagcgacggcaccggcagactgtacgtgatcggcaccggcgagagaggcaacagcgccagcgagaagtgggagatcatgttcaacgaggagctgggcgaccccttcatcatcatccacagcatcagcctgctgaacgccgaggagcacagcatcgccaccctgctgctgagaatcgagaaggaggagctggacatgaagggcagcggcttctacgtgagcctggagtgggtgaccatcagcaagaagaaccaggacaacaagaagtacgagatcatcaagagagacatcctgagaggcaagagcgtgccccactacgccgccatcgagcccgacggcaacggcctgatgatcgtgagctacaagagcctgaccttcgtgcaggccggccaggacctggaggagaacatggacgaggacatcagcgagaagatcaaggagcccctgtactactggcagcagaccgaggacgacctgaccgtgaccatcagactgcccgaggacagcaccaaggaggacatccagatccagttcctgcccgaccacatcaacatcgtgctgaaggaccaccagttcctggagggcaagctgtacagcagcatcgaccacgagagcagcacctggatcatcaaggagagcaacagcctggagatcagcctgatcaagaagaacgagggcctgacctggcccgagctggtgatcggcgacaagcagggcgagctgatcagagacagcgcccagtgcgccgccatcgccgagagactgatgcacctgaccagcgaggagctgaaccccaaccccgacaaggagaagcccccctgcaacgcccaggagctggaggagtgcgacatcttcttcgaggagagcagcagcctgtgcagattcgacggcaacaccctgaagaccacccacgtggtgaacctgggcagcaaccagtacctgttcagcgtgatcgtggaccccaaggagatgccctgcttctgcctgagacacgacgtggacgccctgctgtggcagccccacagcagcaagcaggacgacatgtgggagcacatcgccaccttcaacgccctgggctacgtgcaggccagcaagagagacaagaagttcttcgcctgcgcccccaactacagctacgccgccctgtgcgagtgcctgagaagagtgttcatctacagacagcccgcccccatgagcaccgtgctgtacaacagaaaggagggcagacaggtgggccaggtggccaagcagcaggtggccagcctggagaccaacgaccccatcctgggcttccaggccaccaacgagagactgttcgtgctgaccaccaagaacctgttcctgatcaaggtgaacaccgagaactga

SEQ ID NO: 2626 - RNA, 1563 nt, synthetic construct
  misc_feature 1..1563: note = CCDS41288.1 variant
  source 1..1563: mol_type = other RNA
atgagcagccccctggccagcctgagcaagaccagaaaggtgcccctgcccagcgagcccatgaaccccggcagaagaggcatcagaatctacggcgacgaggacgaggtggacatgctgagcgacggctgcggcagcgaggagaagatcagcgtgcccagctgctacggcggcatcggcgcccccgtgagcagacaggtgcccgccagccacgacagcgagctgatggccttcatgaccagaaagctgtgggacctggagcagcaggtgaaggcccagaccgacgagatcctgagcaaggaccagaagatcgccgccctggaggacctggtgcagaccctgagaccccaccccgccgaggccaccctgcagagacaggaggagctggagaccatgtgcgtgcagctgcagagacaggtgagagagatggagagattcctgagcgactacggcctgcagtgggtgggcgagcccatggaccaggaggacagcgagagcaagaccgtgagcgagcacggcgagagagactggatgaccgccaagaagttctggaagcccggcgacagcctggccccccccgaggtggacttcgacagactgctggccagcctgcaggacctgagcgagctggtggtggagggcgacacccaggtgacccccgtgcccggcggcgccagactgagaaccctggagcccatccccctgaagctgtacagaaacggcatcatgatgttcgacggccccttccagcccttctacgaccccagcacccagagatgcctgagagacatcctggacggcttcttccccagcgagctgcagagactgtaccccaacggcgtgcccttcaaggtgagcgacctgagaaaccaggtgtacctggaggacggcctggaccccttccccggcgagggcagagtggtgggcagacagctgatgcacaaggccctggacagagtggaggagcaccccggcagcagaatgaccgccgagaagttcctgaacagactgcccaagttcgtgatcagacagggcgaggtgatcgacatcagaggccccatcagagacaccctgcagaactgctgccccctgcccgccagaatccaggagatcgtggtggagacccccaccctggccgccgagagagagagaagccaggagagccccaacacccccgccccccccctgagcatgctgagaatcaagagcgagaacggcgagcaggccttcctgctgatgatgcagcccgacaacaccatcggcgacgtgagagccctgctggcccaggccagagtgatggacgccagcgccttcgagatcttcagcaccttcccccccaccctgtaccaggacgacaccctgaccctgcaggccgccggcctggtgcccaaggccgccctgctgctgagagccagaagagcccccaagagcagcctgaagttcagccccggcccctgccccggccccggccccggccccagccccggccccggccccggccccagccccggccccggccccggccccagcccctgccccggccccagccccagcccccagtga

SEQ ID NO: 2627 - RNA, 429 nt, synthetic construct
  misc_feature 1..429: note = AAA88022 variant
  source 1..429: mol_type = other RNA
atggccaccaagatcgacaaggaggcctgcagagccgcctacaacctggtgagagacgacggcagcgccgtgatctgggtgaccttcaagtacgacggcagcaccatcgtgcccggcgagcagggcgccgagtaccagcacttcatccagcagtgcaccgacgacgtgagactgttcgccttcgtgagattcaccaccggcgacgccatgagcaagagaagcaagttcgccctgatcacctggatcggcgagaacgtgagcggcctgcagagagccaagaccggcaccgacaagaccctggtgaaggaggtggtgcagaacttcgccaaggagttcgtgatcagcgacagaaaggagctggaggaggacttcatcaagagcgagctgaagaaggccggcggcgccaactacgacgcccagaccgagtga

SEQ ID NO: 2628 - RNA, 495 nt, synthetic construct
  misc_feature 1..495: note = CCQ43891 variant
  source 1..495: mol_type = other RNA
atggccaccagagacccctgggtgtggatggccagccccgacttccaggccagaaagggcaagagagtgcaccaggagaccctggcccccggcgagaccaaggacaagatggagctgctgggcctgagaggccccctggacctgctgggccccggcgccctgctggccaccctgggcaagatggcccccggcgagcacaaggcccagagagcccccaaggagagccccgacaagaccgccagatgggcccagagagacccccagggccccagagtgagcctggagtacctggagagaagagccaccatgggccaccaggccagcctggaccaccagggccccagagccagccagggcgcctggggcctgggcgagagaaccgtgtggaccgtgccccaggacagaagaggcagcctggccaccgaggccagaatggagctgcagggccccggcgtgccccaggccagcagagccagcagagagacccagtggtga

SEQ ID NO: 2629 - RNA, 1623 nt, synthetic construct
  misc_feature 1..1623: note = AAO18361 variant
  source 1..1623: mol_type = other RNA
atgggccccggcgagagagccggcggcggcggcgacgccggcaagggcaacgccgccggcggcggcggcggcggcagaagcgccaccaccgccggcagcagagccgtgagcgccctgtgcctgctgctgagcgtgggcagcgccgccgcctgcctgctgctgggcgtgcaggccgccgccctgcagggcagagtggccgccctggaggaggagagagagctgctgagaagagccggcccccccggcgccctggacgcctgggccgagccccacctggagagactgctgagagagaagctggacggcctggccaagatcagaaccgccagagaggcccccagcgagtgcgtgtgcccccccggcccccccggcagaagaggcaagcccggcagaagaggcgaccccggcccccccggccagagcggcagagacggctaccccggccccctgggcctggacggcaagcccggcctgcccggccccaagggcgagaagggcgcccccggcgacttcggccccagaggcgaccagggccaggacggcgccgccggcccccccggcccccccggcccccccggcgccagaggcccccccggcgacaccggcaaggacggccccagaggcgcccagggccccgccggccccaagggcgagcccggccaggacggcgagatgggccccaagggcccccccggccccaagggcgagcccggcgtgcccggcaagaagggcgacgacggcacccccagccagcccggcccccccggccccaagggcgagcccggcagcatgggccccagaggcgagaacggcgtggacggcgcccccggccccaagggcgagcccggccacagaggcaccgacggcgccgccggccccagaggcgcccccggcctgaagggcgagcagggcgacaccgtggtgatcgactacgacggcagaatcctggacgccctgaagggcccccccggcccccagggcccccccggcccccccggcatccccggcgccaagggcgagctgggcctgcccggcgcccccggcatcgacggcgagaagggccccaagggccagaagggcgaccccggcgagcccggccccgccggcctgaagggcgaggccggcgagatgggcctgagcggcctgcccggcgccgacggcctgaagggcgagaagggcgagagcgccagcgacagcctgcaggagagcctggcccagctgatcgtggagcccggcccccccggcccccccggcccccccggccccatgggcctgcagggcatccagggccccaagggcctggacggcgccaagggcgagaagggcgccagcggcgagagaggccccagcggcctgcccggccccgtgggcccccccggcctgatcggcctgcccggcaccaagggcgagaagggcagacccggcgagcccggcctggacggcttccccggccccagaggcgagaagggcgacagaagcgagagaggcgagaagggcgagagaggcgtgcccggcagaaagggcgtgaagggccagaagggcgagcccggcccccccggcctggaccagccctgccccgtgggccccgacggcctgcccgtgcccggctgctggcacaagtga

SEQ ID NO: 2630 - RNA, 492 nt, synthetic construct
  misc_feature 1..492: note = CAG25548 variant
  source 1..492: mol_type = other RNA
atgctggccagagccctgctgctgtgcgccgtgctggccctgagccacaccgccaacccctgctgcagccacccctgccagaacagaggcgtgtgcatgagcgtgggcttcgaccagtacaagtgcgactgcaccagaaccggcttctacggcgagaactgcagcacccccgagttcctgaccagaatcaagctgttcctgaagcccacccccaacaccgtgcactacatcctgacccacttcaagggcttctggaacgtggtgaacaacatccccttcctgagaaacgccatcatgagctacgtgctgaccagcagaagccacctgatcgacagcccccccacctacaacgccgactacggctacaagagctgggaggccttcagcaacctgagctactacaccagagccctgccccccgtgcccgacgactgccccacccccctgggcgtgaaggccctgcacgccagcgtgttccaggacagaagctga

SEQ ID NO: 2631 - RNA, 1632 nt, synthetic construct
  misc_feature 1..1632: note = AAC50809 variant
  source 1..1632: mol_type = other RNA
atgggcaccagcctgagccccaacgacccctggcccctgaaccccctgagcatccagcagaccaccctgctgctgctgctgagcgtgctggccaccgtgcacgtgggccagagactgctgagacagagaagaagacagctgagaagcgccccccccggccccttcgcctggcccctgatcggcaacgccgccgccgtgggccaggccgcccacctgagcttcgccagactggccagaagatacggcgacgtgttccagatcagactgggcagctgccccatcgtggtgctgaacggcgagagagccatccaccaggccctggtgcagcagggcagcgccttcgccgacagacccgccttcgccagcttcagagtggtgagcggcggcagaagcatggccttcggccactacagcgagcactggaaggtgcagagaagagccgcccacagcatgatgagaaacttcttcaccagacagcccagaagcagacaggtgctggagggccacgtgctgagcgaggccagagagctggtggccctgctggtgagaggcagcgccgacggcgccttcctggaccccagacccctgaccgtggtggccgtggccaacgtgatgagcgccgtgtgcttcggctgcagatacagccacgacgaccccgagttcagagagctgctgagccacaacgaggagttcggcagaaccgtgggcgccggcagcctggtggacgtgatgccctggctgcagtacttccccaaccccgtgagaaccgtgttcagagagttcgagcagctgaacagaaacttcagcaacttcatcctggacaagttcctgagacactgcgagagcctgagacccggcgccgcccccagagacatgatggacgccttcatcctgagcgccgagaagaaggccgccggcgacagccacggcggcggcgccagactggacctggagaacgtgcccgccaccatcaccgacatcttcggcgccagccaggacaccctgagcaccgccctgcagtggctgctgctgctgttcaccagataccccgacgtgcagaccagagtgcaggccgagctggaccaggtggtgggcagagacagactgccctgcatgggcgaccagcccaacctgccctacgtgctggccttcctgtacgaggccatgagattcagcagcttcgtgcccgtgaccatcccccacgccaccaccgccaacaccagcgtgctgggctaccacatccccaaggacaccgtggtgttcgtgaaccagtggagcgtgaaccacgaccccctgaagtggcccaaccccgagaacttcgaccccgccagattcctggacaaggacggcctgatcaacaaggacctgaccagcagagtgatgatcttcagcgtgggcaagagaagatgcatcggcgaggagctgagcaagatgcagctgttcctgttcatcagcatcctggcccaccagtgcgacttcagagccaaccccaacgagcccgccaagatgaacttcagctacggcctgaccatcaagcccaagagcttcaaggtgaacgtgaccctgagagagagcatggagctgctggacagcgccgtgcagaacctgcaggccaaggagacctgccagtga

SEQ ID NO: 2632 - RNA, 333 nt, synthetic construct
  misc_feature 1..333: note = NM_001129828 variant
  source 1..333: mol_type = other RNA
atgtggatgggcctgatccagctggtggagggcgtgaagagaaaggaccagggcttcctggagaaggagttctaccacaagaccaacatcaagatgagatgcgagttcctggcctgctggcccgccttcaccgtgctgggcgaggcctggagagaccaggtggactggagcagactgctgagagacgccggcctggtgaagatgagcagaaagcccagagccagcagccccctgagcaacaaccacccccccacccccaagagattccccagacagcccggcagagagaagggccccatcaaggaggtgcccggcaccaagggcagcccctga

SEQ ID NO: 2633 - RNA, 384 nt, synthetic construct
  misc_feature 1..384: note = NM_001129826 variant
  source 1..384: mol_type = other RNA
atgtggatgggcctgatccagctggtggagggcgtgaagagaaaggaccagggcttcctggagaaggagttctaccacaagaccaacatcaagatgagatgcgagttcctggcctgctggcccgccttcaccgtgctgggcgaggcctggagagaccaggtggactggagcagactgctgagagacgccggcctggtgaagatgagcagaaagcccagagccagcagccccctgagcaacaaccacccccccacccccaagagaagaggcagcggcagacaccccctgaaccccggccccgaggccctgagcaagttccccagacagcccggcagagagaagggccccatcaaggaggtgcccggcaccaagggcagcccctga

SEQ ID NO: 2634 - RNA, 570 nt, synthetic construct
  misc_feature 1..570: note = AAI40914 variant
  source 1..570: mol_type = other RNA
atgaccgacaagaccgagaaggtggccgtggaccccgagaccgtgttcaagagacccagagagtgcgacagccccagctaccagaagagacagagaatggccctgctggccagaaagcagggcgccggcgacagcctgatcgccggcagcgccatgagcaaggccaagaagctgatgaccggccacgccatcccccccagccagctggacagccagatcgacgacttcaccggcttcagcaaggacagaatgatgcagaagcccggcagcaacgcccccgtgggcggcaacgtgaccagcagcttcagcggcgacgacctggagtgcagagagaccgccagcagccccaagagccagagagagatcaacgccgacatcaagagaaagctggtgaaggagctgagatgcgtgggccagaagtacgagaagatcttcgagatgctggagggcgtgcagggccccaccgccgtgagaaagagattcttcgagagcatcatcaaggaggccgccagatgcatgagaagagacttcgtgaagcacctgaagaagaagctgaagagaatgatctga

SEQ ID NO: 2635 - RNA, 795 nt, synthetic construct
  misc_feature 1..795: note = AAH20662 variant
  source 1..795: mol_type = other RNA
atgctgagactgctgagactggccctggccttctacggcagaaccgccgaccccgccgagagacagggcccccagcagcagggcctgccccagggcgacacccagctgaccaccgtgcagggcgtggtgaccagcttctgcggcgactacggcatgatcgacgagagcatctacttcagcagcgacgtggtgaccggcaacgtgcccctgaaggtgggccagaaggtgaacgtggtggtggaggaggacaagccccactacggcctgagagccatcaaggtggacgtggtgcccagacacctgtacggcgccggccccagcgacagcggcaccagagtgctgatcggctgcgtgaccagcatcaacgaggacaacatctacatcagcaacagcatctacttcagcatcgccatcgtgagcgaggacttcgtgccctacaagggcgacctgctggaggtggagtacagcaccgagcccggcatcagcaacatcaaggccaccagcgtgaagcccatcagatgcatccacaccgaggaggtgtgcatcaccagcgtgcacggcagaaacggcgtgatcgactacaccatcttcttcaccctggacagcgtgaagctgcccgacggctacgtgccccaggtggacgacatcgtgaacgtggtgatggtggagagcatccagttctgcttcatctggagagccatcagcatcacccccgtgcacaagagcagcagcggcttccaggacgacggcggcctgggcagacccaagagagagagaagaagccagagcatctga

SEQ ID NO: 2636 - RNA, 2844 nt, synthetic construct
  misc_feature 1..2844: note = CCDS735.1 variant
  source 1..2844: mol_type = other RNA
atgagcctgcccagcagacagaccgccatcatcgtgaacccccccccccccgagtacatcaacaccaagaagaacggcagactgaccaaccagctgcagtacctgcagaaggtggtgctgaaggacctgtggaagcacagcttcagctggcccttccagagacccgtggacgccgtgaagctgcagctgcccgactactacaccatcatcaagaaccccatggacctgaacaccatcaagaagagactggagaacaagtactacgccaaggccagcgagtgcatcgaggacttcaacaccatgttcagcaactgctacctgtacaacaagcccggcgacgacatcgtgctgatggcccaggccctggagaagctgttcatgcagaagctgagccagatgccccaggaggagcaggtggtgggcgtgaaggagagaatcaagaagggcacccagcagaacatcgccgtgagcagcgccaaggagaagagcagccccagcgccaccgagaaggtgttcaagcagcaggagatccccagcgtgttccccaagaccagcatcagccccctgaacgtggtgcagggcgccagcgtgaacagcagcagccagaccgccgcccaggtgaccaagggcgtgaagagaaaggccgacaccaccacccccgccaccagcgccgtgaaggccagcagcgagttcagccccaccttcaccgagaagagcgtggccctgccccccatcaaggagaacatgcccaagaacgtgctgcccgacagccagcagcagtacaacgtggtgaagaccgtgaaggtgaccgagcagctgagacactgcagcgagatcctgaaggagatgctggccaagaagcacttcagctacgcctggcccttctacaaccccgtggacgtgaacgccctgggcctgcacaactactacgacgtggtgaagaaccccatggacctgggcaccatcaaggagaagatggacaaccaggagtacaaggacgcctacaagttcgccgccgacgtgagactgatgttcatgaactgctacaagtacaacccccccgaccacgaggtggtgaccatggccagaatgctgcaggacgtgttcgagacccacttcagcaagatccccatcgagcccgtggagagcatgcccctgtgctacatcaagaccgacatcaccgagaccaccggcagagagaacaccaacgaggccagcagcgagggcaacagcagcgacgacagcgaggacgagagagtgaagagactggccaagctgcaggagcagctgaaggccgtgcaccagcagctgcaggtgctgagccaggtgcccttcagaaagctgaacaagaagaaggagaagagcaagaaggagaagaagaaggagaaggtgaacaacagcaacgagaaccccagaaagatgtgcgagcagatgagactgaaggagaagagcaagagaaaccagcccaagaagagaaagcagcagttcatcggcctgaagagcgaggacgaggacaacgccaagcccatgaactacgacgagaagagacagctgagcctgaacatcaacaagctgcccggcgacaagctgggcagagtggtgcacatcatccagagcagagagcccagcctgagcaacagcaaccccgacgagatcgagatcgacttcgagaccctgaaggccagcaccctgagagagctggagaagtacgtgagcgcctgcctgagaaagagacccctgaagccccccgccaagaagatcatgatgagcaaggaggagctgcacagccagaagaagcaggagctggagaagagactgctggacgtgaacaaccagctgaacagcagaaagagacagaccaagagcgacaagacccagcccagcaaggccgtggagaacgtgagcagactgagcgagagcagcagcagcagcagcagcagcagcgagagcgagagcagcagcagcgacctgagcagcagcgacagcagcgacagcgagagcgagatgttccccaagttcaccgaggtgaagcccaacgacagccccagcaaggagaacgtgaagaagatgaagaacgagtgcatcccccccgagggcagaaccggcgtgacccagatcggctactgcgtgcaggacaccaccagcgccaacaccaccctggtgcaccagaccacccccagccacgtgatgccccccaaccaccaccagctggccttcaactaccaggagctggagcacctgcagaccgtgaagaacatcagccccctgcagatcctgccccccagcggcgacagcgagcagctgagcaacggcatcaccgtgatgcaccccagcggcgacagcgacaccaccatgctggagagcgagtgccaggcccccgtgcagaaggacatcaagatcaagaacgccgacagctggaagagcctgggcaagcccgtgaagcccagcggcgtgatgaagagcagcgacgagctgttcaaccagttcagaaaggccgccatcgagaaggaggtgaaggccagaacccaggagctgatcagaaagcacctggagcagaacaccaaggagctgaaggccagccaggagaaccagagagacctgggcaacggcctgaccgtggagagcttcagcaacaagatccagaacaagtgcagcggcgaggagcagaaggagcaccagcagagcagcgaggcccaggacaagagcaagctgtggctgctgaaggacagagacctggccagacagaaggagcaggagagaagaagaagagaggccatggtgggcaccatcgacatgaccctgcagagcgacatcatgaccatgttcgagaacaacttcgactga

SEQ ID NO: 2637 - RNA, 543 nt, synthetic construct
  misc_feature 1..543: note = CCDS35455.1 variant
  source 1..543: mol_type = other RNA
atgcaggccgagggcagaggcaccggcggcagcaccggcgacgccgacggccccggcggccccggcatccccgacggccccggcggcaacgccggcggccccggcgaggccggcgccaccggcggcagaggccccagaggcgccggcgccgccagagccagcggccccagaggcggcgcccccagaggcccccacggcggcgccgccagcgcccaggacggcagatgcccctgcggcgccagaagacccgacagcagactgctggagctgcacatcaccatgcccttcagcagccccatggaggccgagctggtgagaagaatcctgagcagagacgccgcccccctgcccagacccggcgccgtgctgaaggacttcaccgtgagcggcaacctgctgttcatcagactgaccgccgccgaccacagacagctgcagctgagcatcagcagctgcctgcagcagctgagcctgctgatgtggatcacccagtgcttcctgcccgtgttcctggcccaggcccccagcggccagagaagatga

SEQ ID NO: 2638 - RNA, 633 nt, synthetic construct
  misc_feature 1..633: note = CAA10196 variant
  source 1..633: mol_type = other RNA
atgcaggccgagggccagggcaccggcggcagcaccggcgacgccgacggccccggcggccccggcatccccgacggccccggcggcaacgccggcggccccggcgaggccggcgccaccggcggcagaggccccagaggcgccggcgccgccagagccagcggccccagaggcggcgcccccagaggcccccacggcggcgccgccagcgcccaggacggcagatgcccctgcggcgccagaagacccgacagcagactgctgcagctgcacatcaccatgcccttcagcagccccatggaggccgagctggtgagaagaatcctgagcagagacgccgcccccctgcccagacccggcgccgtgctgaaggacttcaccgtgagcggcaacctgctgttcatgagcgtgagagaccaggacagagagggcgccggcagaatgagagtggtgggctggggcctgggcagcgccagccccgagggccagaaggccagagacctgagaacccccaagcacaaggtgagcgagcagagacccggcacccccggcccccccccccccgagggcgcccagggcgacggctgcagaggcgtggccttcaacgtgatgttcagcgccccccacatctga

SEQ ID NO: 2639 - RNA, 1992 nt, synthetic construct
  misc_feature 1..1992: note = CCDS13459.1 variant
  source 1..1992: mol_type = other RNA
atggccgccaccgagatcagcgtgctgagcgagcagttcaccaagatcaaggagctggagctgatgcccgagaagggcctgaaggaggaggagaaggacggcgtgtgcagagagaaggaccacagaagccccagcgagctggaggccgagagaaccagcggcgccttccaggacagcgtgctggaggaggaggtggagctggtgctggcccccagcgaggagagcgagaagtacatcctgaccctgcagaccgtgcacttcaccagcgaggccgtggagctgcaggacatgagcctgctgagcatccagcagcaggagggcgtgcaggtggtggtgcagcagcccggccccggcctgctgtggctggaggagggccccagacagagcctgcagcagtgcgtggccatcagcatccagcaggagctgtacagcccccaggagatggaggtgctgcagttccacgccctggaggagaacgtgatggtggccagcgaggacagcaagctggccgtgagcctggccgagaccaccggcctgatcaagctggaggaggagcaggagaagaaccagctgctggccgagagaaccaaggagcagctgttcttcgtggagaccatgagcggcgacgagagaagcgacgagatcgtgctgaccgtgagcaacagcaacgtggaggagcaggaggaccagcccaccgccggccaggccgacgccgagaaggccaagagcaccaagaaccagagaaagaccaagggcgccaagggcaccttccactgcgacgtgtgcatgttcaccagcagcagaatgagcagcttcaacagacacatgaagacccacaccagcgagaagccccacctgtgccacctgtgcctgaagaccttcagaaccgtgaccctgctgagaaaccacgtgaacacccacaccggcaccagaccctacaagtgcaacgactgcaacatggccttcgtgaccagcggcgagctggtgagacacagaagatacaagcacacccacgagaagcccttcaagtgcagcatgtgcaagtacgccagcgtggaggccagcaagctgaagagacacgtgagaagccacaccggcgagagacccttccagtgctgccagtgcagctacgccagcagagacacctacaagctgaagagacacatgagaacccacagcggcgagaagccctacgagtgccacatctgccacaccagattcacccagagcggcaccatgaagatccacatcctgcagaagcacggcgagaacgtgcccaagtaccagtgcccccactgcgccaccatcatcgccagaaagagcgacctgagagtgcacatgagaaacctgcacgcctacagcgccgccgagctgaagtgcagatactgcagcgccgtgttccacgagagatacgccctgatccagcaccagaagacccacaagaacgagaagagattcaagtgcaagcactgcagctacgcctgcaagcaggagagacacatgaccgcccacatcagaacccacaccggcgagaagcccttcacctgcctgagctgcaacaagtgcttcagacagaagcagctgctgaacgcccacttcagaaagtaccacgacgccaacttcatccccaccgtgtacaagtgcagcaagtgcggcaagggcttcagcagatggatcaacctgcacagacacagcgagaagtgcggcagcggcgaggccaagagcgccgccagcggcaagggcagaagaaccagaaagagaaagcagaccatcctgaaggaggccaccaagggccagaaggaggccgccaagggctggaaggaggccgccaacggcgacgaggccgccgccgaggaggccagcaccaccaagggcgagcagttccccggcgagatgttccccgtggcctgcagagagaccaccgccagagtgaaggaggaggtggacgagggcgtgacctgcgagatgctgctgaacaccatggacaagtga

SEQ ID NO: 2640 - RNA, 2148 nt, synthetic construct
  misc_feature 1..2148: note = CCDS11368.1 variant
  source 1..2148: mol_type = other RNA
atgagccaggtgatgagcagccccctgctggccggcggccacgccgtgagcctggccccctgcgacgagcccagaagaaccctgcaccccgcccccagccccagcctgcccccccagtgcagctactacaccaccgagggctggggcgcccaggccctgatggcccccgtgccctgcatgggcccccccggcagactgcagcaggccccccaggtggaggccaaggccacctgcttcctgcccagccccggcgagaaggccctgggcacccccgaggacctggacagctacatcgacttcagcctggagagcctgaaccagatgatcctggagctggaccccaccttccagctgctgccccccggcaccggcggcagccaggccgagctggcccagagcaccatgagcatgagaaagaaggaggagagcgaggccctggacatcaagtacatcgaggtgaccagcgccagaagcagatgccacgacggcccccagcactgcagcagccccagcgtgaccccccccttcggcagcctgagaagcggcggcctgctgctgagcagagacgtgcccagagagaccagaagcagcagcgagagcctgatcttcagcggcaaccagggcagaggccaccagagacccctgccccccagcgagggcctgagccccagaccccccaacagccccagcatcagcatcccctgcatgggcagcaaggccagcagcccccacggcctgggcagccccctggtggccagccccagactggagaagagactgggcggcctggccccccagagaggcagcagaatcagcgtgctgagcgccagccccgtgagcgacgtgagctacatgttcggcagcagccagagcctgctgcacagcagcaacagcagccaccagagcagcagcagaagcctggagagccccgccaacagcagcagcagcctgcacagcctgggcagcgtgagcctgtgcaccagacccagcgacttccaggcccccagaaaccccaccctgaccatgggccagcccagaaccccccacagcccccccctggccaaggagcacgccagcagctgcccccccagcatcaccaacagcatggtggacatccccatcgtgctgatcaacggctgccccgagcccggcagcagccccccccagagaacccccggccaccagaacagcgtgcagcccggcgccgccagccccagcaacccctgccccgccaccagaagcaacagccagaccctgagcgacgcccccttcaccacctgccccgagggccccgccagagacatgcagcccaccatgaagttcgtgatggacaccagcaagtactggttcaagcccaacatcaccagagagcaggccatcgagctgctgagaaaggaggagcccggcgccttcgtgatcagagacagcagcagctacagaggcagcttcggcctggccctgaaggtgcaggaggtgcccgccagcgcccagagcagacccggcgaggacagcaacgacctgatcagacacttcctgatcgagagcagcgccaagggcgtgcacctgaagggcgccgacgaggagccctacttcggcagcctgagcgccttcgtgtgccagcacagcatcatggccctggccctgccctgcaagctgaccatcccccagagagagctgggcggcgccgacggcgccagcgacagcaccgacagccccgccagctgccagaagaagagcgccggctgccacaccctgtacctgagcagcgtgagcgtggagaccctgaccggcgccctggccgtgcagaaggccatcagcaccaccttcgagagagacatcctgcccacccccaccgtggtgcacttcaaggtgaccgagcagggcatcaccctgaccgacgtgcagagaaaggtgttcttcagaagacactaccccctgaccaccctgagattctgcggcatggaccccgagcagagaaagtggcagaagtactgcaagcccagctggatcttcggcttcgtggccaagagccagaccgagccccaggagaacgtgtgccacctgttcgccgagtacgacatggtgcagcccgccagccaggtgatcggcctggtgaccgccctgctgcaggacgccgagagaatgtga

SEQ ID NO: 2641 - RNA, 1302 nt, synthetic construct
  misc_feature 1..1302: note = AAH06510 variant
  source 1..1302: mol_type = other RNA
atggccctgagagtgaccagaaacagcaagatcaacgccgagaacaaggccaagatcaacatggccggcgccaagagagtgcccaccgcccccgccgccaccagcaagcccggcctgagacccagaaccgccctgggcgacatcggcaacaaggtgagcgagcagctgcaggccaagatgcccatgaagaaggaggccaagcccagcgccaccggcaaggtgatcgacaagaagctgcccaagcccctggagaaggtgcccatgctggtgcccgtgcccgtgagcgagcccgtgcccgagcccgagcccgagcccgagcccgagcccgtgaaggaggagaagctgagccccgagcccatcctggtggacaccgccagccccagccccatggagaccagcggctgcgcccccgccgaggaggacctgtgccaggccttcagcgacgtgatcctggccgtgaacgacgtggacgccgaggacggcgccgaccccaacctgtgcagcgagtacgtgaaggacatctacgcctacctgagacagctggaggaggagcaggccgtgagacccaagtacctgctgggcagagaggtgaccggcaacatgagagccatcctgatcgactggctggtgcaggtgcagatgaagttcagactgctgcaggagaccatgtacatgaccgtgagcatcatcgacagattcatgcagaacaactgcgtgcccaagaagatgctgcagctggtgggcgtgaccgccatgttcatcgccagcaagtacgaggagatgtacccccccgagatcggcgacttcgccttcgtgaccgacaacacctacaccaagcaccagatcagacagatggagatgaagatcctgagagccctgaacttcggcctgggcagacccctgcccctgcacttcctgagaagagccagcaagatcggcgaggtggacgtggagcagcacaccctggccaagtacctgatggagctgaccatgctggactacgacatggtgcacttcccccccagccagatcgccgccggcgccttctgcctggccctgaagatcctggacaacggcgagtggacccccaccctgcagcactacctgagctacaccgaggagagcctgctgcccgtgatgcagcacctggccaagaacgtggtgatggtgaaccagggcctgaccaagcacatgaccgtgaagaacaagtacgccaccagcaagcacgccaagatcagcaccctgccccagctgaacagcgccctggtgcaggacctggccaaggccgtggccaaggtgtga

SEQ ID NO: 2642 - RNA, 888 nt, synthetic construct
  misc_feature 1..888: note = AAA58392 variant
  source 1..888: mol_type = other RNA
atggagcaccagctgctgtgctgcgaggtggagaccatcagaagagcctaccccgacgccaacctgctgaacgacagagtgctgagagccatgctgaaggccgaggagacctgcgcccccagcgtgagctacttcaagtgcgtgcagaaggaggtgctgcccagcatgagaaagatcgtggccacctggatgctggaggtgtgcgaggagcagaagtgcgaggaggaggtgttccccctggccatgaactacctggacagattcctgagcctggagcccgtgaagaagagcagactgcagctgctgggcgccacctgcatgttcgtggccagcaagatgaaggagaccatccccctgaccgccgagaagctgtgcatctacaccgacaacagcatcagacccgaggagctgctgcagatggagctgctgctggtgaacaagctgaagtggaacctggccgccatgaccccccacgacttcatcgagcacttcctgagcaagatgcccgaggccgaggagaacaagcagatcatcagaaagcacgcccagaccttcgtggccctgtgcgccaccgacgtgaagttcatcagcaacccccccagcatggtggccgccggcagcgtggtggccgccgtgcagggcctgaacctgagaagccccaacaacttcctgagctactacagactgaccagattcctgagcagagtgatcaagtgcgaccccgactgcctgagagcctgccaggagcagatcgaggccctgctggagagcagcctgagacaggcccagcagaacatggaccccaaggccgccgaggaggaggaggaggaggaggaggaggtggacctggcctgcacccccaccgacgtgagagacgtggacatctga

SEQ ID NO: 2643 - RNA, 651 nt, synthetic construct
  misc_feature 1..651: note = AAA36601 variant
  source 1..651: mol_type = other RNA
atgctgagactgagcgagagaaacatgaaggtgctgctggccgccgccctgatcgccggcagcgtgttcttcctgctgctgcccggccccagcgccgccgacgagaagaagaagggccccaaggtgaccgtgaaggtgtacttcgacctgagaatcggcgacgaggacgtgggcagagtgatcttcggcctgttcggcaagaccgtgcccaagaccgtggacaacttcgtggccctggccaccggcgagaagggcttcggctacaagaacagcaagttccacagagtgatcaaggacttcatgatccagggcggcgacttcaccagaggcgacggcaccggcggcaagagcatctacggcgagagattccccgacgagaacttcaagctgaagcactacggccccggctgggtgagcatggccaacgccggcaaggacaccaacggcagccagttcttcatcaccaccgtgaagaccgcctggctggacggcaagcacgtggtgttcggcaaggtgctggagggcatggaggtggtgagaaaggtggagagcaccaagaccgacagcagagacaagcccctgaaggacgtgatcatcgccgactgcggcaagatcgaggtggagaagcccttcgccatcgccaaggagtga

SEQ ID NO: 2644 - RNA, 1044 nt, synthetic construct
  misc_feature 1..1044: note = AAD10634 variant
  source 1..1044: mol_type = other RNA
atgcccagaggccagaagagcaagctgagagccagagagaagagaagaaaggccagagaggagacccagggcctgaaggtggcccacgccaccgccgccgagaaggaggagtgccccagcagcagccccgtgctgggcgacacccccaccagcagccccgccgccggcatcccccagaagccccagggcgccccccccaccaccaccgccgccgccgccgtgagctgcaccgagagcgacgagggcgccaagtgccagggcgaggagaacgccagcttcagccaggccaccaccagcaccgagagcagcgtgaaggaccccgtggcctgggaggccggcatgctgatgcacttcatcctgagaaagtacaagatgagagagcccatcatgaaggccgacatgctgaaggtggtggacgagaagtacaaggaccacttcaccgagatcctgaacggcgccagcagaagactggagctggtgttcggcctggacctgaaggaggacaaccccagcggccacacctacaccctggtgagcaagctgaacctgaccaacgacggcaacctgagcaacgactgggacttccccagaaacggcctgctgatgcccctgctgggcgtgatcttcctgaagggcaacagcgccaccgaggaggagatctggaagttcatgaacgtgctgggcgcctacgacggcgaggagcacctgatctacggcgagcccagaaagttcatcacccaggacctggtgcaggagaagtacctgaagtacgagcaggtgcccaacagcgacccccccagataccagttcctgtggggccccagagcctacgccgagaccaccaagatgaaggtgctggagttcctggccaagatgaacggcgccacccccagagacttccccagccactacgaggaggccctgagagacgaggaggagagagcccaggtgagaagcagcgtgagagccagaagaagaaccaccgccaccaccttcagagccagaagcagagcccccttcagcagaagcagccaccccatgtga

SEQ ID NO: 2645 - RNA, 2436 nt, synthetic construct
  misc_feature 1..2436: note = BAF91373 variant
  source 1..2436: mol_type = other RNA
atggagagccagggcgtgccccccggcccctacagagccaccaagctgtggaacgaggtgaccaccagcttcagagccggcatgcccctgagaaagcacagacagcacttcaagaagtacggcaactgcttcaccgccggcgaggccgtggactggctgtacgacctgctgagaaacaacagcaacttcggccccgaggtgaccagacagcagaccatccagctgctgagaaagttcctgaagaaccacgtgatcgaggacatcaagggcagatggggcagcgagaacgtggacgacaacaaccagctgttcagattccccgccaccagccccctgaagaccctgcccagaagataccccgagctgagaaagaacaacatcgagaacttcagcaaggacaaggacagcatcttcaagctgagaaacctgagcagaagaacccccaagagacacggcctgcacctgagccaggagaacggcgagaagatcaagcacgagatcatcaacgaggaccaggagaacgccatcgacaacagagagctgagccaggaggacgtggaggaggtgtggagatacgtgatcctgatctacctgcagaccatcctgggcgtgcccagcctggaggaggtgatcaaccccaagcaggtgatcccccagtacatcatgtacaacatggccaacaccagcaagagaggcgtggtgatcctgcagaacaagagcgacgacctgccccactgggtgctgagcgccatgaagtgcctggccaactggcccagaagcaacgacatgaacaaccccacctacgtgggcttcgagagagacgtgttcagaaccatcgccgactacttcctggacctgcccgagcccctgctgaccttcgagtactacgagctgttcgtgaacatcctggtggtgtgcggctacatcaccgtgagcgacagaagcagcggcatccacaagatccaggacgacccccagagcagcaagttcctgcacctgaacaacctgaacagcttcaagagcaccgagtgcctgctgctgagcctgctgcacagagagaagaacaaggaggagagcgacagcaccgagagactgcagatcagcaaccccggcttccaggagagatgcgccaagaagatgcagctggtgaacctgagaaacagaagagtgagcgccaacgacatcatgggcggcagctgccacaacctgatcggcctgagcaacatgcacgacctgagcagcaacagcaagcccagatgctgcagcctggagggcatcgtggacgtgcccggcaacagcagcaaggaggccagcagcgtgttccaccagagcttccccaacatcgagggccagaacaacaagctgttcctggagagcaagcccaagcaggagttcctgctgaacctgcacagcgaggagaacatccagaagcccttcagcgccggcttcaagagaaccagcaccctgaccgtgcaggaccaggaggagctgtgcaacggcaagtgcaagagcaagcagctgtgcagaagccagagcctgctgctgagaagcagcaccagaagaaacagctacatcaacacccccgtggccgagatcatcatgaagcccaacgtgggccagggcagcaccagcgtgcagaccgccatggagagcgagctgggcgagagcagcgccaccatcaacaagagactgtgcaagagcaccatcgagctgagcgagaacagcctgctgcccgccagcagcatgctgaccggcacccagagcctgctgcagccccacctggagagagtggccatcgacgccctgcagctgtgctgcctgctgctgcccccccccaacagaagaaagctgcagctgctgatgagaatgatcagcagaatgagccagaacgtggacatgcccaagctgcacgacgccatgggcaccagaagcctgatgatccacaccttcagcagatgcgtgctgtgctgcgccgaggaggtggacctggacgagctgctggccggcagactggtgagcttcctgatggaccaccaccaggagatcctgcaggtgcccagctacctgcagaccgccgtggagaagcacctggactacctgaagaagggccacatcgagaaccccggcgacggcctgttcgcccccctgcccacctacagctactgcaagcagatcagcgcccaggagttcgacgagcagaaggtgagcaccagccaggccgccatcgccgagctgctggagaacatcatcaagaacagaagcctgcccctgaaggagaagagaaagaagctgaagcagttccagaaggagtaccccctgatctaccagaagagattccccaccaccgagagcgaggccgccctgttcggcgacaagcccaccatcaagcagcccatgctgatcctgagaaagcccaagttcagaagcctgagatga

SEQ ID NO: 2646 - RNA, 297 nt, synthetic construct
  misc_feature 1..297: note = AAA46940 variant
  source 1..297: mol_type = other RNA
atgcacggcgacacccccaccctgcacgagtacatgctggacctgcagcccgagaccaccgacctgtactgctacgagcagctgaacgacagcagcgaggaggaggacgagatcgacggccccgccggccaggccgagcccgacagagcccactacaacatcgtgaccttctgctgcaagtgcgacagcaccctgagactgtgcgtgcagagcacccacgtggacatcagaaccctggaggacctgctgatgggcaccctgggcatcgtgtgccccatctgcagccagaagccctga

SEQ ID NO: 2647 - RNA, 318 nt, synthetic construct
  misc_feature 1..318: note = AAA46947 variant
  source 1..318: mol_type = other RNA
atgcacggccccaaggccaccctgcaggacatcgtgctgcacctggagccccagaacgagatccccgtggacctgctgtgccacgagcagctgagcgacagcgaggaggagaacgacgagatcgacggcgtgaaccaccagcacctgcccgccagaagagccgagccccagagacacaccatgctgtgcatgtgctgcaagtgcgaggccagaatcaagctggtggtggagagcagcgccgacgacctgagagccttccagcagctgttcctgaacaccctgagcttcgtgtgcccctggtgcgccagccagcagtga

SEQ ID NO: 2648 - RNA, 297 nt, synthetic construct
  misc_feature 1..297: note = AAA46951 variant
  source 1..297: mol_type = other RNA
atgagaggcgagacccccaccctgcaggactacgtgctggacctgcagcccgaggccaccgacctgcactgctacgagcagctgcccgacagcagcgacgaggaggacgtgatcgacagccccgccggccaggccgagcccgacaccagcaactacaacatcgtgaccttctgctgccagtgcaagagcaccctgagactgtgcgtgcagagcacccaggtggacatcagaatcctgcaggagctgctgatgggcagcttcggcatcgtgtgccccaactgcagcaccagactgtga

SEQ ID NO: 2649 - RNA, 294 nt, synthetic construct
  misc_feature 1..294: note = AAA46959 variant
  source 1..294: mol_type = other RNA
atgagaggccacaagcccaccctgaaggagtacgtgctggacctgtaccccgagcccaccgacctgtactgctacgagcagctgagcgacagcagcgacgaggacgagggcctggacagacccgacggccaggcccagcccgccaccgccgactactacatcgtgacctgctgccacacctgcaacaccaccgtgagactgtgcgtgaacagcaccgccagcgacctgagaaccatccagcagctgctgatgggcaccgtgaacatcgtgtgccccacctgcgcccagcagtga

SEQ ID NO: 2650 - RNA, 300 nt, synthetic construct
  misc_feature 1..300: note = AAA46967 variant
  source 1..300: mol_type = other RNA
atgcacggcgagatcaccaccctgcaggactacgtgctggacctggagcccgaggccaccgacctgtactgctacgagcagctgtgcgacagcagcgaggaggaggaggacaccatcgacggccccgccggccaggccaagcccgacaccagcaactacaacatcgtgaccagctgctgcaagtgcgaggccaccctgagactgtgcgtgcagagcacccacatcgacatcagaaagctggaggacctgctgatgggcaccttcggcatcgtgtgccccggctgcagccagagagcctga

SEQ ID NO: 2651 - RNA, 330 nt, synthetic construct
  misc_feature 1..330: note = AAA47051 variant
  source 1..330: mol_type = other RNA
atgagaggccccaagcccaccctgcaggagatcgtgctggacctgtgcccctacaacgagatccagcccgtggacctggtgtgccacgagcagctgggcgagagcgaggacgagatcgacgagcccgaccacgccgtgaaccaccagcaccagctgctggccagaagagacgagccccagagacacaccatccagtgcagctgctgcaagtgcaacaacaccctgcagctggtggtggaggccagcagagacaccctgagacagctgcagcagctgttcatggacagcctgggcttcgtgtgcccctggtgcgccaccgccaaccagtga

SEQ ID NO: 2652 - RNA, 321 nt, synthetic construct
  misc_feature 1..321: note = CAA52574 variant
  source 1..321: mol_type = other RNA
atgcacggccccagagagaccctgcaggagatcgtgctgcacctggagccccagaacgagctggaccccgtggacctgctgtgctacgagcagctgagcgagagcgaggaggagaacgacgaggccgacggcgtgagccacgcccagctgcccgccagaagagccgagccccagagacacaagatcctgtgcgtgtgctgcaagtgcgacggcagaatcgagctgaccgtggagagcagcgccgaggacctgagaaccctgcagcagctgttcctgagcaccctgagcttcgtgtgcccctggtgcgccaccaaccagtga

SEQ ID NO: 2653 - RNA, 306 nt, synthetic construct
  misc_feature 1..306: note = M62877.1 variant
  source 1..306: mol_type = other RNA
atgagaggcaacgtgccccagctgaaggacgtggtgctgcacctgaccccccagaccgagatcgacctgcagtgctacgagcagttcgacagcagcgaggaggaggacgaggtggacaacatgagagaccagctgcccgagagaagagccggccaggccacctgctacagaatcgaggccccctgctgcagatgcagcagcgtggtgcagctggccgtggagagcagcggcgacaccctgagagtggtgcagcagatgctgatgggcgagctgagcctggtgtgcccctgctgcgccaacaactga

SEQ ID NO: 2654 - RNA, 300 nt, synthetic construct
  misc_feature 1..300: note = CAA52586 variant
  source 1..300: mol_type = other RNA
atgagaggcgacaaggccaccatcaaggactacatcctggacctgcagcccgagaccaccgacctgcactgctacgagcagctgggcgacagcagcgacgaggaggacaccgacggcgtggacagacccgacggccaggccgagcaggccaccagcaactactacatcgtgacctactgccacagctgcgacagcaccctgagactgtgcatccacagcaccgccaccgacctgagaaccctgcagcagatgctgctgggcaccctgcaggtggtgtgccccggctgcgccagactgtga

SEQ ID NO: 2655 - RNA, 318 nt, synthetic construct
  misc_feature 1..318: note = CAA52597 variant
  source 1..318: mol_type = other RNA
atgcacggcaaggtgcccaccctgcaggacgtggtgctggagctgaccccccagaccgagatcgacctgcagtgcaacgagcagctggacagcagcgaggacgaggacgaggacgaggtggaccacctgcaggagagaccccagcaggccagacaggccaagcagcacacctgctacctgatccacgtgccctgctgcgagtgcaagttcgtggtgcagctggacatccagagcaccaaggaggacctgagagtggtgcagcagctgctgatgggcgccctgaccgtgacctgccccctgtgcgccagcagcaactga

SEQ ID NO: 2656 - RNA, 297 nt, synthetic construct
  misc_feature 1..297: note = AAF13691 variant
  source 1..297: mol_type = other RNA
atgagaggcaacaaccccaccctgagagagtacatcctggacctgcaccccgagcccaccgacctgttctgctacgagcagctgtgcgacagcagcgacgaggacgagatcggcctggacagacccgacggccaggcccagcccgccaccgccaactactacatcgtgacctgctgctacacctgcgacaccaccgtgagactgtgcatcaacagcaccaccaccgacgtgagaaccctgcagcagctgctgatgggcacctgcaccatcgtgtgccccagctgcgcccagcagtga

SEQ ID NO: 2657 - RNA, 324 nt, synthetic construct
  misc_feature 1..324: note = ACL12335 variant
  source 1..324: mol_type = other RNA
atgcacggccccaaggccaccctgtgcgacatcgtgctggacctggagccccagaactacgaggaggtggacctggtgtgctacgagcagctgcccgacagcgacagcgagaacgagaaggacgagcccgacggcgtgaaccaccccctgctgctggccagaagagccgagccccagagacacaacatcgtgtgcgtgtgctgcaagtgcaacaaccagctgcagctggtggtggagaccagccaggacggcctgagagccctgcagcagctgttcatggacaccctgagcttcgtgtgccccctgtgcgccgccaaccagtga

SEQ ID NO: 2658 - RNA, 318 nt, synthetic construct
  misc_feature 1..318: note = AAA79500 variant
  source 1..318: mol_type = other RNA
atgcacggcaaggtgcccaccctgcaggaggtgatcctggagctggccccccagaccgagatcgacctgcagtgcaacgagcagctggacagcagcgaggacgaggacgaggacgagatcgaccacctgctggagagaccccagcaggccagacaggccgagcagcacaagtgctacctgatccacgtgccctgctgcaagtgcgagctggtggtgcagctggacatccagagcaccaaggaggagctgagagtggtgcagcagctgctgatgggcgccctgaccgtgacctgccccctgtgcgccagcagcaagtga

SEQ ID NO: 2659 - RNA, 1392 nt, synthetic construct
  misc_feature 1..1392: note = AAF80488 variant
  source 1..1392: mol_type = other RNA
atgggcaaggagaagacccacatcaacatcgtggtgatcggccacgtggacagcggcaagagcaccaccaccggccacctgatctacaagtgcggcggcatcgacaagagaaccatcgagaagttcgagaaggaggccgccgagatgggcaagggcagcttcaagtacgcctgggtgctggacaagctgaaggccgagagagagagaggcatcaccatcgacatcagcctgtggaagttcgagaccaccaagtactacatcaccatcatcgacgcccccggccacagagacttcatcaagaacatgatcaccggcaccagccaggccgactgcgccgtgctgatcgtggccgccggcgtgggcgagttcgaggccggcatcagcaagaacggccagaccagagagcacgccctgctggcctacaccctgggcgtgaagcagctgatcgtgggcgtgaacaagatggacagcaccgagcccgcctacagcgagaagagatacgacgagatcgtgaaggaggtgagcgcctacatcaagaagatcggctacaaccccgccaccgtgcccttcgtgcccatcagcggctggcacggcgacaacatgctggagcccagccccaacatgccctggttcaagggctggaaggtggagagaaaggagggcaacgccagcggcgtgagcctgctggaggccctggacaccatcctgccccccaccagacccaccgacaagcccctgagactgcccctgcaggacgtgtacaagatcggcggcatcggcaccgtgcccgtgggcagagtggagaccggcatcctgagacccggcatggtggtgaccttcgcccccgtgaacatcaccaccgaggtgaagagcgtggagatgcaccacgaggccctgagcgaggccctgcccggcgacaacgtgggcttcaacgtgaagaacgtgagcgtgaaggacatcagaagaggcaacgtgtgcggcgacagcaagagcgaccccccccaggaggccgcccagttcaccagccaggtgatcatcctgaaccaccccggccagatcagcgccggctacagccccgtgatcgactgccacaccgcccacatcgcctgcaagttcgccgagctgaaggagaagatcgacagaagaagcggcaagaagctggaggacaaccccaagagcctgaagagcggcgacgccgccatcgtggagatggtgcccggcaagcccatgtgcgtggagagcttcagccagtacccccccctgggcagattcgccgtgagagacatgagacagaccgtggccgtgggcgtgatcaagaacgtggagaagaagagcggcggcgccggcaaggtgaccaagagcgcccagaaggcccagaaggccggcaagtga

SEQ ID NO: 2660 - RNA, 2919 nt, synthetic construct
  misc_feature 1..2919: note = EAW51573 variant
  source 1..2919: mol_type = other RNA
atggacaccgacctgtacgacgagttcggcaactacatcggccccgagctggacagcgacgaggacgacgacgagctgggcagagagaccaaggacctggacgagatggacgacgacgacgacgacgacgacgtgggcgaccacgacgacgaccaccccggcatggaggtggtgctgcacgaggacaagaagtactaccccaccgccgaggaggtgtacggccccgaggtggagaccatcgtgcaggaggaggacacccagcccctgaccgagcccatcatcaagcccgtgaagaccaagaagttcaccctgatggagcagaccctgcccgtgaccgtgtacgagatggacttcctggccgacctgatggacaacagcgagctgatcagaaacgtgaccctgtgcggccacctgcaccacggcaagacctgcttcgtggactgcctgatcgagcagacccaccccgagatcagaaagagatacgaccaggacctgtgctacaccgacatcctgttcaccgagcaggagagaggcgtgggcatcaagagcacccccgtgaccgtggtgctgcccgacaccaagggcaagagctacctgttcaacatcatggacacccccggccacgtgaacttcagcgacgaggtgaccgccggcctgagaatcagcgacggcgtggtgctgttcatcgacgccgccgagggcgtgatgctgaacaccgagagactgatcaagcacgccgtgcaggagagactggccgtgaccgtgtgcatcaacaagatcgacagactgatcctggagctgaagctgccccccaccgacgcctactacaagctgagacacatcgtggacgaggtgaacggcctgatcagcatgtacagcaccgacgagaacctgatcctgagccccctgctgggcaacgtgtgcttcagcagcagccagtacagcatctgcttcaccctgggcagcttcgccaagatctacgccgacaccttcggcgacatcaactaccaggagttcgccaagagactgtggggcgacatctacttcaaccccaagaccagaaagttcaccaagaaggcccccaccagcagcagccagagaagcttcgtggagttcatcctggagcccctgtacaagatcctggcccaggtggtgggcgacgtggacaccagcctgcccagaaccctggacgagctgggcatccacctgaccaaggaggagctgaagctgaacatcagacccctgctgagactggtgtgcaagaagttcttcggcgagttcaccggcttcgtggacatgtgcgtgcagcacatccccagccccaaggtgggcgccaagcccaagatcgagcacacctacaccggcggcgtggacagcgacctgggcgaggccatgagcgactgcgaccccgacggccccctgatgtgccacaccaccaagatgtacagcaccgacgacggcgtgcagttccacgccttcggcagagtgctgagcggcaccatccacgccggccagcccgtgaaggtgctgggcgagaactacaccctggaggacgaggaggacagccagatctgcaccgtgggcagactgtggatcagcgtggccagataccacatcgaggtgaacagagtgcccgccggcaactgggtgctgatcgagggcgtggaccagcccatcgtgaagaccgccaccatcaccgagcccagaggcaacgaggaggcccagatcttcagacccctgaagttcaacaccaccagcgtgatcaagatcgccgtggagcccgtgaaccccagcgagctgcccaagatgctggacggcctgagaaaggtgaacaagagctaccccagcctgaccaccaaggtggaggagagcggcgagcacgtgatcctgggcaccggcgagctgtacctggactgcgtgatgcacgacctgagaaagatgtacagcgagatcgacatcaaggtggccgaccccgtggtgaccttctgcgagaccgtggtggagaccagcagcctgaagtgcttcgccgagacccccaacaagaagaacaagatcaccatgatcgccgagcccctggagaagggcctggccgaggacatcgagaacgaggtggtgcagatcacctggaacagaaagaagctgggcgagttcttccagaccaagtacgactgggacctgctggccgccagaagcatctgggccttcggccccgacgccaccggccccaacatcctggtggacgacaccctgcccagcgaggtggacaaggccctgctgggcagcgtgaaggacagcatcgtgcagggcttccagtggggcaccagagagggccccctgtgcgacgagctgatcagaaacgtgaagttcaagatcctggacgccgtggtggcccaggagcccctgcacagaggcggcggccagatcatccccaccgccagaagagtggtgtacagcgccttcctgatggccacccccagactgatggagccctactacttcgtggaggtgcaggcccccgccgactgcgtgagcgccgtgtacaccgtgctggccagaagaagaggccacgtgacccaggacgcccccatccccggcagccccctgtacaccatcaaggccttcatccccgccatcgacagcttcggcttcgagaccgacctgagaacccacacccagggccaggccttcagcctgagcgtgttccaccactggcagatcgtgcccggcgaccccctggacaagagcatcgtgatcagacccctggagccccagcccgccccccacctggccagagagttcatgatcaagaccagaagaagaaagggcctgagcgaggacgtgagcatcagcaagttcttcgacgaccccatgctgctggagctggccaagcaggacgtggtgctgaactaccccatgtga

SEQ ID NO: 2661 - RNA, 1971 nt, synthetic construct
  misc_feature 1..1971: note = EAW50963 variant
  source 1..1971: mol_type = other RNA
atgagacccagcggcaccgccggcgccgccctgctggccctgctggccgccctgtgccccgccagcagagccctggaggagaagaaggtgtgccagggcaccagcaacaagctgacccagctgggcaccttcgaggaccacttcctgagcctgcagagaatgttcaacaactgcgaggtggtgctgggcaacctggagatcacctacgtgcagagaaactacgacctgagcttcctgaagaccatccaggaggtggccggctacgtgctgatcgccctgaacaccgtggagagaatccccctggagaacctgcagatcatcagaggcaacatgtactacgagaacagctacgccctggccgtgctgagcaactacgacgccaacaagaccggcctgaaggagctgcccatgagaaacctgcaggagatcctgcacggcgccgtgagattcagcaacaaccccgccctgtgcaacgtggagagcatccagtggagagacatcgtgagcagcgacttcctgagcaacatgagcatggacttccagaaccacctgggcagctgccagaagtgcgaccccagctgccccaacggcagctgctggggcgccggcgaggagaactgccagaagctgaccaagatcatctgcgcccagcagtgcagcggcagatgcagaggcaagagccccagcgactgctgccacaaccagtgcgccgccggctgcaccggccccagagagagcgactgcctggtgtgcagaaagttcagagacgaggccacctgcaaggacacctgcccccccctgatgctgtacaaccccaccacctaccagatggacgtgaaccccgagggcaagtacagcttcggcgccacctgcgtgaagaagtgccccagaaactacgtggtgaccgaccacggcagctgcgtgagagcctgcggcgccgacagctacgagatggaggaggacggcgtgagaaagtgcaagaagtgcgagggcccctgcagaaaggtgtgcaacggcatcggcatcggcgagttcaaggacagcctgagcatcaacgccaccaacatcaagcacttcaagaactgcaccagcatcagcggcgacctgcacatcctgcccgtggccttcagaggcgacagcttcacccacaccccccccctggacccccaggagctggacatcctgaagaccgtgaaggagatcaccggcttcctgctgatccaggcctggcccgagaacagaaccgacctgcacgccttcgagaacctggagatcatcagaggcagaaccaagcagcacggccagttcagcctggccgtggtgagcctgaacatcaccagcctgggcctgagaagcctgaaggagatcagcgacggcgacgtgatcatcagcggcaacaagaacctgtgctacgccaacaccatcaactggaagaagctgttcggcaccagcggccagaagaccaagatcatcagcaacagaggcgagaacagctgcaaggccaccggccaggtgtgccacgccctgtgcagccccgagggctgctggggccccgagcccagagactgcgtgagctgcagaaacgtgagcagaggcagagagtgcgtggacaagtgcaacctgctggagggcgagcccagagagttcgtggagaacagcgagtgcatccagtgccaccccgagtgcctgccccaggccatgaacatcacctgcaccggcagaggccccgacaactgcatccagtgcgcccactacatcgacggcccccactgcgtgaagacctgccccgccggcgtgatgggcgagaacaacaccctggtgtggaagtacgccgacgccggccacgtgtgccacctgtgccaccccaactgcacctacggctgcaccggccccggcctggagggctgccccaccaacggcagctacatcgtgagccacttccccagaagcttctacaagatgagcgtgcac

SEQ ID NO: 2662 - RNA, 3411 nt, synthetic construct
  misc_feature 1..3411: note = ADL28125 variant
  source 1..3411: mol_type = other RNA
atgagacccagcggcaccgccggcgccgccctgctggccctgctggccgccctgtgccccgccagcagagccctggaggagaagaaggtgtgccagggcaccagcaacaagctgacccagctgggcaccttcgaggaccacttcctgagcctgcagagaatgttcaacaactgcgaggtggtgctgggcaacctggagatcacctacgtgcagagaaactacgacctgagcttcctgaagaccatccaggaggtggccggctacgtgctgatcgccctgaacaccgtggagagaatccccctggagaacctgcagatcatcagaggcaacatgtactacgagaacagctacgccctggccgtgctgagcaactacgacgccaacaagaccggcctgaaggagctgcccatgagaaacctgcaggagatcctgcacggcgccgtgagattcagcaacaaccccgccctgtgcaacgtggagagcatccagtggagagacatcgtgagcagcgacttcctgagcaacatgagcatggacttccagaaccacctgggcagctgccagaagtgcgaccccagctgccccaacggcagctgctggggcgccggcgaggagaactgccagaagctgaccaagatcatctgcgcccagcagtgcagcggcagatgcagaggcaagagccccagcgactgctgccacaaccagtgcgccgccggctgcaccggccccagagagagcgactgcctggtgtgcagaaagttcagagacgaggccacctgcaaggacacctgcccccccctgatgctgtacaaccccaccacctaccagatggacgtgaaccccgagggcaagtacagcttcggcgccacctgcgtgaagaagtgccccagaaactacgtggtgaccgaccacggcagctgcgtgagagcctgcggcgccgacagctacgagatggaggaggacggcgtgagaaagtgcaagaagtgcgagggcccctgcagaaaggtgtgcaacggcatcggcatcggcgagttcaaggacagcctgagcatcaacgccaccaacatcaagcacttcaagaactgcaccagcatcagcggcgacctgcacatcctgcccgtggccttcagaggcgacagcttcacccacaccccccccctggacccccaggagctggacatcctgaagaccgtgaaggagatcaccggcttcctgctgatccaggcctggcccgagaacagaaccgacctgcacgccttcgagaacctggagatcatcagaggcagaaccaagcagcacggccagttcagcctggccgtggtgagcctgaacatcaccagcctgggcctgagaagcctgaaggagatcagcgacggcgacgtgatcatcagcggcaacaagaacctgtgctacgccaacaccatcaactggaagaagctgttcggcaccagcggccagaagaccaagatcatcagcaacagaggcgagaacagctgcaaggccaccggccaggtgtgccacgccctgtgcagccccgagggctgctggggccccgagcccagagactgcgtgagctgcagaaacgtgagcagaggcagagagtgcgtggacaagtgcaacctgctggagggcgagcccagagagttcgtggagaacagcgagtgcatccagtgccaccccgagtgcctgccccaggccatgaacatcacctgcaccggcagaggccccgacaactgcatccagtgcgcccactacatcgacggcccccactgcgtgaagacctgccccgccggcgtgatgggcgagaacaacaccctggtgtggaagtacgccgacgccggccacgtgtgccacctgtgccaccccaactgcacctacggctgcaccggccccggcctggagggctgccccaccaacggccccaagatccccagcatcgccaccggcatggtgggcgccctgctgctgctgctggtggtggccctgggcatcggcctgttcatgagaagaagacacatcgtgagaaagagaaccctgagaagactgctgcaggagagagagctggtggagcccctgacccccagcggcgaggcccccaaccaggccctgctgagaatcctgaaggagaccgagttcaagaagatcaaggtgctgggcagcggcgccttcggcaccgtgtacaagggcctgtggatccccgagggcgagaaggtgaagatccccgtggccatcaaggagctgagagaggccaccagccccaaggccaacaaggagatcctggacgaggcctacgtgatggccagcgtggacaacccccacgtgtgcagactgctgggcatctgcctgaccagcaccgtgcagctgatcacccagctgatgcccttcggctgcctgctggactacgtgagagagcacaaggacaacatcggcagccagtacctgctgaactggtgcgtgcagatcgccaagggcatgaactacctggaggacagaagactggtgcacagagacctggccgccagaaacgtgctggtgaagaccccccagcacgtgaagatcaccgacttcggcctggccaagctgctgggcgccgaggagaaggagtaccacgccgagggcggcaaggtgcccatcaagtggatggccctggagagcatcctgcacagaatctacacccaccagagcgacgtgtggagctacggcgtgaccgtgtgggagctgatgaccttcggcagcaagccctacgacggcatccccgccagcgagatcagcagcatcctggagaagggcgagagactgccccagccccccatctgcaccatcgacgtgtacatgatcatggtgaagtgctggatgatcgacgccgacagcagacccaagttcagagagctgatcatcgagttcagcaagatggccagagacccccagagatacctggtgatccagggcgacgagagaatgcacctgcccagccccaccgacagcaacttctacagagccctgatggacgaggaggacatggacgacgtggtggacgccgacgagtacctgatcccccagcagggcttcttcagcagccccagcaccagcagaacccccctgctgagcagcctgagcgccaccagcaacaacagcaccgtggcctgcatcgacagaaacggcctgcagagctgccccatcaaggaggacagcttcctgcagagatacagcagcgaccccaccggcgccctgaccgaggacagcatcgacgacaccttcctgcccgtgcccggcgagtggctggtgtggaagcagagctgcagcagcaccagcagcacccacagcgccgccgccagcctgcagtgccccagccaggtgctgccccccgccagccccgagggcgagaccgtggccgacctgcagacccagtga

SEQ ID NO: 2663 - RNA, 150 nt, synthetic construct
  misc_feature 1..150: note = CCO13722 variant
  source 1..150: mol_type = other RNA
atgtgcgccacctgcgccatccagaccgcccccaccggccccaacaagagcagcctgagcgacttcagcctgcccctgaagctgcacttcctgagcaccatcagcatcagccccttcgccagcaacaaggtgctgaccctgttcatctga

SEQ ID NO: 2664 - RNA, 1218 nt, synthetic construct
  misc_feature 1..1218: note = CCDS47587.1 variant
  source 1..1218: mol_type = other RNA
atgagacccagcggcaccgccggcgccgccctgctggccctgctggccgccctgtgccccgccagcagagccctggaggagaagaaggtgtgccagggcaccagcaacaagctgacccagctgggcaccttcgaggaccacttcctgagcctgcagagaatgttcaacaactgcgaggtggtgctgggcaacctggagatcacctacgtgcagagaaactacgacctgagcttcctgaagaccatccaggaggtggccggctacgtgctgatcgccctgaacaccgtggagagaatccccctggagaacctgcagatcatcagaggcaacatgtactacgagaacagctacgccctggccgtgctgagcaactacgacgccaacaagaccggcctgaaggagctgcccatgagaaacctgcaggagatcctgcacggcgccgtgagattcagcaacaaccccgccctgtgcaacgtggagagcatccagtggagagacatcgtgagcagcgacttcctgagcaacatgagcatggacttccagaaccacctgggcagctgccagaagtgcgaccccagctgccccaacggcagctgctggggcgccggcgaggagaactgccagaagctgaccaagatcatctgcgcccagcagtgcagcggcagatgcagaggcaagagccccagcgactgctgccacaaccagtgcgccgccggctgcaccggccccagagagagcgactgcctggtgtgcagaaagttcagagacgaggccacctgcaaggacacctgcccccccctgatgctgtacaaccccaccacctaccagatggacgtgaaccccgagggcaagtacagcttcggcgccacctgcgtgaagaagtgccccagaaactacgtggtgaccgaccacggcagctgcgtgagagcctgcggcgccgacagctacgagatggaggaggacggcgtgagaaagtgcaagaagtgcgagggcccctgcagaaaggtgtgcaacggcatcggcatcggcgagttcaaggacagcctgagcatcaacgccaccaacatcaagcacttcaagaactgcaccagcatcagcggcgacctgcacatcctgcccgtggccttcagaggcgacagcttcacccacaccccccccctggacccccaggagctggacatcctgaagaccgtgaaggagatcaccggcctgagctga

SEQ ID NO: 2665 - RNA, 3633 nt, synthetic construct
  misc_feature 1..3633: note = AAG35789 variant
  source 1..3633: mol_type = other RNA
atgagacccagcggcaccgccggcgccgccctgctggccctgctggccgccctgtgccccgccagcagagccctggaggagaagaaggtgtgccagggcaccagcaacaagctgacccagctgggcaccttcgaggaccacttcctgagcctgcagagaatgttcaacaactgcgaggtggtgctgggcaacctggagatcacctacgtgcagagaaactacgacctgagcttcctgaagaccatccaggaggtggccggctacgtgctgatcgccctgaacaccgtggagagaatccccctggagaacctgcagatcatcagaggcaacatgtactacgagaacagctacgccctggccgtgctgagcaactacgacgccaacaagaccggcctgaaggagctgcccatgagaaacctgcaggagatcctgcacggcgccgtgagattcagcaacaaccccgccctgtgcaacgtggagagcatccagtggagagacatcgtgagcagcgacttcctgagcaacatgagcatggacttccagaaccacctgggcagctgccagaagtgcgaccccagctgccccaacggcagctgctggggcgccggcgaggagaactgccagaagctgaccaagatcatctgcgcccagcagtgcagcggcagatgcagaggcaagagccccagcgactgctgccacaaccagtgcgccgccggctgcaccggccccagagagagcgactgcctggtgtgcagaaagttcagagacgaggccacctgcaaggacacctgcccccccctgatgctgtacaaccccaccacctaccagatggacgtgaaccccgagggcaagtacagcttcggcgccacctgcgtgaagaagtgccccagaaactacgtggtgaccgaccacggcagctgcgtgagagcctgcggcgccgacagctacgagatggaggaggacggcgtgagaaagtgcaagaagtgcgagggcccctgcagaaaggtgtgcaacggcatcggcatcggcgagttcaaggacagcctgagcatcaacgccaccaacatcaagcacttcaagaactgcaccagcatcagcggcgacctgcacatcctgcccgtggccttcagaggcgacagcttcacccacaccccccccctggacccccaggagctggacatcctgaagaccgtgaaggagatcaccggcttcctgctgatccaggcctggcccgagaacagaaccgacctgcacgccttcgagaacctggagatcatcagaggcagaaccaagcagcacggccagttcagcctggccgtggtgagcctgaacatcaccagcctgggcctgagaagcctgaaggagatcagcgacggcgacgtgatcatcagcggcaacaagaacctgtgctacgccaacaccatcaactggaagaagctgttcggcaccagcggccagaagaccaagatcatcagcaacagaggcgagaacagctgcaaggccaccggccaggtgtgccacgccctgtgcagccccgagggctgctggggccccgagcccagagactgcgtgagctgcagaaacgtgagcagaggcagagagtgcgtggacaagtgcaacctgctggagggcgagcccagagagttcgtggagaacagcgagtgcatccagtgccaccccgagtgcctgccccaggccatgaacatcacctgcaccggcagaggccccgacaactgcatccagtgcgcccactacatcgacggcccccactgcgtgaagacctgccccgccggcgtgatgggcgagaacaacaccctggtgtggaagtacgccgacgccggccacgtgtgccacctgtgccaccccaactgcacctacggctgcaccggccccggcctggagggctgccccaccaacggccccaagatccccagcatcgccaccggcatggtgggcgccctgctgctgctgctggtggtggccctgggcatcggcctgttcatgagaagaagacacatcgtgagaaagagaaccctgagaagactgctgcaggagagagagctggtggagcccctgacccccagcggcgaggcccccaaccaggccctgctgagaatcctgaaggagaccgagttcaagaagatcaaggtgctgggcagcggcgccttcggcaccgtgtacaagggcctgtggatccccgagggcgagaaggtgaagatccccgtggccatcaaggagctgagagaggccaccagccccaaggccaacaaggagatcctggacgaggcctacgtgatggccagcgtggacaacccccacgtgtgcagactgctgggcatctgcctgaccagcaccgtgcagctgatcacccagctgatgcccttcggctgcctgctggactacgtgagagagcacaaggacaacatcggcagccagtacctgctgaactggtgcgtgcagatcgccaagggcatgaactacctggaggacagaagactggtgcacagagacctggccgccagaaacgtgctggtgaagaccccccagcacgtgaagatcaccgacttcggcctggccaagctgctgggcgccgaggagaaggagtaccacgccgagggcggcaaggtgcccatcaagtggatggccctggagagcatcctgcacagaatctacacccaccagagcgacgtgtggagctacggcgtgaccgtgtgggagctgatgaccttcggcagcaagccctacgacggcatccccgccagcgagatcagcagcatcctggagaagggcgagagactgccccagccccccatctgcaccatcgacgtgtacatgatcatggtgaagtgctggatgatcgacgccgacagcagacccaagttcagagagctgatcatcgagttcagcaagatggccagagacccccagagatacctggtgatccagggcgacgagagaatgcacctgcccagccccaccgacagcaacttctacagagccctgatggacgaggaggacatggacgacgtggtggacgccgacgagtacctgatcccccagcagggcttcttcagcagccccagcaccagcagaacccccctgctgagcagcctgagcgccaccagcaacaacagcaccgtggcctgcatcgacagaaacggcctgcagagctgccccatcaaggaggacagcttcctgcagagatacagcagcgaccccaccggcgccctgaccgaggacagcatcgacgacaccttcctgcccgtgcccgagtacatcaaccagagcgtgcccaagagacccgccggcagcgtgcagaaccccgtgtaccacaaccagcccctgaaccccgcccccagcagagacccccactaccaggacccccacagcaccgccgtgggcaaccccgagtacctgaacaccgtgcagcccacctgcgtgaacagcaccttcgacagccccgcccactgggcccagaagggcagccaccagatcagcctggacaaccccgactaccagcaggacttcttccccaaggaggccaagcccaacggcatcttcaagggcagcaccgccgagaacgccgagtacctgagagtggccccccagagcagcgagttcatcggcgcctga

SEQ ID NO: 2666 - RNA, 1395 nt, synthetic construct
  misc_feature 1..1395: note = AAI18666 variant
  source 1..1395: mol_type = other RNA
atggccgccgaggacgtgatcatctgcgcccagcagtgcagcggcagatgcagaggcaagagccccagcgactgctgccacaaccagtgcgccgccggctgcaccggccccagagagagcgactgcctggtgtgcagaaagttcagagacgaggccacctgcaaggacacctgcccccccctgatgctgtacaaccccaccacctaccagatggacgtgaaccccgagggcaagtacagcttcggcgccacctgcgtgaagaagtgccccagaaactacgtggtgaccgaccacggcagctgcgtgagagcctgcggcgccgacagctacgagatggaggaggacggcgtgagaaagtgcaagaagtgcgagggcccctgcagaaaggtgtgcaacggcatcggcatcggcgagttcaaggacagcctgagcatcaacgccaccaacatcaagcacttcaagaactgcaccagcatcagcggcgacctgcacatcctgcccgtggccttcagaggcgacagcttcacccacaccccccccctggacccccaggagctggacatcctgaagaccgtgaaggagatcaccggcttcctgctgatccaggcctggcccgagaacagaaccgacctgcacgccttcgagaacctggagatcatcagaggcagaaccaagcagcacggccagttcagcctggccgtggtgagcctgaacatcaccagcctgggcctgagaagcctgaaggagatcagcgacggcgacgtgatcatcagcggcaacaagaacctgtgctacgccaacaccatcaactggaagaagctgttcggcaccagcggccagaagaccaagatcatcagcaacagaggcgagaacagctgcaaggccaccggccaggtgtgccacgccctgtgcagccccgagggctgctggggccccgagcccagagactgcgtgagctgcagaaacgtgagcagaggcagagagtgcgtggacaagtgcaacctgctggagggcgagcccagagagttcgtggagaacagcgagtgcatccagtgccaccccgagtgcctgccccaggccatgaacatcacctgcaccggcagaggccccgacaactgcatccagtgcgcccactacatcgacggcccccactgcgtgaagacctgccccgccggcgtgatgggcgagaacaacaccctggtgtggaagtacgccgacgccggccacgtgtgccacctgtgccaccccaactgcacctacggctgcaccggccccggcctggagggctgccccaccaacggccccaagatccccagcatcgccaccggcatggtgggcgccctgctgctgctgctggtggtggccctgggcatcggccccctgcacggcagatga

SEQ ID NO: 2667 - RNA, 3276 nt, synthetic construct
  misc_feature 1..3276: note = AAH94761 variant
  source 1..3276: mol_type = other RNA
atgagacccagcggcaccgccggcgccgccctgctggccctgctggccgccctgtgccccgccagcagagccctggaggagaagaaggtgtgccagggcaccagcaacaagctgacccagctgggcaccttcgaggaccacttcctgagcctgcagagaatgttcaacaactgcgaggtggtgctgggcaacctggagatcacctacgtgcagagaaactacgacctgagcttcctgaagaccatccaggaggtggccggctacgtgctgatcgccctgaacaccgtggagagaatccccctggagaacctgcagatcatcagaggcaacatgtactacgagaacagctacgccctggccgtgctgagcaactacgacgccaacaagaccggcctgaaggagctgcccatgagaaacctgcagggccagaagtgcgaccccagctgccccaacggcagctgctggggcgccggcgaggagaactgccagaagctgaccaagatcatctgcgcccagcagtgcagcggcagatgcagaggcaagagccccagcgactgctgccacaaccagtgcgccgccggctgcaccggccccagagagagcgactgcctggtgtgcagaaagttcagagacgaggccacctgcaaggacacctgcccccccctgatgctgtacaaccccaccacctaccagatggacgtgaaccccgagggcaagtacagcttcggcgccacctgcgtgaagaagtgccccagaaactacgtggtgaccgaccacggcagctgcgtgagagcctgcggcgccgacagctacgagatggaggaggacggcgtgagaaagtgcaagaagtgcgagggcccctgcagaaaggtgtgcaacggcatcggcatcggcgagttcaaggacagcctgagcatcaacgccaccaacatcaagcacttcaagaactgcaccagcatcagcggcgacctgcacatcctgcccgtggccttcagaggcgacagcttcacccacaccccccccctggacccccaggagctggacatcctgaagaccgtgaaggagatcaccggcttcctgctgatccaggcctggcccgagaacagaaccgacctgcacgccttcgagaacctggagatcatcagaggcagaaccaagcagcacggccagttcagcctggccgtggtgagcctgaacatcaccagcctgggcctgagaagcctgaaggagatcagcgacggcgacgtgatcatcagcggcaacaagaacctgtgctacgccaacaccatcaactggaagaagctgttcggcaccagcggccagaagaccaagatcatcagcaacagaggcgagaacagctgcaaggccaccggccaggtgtgccacgccctgtgcagccccgagggctgctggggccccgagcccagagactgcgtgagctgcagaaacgtgagcagaggcagagagtgcgtggacaagtgcaacctgctggagggcgagcccagagagttcgtggagaacagcgagtgcatccagtgccaccccgagtgcctgccccaggccatgaacatcacctgcaccggcagaggccccgacaactgcatccagtgcgcccactacatcgacggcccccactgcgtgaagacctgccccgccggcgtgatgggcgagaacaacaccctggtgtggaagtacgccgacgccggccacgtgtgccacctgtgccaccccaactgcacctacggctgcaccggccccggcctggagggctgccccaccaacggccccaagatccccagcatcgccaccggcatggtgggcgccctgctgctgctgctggtggtggccctgggcatcggcctgttcatgagaagaagacacatcgtgagaaagagaaccctgagaagactgctgcaggagagagagctggtggagcccctgacccccagcggcgaggcccccaaccaggccctgctgagaatcctgaaggagaccgagttcaagaagatcaaggtgctgggcagcggcgccttcggcaccgtgtacaagggcctgtggatccccgagggcgagaaggtgaagatccccgtggccatcaaggagctgagagaggccaccagccccaaggccaacaaggagatcctggacgaggcctacgtgatggccagcgtggacaacccccacgtgtgcagactgctgggcatctgcctgaccagcaccgtgcagctgatcacccagctgatgcccttcggctgcctgctggactacgtgagagagcacaaggacaacatcggcagccagtacctgctgaactggtgcgtgcagatcgccaagggcatgaactacctggaggacagaagactggtgcacagagacctggccgccagaaacgtgctggtgaagaccccccagcacgtgaagatcaccgacttcggcctggccaagctgctgggcgccgaggagaaggagtaccacgccgagggcggcaaggtgcccatcaagtggatggccctggagagcatcctgcacagaatctacacccaccagagcgacgtgtggagctacggcgtgaccgtgtgggagctgatgaccttcggcagcaagccctacgacggcatccccgccagcgagatcagcagcatcctggagaagggcgagagactgccccagccccccatctgcaccatcgacgtgtacatgatcatggtgaagtgctggatgatcgacgccgacagcagacccaagttcagagagctgatcatcgagttcagcaagatggccagagacccccagagatacctggtgatccagggcgacgagagaatgcacctgcccagccccaccgacagcaacttctacagagccctgatggacgaggaggacatggacgacgtggtggacgccgacgagtacctgatcccccagcagggcttcttcagcagccccagcaccagcagaacccccctgctgagcagcctgagcgccaccagcaacaacagcaccgtggcctgcatcgacagaaacggcctgcagagctgccccatcaaggaggacagcttcctgcagagatacagcagcgaccccaccggcgccctgaccgaggacagcatcgacgacaccttcctgcccgtgcccggcgagtggctggtgtggaagcagagctgcagcagcaccagcagcacccacagcgccgccgccagcctgcagtgccccagccaggtgctgccccccgccagccccgagggcgagaccgtggccgacctgcagacccagtga

SEQ ID NO: 2668 - RNA, 216 nt, synthetic construct
  misc_feature 1..216: note = CAA34902 variant
  source 1..216: mol_type = other RNA
atgagacccagcggcaccgccggcgccgccctgctggccctgctggccgccctgtgccccgccagcagagccctggaggagaagaagggcaagggcgtgagcagaagactgcccagaagacccagaatcgcccccagaaccccccagcccgcccagcccagaaccggcgcccccgccagagccagagcccccgccagacccttcctgttcccctga

SEQ ID NO: 2669 - RNA, 720 nt, synthetic construct
  misc_feature 1..720: note = AAH10992 variant
  source 1..720: mol_type = other RNA
atgcccctgggccacatcatgagactggacctggagaagatcgccctggagtacatcgtgccctgcctgcacgaggtgggcttctgctacctggacaacttcctgggcgaggtggtgggcgactgcgtgctggagagagtgaagcagctgcactgcaccggcgccctgagagacggccagctggccggccccagagccggcgtgagcaagagacacctgagaggcgaccagatcacctggatcggcggcaacgaggagggctgcgaggccatcagcttcctgctgagcctgatcgacagactggtgctgtactgcggcagcagactgggcaagtactacgtgaaggagagaagcaaggccatggtggcctgctaccccggcaacggcaccggctacgtgagacacgtggacaaccccaacggcgacggcagatgcatcacctgcatctactacctgaacaagaactgggacgccaagctgcacggcggcatcctgagaatcttccccgagggcaagagcttcatcgccgacgtggagcccatcttcgacagactgctgttcttctggagcgacagaagaaacccccacgaggtgcagcccagctacgccaccagatacgccatgaccgtgtggtacttcgacgccgaggagagagccgaggccaagaagaagttcagaaacctgaccagaaagaccgagagcgccctgaccgaggactga

SEQ ID NO: 2670 - RNA, 1566 nt, synthetic construct
  misc_feature 1..1566: note = BAH13456 variant
  source 1..1566: mol_type = other RNA
atggccaccagcctgcacgagggccccaccaaccagctggacctgctgatcagagccgtggaggccagcgtgcacagcagcaacgcccactgcaccgacaagaccatcgaggccgccgaggccctgctgcacatggagagccccacctgcctgagagacagcagaagccccgagttcatccacgccgccatgagacccgacgtgatcaccgagaccgtggtggaggtgagcaccgaggagagcgagcccatggacaccagccccatccccaccagccccgacagccacgagcccatgaagaagaagaaggtgggcagaaagcccaagacccagcagagccccatcagcaacggcagccccgagctgggcatcaagaagaagcccagagagggcaagggcaacaccacctacctgtgggagttcctgctggacctgctgcaggacaagaacacctgccccagatacatcaagtggacccagagagagaagggcatcttcaagctggtggacagcaaggccgtgagcaagctgtggggcaagcacaagaacaagcccgacatgaactacgagaccatgggcagagccctgagatactactaccagagaggcatcctggccaaggtggagggccagagactggtgtaccagttcaaggacatgcccaagaacatcgtggtgatcgacgacgacaagagcgagacctgcaacgaggacctggccggcaccaccgacgagaagagcctggagagagtgagcctgagcgccgagagcctgctgaaggccgccagcagcgtgagaagcggcaagaacagcagccccatcaactgcagcagagccgagaagggcgtggccagagtggtgaacatcaccagccccggccacgacgccagcagcagaagccccaccaccaccgccagcgtgagcgccaccgccgcccccagaaccgtgagagtggccatgcaggtgcccgtggtgatgaccagcctgggccagaagatcagcaccgtggccgtgcagagcgtgaacgccggcgcccccctgatcaccagcaccagccccaccaccgccaccagccccaaggtggtgatccagaccatccccaccgtgatgcccgccagcaccgagaacggcgacaagatcaccatgcagcccgccaagatcatcaccatccccgccacccagctggcccagtgccagctgcagaccaagagcaacctgaccggcagcggcagcatcaacatcgtgggcacccccctggccgtgagagccctgacccccgtgagcatcgcccacggcacccccgtgatgagactgagcatgcccacccagcaggccagcggccagaccccccccagagtgatcagcgccgtgatcaagggccccgaggtgaagagcgaggccgtggccaagaagcaggagcacgacgtgaagaccctgcagctggtggaggagaagcccgccgacggcaacaagaccgtgacccacgtggtggtggtgagcgcccccagcgccatcgccctgcccgtgaccatgaagaccgagggcctggtgacctgcgagaagtga

SEQ ID NO: 2671 - RNA, 810 nt, synthetic construct
  misc_feature 1..810: note = BAC67168 variant
  source 1..810: mol_type = other RNA
atggccgccgccctgttcgtgctgctgggcttcgccctgctgggcacccacggcgccagcggcgccgccggcaccgtgttcaccaccgtggaggacctgggcagcaagatcctgctgacctgcagcctgaacgacagcgccaccgaggtgaccggccacagatggctgaagggcggcgtggtgctgaaggaggacgccctgcccggccagaagaccgagttcaaggtggacagcgacgaccagtggggcgagtacagctgcgtgttcctgcccgagcccatgggcaccgccaacatccagctgcacggcccccccagagtgaaggccgtgaagagcagcgagcacatcaacgagggcgagaccgccatgctggtgtgcaagagcgagagcgtgccccccgtgaccgactgggcctggtacaagatcaccgacagcgaggacaaggccctgatgaacggcagcgagagcagattcttcgtgagcagcagccagggcagaagcgagctgcacatcgagaacctgaacatggaggccgaccccggccagtacagatgcaacggcaccagcagcaagggcagcgaccaggccatcatcaccctgagagtgagaagccacctggccgccctgtggcccttcctgggcatcgtggccgaggtgctggtgctggtgaccatcatcttcatctacgagaagagaagaaagcccgaggacgtgctggacgacgacgacgccggcagcgcccccctgaagagcagcggccagcaccagaacgacaagggcaagaacgtgagacagagaaacagcagctga

SEQ ID NO: 2672 - RNA, 945 nt, synthetic construct
  misc_feature 1..945: note = AAA35723 variant
  source 1..945: mol_type = other RNA
atggcccccccccaggtgctggccttcggcctgctgctggccgccgccaccgccaccttcgccgccgcccaggaggagtgcgtgtgcgagaactacaagctggccgtgaactgcttcgtgaacaacaacagacagtgccagtgcaccagcgtgggcgcccagaacaccgtgatctgcagcaagctggccgccaagtgcctggtgatgaaggccgagatgaacggcagcaagctgggcagaagagccaagcccgagggcgccctgcagaacaacgacggcctgtacgaccccgactgcgacgagagcggcctgttcaaggccaagcagtgcaacggcaccagcatgtgctggtgcgtgaacaccgccggcgtgagaagaaccgacaaggacaccgagatcacctgcagcgagagagtgagaacctactggatcatcatcgagctgaagcacaaggccagagagaagccctacgacagcaagagcctgagaaccgccctgcagaaggagatcaccaccagataccagctggaccccaagttcatcaccagcatcctgtacgagaacaacgtgatcaccatcgacctggtgcagaacagcagccagaagacccagaacgacgtggacatcgccgacgtggcctactacttcgagaaggacgtgaagggcgagagcctgttccacagcaagaagatggacctgaccgtgaacggcgagcagctggacctggaccccggccagaccctgatctactacgtggacgagaaggcccccgagttcagcatgcagggcctgaaggccggcgtgatcgccgtgatcgtggtggtggtgatcgccgtggtggccggcatcgtggtgctggtgatcagcagaaagaagagaatggccaagtacgagaaggccgagatcaaggagatgggcgagatgcacagagagctgaacgcctga

SEQ ID NO: 2673 - RNA, 2931 nt, synthetic construct
  misc_feature 1..2931: note = CCDS169.1 variant
  source 1..2931: mol_type = other RNA
atggagctgcaggccgccagagcctgcttcgccctgctgtggggctgcgccctggccgccgccgccgccgcccagggcaaggaggtggtgctgctggacttcgccgccgccggcggcgagctgggctggctgacccacccctacggcaagggctgggacctgatgcagaacatcatgaacgacatgcccatctacatgtacagcgtgtgcaacgtgatgagcggcgaccaggacaactggctgagaaccaactgggtgtacagaggcgaggccgagagaatcttcatcgagctgaagttcaccgtgagagactgcaacagcttccccggcggcgccagcagctgcaaggagaccttcaacctgtactacgccgagagcgacctggactacggcaccaacttccagaagagactgttcaccaagatcgacaccatcgcccccgacgagatcaccgtgagcagcgacttcgaggccagacacgtgaagctgaacgtggaggagagaagcgtgggccccctgaccagaaagggcttctacctggccttccaggacatcggcgcctgcgtggccctgctgagcgtgagagtgtactacaagaagtgccccgagctgctgcagggcctggcccacttccccgagaccatcgccggcagcgacgcccccagcctggccaccgtggccggcacctgcgtggaccacgccgtggtgccccccggcggcgaggagcccagaatgcactgcgccgtggacggcgagtggctggtgcccatcggccagtgcctgtgccaggccggctacgagaaggtggaggacgcctgccaggcctgcagccccggcttcttcaagttcgaggccagcgagagcccctgcctggagtgccccgagcacaccctgcccagccccgagggcgccaccagctgcgagtgcgaggagggcttcttcagagccccccaggaccccgccagcatgccctgcaccagaccccccagcgccccccactacctgaccgccgtgggcatgggcgccaaggtggagctgagatggacccccccccaggacagcggcggcagagaggacatcgtgtacagcgtgacctgcgagcagtgctggcccgagagcggcgagtgcggcccctgcgaggccagcgtgagatacagcgagcccccccacggcctgaccagaaccagcgtgaccgtgagcgacctggagccccacatgaactacaccttcaccgtggaggccagaaacggcgtgagcggcctggtgaccagcagaagcttcagaaccgccagcgtgagcatcaaccagaccgagccccccaaggtgagactggagggcagaagcaccaccagcctgagcgtgagctggagcatcccccccccccagcagagcagagtgtggaagtacgaggtgacctacagaaagaagggcgacagcaacagctacaacgtgagaagaaccgagggcttcagcgtgaccctggacgacctggcccccgacaccacctacctggtgcaggtgcaggccctgacccaggagggccagggcgccggcagcaaggtgcacgagttccagaccctgagccccgagggcagcggcaacctggccgtgatcggcggcgtggccgtgggcgtggtgctgctgctggtgctggccggcgtgggcttcttcatccacagaagaagaaagaaccagagagccagacagagccccgaggacgtgtacttcagcaagagcgagcagctgaagcccctgaagacctacgtggacccccacacctacgaggaccccaaccaggccgtgctgaagttcaccaccgagatccaccccagctgcgtgaccagacagaaggtgatcggcgccggcgagttcggcgaggtgtacaagggcatgctgaagaccagcagcggcaagaaggaggtgcccgtggccatcaagaccctgaaggccggctacaccgagaagcagagagtggacttcctgggcgaggccggcatcatgggccagttcagccaccacaacatcatcagactggagggcgtgatcagcaagtacaagcccatgatgatcatcaccgagtacatggagaacggcgccctggacaagttcctgagagagaaggacggcgagttcagcgtgctgcagctggtgggcatgctgagaggcatcgccgccggcatgaagtacctggccaacatgaactacgtgcacagagacctggccgccagaaacatcctggtgaacagcaacctggtgtgcaaggtgagcgacttcggcctgagcagagtgctggaggacgaccccgaggccacctacaccaccagcggcggcaagatccccatcagatggaccgcccccgaggccatcagctacagaaagttcaccagcgccagcgacgtgtggagcttcggcatcgtgatgtgggaggtgatgacctacggcgagagaccctactgggagctgagcaaccacgaggtgatgaaggccatcaacgacggcttcagactgcccacccccatggactgccccagcgccatctaccagctgatgatgcagtgctggcagcaggagagagccagaagacccaagttcgccgacatcgtgagcatcctggacaagctgatcagagcccccgacagcctgaagaccctggccgacttcgaccccagagtgagcatcagactgcccagcaccagcggcagcgagggcgtgcccttcagaaccgtgagcgagtggctggagagcatcaagatgcagcagtacaccgagcacttcatggccgccggctacaccgccatcgagaaggtggtgcagatgaccaacgacgacatcaagagaatcggcgtgagactgcccggccaccagaagagaatcgcctacagcctgctgggcctgaaggaccaggtgaacaccgtgggcatccccatctga

SEQ ID NO: 2674 - RNA, 2952 nt, synthetic construct
  misc_feature 1..2952: note = AAG43576 variant
  source 1..2952: mol_type = other RNA
atggactgccagctgagcatcctgctgctgctgagctgcagcgtgctggacagcttcggcgagctgatcccccagcccagcaacgaggtgaacctgctggacagcaagaccatccagggcgagctgggctggatcagctaccccagccacggctgggaggagatcagcggcgtggacgagcactacacccccatcagaacctaccaggtgtgcaacgtgatggaccacagccagaacaactggctgagaaccaactgggtgcccagaaacagcgcccagaagatctacgtggagctgaagttcaccctgagagactgcaacagcatccccctggtgctgggcacctgcaaggagaccttcaacctgtactacatggagagcgacgacgaccacggcgtgaagttcagagagcaccagttcaccaagatcgacaccatcgccgccgacgagagcttcacccagatggacctgggcgacagaatcctgaagctgaacaccgagatcagagaggtgggccccgtgaacaagaagggcttctacctggccttccaggacgtgggcgcctgcgtggccctggtgagcgtgagagtgtacttcaagaagtgccccttcaccgtgaagaacctggccatgttccccgacaccgtgcccatggacagccagagcctggtggaggtgagaggcagctgcgtgaacaacagcaaggaggaggacccccccagaatgtactgcagcaccgagggcgagtggctggtgcccatcggcaagtgcagctgcaacgccggctacgaggagagaggcttcatgtgccaggcctgcagacccggcttctacaaggccctggacggcaacatgaagtgcgccaagtgccccccccacagcagcacccaggaggacggcagcatgaactgcagatgcgagaacaactacttcagagccgacaaggacccccccagcatggcctgcaccagaccccccagcagccccagaaacgtgatcagcaacatcaacgagaccagcgtgatcctggactggagctggcccctggacaccggcggcagaaaggacgtgaccttcaacatcatctgcaagaagtgcggctggaacatcaagcagtgcgagccctgcagccccaacgtgagattcctgcccagacagttcggcctgaccaacaccaccgtgaccgtgaccgacctgctggcccacaccaactacaccttcgagatcgacgccgtgaacggcgtgagcgagctgagcagcccccccagacagttcgccgccgtgagcatcaccaccaaccaggccgcccccagccccgtgctgaccatcaagaaggacagaaccagcagaaacagcatcagcctgagctggcaggagcccgagcaccccaacggcatcatcctggactacgaggtgaagtactacgagaagcaggagcaggagaccagctacaccatcctgagagccagaggcaccaacgtgaccatcagcagcctgaagcccgacaccatctacgtgttccagatcagagccagaaccgccgccggctacggcaccaacagcagaaagttcgagttcgagaccagccccgacagcttcagcatcagcggcgagagcagccaggtggtgatgatcgccatcagcgccgccgtggccatcatcctgctgaccgtggtgatctacgtgctgatcggcagattctgcggctacaagagcaagcacggcgccgacgagaagagactgcacttcggcaacggccacctgaagctgcccggcctgagaacctacgtggacccccacacctacgaggaccccacccaggccgtgcacgagttcgccaaggagctggacgccaccaacatcagcatcgacaaggtggtgggcgccggcgagttcggcgaggtgtgcagcggcagactgaagctgcccagcaagaaggagatcagcgtggccatcaagaccctgaaggtgggctacaccgagaagcagagaagagacttcctgggcgaggccagcatcatgggccagttcgaccaccccaacatcatcagactggagggcgtggtgaccaagagcaagcccgtgatgatcgtgaccgagtacatggagaacggcagcctggacagcttcctgagaaagcacgacgcccagttcaccgtgatccagctggtgggcatgctgagaggcatcgccagcggcatgaagtacctgagcgacatgggctacgtgcacagagacctggccgccagaaacatcctgatcaacagcaacctggtgtgcaaggtgagcgacttcggcctgagcagagtgctggaggacgaccccgaggccgcctacaccaccagaggcggcaagatccccatcagatggaccagccccgaggccatcgcctacagaaagttcaccagcgccagcgacgtgtggagctacggcatcgtgctgtgggaggtgatgagctacggcgagagaccctactgggagatgagcaaccaggacgtgatcaaggccgtggacgagggctacagactgcccccccccatggactgccccgccgccctgtaccagctgatgctggactgctggcagaaggacagaaacaacagacccaagttcgagcagatcgtgagcatcctggacaagctgatcagaaaccccggcagcctgaagatcatcaccagcgccgccgccagacccagcaacctgctgctggaccagagcaacgtggacatcaccaccttcagaaccaccggcgactggctgaacggcgtgtggaccgcccactgcaaggagatcttcaccggcgtggagtacagcagctgcgacaccatcgccaagatcagcaccgacgacatgaagaaggtgggcgtgaccgtggtgggcccccagaagaagatcatcagcagcatcaaggccctggagacccagagcaagaacggccccgtgcccgtgtga

SEQ ID NO: 2675 - RNA, 2952 nt, synthetic construct
  misc_feature 1..2952: note = AAH63282 variant
  source 1..2952: mol_type = other RNA
atggactgccagctgagcatcctgctgctgctgagctgcagcgtgctggacagcttcggcgagctgatcccccagcccagcaacgaggtgaacctgctggacagcaagaccatccagggcgagctgggctggatcagctaccccagccacggctgggaggagatcagcggcgtggacgagcactacacccccatcagaacctaccaggtgtgcaacgtgatggaccacagccagaacaactggctgagaaccaactgggtgcccagaaacagcgcccagaagatctacgtggagctgaagttcaccctgagagactgcaacagcatccccctggtgctgggcacctgcaaggagaccttcaacctgtactacatggagagcgacgacgaccacggcgtgaagttcagagagcaccagttcaccaagatcgacaccatcgccgccgacgagagcttcacccagatggacctgggcgacagaatcctgaagctgaacaccgagatcagagaggtgggccccgtgaacaagaagggcttctacctggccttccaggacgtgggcgcctgcgtggccctggtgagcgtgagagtgtacttcaagaagtgccccttcaccgtgaagaacctggccatgttccccgacaccgtgcccatggacagccagagcctggtggaggtgagaggcagctgcgtgaacaacagcaaggaggaggacccccccagaatgtactgcagcaccgagggcgagtggctggtgcccatcggcaagtgcagctgcaacgccggctacgaggagagaggcttcatgtgccaggcctgcagacccggcttctacaaggccctggacggcaacatgaagtgcgccaagtgccccccccacagcagcacccaggaggacggcagcatgaactgcagatgcgagaacaactacttcagagccgacaaggacccccccagcatggcctgcaccagaccccccagcagccccagaaacgtgatcagcaacatcaacgagaccagcgtgatcctggactggagctggcccctggacaccggcggcagaaaggacgtgaccttcaacatcatctgcaagaagtgcggctggaacatcaagcagtgcgagccctgcagccccaacgtgagattcctgcccagacagttcggcctgaccaacaccaccgtgaccgtgaccgacctgctggcccacaccaactacaccttcgagatcgacgccgtgaacggcgtgagcgagctgagcagcccccccagacagttcgccgccgtgagcatcaccaccaaccaggccgcccccagccccgtgctgaccatcaagaaggacagaaccagcagaaacagcatcagcctgagctggcaggagcccgagcaccccaacggcatcatcctggactacgaggtgaagtactacgagaagcaggagcaggagaccagctacaccatcctgagagccagaggcaccaacgtgaccatcagcagcctgaagcccgacaccatctacgtgttccagatcagagccagaaccgccgccggctacggcaccaacagcagaaagttcgagttcgagaccagccccgacagcttcagcatcagcggcgagagcagccaggtggtgatgatcgccatcagcgccgccgtggccatcatcctgctgaccgtggtgatctacgtgctgatcggcagattctgcggctacaagagcaagcacggcgccgacgagaagagactgcacttcggcaacggccacctgaagctgcccggcctgagaacctacgtggacccccacacctacgaggaccccacccagaccgtgcacgagttcgccaaggagctggacgccaccaacatcagcatcgacaaggtggtgggcgccggcgagttcggcgaggtgtgcagcggcagactgaagctgcccagcaagaaggagatcagcgtggccatcaagaccctgaaggtgggctacaccgagaagcagagaagagacttcctgggcgaggccagcatcatgggccagttcgaccaccccaacatcatcagactggagggcgtggtgaccaagagcaagcccgtgatgatcgtgaccgagtacatggagaacggcagcctggacagcttcctgagaaagcacgacgcccagttcaccgtgatccagctggtgggcatgctgagaggcatcgccagcggcatgaagtacctgagcgacatgggctacgtgcacagagacctggccgccagaaacatcctgatcaacagcaacctggtgtgcaaggtgagcgacttcggcctgagcagagtgctggaggacgaccccgaggccgcctacaccaccagaggcggcaagatccccatcagatggaccagccccgaggccatcgcctacagaaagttcaccagcgccagcgacgtgtggagctacggcatcgtgctgtgggaggtgatgagctacggcgagagaccctactgggagatgagcaaccaggacgtgatcaaggccgtggacgagggctacagactgcccccccccatggactgccccgccgccctgtaccagctgatgctggactgctggcagaaggacagaaacaacagacccaagttcgagcagatcgtgagcatcctggacaagctgatcagaaaccccggcagcctgaagatcatcaccagcgccgccgccagacccagcaacctgctgctggaccagagcaacgtggacatcaccaccttcagaaccaccggcgactggctgaacggcgtgtggaccgcccactgcaaggagatcttcaccggcgtggagtacagcagctgcgacaccatcgccaagatcagcaccgacgacatgaagaaggtgggcgtgaccgtggtgggcccccagaagaagatcatcagcagcatcaaggccctggagacccagagcaagaacggccccgtgcccgtgtga

SEQ ID NO: 2676 - RNA, 1389 nt, synthetic construct
  misc_feature 1..1389: note = BAG54127 variant
  source 1..1389: mol_type = other RNA
atgcccatgagcaccatcctgcccgtgaccagcccctgcctgcccgccaccggcgtgaccgtgtgggagctgatgaccttcggcgccgagccctacgccggcctgagactggccgaggtgcccgacctgctggagaagggcgagagactggcccagccccagatctgcaccatcgacgtgtacatggtgatggtgaagtgctggatgatcgacgagaacatcagacccaccttcaaggagctggccaacgagttcaccagaatggccagagacccccccagatacctggtgatcaagagagagagcggccccggcatcgcccccggccccgagccccacggcctgaccaacaagaagctggaggaggtggagctggagcccgagctggacctggacctggacctggaggccgaggaggacaacctggccaccaccaccctgggcagcgccctgagcctgcccgtgggcaccctgaacagacccagaggcagccagagcctgctgagccccagcagcggctacatgcccatgaaccagggcaacctgggcgagagctgccaggagagcgccgtgagcggcagcagcgagagatgccccagacccgtgagcctgcaccccatgcccagaggctgcctggccagcgagagcagcgagggccacgtgaccggcagcgaggccgagctgcaggagaaggtgagcatgtgcagaagcagaagcagaagcagaagccccagacccagaggcgacagcgcctaccacagccagagacacagcctgctgacccccgtgacccccctgagcccccccggcctggaggaggaggacgtgaacggctacgtgatgcccgacacccacctgaagggcacccccagcagcagagagggcaccctgagcagcgtgggcctgagcagcgtgctgggcaccgaggaggaggacgaggacgaggagtacgagtacatgaacagaagaagaagacacagccccccccacccccccagacccagcagcctggaggagctgggctacgagtacatggacgtgggcagcgacctgagcgccagcctgggcagcacccagagctgccccctgcaccccgtgcccatcatgcccaccgccggcaccacccccgacgaggactacgagtacatgaacagacagagagacggcggcggccccggcggcgactacgccgccatgggcgcctgccccgccagcgagcagggctacgaggagatgagagccttccagggccccggccaccaggccccccacgtgcactacgccagactgaagaccctgagaagcctggaggccaccgacagcgccttcgacaaccccgactactggcacagcagactgttccccaaggccaacgcccagagaacctga

SEQ ID NO: 2677 - RNA, 2766 nt, synthetic construct
  misc_feature 1..2766: note = BAG57868 variant
  source 1..2766: mol_type = other RNA
atgagagccaacgacgccctgcaggtgctgggcctgctgttcagcctggccagaggcagcgaggtgggcaacagccaggccgtgtgccccggcaccctgaacggcctgagcgtgaccggcgacgccgagaaccagtaccagaccctgtacaagctgtacgagagatgcgaggtggtgatgggcaacctggagatcgtgctgaccggccacaacgccgacctgagcttcctgcagtggatcagagaggtgaccggctacgtgctggtggccatgaacgagttcagcaccctgcccctgcccaacctgagagtggtgagaggcacccaggtgtacgacggcaagttcgccatcttcgtgatgctgaactacaacaccaacagcagccacgccctgagacagctgagactgacccagctgaccgagatcctgagcggcggcgtgtacatcgagaagaacgacaagctgtgccacatggacaccatcgactggagagacatcgtgagagacagagacgccgagatcgtggtgaaggacaacggcagaagctgccccccctgccacgaggtgtgcaagggcagatgctggggccccggcagcgaggactgccagaccctgaccaagaccatctgcgccccccagtgcaacggccactgcttcggccccaaccccaaccagtgctgccacgacgagtgcgccggcggctgcagcggcccccaggacaccgactgcttcgcctgcagacacttcaacgacagcggcgcctgcgtgcccagatgcccccagcccctggtgtacaacaagctgaccttccagctggagcccaacccccacaccaagtaccagtacggcggcgtgtgcgtggccagctgcccccacaacttcgtggtggaccagaccagctgcgtgagagcctgcccccccgacaagatggaggtggacaagaacggcctgaagatgtgcgagccctgcggcggcctgtgccccaaggcctgcgagggcaccggcagcggcagcagattccagaccgtggacagcagcaacatcgacggcttcgtgaactgcaccaagatcctgggcaacctggacttcctgatcaccggcctgaacggcgacccctggcacaagatccccgccctggaccccgagaagctgaacgtgttcagaaccgtgagagagatcaccggctacctgaacatccagagctggcccccccacatgcacaacttcagcgtgttcagcaacctgaccaccatcggcggcagaagcctgtacaacagaggcttcagcctgctgatcatgaagaacctgaacgtgaccagcctgggcttcagaagcctgaaggagatcagcgccggcagaatctacatcagcgccaacagacagctgtgctaccaccacagcctgaactggaccaaggtgctgagaggccccaccgaggagagactggacatcaagcacaacagacccagaagagactgcgtggccgagggcaaggtgtgcgaccccctgtgcagcagcggcggctgctggggccccggccccggccagtgcctgagctgcagaaactacagcagaggcggcgtgtgcgtgacccactgcaacttcctgaacggcgagcccagagagttcgcccacgaggccgagtgcttcagctgccaccccgagtgccagcccatggagggcaccgccacctgcaacggcagcggcagcgacacctgcgcccagtgcgcccacttcagagacggcccccactgcgtgagcagctgcccccacggcgtgctgggcgccaagggccccatctacaagtaccccgacgtgcagaacgagtgcagaccctgccacgagaactgcacccagggctgcaagggccccgagctgcaggactgcctgggccagaccctggtgctgatcggcaagacccacctgaccatggccctgaccgtgatcgccggcctggtggtgatcttcatgatgctgggcggcaccttcctgtactggagaggcagaagaatccagaacaagagagccatgagaagatacctggagagaggcgagagcatcgagcccctggaccccagcgagaaggccaacaaggtgctggccagaatcttcaaggagaccgagctgagaaagctgaaggtgctgggcagcggcgtgttcggcaccgtgcacaagggcgtgtggatccccgagggcgagagcatcaagatccccgtgtgcatcaaggtgatcgaggacaagagcggcagacagagcttccaggccgtgaccgaccacatgctggccatcggcagcctggaccacgcccacatcgtgagactgctgggcctgtgccccggcagcagcctgcagctggtgacccagtacctgcccctgggcagcctgctggaccacgtgagacagcacagaggcgccctgggcccccagctgctgctgaactggggcgtgcagatcgccaagggcatgtactacctggaggagcacggcatggtgcacagaaacctggccgccagaaacgtgctgctgaagagccccagccaggtgcaggtggccgacttcggcgtggccgacctgctgccccccgacgacaagcagctgctgtacagcgaggccaagacccccatcaagtggatggccctggagagcatccacttcggcaagtacacccaccagagcgacgtgtggagctacggccagtgcatctggatgcccagcctgcccagcctggcccccgtgagcaacctgcccttcgagacccccagctga

SEQ ID NO: 2678 - RNA, 3927 nt, synthetic construct
  misc_feature 1..3927: note = AAB59446 variant
  source 1..3927: mol_type = other RNA
atgaagcccgccaccggcctgtgggtgtgggtgagcctgctggtggccgccggcaccgtgcagcccagcgacagccagagcgtgtgcgccggcaccgagaacaagctgagcagcctgagcgacctggagcagcagtacagagccctgagaaagtactacgagaactgcgaggtggtgatgggcaacctggagatcaccagcatcgagcacaacagagacctgagcttcctgagaagcgtgagagaggtgaccggctacgtgctggtggccctgaaccagttcagatacctgcccctggagaacctgagaatcatcagaggcaccaagctgtacgaggacagatacgccctggccatcttcctgaactacagaaaggacggcaacttcggcctgcaggagctgggcctgaagaacctgaccgagatcctgaacggcggcgtgtacgtggaccagaacaagttcctgtgctacgccgacaccatccactggcaggacatcgtgagaaacccctggcccagcaacctgaccctggtgagcaccaacggcagcagcggctgcggcagatgccacaagagctgcaccggcagatgctggggccccaccgagaaccactgccagaccctgaccagaaccgtgtgcgccgagcagtgcgacggcagatgctacggcccctacgtgagcgactgctgccacagagagtgcgccggcggctgcagcggccccaaggacaccgactgcttcgcctgcatgaacttcaacgacagcggcgcctgcgtgacccagtgcccccagaccttcgtgtacaaccccaccaccttccagctggagcacaacttcaacgccaagtacacctacggcgccttctgcgtgaagaagtgcccccacaacttcgtggtggacagcagcagctgcgtgagagcctgccccagcagcaagatggaggtggaggagaacggcatcaagatgtgcaagccctgcaccgacatctgccccaaggcctgcgacggcatcggcaccggcagcctgatgagcgcccagaccgtggacagcagcaacatcgacaagttcatcaactgcaccaagatcaacggcaacctgatcttcctggtgaccggcatccacggcgacccctacaacgccatcgaggccatcgaccccgagaagctgaacgtgttcagaaccgtgagagagatcaccggcttcctgaacatccagagctggccccccaacatgaccgacttcagcgtgttcagcaacctggtgaccatcggcggcagagtgctgtacagcggcctgagcctgctgatcctgaagcagcagggcatcaccagcctgcagttccagagcctgaaggagatcagcgccggcaacatctacatcaccgacaacagcaacctgtgctactaccacaccatcaactggaccaccctgttcagcaccatcaaccagagaatcgtgatcagagacaacagaaaggccgagaactgcaccgccgagggcatggtgtgcaaccacctgtgcagcagcgacggctgctggggccccggccccgaccagtgcctgagctgcagaagattcagcagaggcagaatctgcatcgagagctgcaacctgtacgacggcgagttcagagagttcgagaacggcagcatctgcgtggagtgcgacccccagtgcgagaagatggaggacggcctgctgacctgccacggccccggccccgacaactgcaccaagtgcagccacttcaaggacggccccaactgcgtggagaagtgccccgacggcctgcagggcgccaacagcttcatcttcaagtacgccgaccccgacagagagtgccacccctgccaccccaactgcacccagggctgcaacggccccaccagccacgactgcatctactacccctggaccggccacagcaccctgccccagcacgccagaacccccctgatcgccgccggcgtgatcggcggcctgttcatcctggtgatcgtgggcctgaccttcgccgtgtacgtgagaagaaagagcatcaagaagaagagagccctgagaagattcctggagaccgagctggtggagcccctgacccccagcggcaccgcccccaaccaggcccagctgagaatcctgaaggagaccgagctgaagagagtgaaggtgctgggcagcggcgccttcggcaccgtgtacaagggcatctgggtgcccgagggcgagaccgtgaagatccccgtggccatcaagatcctgaacgagaccaccggccccaaggccaacgtggagttcatggacgaggccctgatcatggccagcatggaccacccccacctggtgagactgctgggcgtgtgcctgagccccaccatccagctggtgacccagctgatgccccacggctgcctgctggagtacgtgcacgagcacaaggacaacatcggcagccagctgctgctgaactggtgcgtgcagatcgccaagggcatgatgtacctggaggagagaagactggtgcacagagacctggccgccagaaacgtgctggtgaagagccccaaccacgtgaagatcaccgacttcggcctggccagactgctggagggcgacgagaaggagtacaacgccgacggcggcaagatgcccatcaagtggatggccctggagtgcatccactacagaaagttcacccaccagagcgacgtgtggagctacggcgtgaccatctgggagctgatgaccttcggcggcaagccctacgacggcatccccaccagagagatccccgacctgctggagaagggcgagagactgccccagccccccatctgcaccatcgacgtgtacatggtgatggtgaagtgctggatgatcgacgccgacagcagacccaagttcaaggagctggccgccgagttcagcagaatggccagagacccccagagatacctggtgatccagggcgacgacagaatgaagctgcccagccccaacgacagcaagttcttccagaacctgctggacgaggaggacctggaggacatgatggacgccgaggagtacctggtgccccaggccttcaacatccccccccccatctacaccagcagagccagaatcgacagcaacagaagcgagatcggccacagccccccccccgcctacacccccatgagcggcaaccagttcgtgtacagagacggcggcttcgccgccgagcagggcgtgagcgtgccctacagagcccccaccagcaccatccccgaggcccccgtggcccagggcgccaccgccgagatcttcgacgacagctgctgcaacggcaccctgagaaagcccgtggccccccacgtgcaggaggacagcagcacccagagatacagcgccgaccccaccgtgttcgcccccgagagaagccccagaggcgagctggacgaggagggctacatgacccccatgagagacaagcccaagcaggagtacctgaaccccgtggaggagaaccccttcgtgagcagaagaaagaacggcgacctgcaggccctggacaaccccgagtaccacaacgccagcaacggcccccccaaggccgaggacgagtacgtgaacgagcccctgtacctgaacaccttcgccaacaccctgggcaaggccgagtacctgaagaacaacatcctgagcatgcccgagaaggccaagaaggccttcgacaaccccgactactggaaccacagcctgccccccagaagcaccctgcagcaccccgactacctgcaggagtacagcaccaagtacttctacaagcagaacggcagaatcagacccatcgtggccgagaaccccgagtacctgagcgagttcagcctgaagcccggcaccgtgctgcccccccccccctacagacacagaaacaccgtggtgtga

SEQ ID NO: 2679 - RNA, 1461 nt, synthetic construct
  misc_feature 1..1461: note = CCDS46648.1 variant
  source 1..1461: mol_type = other RNA
atgatccagaccgtgcccgaccccgccgcccacatcaaggaggccctgagcgtggtgagcgaggaccagagcctgttcgagtgcgcctacggcaccccccacctggccaagaccgagatgaccgccagcagcagcagcgactacggccagaccagcaagatgagccccagagtgccccagcaggactggctgagccagccccccgccagagtgaccatcaagatggagtgcaaccccagccaggtgaacggcagcagaaacagccccgacgagtgcagcgtggccaagggcggcaagatggtgggcagccccgacaccgtgggcatgaactacggcagctacatggaggagaagcacatgcccccccccaacatgaccaccaacgagagaagagtgatcgtgcccgccgaccccaccctgtggagcaccgaccacgtgagacagtggctggagtgggccgtgaaggagtacggcctgcccgacgtgaacatcctgctgttccagaacatcgacggcaaggagctgtgcaagatgaccaaggacgacttccagagactgacccccagctacaacgccgacatcctgctgagccacctgcactacctgagagagacccccctgccccacctgaccagcgacgacgtggacaaggccctgcagaacagccccagactgatgcacgccagaaacaccggcggcgccgccttcatcttccccaacaccagcgtgtaccccgaggccacccagagaatcaccaccagacccgacctgccctacgagccccccagaagaagcgcctggaccggccacggccaccccaccccccagagcaaggccgcccagcccagccccagcaccgtgcccaagaccgaggaccagagaccccagctggacccctaccagatcctgggccccaccagcagcagactggccaaccccggcagcggccagatccagctgtggcagttcctgctggagctgctgagcgacagcagcaacagcagctgcatcacctgggagggcaccaacggcgagttcaagatgaccgaccccgacgaggtggccagaagatggggcgagagaaagagcaagcccaacatgaactacgacaagctgagcagagccctgagatactactacgacaagaacatcatgaccaaggtgcacggcaagagatacgcctacaagttcgacttccacggcatcgcccaggccctgcagccccacccccccgagagcagcctgtacaagtaccccagcgacctgccctacatgggcagctaccacgcccacccccagaagatgaacttcgtggccccccacccccccgccctgcccgtgaccagcagcagcttcttcgccgcccccaacccctactggaacagccccaccggcggcatctaccccaacaccagactgcccaccagccacatgcccagccacctgggcacctactactga

SEQ ID NO: 2680 - RNA, 1359 nt, synthetic construct
  misc_feature 1..1359: note = AAA19786 variant
  source 1..1359: mol_type = other RNA
atgagcgagacccccgcccagtgcagcatcaagcaggagagaatcagctacaccccccccgagagccccgtgcccagctacgccagcagcacccccctgcacgtgcccgtgcccagagccctgagaatggaggaggacagcatcagactgcccgcccacctgagactgcagcccatctactggagcagagacgacgtggcccagtggctgaagtgggccgagaacgagttcagcctgagacccatcgacagcaacaccttcgagatgaacggcaaggccctgctgctgctgaccaaggaggacttcagatacagaagcccccacagcggcgacgtgctgtacgagctgctgcagcacatcctgaagcagagaaagcccagaatcctgttcagccccttcttccaccccggcaacagcatccacacccagcccgaggtgatcctgcaccagaaccacgaggaggacaactgcgtgcagagaacccccagacccagcgtggacaacgtgcaccacaacccccccaccatcgagctgctgcacagaagcagaagccccatcaccaccaaccacagacccagccccgaccccgagcagagacccctgagaagccccctggacaacatgatcagaagactgagccccgccgagagagcccagggccccagaccccaccaggagaacaaccaccaggagagctaccccctgagcgtgagccccatggagaacaaccactgccccgccagcagcgagagccaccccaagcccagcagccccagacaggagagcaccagagtgatccagctgatgcccagccccatcatgcaccccctgatcctgaaccccagacacagcgtggacttcaagcagagcagactgagcgaggacggcctgcacagagagggcaagcccatcaacctgagccacagagaggacctggcctacatgaaccacatcatggtgagcgtgagcccccccgaggagcacgccatgcccatcggcagaatcgccgactgcagactgctgtgggactacgtgtaccagctgctgagcgacagcagatacgagaacttcatcagatgggaggacaaggagagcaagatcttcagaatcgtggaccccaacggcctggccagactgtggggcaaccacaagaacagaaccaacatgacctacgagaagatgagcagagccctgagacactactacaagctgaacatcatcagaaaggagcccggccagagactgctgttcagattcatgaagacccccgacgagatcatgagcggcagaaccgacagactggagcacctggagagccaggagctggacgagcagatctaccaggaggacgagtgctga

SEQ ID NO: 2681 - RNA, 1971 nt, synthetic construct
  misc_feature 1..1971: note = AAH04817 variant
  source 1..1971: mol_type = other RNA
atggccagcaccgactacagcacctacagccaggccgccgcccagcagggctacagcgcctacaccgcccagcccacccagggctacgcccagaccacccaggcctacggccagcagagctacggcacctacggccagcccaccgacgtgagctacacccaggcccagaccaccgccacctacggccagaccgcctacgccaccagctacggccagccccccaccggctacaccacccccaccgccccccaggcctacagccagcccgtgcagggctacggcaccggcgcctacgacaccaccaccgccaccgtgaccaccacccaggccagctacgccgcccagagcgcctacggcacccagcccgcctaccccgcctacggccagcagcccgccgccaccgcccccaccagaccccaggacggcaacaagcccaccgagaccagccagccccagagcagcaccggcggctacaaccagcccagcctgggctacggccagagcaactacagctacccccaggtgcccggcagctaccccatgcagcccgtgaccgccccccccagctacccccccaccagctacagcagcacccagcccaccagctacgaccagagcagctacagccagcagaacacctacggccagcccagcagctacggccagcagagcagctacggccagcagagcagctacggccagcagccccccaccagctaccccccccagaccggcagctacagccaggcccccagccagtacagccagcagagcagcagctacggccagcagagcagcttcagacaggaccaccccagcagcatgggcgtgtacggccaggagagcggcggcttcagcggccccggcgagaacagaagcatgagcggccccgacaacagaggcagaggcagaggcggcttcgacagaggcggcatgagcagaggcggcagaggcggcggcagaggcggcatgggcagcgccggcgagagaggcggcttcaacaagcccggcggccccatggacgagggccccgacctggacctgggcccccccgtggaccccgacgaggacagcgacaacagcgccatctacgtgcagggcctgaacgacagcgtgaccctggacgacctggccgacttcttcaagcagtgcggcgtggtgaagatgaacaagagaaccggccagcccatgatccacatctacctggacaaggagaccggcaagcccaagggcgacgccaccgtgagctacgaggacccccccaccgccaaggccgccgtggagtggttcgacggcaaggacttccagggcagcaagctgaaggtgagcctggccagaaagaagccccccatgaacagcatgagaggcggcctgccccccagagagggcagaggcatgcccccccccctgagaggcggccccggcggccccggcggccccggcggccccatgggcagaatgggcggcagaggcggcgacagaggcggcttcccccccagaggccccagaggcagcagaggcaaccccagcggcggcggcaacgtgcagcacagagccggcgactggcagtgccccaaccccggctgcggcaaccagaacttcgcctggagaaccgagtgcaaccagtgcaaggcccccaagcccgagggcttcctgcccccccccttccccccccccggcggcgacagaggcagaggcggccccggcggcatgagaggcggcagaggcggcctgatggacagaggcggccccggcggcatgttcagaggcggcagaggcggcgacagaggcggcttcagaggcggcagaggcatggacagaggcggcttcggcggcggcagaagaggcggccccggcggcccccccggccccctgatggagcagatgggcggcagaagaggcggcagaggcggccccggcaagatggacaagggcgagcacagacaggagagaagagacagaccctactga

SEQ ID NO: 2682 - RNA, 1998 nt, synthetic construct
  misc_feature 1..1998: note = AEA07595 variant
  source 1..1998: mol_type = other RNA
atgggccagaccggcaagaagagcgagaagggccccgtgtgctggagaaagagagtgaagagcgagtacatgagactgagacagctgaagagattcagaagagccgacgaggtgaagagcatgttcagcagcaacagacagaagatcctggagagaaccgagatcctgaaccaggagtggaagcagagaagaatccagcccgtgcacatcctgaccagcgtgagcagcctgagaggcaccagagaggtggaggacgagaccgtgctgcacaacatcccctacatgggcgacgaggtgctggaccaggacggcaccttcatcgaggagctgatcaagaactacgacggcaaggtgcacggcgacagagagtgcggcttcatcaacgacgagatcttcgtggagctggtgaacgccctgggccagtacaacgacgacgacgacgacgacgacggcgacgaccccgaggagagagaggagaagcagaaggacctggaggaccacagagacgacaaggagagcagaccccccagaaagttccccagcgacaagatcttcgaggccatcagcagcatgttccccgacaagggcaccgccgaggagctgaaggagaagtacaaggagctgaccgagcagcagctgcccggcgccctgccccccgagtgcacccccaacatcgacggccccaacgccaagagcgtgcagagagagcagagcctgcacagcttccacaccctgttctgcagaagatgcttcaagtacgactgcttcctgcaccccttccacgccacccccaacacctacaagagaaagaacaccgagaccgccctggacaacaagccctgcggcccccagtgctaccagcacctggagggcgccaaggagttcgccgccgccctgaccgccgagagaatcaagaccccccccaagagacccggcggcagaagaagaggcagactgcccaacaacagcagcagacccagcacccccaccatcaacgtgctggagagcaaggacaccgacagcgacagagaggccggcaccgagaccggcggcgagaacaacgacaaggaggaggaggagaagaaggacgagaccagcagcagcagcgaggccaacagcagatgccagacccccatcaagatgaagcccaacatcgagccccccgagaacgtggagtggagcggcgccgaggccagcatgttcagagtgctgatcggcacctactacgacaacttctgcgccatcgccagactgatcggcaccaagacctgcagacaggtgtacgagttcagagtgaaggagagcagcatcatcgcccccgcccccgccgaggacgtggacaccccccccagaaagaagaagagaaagcacagactgtgggccgcccactgcagaaagatccagctgaagaagggccagaacagattccccggctgcagatgcaaggcccagtgcaacaccaagcagtgcccctgctacctggccgtgagagagtgcgaccccgacctgtgcctgacctgcggcgccgccgaccactgggacagcaagaacgtgagctgcaagaactgcagcatccagagaggcagcaagaagcacctgctgctggcccccagcgacgtggccggctggggcatcttcatcaaggaccccgtgcagaagaacgagttcatcagcgagtactgcggcgagatcatcagccaggacgaggccgacagaagaggcaaggtgtacgacaagtacatgtgcagcttcctgttcaacctgaacaacgacttcgtggtggacgccaccagaaagggcaacaagatcagattcgccaaccacagcgtgaaccccaactgctacgccaaggtgatgatggtgaacggcgaccacagaatcggcatcttcgccaagagagccatccagaccggcgaggagctgttcttcgactacagatacagccaggccgacgccctgaagtacgtgggcatcgagagagagatggagatcccctga

SEQ ID NO: 2683 - RNA, 1005 nt, synthetic construct
  misc_feature 1..1005: note = EAW80068 variant
  source 1..1005: mol_type = other RNA
atgggccagaccggcaagaagagcgagaagggccccgtgtgctggagaaagagagtgaagagcgagtacatgagactgagacagctgaagagattcagaagagccgacgaggtgaagagcatgttcagcagcaacagacagaagatcctggagagaaccgagatcctgaaccaggagtggaagcagagaagaatccagcccgtgcacatcctgaccagcgtgagcagcctgagaggcaccagagagtgcagcgtgaccagcgacctggacttccccacccaggtgatccccctgaagaccctgaacgccgtggccagcgtgcccatcatgtacagctggagccccctgcagcagaacttcatggtggaggacgagaccgtgctgcacaacatcccctacatgggcgacgaggtgctggaccaggacggcaccttcatcgaggagctgatcaagaactacgacggcaaggtgcacggcgacagagagtgcggcttcatcaacgacgagatcttcgtggagctggtgaacgccctgggccagtacaacgacgacgacgacgacgacgacggcgacgaccccgaggagagagaggagaagcagaaggacctggaggaccacagagacgacaaggagagcagaccccccagaaagttccccagcgacaagatcttcgaggccatcagcagcatgttccccgacaagggcaccgccgaggagctgaaggagaagtacaaggagctgaccgagcagcagctgcccggcgccctgccccccgagtgcacccccaacatcgacggccccaacgccaagagcgtgcagagagagcagagcctgcacagcttccacaccctgttctgcagaagatgcttcaagtacgactgcttcctgcaccccttccacgccacccccaacacctacaagagaaagaacaccgagaccgccctggacaacaagccctgcggcccccagtgctaccagcacctgcccctgctgcccagaaactga

SEQ ID NO: 2684 - RNA, 195 nt, synthetic construct
  misc_feature 1..195: note = CCO13726 variant
  source 1..195: mol_type = other RNA
atgcccctggtgaacatcatgatgatgaccatgatgatgatggagaccatcctgaagaaggagaagaagagcagaaagatctggagaatcaccgagatgatcaagaaggccgcccacctgggcaacttcctgctgatcaagttcctgaagcccttcccccagtgcttccagatcagagcccagcagaagaactga

SEQ ID NO: 2685 - RNA, 2241 nt, synthetic construct
  misc_feature 1..2241: note = AAC51520 variant
  source 1..2241: mol_type = other RNA
atgggccagaccggcaagaagagcgagaagggccccgtgtgctggagaaagagagtgaagagcgagtacatgagactgagacagctgaagagattcagaagagccgacgaggtgaagagcatgttcagcagcaacagacagaagatcctggagagaaccgagatcctgaaccaggagtggaagcagagaagaatccagcccgtgcacatcctgaccagcgtgagcagcctgagaggcaccagagagtgcagcgtgaccagcgacctggacttccccacccaggtgatccccctgaagaccctgaacgccgtggccagcgtgcccatcatgtacagctggagccccctgcagcagaacttcatggtggaggacgagaccgtgctgcacaacatcccctacatgggcgacgaggtgctggaccaggacggcaccttcatcgaggagctgatcaagaactacgacggcaaggtgcacggcgacagagagtgcggcttcatcaacgacgagatcttcgtggagctggtgaacgccctgggccagtacaacgacgacgacgacgacgacgacggcgacgaccccgaggagagagaggagaagcagaaggacctggaggaccacagagacgacaaggagagcagaccccccagaaagttccccagcgacaagatcttcgaggccatcagcagcatgttccccgacaagggcaccgccgaggagctgaaggagaagtacaaggagctgaccgagcagcagctgcccggcgccctgccccccgagtgcacccccaacatcgacggccccaacgccaagagcgtgcagagagagcagagcctgcacagcttccacaccctgttctgcagaagatgcttcaagtacgactgcttcctgcaccccttccacgccacccccaacacctacaagagaaagaacaccgagaccgccctggacaacaagccctgcggcccccagtgctaccagcacctggagggcgccaaggagttcgccgccgccctgaccgccgagagaatcaagaccccccccaagagacccggcggcagaagaagaggcagactgcccaacaacagcagcagacccagcacccccaccatcaacgtgctggagagcaaggacaccgacagcgacagagaggccggcaccgagaccggcggcgagaacaacgacaaggaggaggaggagaagaaggacgagaccagcagcagcagcgaggccaacagcagatgccagacccccatcaagatgaagcccaacatcgagccccccgagaacgtggagtggagcggcgccgaggccagcatgttcagagtgctgatcggcacctactacgacaacttctgcgccatcgccagactgatcggcaccaagacctgcagacaggtgtacgagttcagagtgaaggagagcagcatcatcgcccccgcccccgccgaggacgtggacaccccccccagaaagaagaagagaaagcacagactgtgggccgcccactgcagaaagatccagctgaagaaggacggcagcagcaaccacgtgtacaactaccagccctgcgaccaccccagacagccctgcgacagcagctgcccctgcgtgatcgcccagaacttctgcgagaagttctgccagtgcagcagcgagtgccagaacagattccccggctgcagatgcaaggcccagtgcaacaccaagcagtgcccctgctacctggccgtgagagagtgcgaccccgacctgtgcctgacctgcggcgccgccgaccactgggacagcaagaacgtgagctgcaagaactgcagcatccagagaggcagcaagaagcacctgctgctggcccccagcgacgtggccggctggggcatcttcatcaaggaccccgtgcagaagaacgagttcatcagcgagtactgcggcgagatcatcagccaggacgaggccgacagaagaggcaaggtgtacgacaagtacatgtgcagcttcctgttcaacctgaacaacgacttcgtggtggacgccaccagaaagggcaacaagatcagattcgccaaccacagcgtgaaccccaactgctacgccaaggtgatgatggtgaacggcgaccacagaatcggcatcttcgccaagagagccatccagaccggcgaggagctgttcttcgactacagatacagccaggccgacgccctgaagtacgtgggcatcgagagagagatggagatcccctga

SEQ ID NO: 2686 - RNA, 2124 nt, synthetic construct
  misc_feature 1..2124: note = AEN79481 variant
  source 1..2124: mol_type = other RNA
atgggccagaccggcaagaagagcgagaagggccccgtgtgctggagaaagagagtgaagagcgagtacatgagactgagacagctgaagagattcagaagagccgacgaggtgaagagcatgttcagcagcaacagacagaagatcctggagagaaccgagatcctgaaccaggagtggaagcagagaagaatccagcccgtgcacatcctgaccagcgtgagcagcctgagaggcaccagagaggtggaggacgagaccgtgctgcacaacatcccctacatgggcgacgaggtgctggaccaggacggcaccttcatcgaggagctgatcaagaactacgacggcaaggtgcacggcgacagagagtgcggcttcatcaacgacgagatcttcgtggagctggtgaacgccctgggccagtacaacgacgacgacgacgacgacgacggcgacgaccccgaggagagagaggagaagcagaaggacctggaggaccacagagacgacaaggagagcagaccccccagaaagttccccagcgacaagatcttcgaggccatcagcagcatgttccccgacaagggcaccgccgaggagctgaaggagaagtacaaggagctgaccgagcagcagctgcccggcgccctgccccccgagtgcacccccaacatcgacggccccaacgccaagagcgtgcagagagagcagagcctgcacagcttccacaccctgttctgcagaagatgcttcaagtacgactgcttcctgcaccccttccacgccacccccaacacctacaagagaaagaacaccgagaccgccctggacaacaagccctgcggcccccagtgctaccagcacctggagggcgccaaggagttcgccgccgccctgaccgccgagagaatcaagaccccccccaagagacccggcggcagaagaagaggcagactgcccaacaacagcagcagacccagcacccccaccatcaacgtgctggagagcaaggacaccgacagcgacagagaggccggcaccgagaccggcggcgagaacaacgacaaggaggaggaggagaagaaggacgagaccagcagcagcagcgaggccaacagcagatgccagacccccatcaagatgaagcccaacatcgagccccccgagaacgtggagtggagcggcgccgaggccagcatgttcagagtgctgatcggcacctactacgacaacttctgcgccatcgccagactgatcggcaccaagacctgcagacaggtgtacgagttcagagtgaaggagagcagcatcatcgcccccgcccccgccgaggacgtggacaccccccccagaaagaagaagagaaagcacagactgtgggccgcccactgcagaaagatccagctgaagaaggacggcagcagcaaccacgtgtacaactaccagccctgcgaccaccccagacagccctgcgacagcagctgcccctgcgtgatcgcccagaacttctgcgagaagttctgccagtgcagcagcgagtgccagaacagattccccggctgcagatgcaaggcccagtgcaacaccaagcagtgcccctgctacctggccgtgagagagtgcgaccccgacctgtgcctgacctgcggcgccgccgaccactgggacagcaagaacgtgagctgcaagaactgcagcatccagagaggcagcaagaagcacctgctgctggcccccagcgacgtggccggctggggcatcttcatcaaggaccccgtgcagaagaacgagttcatcagcgagtactgcggcgagatcatcagccaggacgaggccgacagaagaggcaaggtgtacgacaagtacatgtgcagcttcctgttcaacctgaacaacgacttcgtggtggacgccaccagaaagggcaacaagatcagattcgccaaccacagcgtgaaccccaactgctacgccaaggtgatgatggtgaacggcgaccacagaatcggcatcttcgccaagagagccatccagaccggcgaggagctgttcttcgactacagatacagccaggccgacgccctgaagtacgtgggcatcgagagagagatggagatcccctga

SEQ ID NO: 2687 - RNA, 399 nt, synthetic construct
  misc_feature 1..399: note = AAB87141 variant
  source 1..399: mol_type = other RNA
atggtggaggccttctgcgccacctggaagctgaccaacagccagaacttcgacgagtacatgaaggccctgggcgtgggcttcgccaccagacaggtgggcaacgtgaccaagcccaccgtgatcatcagccaggagggcgacaaggtggtgatcagaaccctgagcaccttcaagaacaccgagatcagcttccagctgggcgaggagttcgacgagaccaccgccgacgacagaaactgcaagagcgtggtgagcctggacggcgacaagctggtgcacatccagaagtgggacggcaaggagaccaacttcgtgagagagatcaaggacggcaagatggtgatgaccctgaccttcggcgacgtggtggccgtgagacactacgagaaggcctga

SEQ ID NO: 2688 - RNA, 765 nt, synthetic construct
  misc_feature 1..765: note = CAA36870 variant
  source 1..765: mol_type = other RNA
atgtggcagctgctgctgcccaccgccctgctgctgctggtgagcgccggcatgagaaccgaggacctgcccaaggccgtggtgttcctggagccccagtggtacagagtgctggagaaggacagcgtgaccctgaagtgccagggcgcctacagccccgaggacaacagcacccagtggttccacaacgagagcctgatcagcagccaggccagcagctacttcatcgacgccgccaccgtggacgacagcggcgagtacagatgccagaccaacctgagcaccctgagcgaccccgtgcagctggaggtgcacatcggctggctgctgctgcaggcccccagatgggtgttcaaggaggaggaccccatccacctgagatgccacagctggaagaacaccgccctgcacaaggtgacctacctgcagaacggcaagggcagaaagtacttccaccacaacagcgacttctacatccccaaggccaccctgaaggacagcggcagctacttctgcagaggcctgttcggcagcaagaacgtgagcagcgagaccgtgaacatcaccatcacccagggcctggccgtgagcaccatcagcagcttcttcccccccggctaccaggtgagcttctgcctggtgatggtgctgctgttcgccgtggacaccggcctgtacttcagcgtgaagaccaacatcagaagcagcaccagagactggaaggaccacaagttcaagtggagaaaggacccccaggacaagtga

SEQ ID NO: 2689 - RNA, 873 nt, synthetic construct
  misc_feature 1..873: note = CCDS1232.1 variant
  source 1..873: mol_type = other RNA
atgggcggcggcgccggcgagagactgttcaccagcagctgcctggtgggcctggtgcccctgggcctgagaatcagcctggtgacctgccccctgcagtgcggcatcatgtggcagctgctgctgcccaccgccctgctgctgctggtgagcgccggcatgagaaccgaggacctgcccaaggccgtggtgttcctggagccccagtggtacagagtgctggagaaggacagcgtgaccctgaagtgccagggcgcctacagccccgaggacaacagcacccagtggttccacaacgagagcctgatcagcagccaggccagcagctacttcatcgacgccgccaccgtggacgacagcggcgagtacagatgccagaccaacctgagcaccctgagcgaccccgtgcagctggaggtgcacatcggctggctgctgctgcaggcccccagatgggtgttcaaggaggaggaccccatccacctgagatgccacagctggaagaacaccgccctgcacaaggtgacctacctgcagaacggcaagggcagaaagtacttccaccacaacagcgacttctacatccccaaggccaccctgaaggacagcggcagctacttctgcagaggcctgttcggcagcaagaacgtgagcagcgagaccgtgaacatcaccatcacccagggcctggccgtgagcaccatcagcagcttcttcccccccggctaccaggtgagcttctgcctggtgatggtgctgctgttcgccgtggacaccggcctgtacttcagcgtgaagaccaacatcagaagcagcaccagagactggaaggaccacaagttcaagtggagaaaggacccccaggacaagtga

SEQ ID NO: 2690 - RNA, 807 nt, synthetic construct
  misc_feature 1..807: note = AAH74858 variant
  source 1..807: mol_type = other RNA
atgagcctgagcttcctgctgctgctgttcttcagccacctgatcctgagcgcctgggcccacggcgagaagagactggcccccaagggccagcccggccccgccgccaccgacagaaaccccagaggcagcagcagcagacagagcagcagcagcgccatgagcagcagcagcgccagcagcagccccgccgccagcctgggcagccagggcagcggcctggagcagagcagcttccagtggagccccagcggcagaagaaccggcagcctgtactgcagagtgggcatcggcttccacctgcagatctaccccgacggcaaggtgaacggcagccacgaggccaacatgctgagcgtgctggagatcttcgccgtgagccagggcatcgtgggcatcagaggcgtgttcagcaacaagttcctggccatgagcaagaagggcaagctgcacgccagcgccaagttcaccgacgactgcaagttcagagagagattccaggagaacagctacaacacctacgccagcgccatccacagaaccgagaagaccggcagagagtggtacgtggccctgaacaagagaggcaaggccaagagaggctgcagccccagagtgaagccccagcacatcagcacccacttcctgcccagattcaagcagagcgagcagcccgagctgagcttcaccgtgaccgtgcccgagaagaagaagccccccagccccatcaagcccaagatccccctgagcgcccccagaaagaacaccaacagcgtgaagtacagactgaagttcagattcggctga

SEQ ID NO: 2691 - RNA, 117 nt, synthetic construct
  misc_feature 1..117: note = AAB06462 variant
  source 1..117: mol_type = other RNA
atgagcaccagatgcggcgaggccggcagagccagaggcacccagccccacagaggctacagagcccagaaccagccctacaagatgcacctgggcccccccagactggaggagtga

SEQ ID NO: 2692 - RNA, 2466 nt, synthetic construct
  misc_feature 1..2466: note = AAA59470 variant
  source 1..2466: mol_type = other RNA
atggtgagctggggcagattcatctgcctggtggtggtgaccatggccaccctgagcctggccagacccagcttcagcctggtggaggacaccaccctggagcccgaggagccccccaccaagtaccagatcagccagcccgaggtgtacgtggccgcccccggcgagagcctggaggtgagatgcctgctgaaggacgccgccgtgatcagctggaccaaggacggcgtgcacctgggccccaacaacagaaccgtgctgatcggcgagtacctgcagatcaagggcgccacccccagagacagcggcctgtacgcctgcaccgccagcagaaccgtggacagcgagacctggtacttcatggtgaacgtgaccgacgccatcagcagcggcgacgacgaggacgacaccgacggcgccgaggacttcgtgagcgagaacagcaacaacaagagagccccctactggaccaacaccgagaagatggagaagagactgcacgccgtgcccgccgccaacaccgtgaagttcagatgccccgccggcggcaaccccatgcccaccatgagatggctgaagaacggcaaggagttcaagcaggagcacagaatcggcggctacaaggtgagaaaccagcactggagcctgatcatggagagcgtggtgcccagcgacaagggcaactacacctgcgtggtggagaacgagtacggcagcatcaaccacacctaccacctggacgtggtggagagaagcccccacagacccatcctgcaggccggcctgcccgccaacgccagcaccgtggtgggcggcgacgtggagttcgtgtgcaaggtgtacagcgacgcccagccccacatccagtggatcaagcacgtggagaagaacggcagcaagtacggccccgacggcctgccctacctgaaggtgctgaaggccgccggcgtgaacaccaccgacaaggagatcgaggtgctgtacatcagaaacgtgaccttcgaggacgccggcgagtacacctgcctggccggcaacagcatcggcatcagcttccacagcgcctggctgaccgtgctgcccgcccccggcagagagaaggagatcaccgccagccccgactacctggagatcgccatctactgcatcggcgtgttcctgatcgcctgcatggtggtgaccgtgatcctgtgcagaatgaagaacaccaccaagaagcccgacttcagcagccagcccgccgtgcacaagctgaccaagagaatccccctgagaagacaggtgaccgtgagcgccgagagcagcagcagcatgaacagcaacacccccctggtgagaatcaccaccagactgagcagcaccgccgacacccccatgctggccggcgtgagcgagtacgagctgcccgaggaccccaagtgggagttccccagagacaagctgaccctgggcaagcccctgggcgagggctgcttcggccaggtggtgatggccgaggccgtgggcatcgacaaggacaagcccaaggaggccgtgaccgtggccgtgaagatgctgaaggacgacgccaccgagaaggacctgagcgacctggtgagcgagatggagatgatgaagatgatcggcaagcacaagaacatcatcaacctgctgggcgcctgcacccaggacggccccctgtacgtgatcgtggagtacgccagcaagggcaacctgagagagtacctgagagccagaagaccccccggcatggagtacagctacgacatcaacagagtgcccgaggagcagatgaccttcaaggacctggtgagctgcacctaccagctggccagaggcatggagtacctggccagccagaagtgcatccacagagacctggccgccagaaacgtgctggtgaccgagaacaacgtgatgaagatcgccgacttcggcctggccagagacatcaacaacatcgactactacaagaagaccaccaacggcagactgcccgtgaagtggatggcccccgaggccctgttcgacagagtgtacacccaccagagcgacgtgtggagcttcggcgtgctgatgtgggagatcttcaccctgggcggcagcccctaccccggcatccccgtggaggagctgttcaagctgctgaaggagggccacagaatggacaagcccgccaactgcaccaacgagctgtacatgatgatgagagactgctggcacgccgtgcccagccagagacccaccttcaagcagctggtggaggacctggacagaatcctgaccctgaccaccaacgaggagtacctggacctgagccagcccctggagcagtacagccccagctaccccgacaccagaagcagctgcagcagcggcgacgacagcgtgttcagccccgaccccatgccctacgagccctgcctgccccagtacccccacatcaacggcagcgtgaagacctga

SEQ ID NO: 2693 - RNA, 1908 nt, synthetic construct
  misc_feature 1..1908: note = EAW74574 variant
  source 1..1908: mol_type = other RNA
atggccccccccctgctgctgctgctgctggccagcggcgccgccgcctgccccctgccctgcgtgtgccagaacctgagcgagagcctgagcaccctgtgcgcccacagaggcctgctgttcgtgccccccaacgtggacagaagaaccgtggagctgagactggccgacaacttcatccaggccctgggcccccccgacttcagaaacatgaccggcctggtggacctgaccctgagcagaaacgccatcaccagaatcggcgccagagccttcggcgacctggagagcctgagaagcctgcacctggacggcaacagactggtggagctgggcaccggcagcctgagaggccccgtgaacctgcagcacctgatcctgagcggcaaccagctgggcagaatcgcccccggcgccttcgacgacttcctggagagcctggaggacctggacctgagctacaacaacctgagacaggtgccctgggccggcatcggcgccatgcccgccctgcacaccctgaacctggaccacaacctgatcgacgccctgccccccggcgccttcgcccagctgggccagctgagcagactggacctgaccagcaacagactggccaccctggcccccgaccccctgttcagcagaggcagagacgccgaggccagccccgcccccctggtgctgagcttcagcggcaaccccctgcactgcaactgcgagctgctgtggctgagaagactggccagacccgacgacctggagacctgcgccagcccccccggcctggccggcagatacttctgggccgtgcccgagggcgagttcagctgcgagccccccctgatcgccagacacacccagagactgtgggtgctggagggccagagagccaccctgagatgcagagccctgggcgaccccgcccccaccatgcactgggtgggccccgacgacagactggtgggcaacagcagcagagccagagccttccccaacggcaccctggagatcggcgtgaccggcgccggcgacgccggcggctacacctgcatcgccaccaaccccgccggcgaggccaccgccagagtggagctgagagtgctggccctgccccacggcggcaacagcagcgccgagggcggcagacccggccccagcgacatcgccgccagcgccagaaccgccgccgagggcgagggcaccctggagagcgagcccgccgtgcaggtgaccgaggtgaccgccaccagcggcctggtgagctggggccccggcagacccgccgaccccgtgtggatgttccagatccagtacaacagcagcgaggacgagaccctgatctacagaatcgtgcccgccagcagccaccacttcctgctgaagcacctggtgcccggcgccgactacgacctgtgcctgctggccctgagccccgccgccggccccagcgacctgaccgccaccagactgctgggctgcgcccacttcagcaccctgcccgccagccccctgtgccacgccctgcaggcccacgtgctgggcggcaccctgaccgtggccgtgggcggcgtgctggtggccgccctgctggtgttcaccgtggccctgctggtgagaggcagaggcgccggcaacggcagactgcccctgaagctgagccacgtgcagagccagaccaacggcggccccagccccacccccaaggcccacccccccagaagccccccccccagaccccagagaagctgcagcctggacctgggcgacgccggctgctacggctacgccagaagactgggcggcgcctgggccagaagaagccacagcgtgcacggcggcctgctgggcgccggctgcagaggcgtgggcggcagcgccgagagactggaggagagcgtggtgtga

SEQ ID NO: 2694 - RNA, 3297 nt, synthetic construct
  misc_feature 1..3297: note = EAW96782 variant
  source 1..3297: mol_type = other RNA
atgccccccagacagccccccagacaggccggcggcggcctgagcagagagttcggcaagctgctgcccgccctgagccacagccccctgggcggcctgggcagcggcagcggcagcgtggcccccggccagggcagagccggcgccatgggcagcagaacccccgagagccccctgcacgccgtgcagctgagatggggccccagaagaagaccccccctgctgcccctgctgctgctgctgctgccccccccccccagagtgggcggcttcaacctggacgccgaggcccccgccgtgctgagcggcccccccggcagcttcttcggcttcagcgtggagttctacagacccggcaccgacggcgtgagcgtgctggtgggcgcccccaaggccaacaccagccagcccggcgtgctgcagggcggcgccgtgtacctgtgcccctggggcgccagccccacccagtgcacccccatcgagttcgacagcaagggcagcagactgctggagagcagcctgagcagcagcgagggcgaggagcccgtggagtacaagagcctgcagtggttcggcgccaccgtgagagcccacggcagcagcatcctggcctgcgcccccctgtacagctggagaaccgagaaggagcccctgagcgaccccgtgggcacctgctacctgagcaccgacaacttcaccagaatcctggagtacgccccctgcagaagcgacttcagctgggccgccggccagggctactgccagggcggcttcagcgccgagttcaccaagaccggcagagtggtgctgggcggccccggcagctacttctggcagggccagatcctgagcgccacccaggagcagatcgccgagagctactaccccgagtacctgatcaacctggtgcagggccagctgcagaccagacaggccagcagcatctacgacgacagctacctgggctacagcgtggccgtgggcgagttcagcggcgacgacaccgaggacttcgtggccggcgtgcccaagggcaacctgacctacggctacgtgaccatcctgaacggcagcgacatcagaagcctgtacaacttcagcggcgagcagatggccagctacttcggctacgccgtggccgccaccgacgtgaacggcgacggcctggacgacctgctggtgggcgcccccctgctgatggacagaacccccgacggcagaccccaggaggtgggcagagtgtacgtgtacctgcagcaccccgccggcatcgagcccacccccaccctgaccctgaccggccacgacgagttcggcagattcggcagcagcctgacccccctgggcgacctggaccaggacggctacaacgacgtggccatcggcgcccccttcggcggcgagacccagcagggcgtggtgttcgtgttccccggcggccccggcggcctgggcagcaagcccagccaggtgctgcagcccctgtgggccgccagccacacccccgacttcttcggcagcgccctgagaggcggcagagacctggacggcaacggctaccccgacctgatcgtgggcagcttcggcgtggacaaggccgtggtgtacagaggcagacccatcgtgagcgccagcgccagcctgaccatcttccccgccatgttcaaccccgaggagagaagctgcagcctggagggcaaccccgtggcctgcatcaacctgagcttctgcctgaacgccagcggcaagcacgtggccgacagcatcggcttcaccgtggagctgcagctggactggcagaagcagaagggcggcgtgagaagagccctgttcctggccagcagacaggccaccctgacccagaccctgctgatccagaacggcgccagagaggactgcagagagatgaagatctacctgagaaacgagagcgagttcagagacaagctgagccccatccacatcgccctgaacttcagcctggacccccaggcccccgtggacagccacggcctgagacccgccctgcactaccagagcaagagcagaatcgaggacaaggcccagatcctgctggactgcggcgaggacaacatctgcgtgcccgacctgcagctggaggtgttcggcgagcagaaccacgtgtacctgggcgacaagaacgccctgaacctgaccttccacgcccagaacgtgggcgagggcggcgcctacgaggccgagctgagagtgaccgccccccccgaggccgagtacagcggcctggtgagacaccccggcaacttcagcagcctgagctgcgactacttcgccgtgaaccagagcagactgctggtgtgcgacctgggcaaccccatgaaggccggcgccagcctgtggggcggcctgagattcaccgtgccccacctgagagacaccaagaagaccatccagttcgacttccagatcctgagcaagaacctgaacaacagccagagcgacgtggtgagcttcagactgagcgtggaggcccaggcccaggtgaccctgaacggcgtgagcaagcccgaggccgtgctgttccccgtgagcgactggcaccccagagaccagccccagaaggaggaggacctgggccccgccgtgcaccacgtgtacgagctgatcaaccagggccccagcagcatcagccagggcgtgctggagctgagctgcccccaggccctggagggccagcagctgctgtacgtgaccagagtgaccggcctgaactgcaccaccaaccaccccatcaaccccaagggcctggagctggaccccgagggcagcctgcaccaccagcagaagagagaggcccccagcagaagcagcgccagcagcggcccccagatcctgaagtgccccgaggccgagtgcttcagactgagatgcgagctgggccccctgcaccagcaggagagccagagcctgcagctgcacttcagagtgtgggccaagaccttcctgcagagagagcaccagcccttcagcctgcagtgcgaggccgtgtacaaggccctgaagatgccctacagaatcctgcccagacagctgccccagaaggagagacaggtggccaccgccgtgcagtggaccaaggccgagggcagctacggcgtgcccctgtggatcatcatcctggccatcctgttcggcctgctgctgctgggcctgctgatctacatcctgtacaagctgggcttcttcaagagaagcctgccctacggcaccgccatggagaaggcccagctgaagccccccgccaccagcgacgcctga

SEQ ID NO: 2695 - RNA, 3597 nt, synthetic construct
  misc_feature 1..3597: note = EAX08808 variant
  source 1..3597: mol_type = other RNA
atggccgagcacccccccctgctggacaccacccagatcctgagcagcgacatcagcctgctgagcgcccccatcgtgagcgccgacggcacccagcaggtgatcctggtgcaggtgaaccccggcgaggccttcaccatcagaagagaggacggccagttccagtgcatcaccggccccgcccaggtgcccatgatgagccccaacggcagcgtgccccccatctacgtgccccccggctacgccccccaggtgatcgaggacaacggcgtgagaagagtggtggtggtgccccaggcccccgagttccaccccggcagccacaccgtgctgcacagaagcccccacccccccctgcccggcttcatccccgtgcccaccatgatgccccccccccccagacacatgtacagccccgtgaccggcgccggcgacatgaccacccagtacatgccccagtaccagagcagccaggtgtacggcgacgtggacgcccacagcacccacggcagaagcaacttcagagacgagagaagcagcaagacctacgagagactgcagaagaagctgaaggacagacagggcacccagaaggacaagatgagcagcccccccagcagcccccagaagtgccccagccccatcaacgagcacaacggcctgatcaagggccagatcgccggcggcatcaacaccggcagcgccaagatcaagagcggcaagggcaagggcggcacccaggtggacaccgagatcgaggagaaggacgaggagaccaaggccttcgaggccctgctgagcaacatcgtgaagcccgtggccagcgacatccaggccagaaccgtggtgctgacctggagcccccccagcagcctgatcaacggcgagaccgacgagagcagcgtgcccgagctgtacggctacgaggtgctgatcagcagcaccggcaaggacggcaagtacaagagcgtgtacgtgggcgaggagaccaacatcaccctgaacgacctgaagcccgccatggactaccacgccaaggtgcaggccgagtacaacagcatcaagggcacccccagcgaggccgagatcttcaccaccctgagctgcgagcccgacatccccaacccccccagaatcgccaacagaaccaagaacagcctgaccctgcagtggaaggcccccagcgacaacggcagcaagatccagaacttcgtgctggagtgggacgagggcaagggcaacggcgagttctgccagtgctacatgggcagccagaagcagttcaagatcaccaagctgagccccgccatgggctgcaagttcagactgagcgccagaaacgactacggcaccagcggcttcagcgaggaggtgctgtactacaccagcggctgcgcccccagcatgcccgccagccccgtgctgaccaaggccggcatcacctggctgagcctgcagtggagcaagcccagcggcacccccagcgacgagggcatcagctacatcctggagatggaggaggagaccagcggctacggcttcaagcccaagtacgacggcgaggacctggcctacaccgtgaagaacctgagaagaagcaccaagtacaagttcaaggtgatcgcctacaacagcgagggcaagagcaaccccagcgaggtggtggagttcaccacctgccccgacaagcccggcatccccgtgaagcccagcgtgaagggcaagatccacagccacagcttcaagatcacctgggacccccccaaggacaacggcggcgccaccatcaacaagtacgtggtggagatggccgagggcagcaacggcaacaagtgggagatgatctacagcggcgccaccagagagcacctgtgcgacagactgaaccccggctgcttctacagactgagagtgtactgcatcagcgacggcggccagagcgccgtgagcgagagcctgctggtgcagacccccgccgtgccccccggcccctgcctgccccccagactgcagggcagacccaaggccaaggagatccagctgagatggggcccccccctggtggacggcggcagccccatcagctgctacagcgtggagatgagccccatcgagaaggacgagcccagagaggtgtaccagggcagcgaggtggagtgcaccgtgagcagcctgctgcccggcaagacctacagcttcagactgagagccgccaacaagatgggcttcggccccttcagcgagaagtgcgacatcaccaccgcccccggcccccccgaccagtgcaagcccccccaggtgacctgcagaagcgccacctgcgcccaggtgaactgggaggtgcccctgagcaacggcaccgacgtgaccgagtacagactggagtggggcggcgtggagggcagcatgcagatctgctactgcggccccggcctgagctacgagatcaagggcctgagccccgccaccacctactactgcagagtgcaggccctgagcgtggtgggcgccggccccttcagcgaggtggtggcctgcgtgaccccccccagcgtgcccggcatcgtgacctgcctgcaggagatcagcgacgacgagatcgagaacccccactacagccccagcacctgcctggccatcagctgggagaagccctgcgaccacggcagcgagatcctggcctacagcatcgacttcggcgacaagcagagcctgaccgtgggcaaggtgaccagctacatcatcaacaacctgcagcccgacaccacctacagaatcagaatccaggccctgaacagcctgggcgccggccccttcagccacatgatcaagctgaagaccaagcccctgccccccgacccccccagactggagtgcgtggccttcagccaccagaacctgaagctgaagtggggcgagggcacccccaagaccctgagcaccgacagcatccagtaccacctgcagatggaggacaagaacggcagattcgtgagcctgtacagaggcccctgccacacctacaaggtgcagagactgaacgagagcaccagctacaagttctgcatccaggcctgcaacgaggccggcgagggccccctgagccaggagtacatcttcaccacccccaagagcgtgcccgccgccctgaaggcccccaagatcgagaaggtgaacgaccacatctgcgagatcacctgggagtgcctgcagcccatgaagggcgaccccgtgatctacagcctgcaggtgatgctgggcaaggacagcgagttcaagcagatctacaagggccccgacagcagcttcagatacagcagcctgcagctgaactgcgagtacagattcagagtgtgcgccatcagacagtgccaggacagcctgggccaccaggacctggtgggcccctacagcaccaccgtgctgttcatcagccagagaaccgagccccccgccagcaccaacagagacaccgtggagagcaccagaaccagaagagccctgagcgacgagcagtgcgccgccgtgatcctggtgctgttcgccttcttcagcatcctgatcgccttcatcatccagtacttcgtgatcaagtga

SEQ ID NO: 2696 - RNA, 3429 nt, synthetic construct
  misc_feature 1..3429: note = EAX08809 variant
  source 1..3429: mol_type = other RNA
atgagcggccccgcccaggtgcccatgatgagccccaacggcagcgtgccccccatctacgtgccccccggctacgccccccaggtgatcgaggacaacggcgtgagaagagtggtggtggtgccccaggcccccgagttccaccccggcagccacaccgtgctgcacagaagcccccacccccccctgcccggcttcatccccgtgcccaccatgatgccccccccccccagacacatgtacagccccgtgaccggcgccggcgacatgaccacccagtacatgccccagtaccagagcagccaggtgtacggcgacgtggacgcccacagcacccacggcagaagcaacttcagagacgagagaagcagcaagacctacgagagactgcagaagaagctgaaggacagacagggcacccagaaggacaagatgagcagcccccccagcagcccccagaagtgccccagccccatcaacgagcacaacggcctgatcaagggccagatcgccggcggcatcaacaccggcagcgccaagatcaagagcggcaagggcaagggcggcacccaggtggacaccgagatcgaggagaaggacgaggagaccaaggccttcgaggccctgctgagcaacatcgtgaagcccgtggccagcgacatccaggccagaaccgtggtgctgacctggagcccccccagcagcctgatcaacggcgagaccgacgagagcagcgtgcccgagctgtacggctacgaggtgctgatcagcagcaccggcaaggacggcaagtacaagagcgtgtacgtgggcgaggagaccaacatcaccctgaacgacctgaagcccgccatggactaccacgccaaggtgcaggccgagtacaacagcatcaagggcacccccagcgaggccgagatcttcaccaccctgagctgcgagcccgacatccccaacccccccagaatcgccaacagaaccaagaacagcctgaccctgcagtggaaggcccccagcgacaacggcagcaagatccagaacttcgtgctggagtgggacgagggcaagggcaacggcgagttctgccagtgctacatgggcagccagaagcagttcaagatcaccaagctgagccccgccatgggctgcaagttcagactgagcgccagaaacgactacggcaccagcggcttcagcgaggaggtgctgtactacaccagcggctgcgcccccagcatgcccgccagccccgtgctgaccaaggccggcatcacctggctgagcctgcagtggagcaagcccagcggcacccccagcgacgagggcatcagctacatcctggagatggaggaggagaccagcggctacggcttcaagcccaagtacgacggcgaggacctggcctacaccgtgaagaacctgagaagaagcaccaagtacaagttcaaggtgatcgcctacaacagcgagggcaagagcaaccccagcgaggtggtggagttcaccacctgccccgacaagcccggcatccccgtgaagcccagcgtgaagggcaagatccacagccacagcttcaagatcacctgggacccccccaaggacaacggcggcgccaccatcaacaagtacgtggtggagatggccgagggcagcaacggcaacaagtgggagatgatctacagcggcgccaccagagagcacctgtgcgacagactgaaccccggctgcttctacagactgagagtgtactgcatcagcgacggcggccagagcgccgtgagcgagagcctgctggtgcagacccccgccgtgccccccggcccctgcctgccccccagactgcagggcagacccaaggccaaggagatccagctgagatggggcccccccctggtggacggcggcagccccatcagctgctacagcgtggagatgagccccatcgagaaggacgagcccagagaggtgtaccagggcagcgaggtggagtgcaccgtgagcagcctgctgcccggcaagacctacagcttcagactgagagccgccaacaagatgggcttcggccccttcagcgagaagtgcgacatcaccaccgcccccggcccccccgaccagtgcaagcccccccaggtgacctgcagaagcgccacctgcgcccaggtgaactgggaggtgcccctgagcaacggcaccgacgtgaccgagtacagactggagtggggcggcgtggagggcagcatgcagatctgctactgcggccccggcctgagctacgagatcaagggcctgagccccgccaccacctactactgcagagtgcaggccctgagcgtggtgggcgccggccccttcagcgaggtggtggcctgcgtgaccccccccagcgtgcccggcatcgtgacctgcctgcaggagatcagcgacgacgagatcgagaacccccactacagccccagcacctgcctggccatcagctgggagaagccctgcgaccacggcagcgagatcctggcctacagcatcgacttcggcgacaagcagagcctgaccgtgggcaaggtgaccagctacatcatcaacaacctgcagcccgacaccacctacagaatcagaatccaggccctgaacagcctgggcgccggccccttcagccacatgatcaagctgaagaccaagcccctgccccccgacccccccagactggagtgcgtggccttcagccaccagaacctgaagctgaagtggggcgagggcacccccaagaccctgagcaccgacagcatccagtaccacctgcagatggaggacaagaacggcagattcgtgagcctgtacagaggcccctgccacacctacaaggtgcagagactgaacgagagcaccagctacaagttctgcatccaggcctgcaacgaggccggcgagggccccctgagccaggagtacatcttcaccacccccaagagcgtgcccgccgccctgaaggcccccaagatcgagaaggtgaacgaccacatctgcgagatcacctgggagtgcctgcagcccatgaagggcgaccccgtgatctacagcctgcaggtgatgctgggcaaggacagcgagttcaagcagatctacaagggccccgacagcagcttcagatacagcagcctgcagctgaactgcgagtacagattcagagtgtgcgccatcagacagtgccaggacagcctgggccaccaggacctggtgggcccctacagcaccaccgtgctgttcatcagccagagaaccgagccccccgccagcaccaacagagacaccgtggagagcaccagaaccagaagagccctgagcgacgagcagtgcgccgccgtgatcctggtgctgttcgccttcttcagcatcctgatcgccttcatcatccagtacttcgtgatcaagtga

SEQ ID NO: 2697 - RNA, 1020 nt, synthetic construct
  misc_feature 1..1020: note = EAW49214 variant
  source 1..1020: mol_type = other RNA
atgccccccagcaagccccacccccccgtggtgggcaaggtgacccaccacagcatcgagctgtactgggacctggagaagaaggccaagagacagggcccccaggagcagtggttcagattcagcatcgaggaggaggaccccaagatgcacacctacggcatcatctacaccggctacgccaccaagcacgtggtggagggcctggagcccagaaccctgtacagattcagactgaaggtgaccagccccagcggcgagtgcgagtacagccccctggtgagcgtgagcaccaccagagagcccatcagcagcgagcacctgcacagagccgtgagcgtgaacgacgaggacctgctggtgagaatcctgcagggcggcagagtgaaggtggacgtgcccaacaagttcggcttcaccgccctgatggtggccgcccagaagggctacaccagactggtgaagatcctggtgagcaacggcaccgacgtgaacctgaagaacggcagcggcaaggacagcctgatgctggcctgctacgccggccacctggacgtggtgaagtacctgagaagacacggcgccagctggcaggccagagacctgggcggctgcaccgccctgcactgggccgccgacggcggccactgcagcgtgatcgagtggatgatcaaggacggctgcgaggtggacgtggtggacaccggcagcggctggacccccctgatgagagtgagcgccgtgagcggcaaccagagagtggccagcctgctgatcgacgccggcgccaacgtgaacgtgaaggacagaaacggcaagacccccctgatggtggccgtgctgaacaaccacgaggagctggtgcagctgctgctggacaagggcgccgacgccagcgtgaagaacgagttcggcaagggcgtgctggagatggccagagtgttcgacagacagagcgtggtgagcctgctggaggagagaaagaagaagcagagacccaagaagagctgcgtgtgctga

SEQ ID NO: 2698 - RNA, 3150 nt, synthetic construct
  misc_feature 1..3150: note = BAF84259 variant
  source 1..3150: mol_type = other RNA
atgggcagcagaacccccgagagccccctgcacgccgtgcagctgagatggggccccagaagaagaccccccctgctgcccctgctgctgctgctgctgccccccccccccagagtgggcggcttcaacctggacgccgaggcccccgccgtgctgagcggcccccccggcagcttcttcggcttcagcgtggagttctacagacccggcaccgacggcgtgagcgtgctggtgggcgcccccaaggccaacaccagccagcccggcgtgctgcagggcggcgccgtgtacctgtgcccctggggcgccagccccacccagtgcacccccatcgagttcgacagcaagggcagcagactgctggagagcagcctgagcagcagcgagggcgaggagcccgtggagtacaagagcctgcagtggttcggcgccaccgtgagagcccacggcagcagcatcctggcctgcgcccccctgtacagctggagaaccgagaaggagcccctgagcgaccccgtgggcacctgctacctgagcaccgacaacttcaccagaatcctggagtacgccccctgcagaagcgacttcagctgggccgccggccagggctactgccagggcggcttcagcgccgagttcaccaagaccggcagagtggtgctgggcggccccggcagctacttctggcagggccagatcctgagcgccacccaggagcagatcgccgagagctactaccccgagtacctgatcaacctggtgcagggccagctgcagaccagacaggccagcagcatctacgacgacagctacctgggctacagcgtggccgtgggcgagttcagcggcgacgacaccgaggacttcgtggccggcgtgcccaagggcaacctgacctacggctacgtgaccatcctgaacggcagcgacatcagaagcctgtacaacttcagcggcgagcagatggccagctacttcgcctacgccgtggccgccaccgacgtgaacggcgacggcctggacgacctgctggtgggcgcccccctgctgatggacagaacccccgacggcagaccccaggaggtgggcagagtgtacgtgtacctgcagcaccccgccggcatcgagagcacccccaccctgaccctgaccggccacgacgagttcggcagattcggcagcagcctgacccccctgggcgacctggaccaggacggctacaacgacgtggccatcggcgcccccttcggcggcgagacccagcagggcgtggtgttcgtgttccccggcggccccggcggcctgggcagcaagcccagccaggtgctgcagcccctgtgggccgccagccacacccccgacttcttcggcagcgccctgagaggcggcagagacctggacggcaacggctaccccgacctgatcgtgggcagcttcggcgtggacaaggccgtggtgtacagaggcagacccatcgtgagcgccagcgccagcctgaccatcttccccgccatgttcaaccccgaggagagaagctgcagcctggagggcaaccccgtggcctgcatcaacctgagcttctgcctgaacgccagcggcaagcacgtggccgacagcatcggcttcaccgtggagctgcagctggactggcagaagcagaagggcggcgtgagaagagccctgttcctggccagcagacaggccaccctgacccagaccctgctgatccagaacggcgccagagaggactgcagagagatgaagatctacctgagaaacgagagcgagttcagagacaagctgagccccatccacatcgccctgaacttcagcctggacccccaggcccccgtggacagccacggcctgagacccgccctgcactaccagagcaagagcagaatcgaggacaaggcccagatcctgctgggctgcggcgaggacaacatctgcgtgcccgacctgcagctggaggtgttcggcgagcagaaccacgtgtacctgggcgacaagaacgccctgaacctgaccttccacgcccagaacgtgggcgagggcggcgcctacgaggccgagctgagagtgaccgccccccccgaggccgagtacagcggcctggtgagacaccccggcaacttcagcagcctgagctgcgactacttcgccgtgaaccagagcagactgctggtgtgcgacctgggcaaccccatgaaggccggcgccagcctgtggggcggcctgagattcaccgtgccccacctgagagacaccaagaagaccatccagttcgacttccagatcctgagcaagaacctgaacaacagccagagcgacgtggtgagcttcagactgagcgtggaggcccaggcccaggtgaccctgaacggcgtgagcaagcccgaggccgtgctgttccccgtgagcgactggcaccccagagaccagccccaggaggaggaggacctgggccccgccgtgcaccacgtgtacgagctgatcaaccagggccccagcagcatcagccagggcgtgctggagctgagctgcccccaggccctggagggccagcagctgctgtacgtgaccagagtgaccggcctgaactgcaccaccaaccaccccatcaaccccaagggcctggagctggaccccgagggcagcctgcaccaccagcagaagagagaggcccccagcagaagcagcgccagcagcggcccccagatcctgaagtgccccgaggccgagtgcttcagactgagatgcgagctgggccccctgcaccagcaggagagccagagcctgcagctgcacttcagagtgtgggccaagaccttcctgcagagagagcaccagcccttcagcctgcagtgcgaggccgtgtacaaggccctgaagatgccctacagaatcctgcccagacagctgccccagaaggagagacaggtggccaccgccgtgcagtggaccaaggccgagggcagctacggcgtgcccctgtggatcatcatcctggccatcctgttcggcctgctgctgctgggcctgctgatctacatcctgtacaagctgggcttcttcaagagaagcctgccctacggcaccgccatggagaaggcccagctgaagccccccgccaccagcgacgcctga

SEQ ID NO: 2699 - RNA, 3150 nt, synthetic construct
  misc_feature 1..3150: note = BAG35324 variant
  source 1..3150: mol_type = other RNA
atgggcagcagaacccccgagagccccctgcacgccgtgcagctgagatggggccccagaagaagaccccccctgctgcccctgctgctgctgctgctgccccccccccccagagtgggcggcttcaacctggacgccgaggcccccgccgtgctgagcggcccccccggcagcttcttcggcttcagcgtggagttctacagacccggcaccgacggcgtgagcgtgctggtgggcgcccccaaggccaacaccagccagcccggcgtgctgcagggcggcgccgtgtacctgtgcccctggggcgccagccccacccagtgcacccccatcgagttcgacagcaagggcagcagactgctggagagcagcctgagcagcagcgagggcgaggagcccgtggagtacaagagcctgcagtggttcggcgccaccgtgagagcccacggcagcagcatcctggcctgcgcccccctgtacagctggagaaccgagaaggagcccctgagcgaccccgtgggcacctgctacctgagcaccgacaacttcaccagaatcctggagtacgccccctgcagaagcgacttcagctgggccgccggccagggctactgccagggcggcttcagcgccgagttcaccaagaccggcagagtggtgctgggcggccccggcagctacttctggcagggccagatcctgagcgccacccaggagcagatcgccgagagctactaccccgagtacctgatcaacctggtgcagggccagctgcagaccagacaggccagcagcatctacgacgacagctacctgggctacagcgtggccgtgggcgagttcagcggcgacgacaccgaggacttcgtggccggcgtgcccaagggcaacctgacctacggctacgtgaccatcctgaacggcagcgacatcagaagcctgtacaacttcagcggcgagcagatggccagctacttcggctacgccgtggccgccaccgacgtgaacggcgacggcctggacgacctgctggtgggcgcccccctgctgatggacagaacccccgacggcagaccccagggcgtgggcagagtgtacgtgtacctgcagcaccccgccggcatcgagcccacccccaccctgaccctgaccggccacgacgagttcggcagattcggcagcagcctgacccccctgggcgacctggaccaggacggctacaacgacgtggccatcggcgcccccttcggcggcgagacccagcagggcgtggtgttcgtgttccccggcggccccggcggcctgggcagcaagctgagccaggtgctgcagcccctgtgggccgccagccacacccccgacttcttcggcagcgccctgagaggcggcagagacctggacggcaacggctaccccgacctgatcgtgggcagcttcggcgtggacaaggccgtggtgtacagaggcagacccatcgtgagcgccagcgccagcctgaccatcttccccgccatgttcaaccccgaggagagaagctgcagcctggagggcaaccccgtggcctgcatcaacctgagcttctgcctgaacgccagcggcaagcacgtggccgacagcatcggcttcaccgtggagctgcagctggactggcagaagcagaagggcggcgtgagaagagccctgttcctggccagcagacaggccaccctgacccagaccctgctgatccagaacggcgccagagaggactgcagagagatgaagatctacctgagaaacgagagcgagttcagagacaagctgagccccatccacatcgccctgaacttcagcctggacccccaggcccccgtggacagccacggcctgagacccgccctgcactaccagagcaagagcagaatcgaggacaaggcccagatcctgctggactgcggcgaggacaacatctgcgtgcccgacctgcagctggaggtgttcggcgagcagaaccacgtgtacctgggcgacaagaacgccctgaacctgaccttccacgcccagaacgtgggcgagggcggcgcctacgaggccgagctgagagtgaccgccccccccgaggccgagtacagcggcctggtgagacaccccggcaacttcagcagcctgagctgcgactacttcgccgtgaaccagagcagactgctggtgtgcgacctgggcaaccccatgaaggccggcgccagcctgtggggcggcctgagattcaccgtgccccacctgagagacaccaagaagaccatccagttcgacttccagatcctgagcaagaacctgaacaacagccagagcgacgtggtgagcttcagactgagcgtggaggcccaggcccaggtgaccctgaacggcgtgagcaagcccgaggccgtgctgttccccgtgagcgactggcaccccagagaccagccccagaaggaggaggacctgggccccgccgtgcaccacgtgtacgagctgatcaaccagggccccagcagcatcagccagggcgtgctggagctgagctgcccccaggccctggagggccagcagctgctgtacgtgaccagagtgaccggcctgaactgcaccaccaaccaccccatcaaccccaagggcctggagctggaccccgagggcagcctgcaccaccagcagaagagagaggcccccagcagaagcagcgccagcagcggcccccagatcctgaagtgccccgaggccgagtgcttcagactgagatgcgagctgggccccctgcaccagcaggagagccagagcctgcagctgcacttcagagtgtgggccaagaccttcctgcagagagagcaccagcccttcagcctgcagtgcgaggccgtgtacaaggccctgaagatgccctacagaatcctgcccagacagctgccccagaaggagagacaggtggccaccgccgtgcagtggaccaaggccgagggcagctacggcgtgcccctgtggatcatcatcctggccatcctgttcggcctgctgctgctgggcctgctgatctacatcctgtacaagctgggcttcttcaagagaagcctgccctacggcaccgccatggagaaggcccagctgaagccccccgccaccagcgacgcctga

SEQ ID NO: 2700 - RNA, 1401 nt, synthetic construct
  misc_feature 1..1401: note = BAG54537 variant
  source 1..1401: mol_type = other RNA
atgctgagcctgagacagagaatgatgcacgccagattcagaaaccccctgagcagacagcccgccagacccagctacagacagggctacaacggcagacccaacgtggagggcaaggtgctgcccggcagcaacggcaagcccaacggccagagaatcatcaacggcccccagggcaccaagtgggtggtggacctggacagaggcctggtgctgaacgccgagggcagatacctgcaggacagccacggcaaccccctgagaatcaagctgggcggcgacggcagaaccatcgtggacctggagggcacccccgtggtgagccccgacggcctgcccctgttcggccagggcagacacggcacccccctggccaacgcccaggacaagcccatcctgagcctgggcggcaagcccctggtgggcctggaggtgatcaagaagaccacccacccccccaccaccaccatgcagcccaccaccaccaccacccccctgcccaccaccaccacccccagacccaccaccgccaccaccagaagaaccaccaccagaagacccaccaccaccgtgagaaccaccaccagaaccaccaccaccaccacccccaagcccaccacccccatccccacctgcccccccggcaccctggagagacacgacgacgacggcaacctgatcatgagcagcaacggcatccccgagtgctacgccgaggaggacgagttcagcggcctggagaccgacaccgccgtgcccaccgaggaggcctacgtgatctacgacgaggactacgagttcgagaccagcagaccccccaccaccaccgagcccagcaccaccgccaccacccccagagtgatccccgaggagggcgccatcagcagcttccccgaggaggagttcgacctggccggcagaaagagattcgtggccccctacgtgacctacctgaacaaggaccccagcgccccctgcagcctgaccgacgccctggaccacttccaggtggacagcctggacgagatcatccccaacgacctgaagaagagcgacctgcccccccagcacgcccccagaaacatcaccgtggtggccgtggagggctgccacagcttcgtgatcgtggactgggacaaggccacccccggcgacgtggtgaccggctacctggtgtacagcgccagctacgaggacttcatcagaaacaagtggagcacccaggccagcagcgtgacccacctgcccatcgagaacctgaagcccaacaccagatactacttcaaggtgcaggcccagaacccccacggctacggccccatcagccccagcgtgagcttcgtgaccgagagcgacaaccccctgctggtggtgagaccccccggcggcgagcccatctga

SEQ ID NO: 2701 - RNA, 471 nt, synthetic construct
  misc_feature 1..471: note = BAG58437 variant
  source 1..471: mol_type = other RNA
atggaggagcagagaaacgaggagatccagagcttcatctacagcctgaagcagatgctgctgaacgtggaggccaacagcgccaaggtgcaggaggacctggaggccgagttccagagcctgttcagcctgctggaggagctgaaggagggcatgctgatgaagatcaagcaggacagagccagcagaacctacgagctgcagaaccagctggccgcctgcaccagagccctggagagcagcgaggagctgctggagaccgccaaccagaccctgcaggccatggacagcgaggacttcccccaggccgccaagcagatcaaggacggcgtgaccatggcccccgccttcagactgagcctgaaggccaaggtgagcgacaacatgagccacctgatggtggacttcgcccaggagagacagatgctgcaggccctgaagttcctgcccggcgagagaggcacccactga

SEQ ID NO: 2702 - RNA, 921 nt, synthetic construct
  misc_feature 1..921: note = BAH14721 variant
  source 1..921: mol_type = other RNA
atgatcttcgaggagcacggcttcagaagaaccaccccccccaccaccgccacccccatcagacacagacccagaccctacccccccaacgtgggccaggaggccctgagccagaccaccatcagctgggcccccttccaggacaccagcgagtacatcatcagctgccaccccgtgggcaccgacgaggagcccctgcagttcagagtgcccggcaccagcaccagcgccaccctgaccggcctgaccagaggcgccacctacaacatcatcgtggaggccctgaaggaccagcagagacacaaggtgagagaggaggtggtgaccgtgggcaacagcgtgaacgagggcctgaaccagcccaccgacgacagctgcttcgacccctacaccgtgagccactacgccgtgggcgacgagtgggagagaatgagcgagagcggcttcaagctgctgtgccagtgcctgggcttcggcagcggccacttcagatgcgacagcagcagatggtgccacgacaacggcgtgaactacaagatcggcgagaagtgggacagacagggcgagaacggccagatgatgagctgcacctgcctgggcaacggcaagggcgagttcaagtgcgacccccacgaggccacctgctacgacgacggcaagacctaccacgtgggcgagcagtggcagaaggagtacctgggcgccatctgcagctgcacctgcttcggcggccagagaggctggagatgcgacaactgcagaagacccggcggcgagcccagccccgagggcaccaccggccagagctacaaccagtacagccagagataccaccagagaaccaacaccaacgtgaactgccccatcgagtgcttcatgcccctggacgtgcaggccgacagagaggacagcagagagtga

SEQ ID NO: 2703 - RNA, 1920 nt, synthetic construct
  misc_feature 1..1920: note = BAG61560 variant
  source 1..1920: mol_type = other RNA
atggagaagatcctgttctacctgttcctgatcggcatcgccgtgaaggcccagatctgccccaagagatgcgtgtgccagatcctgagccccaacctggccaccctgtgcgccaagaagggcctgctgttcgtgccccccaacatcgacagaagaaccgtggagctgagactggccgacaacttcgtgaccaacatcaagagaaaggacttcgccaacatgaccagcctggtggacctgaccctgagcagaaacaccatcagcttcatcaccccccacgccttcgccgacctgagaaacctgagaagcctgcacctgaacagcaacagactgaccaagatcaccaacgacatgttcagcggcctgagcaacctgcaccacctgatcctgaacaacaaccagctgaccctgatcagcagcaccgccttcgacgacgtgttcgccctggaggagctggacctgagctacaacaacctggagaccatcccctgggacgccgtggagaagatggtgagcctgcacaccctgagcctggaccacaacatgatcgacaacatccccaagggcaccttcagccacctgcacaagatgaccagactggacgtgaccagcaacaagctgcagaagctgccccccgaccccctgttccagagagcccaggtgctggccaccagcggcatcatcagccccagcaccttcgccctgagcttcggcggcaaccccctgcactgcaactgcgagctgctgtggctgagaagactgagcagagagtacgacctggagacctgcgccagcccccccctgctgaccggcagatacttctggagcatccccgaggaggagttcctgtgcgagccccccctgatcaccagacacacccacgagatgagagtgctggagggccagagagccaccctgagatgcaaggccagaggcgaccccgagcccgccatccactggatcagccccgagggcaagctgatcagcaacgccaccagaagcctggtgtacgacaacggcaccctggacatcctgatcaccaccgtgaaggacaccggcgccttcacctgcatcgccagcaaccccgccggcgaggccacccagatcgtggacctgcacatcatcaagctgccccacctgctgaacagcaccaaccacatccacgagcccgaccccggcagcagcgacatcagcaccagcaccaagagcggcagcaacaccagcagcagcaacgacggcatcaccagcctgaccgccaccagagtggtgggctgcatccagttcaccaccgagcaggactacgtgagatgccacttcatgcagagccagttcctgggcggcaccatgatcatcatcatcggcggcatcatcgtggccagcgtgctggtgttcatcatcatcctgatgatcagatacaaggtgtgcaacaacaacggccagcacaaggtgaccaaggtgagcaacgtgtacagccagaccaacggcgcccagatccagggctgcagcgtgaccctgccccagagcgtgagcaagcaggccgtgggccacgaggagaacgcccagtgctgcaaggccaccagcgacaacgtgatccagagcagcgagacctgcagcagccaggacagcgccaccaccaccagcgccctgccccccagctggaccagcagcaccagcgtgagccagaagcagaagagaaagaccggcaccaagcccagcaccgagccccagaacgaggccgtgaccaacgtggagagccagaacaccaacagaaacaacagcaccgccctgcagctggccagcagaccccccgacagcgtgaccgagggccccaccagcaagagagcccacatcaagcccaacgccctgctgaccaacgtggaccagatcgtgcaggagacccagagactggagctgatctga

SEQ ID NO: 2704 - RNA, 1014 nt, synthetic construct
  misc_feature 1..1014: note = BAG61984 variant
  source 1..1014: mol_type = other RNA
atgatcttcgaggagcacggcttcagaagaaccaccccccccaccaccgccacccccatcagacacagacccagaccctacccccccaacgtgggcgaggagatccagatcggccacatccccagagaggacgtggactaccacctgtacccccacggccccggcctgaaccccaacgccagcaccggccaggaggccctgagccagaccaccatcagctgggcccccttccaggacaccagcgagtacatcatcagctgccaccccgtgggcaccgacgaggagcccctgcagttcagagtgcccggcaccagcaccagcgccaccctgaccggcctgaccagaggcgccacctacaacatcatcgtggaggccctgaaggaccagcagagacacaaggtgagagaggaggtggtgaccgtgggcaacagcgtgaacgagggcctgaaccagcccaccgacgacagctgcttcgacccctacaccgtgagccactacgccgtgggcgacgagtgggagagaatgagcgagagcggcttcaagctgctgtgccagtgcctgggcttcggcagcggccacttcagatgcgacagcagcagatggtgccacgacaacggcgtgaactacaagatcggcgagaagtgggacagacagggcgagaacggccagatgatgagctgcacctgcctgggcaacggcaagggcgagttcaagtgcgacccccacgaggccacctgctacgacgacggcaagacctaccacgtgggcgagcagtggcagaaggagtacctgggcgccatctgcagctgcacctgcttcggcggccagagaggctggagatgcgacaactgcagaagacccggcggcgagcccagccccgagggcaccaccggccagagctacaaccagtacagccagagataccaccagagaaccaacaccaacgtgaactgccccatcgagtgcttcatgcccctggacgtgcaggccgacagagaggacagcagagagtga

SEQ ID NO: 2705 - RNA, 3045 nt, synthetic construct
  misc_feature 1..3045: note = BAG62013 variant
  source 1..3045: mol_type = other RNA
atgagagtgacctgggcccccccccccagcatcgacctgaccaacttcctggtgagatacagccccgtgaagaacgaggaggacgtggccgagctgagcatcagccccagcgacaacgccgtggtgctgaccaacctgctgcccggcaccgagtacgtggtgagcgtgagcagcgtgtacgagcagcacgagagcacccccctgagaggcagacagaagaccggcctggacagccccaccggcatcgacttcagcgacatcaccggcaacagcttcaccgtgcactggatcgcccccagagccaccatcaccggctacagaatcagacaccaccccgagcacttcagcggcagacccagagaggacagagtgccccacagcagaaacagcatcaccctgaccaacctgacccccggcaccgagtacgtggtgagcatcgtggccctgaacggcagagaggagagccccctgctgatcggccagcagagcaccgtgagcgacgtgcccagagacctggaggtggtggccgccacccccaccagcctgctgatcagctgggacgcccccgccgtgaccgtgagatactacagaatcacctacggcgagaccggcggcaacagccccgtgcaggagttcaccgtgcccggcagcaagagcaccgccaccatcagcggcctgaagcccggcgtggactacaccatcaccgtgtacgccgtgaccggcagaggcgacagccccgccagcagcaagcccatcagcatcaactacagaaccgagatcgacaagcccagccagatgcaggtgaccgacgtgcaggacaacagcatcagcgtgaagtggctgcccagcagcagccccgtgaccggctacagagtgaccaccacccccaagaacggccccggccccaccaagaccaagaccgccggccccgaccagaccgagatgaccatcgagggcctgcagcccaccgtggagtacgtggtgagcgtgtacgcccagaaccccagcggcgagagccagcccctggtgcagaccgccgtgaccaccatccccgcccccaccgacctgaagttcacccaggtgacccccaccagcctgagcgcccagtggaccccccccaacgtgcagctgaccggctacagagtgagagtgacccccaaggagaagaccggccccatgaaggagatcaacctggcccccgacagcagcagcgtggtggtgagcggcctgatggtggccaccaagtacgaggtgagcgtgtacgccctgaaggacaccctgaccagcagacccgcccagggcgtggtgaccaccctggagaacgtgagcccccccagaagagccagagtgaccgacgccaccgagaccaccatcaccatcagctggagaaccaagaccgagaccatcaccggcttccaggtggacgccgtgcccgccaacggccagacccccatccagagaaccatcaagcccgacgtgagaagctacaccatcaccggcctgcagcccggcaccgactacaagatctacctgtacaccctgaacgacaacgccagaagcagccccgtggtgatcgacgccagcaccgccatcgacgcccccagcaacctgagattcctggccaccacccccaacagcctgctggtgagctggcagccccccagagccagaatcaccggctacatcatcaagtacgagaagcccggcagcccccccagagaggtggtgcccagacccagacccggcgtgaccgaggccaccatcaccggcctggagcccggcaccgagtacaccatctacgtgatcgccctgaagaacaaccagaagagcgagcccctgatcggcagaaagaagaccgacgagctgccccagctggtgaccctgccccaccccaacctgcacggccccgagatcctggacgtgcccagcaccgtgcagaagacccccttcgtgacccaccccggctacgacaccggcaacggcatccagctgcccggcaccagcggccagcagcccagcgtgggccagcagatgatcttcgaggagcacggcttcagaagaaccaccccccccaccaccgccacccccatcagacacagacccagaccctacccccccaacgtgggcgaggagatccagatcggccacatccccagagaggacgtggactaccacctgtacccccacggccccggcctgaaccccaacgccagcaccggccaggaggccctgagccagaccaccatcagctgggcccccttccaggacaccagcgagtacatcatcagctgccaccccgtgggcaccgacgaggagcccctgcagttcagagtgcccggcaccagcaccagcgccaccctgaccggcctgaccagaggcgccacctacaacatcatcgtggaggccctgaaggaccagcagagacacaaggtgagagaggaggtggtgaccgtgggcaacagcgtgaacgagggcctgaaccagcccaccgacgacagctgcttcgacccctacaccgtgagccactacgccgtgggcgacgagtgggagagaatgagcgagagcggcttcaagctgctgtgccagtgcctgggcttcggcagcggccacttcagatgcgacagcagcagatggtgccacgacaacggcgtgaactacaagatcggcgagaagtgggacagacagggcgagaacggccagatgatgagctgcacctgcctgggcaacggcaagggcgagttcaagtgcgacccccacgaggccacctgctacgacgacggcaagacctaccacgtgggcgagcagtggcagaaggagtacctgggcgccatctgcagctgcacctgcttcggcggccagagaggctggagatgcgacaactgcagaagacccggcggcgagcccagccccgagggcaccaccggccagagctacaaccagtacagccagagataccaccagagaaccaacaccaacgtgaactgccccatcgagtgcttcatgcccctggacgtgcaggccgacagagaggacagcagagagtga

SEQ ID NO: 2706 - RNA, 2685 nt, synthetic construct
  misc_feature 1..2685: note = BAG62178 variant
  source 1..2685: mol_type = other RNA
atgagagtgacctgggcccccccccccagcatcgacctgaccaacttcctggtgagatacagccccgtgaagaacgaggaggacgtggccgagctgagcatcagccccagcgacaacgccgtggtgctgaccaacctgctgcccggcaccgagtacgtggtgagcgtgagcagcgtgtacgagcagcacgagagcacccccctgagaggcagacagaagaccggcctggacagccccaccggcatcgacttcagcgacatcaccgccaacagcttcaccgtgcactggatcgcccccagagccaccatcaccggctacagaatcagacaccaccccgagcacttcagcggcagacccagagaggacagagtgccccacagcagaaacagcatcaccctgaccaacctgacccccggcaccgagtacgtggtgagcatcgtggccctgaacggcagagaggagagccccctgctgatcggccagcagagcaccgtgagcgacgtgcccagagacctggaggtggtggccgccacccccaccagcctgctgatcagctgggacgcccccgccgtgaccgtgagatactacagaatcacctacggcgagaccggcggcaacagccccgtgcaggagttcaccgtgcccggcagcaagagcaccgccaccatcagcggcctgaagcccggcgtggactacaccatcaccgtgtacgccgtgaccggcagaggcgacagccccgccagcagcaagcccatcagcatcaactacagaaccgagatcgacaagcccagccagatgcaggtgaccgacgtgcaggacaacagcatcagcgtgaagtggctgcccagcagcagccccgtgaccggctacagagtgaccaccacccccaagaacggccccggccccaccaagaccaagaccgccggccccgaccagaccgagatgaccatcgagggcctgcaccccaccgtggagtacgtggtgagcgtgtacgcccagaaccccagcggcgagagccagcccctggtgcagaccgccgtgaccaccatccccgcccccaccgacctgaagttcacccaggtgacccccaccagcctgagcgcccagtggaccccccccaacgtgcagctgaccggctacagagtgagagtgacccccaaggagaagaccggccccatgaaggagatcaacctggcccccgacagcagcagcgtggtggtgagcggcctgatggtggccaccaagtacgaggtgagcgtgtacgccctgaaggacaccctgaccagcagacccgcccagggcgtggtgaccaccctggagaacgtgagcccccccagaagagccagagtgaccgacgccaccgagaccaccatcaccatcagctggagaaccaagaccgagaccatcaccggcttccaggtggacgccgtgcccgccaacggccagacccccatccagagaaccatcaagcccgacgtgagaagctacaccatcaccggcctgcagcccggcaccgactacaagatctacctgtacaccctgaacgacaacgccagaagcagccccgtggtgatcgacgccagcaccgccatcgacgcccccagcaacctgagattcctggccaccacccccaacagcctgctggtgagctggcagccccccagagccagaatcaccggctacatcatcaagtacgagaagcccggcagcccccccagagaggtggtgcccagacccagacccggcgtgaccgaggccaccatcaccggcctggagcccggcaccgagtacaccatctacgtgatcgccctgaagaacaaccagaagagcgagcccctgatcggcagaaagaagaccggccaggaggccctgagccagaccaccatcagctgggcccccttccaggacaccagcgagtacatcatcagctgccaccccgtgggcaccgacgaggagcccctgcagttcagagtgcccggcaccagcaccagcgccaccctgaccggcctgaccagaggcgccacctacaacatcatcgtggaggccctgaaggaccagcagagacacaaggtgagagaggaggtgatcaccgtgggcaacagcgtgaacgagggcctgaaccagcccaccgacgacagctgcttcgacccctacaccgtgagccactacgccgtgggcgacgagtgggagagaatgagcgagagcggcttcaagctgctgtgccagtgcctgggcttcggcagcggccacttcagatgcgacagcagcagatggtgccacgacaacggcgtgaactacaagatcggcgagaagtgggacagacagggcgagaacggccagatgatgagctgcacctgcctgggcaacggcaagggcgagttcaagtgcgacccccacgaggccacctgctacgacgacggcaagacctaccacgtgggcgagcagtggcagaaggagtacctgggcgccatctgcagctgcacctgcttcggcggccagagaggctggagatgcgacaactgcagaagacccggcggcgagcccagccccgagggcaccaccggccagagctacaaccagtacagccagagataccaccagagaaccaacaccaacgtgaactgccccatcgagtgcttcatgcccctggacgtgcaggccgacagagaggacagcagagagtga

SEQ ID NO: 2707 - RNA, 1152 nt, synthetic construct
  misc_feature 1..1152: note = BAH12351 variant
  source 1..1152: mol_type = other RNA
atggccagcgccttcagactgagcctgaagcccaaggtgagcgacaacatgacccacctgatggtggacttcagccaggagagacagatgctgcagaccctgaagttcctgcccgtgcccaaggcccccgagatcgaccccgtggagtgcctggtggccgacaacagcgtgaccgtggcctggagaatgcccgaggaggacaacaagatcgaccacttcatcctggagcacagaaagaccaacttcgacggcctgcccagagtgaaggacgagagatgctgggagatcatcgacaacatcaagggcaccgagtacaccctgagcggcctgaagttcgacagcaagtacatgaacttcagagtgagagcctgcaacaaggccgtggccggcgagtacagcgaccccgtgaccctggagaccaaggccctgaacttcaacctggacaacagcagcagccacctgaacctgaaggtggaggacacctgcgtggagtgggaccccaccggcggcaagggccaggagagcaagatcaagggcaaggagaacaagggcagcgtgcacgtgaccagcctgaagaagcacaccagcggcacccccagccccaagagaaccagcgtgggcagcagaccccccgccgtgagaggcagcagagacagattcaccggcgagagctacaccgtgctgggcgacaccgccatcgagagcggccagcactactgggaggtgaaggcccagaaggactgcaagagctacagcgtgggcgtggcctacaagaccctgggcaagttcgaccagctgggcaagaccaacaccagctggtgcatccacgtgaacaactggctgcagaacaccttcgccgccaagcacaacaacaaggtgaaggccctggacgtgaccgtgcccgagaagatcggcgtgttctgcgacttcgacggcggccagctgagcttctacgacgccaacagcaagcagctgctgtacagcttcaagaccaagttcacccagcccgtgctgcccggcttcatggtgtggtgcggcggcctgagcctgagcaccggcatgcaggtgcccagcgccgtgagaaccctgcagaagagcgagaacggcatgaccggcagcgccagcagcctgaacaacgtggtgacccagtga

SEQ ID NO: 2708 - RNA, 441 nt, synthetic construct
  misc_feature 1..441: note = BAH14175 variant
  source 1..441: mol_type = other RNA
atgccccccagcaagccccacccccccgtggtgggcaaggtgacccaccacagcatcgagctgtactgggacctggagaagaaggccaagagacagggcccccaggagcagtggttcagattcagcatcgaggaggaggaccccaagatgcacacctacggcatcatctacaccggctacgccaccaagcacgtggtggagggcctggagcccagaaccctgtacagattcagactgaaggtgaccagccccagcggcgagtgcgagtacagccccctggtgagcgtgagcaccaccagcgagtacagcgacagaccccacagccccctgagcagaagcatggagatgaccagcaacctggagaagatcttctgcctgagcttcggcctgaccagaagcagaaacgacaccatcttcaagcactgcaacaacatctgctga

SEQ ID NO: 2709 - RNA, 2055 nt, synthetic construct
  misc_feature 1..2055: note = EAX08810 variant
  source 1..2055: mol_type = other RNA
atggccgagcacccccccctgctggacaccacccagatcctgagcagcgacatcagcctgctgagcgcccccatcgtgagcgccgacggcacccagcaggtgatcctggtgcaggtgaaccccggcgaggccttcaccatcagaagagaggacggccagttccagtgcatcaccggccccgcccaggtgcccatgatgagccccaacggcagcgtgccccccatctacgtgccccccggctacgccccccaggtgatcgaggacaacggcgtgagaagagtggtggtggtgccccaggcccccgagttccaccccggcagccacaccgtgctgcacagaagcccccacccccccctgcccggcttcatccccgtgcccaccatgatgccccccccccccagacacatgtacagccccgtgaccggcgccggcgacatgaccacccagtacatgccccagtaccagagcagccaggtgtacggcgacgtggacgcccacagcacccacggcagaagcaacttcagagacgagagaagcagcaagacctacgagagactgcagaagaagctgaaggacagacagggcacccagaaggacaagatgagcagcccccccagcagcccccagaagtgccccagccccatcaacgagcacaacggcctgatcaagggccagatcgccggcggcatcaacaccggcagcgccaagatcaagagcggcaagggcaagggcggcacccaggtggacaccgagatcgaggagaaggacgaggagaccaaggccttcgaggccctgctgagcaacatcgtgaagcccgtggccagcgacatccaggccagaaccgtggtgctgacctggagcccccccagcagcctgatcaacggcgagaccgacgagagcagcgtgcccgagctgtacggctacgaggtgctgatcagcagcaccggcaaggacggcaagtacaagagcgtgtacgtgggcgaggagaccaacatcaccctgaacgacctgaagcccgccatggactaccacgccaaggtgcaggccgagtacaacagcatcaagggcacccccagcgaggccgagatcttcaccaccctgagctgcgagcccgacatccccaacccccccagaatcgccaacagaaccaagaacagcctgaccctgcagtggaaggcccccagcgacaacggcagcaagatccagaacttcgtgctggagtgggacgagggcaagggcaacggcgagttctgccagtgctacatgggcagccagaagcagttcaagatcaccaagctgagccccgccatgggctgcaagttcagactgagcgccagaaacgactacggcaccagcggcttcagcgaggaggtgctgtactacaccagcggctgcgcccccagcatgcccgccagccccgtgctgaccaaggccggcatcacctggctgagcctgcagtggagcaagcccagcggcacccccagcgacgagggcatcagctacatcctggagatggaggaggagaccagcggctacggcttcaagcccaagtacgacggcgaggacctggcctacaccgtgaagaacctgagaagaagcaccaagtacaagttcaaggtgatcgcctacaacagcgagggcaagagcaaccccagcgaggtggtggagttcaccacctgccccgacaagcccggcatccccgtgaagcccagcgtgaagggcaagatccacagccacagcttcaagatcacctgggacccccccaaggacaacggcggcgccaccatcaacaagtacgtggtggagatggccgagggcagcaacggcaacaagtgggagatgatctacagcggcgccaccagagagcacctgtgcgacagactgaaccccggctgcttctacagactgagagtgtactgcatcagcgacggcggccagagcgccgtgagcgagagcctgctggtgcagacccccgccgtgccccccggcccctgcctgccccccagactgcagggcagacccaaggccaaggagatccagacccccagcggctga

SEQ ID NO: 2710 - RNA, 492 nt, synthetic construct
  misc_feature 1..492: note = AAG35520 variant
  source 1..492: mol_type = other RNA
atgagcgagagcggcttcaagctgctgtgccagtgcctgggcttcggcagcggccacttcagatgcgacagcagcagatggtgccacgacaacggcgtgaactacaagatcggcgagaagtgggacagacagggcgagaacggccagatgatgagctgcacctgcctgggcaacggcaagggcgagttcaagtgcgacccccacgaggccacctgctacgacgacggcaagacctaccacgtgggcgagcagtggcagaaggagtacctgggcgccatctgcagctgcacctgcttcggcggccagagaggctggagatgcgacaactgcagaagacccggcggcgagcccagccccgagggcaccaccggccagagctacaaccagtacagccagagataccaccagagaaccaacaccaacgtgaactgccccatcgagtgcttcatgcccctggacgtgcaggccgacagagaggacagcagagagtga

SEQ ID NO: 2711 - RNA, 1143 nt, synthetic construct
  misc_feature 1..1143: note = AAA52471 variant
  source 1..1143: mol_type = other RNA
atgatgttcagcggcttcaacgccgactacgaggccagcagcagcagatgcagcagcgccagccccgccggcgacagcctgagctactaccacagccccgccgacagcttcagcagcatgggcagccccgtgaacgcccaggacttctgcaccgacctggccgtgagcagcgccaacttcatccccaccgtgaccgccatcagcaccagccccgacctgcagtggctggtgcagcccgccctggtgagcagcgtggcccccagccagaccagagccccccaccccttcggcgtgcccgcccccagcgccggcgcctacagcagagccggcgtggtgaagaccatgaccggcggcagagcccagagcatcggcagaagaggcaaggtggagcagctgagccccgaggaggaggagaagagaagaatcagaagagagagaaacaagatggccgccgccaagtgcagaaacagaagaagagagctgaccgacaccctgcaggccgagaccgaccagctggaggacgagaagagcgccctgcagaccgagatcgccaacctgctgaaggagaaggagaagctggagttcatcctggccgcccacagacccgcctgcaagatccccgacgacctgggcttccccgaggagatgagcgtggccagcctggacctgaccggcggcctgcccgaggtggccacccccgagagcgaggaggccttcaccctgcccctgctgaacgaccccgagcccaagcccagcgtggagcccgtgaagagcatcagcagcatggagctgaagaccgagcccttcgacgacttcctgttccccgccagcagcagacccagcggcagcgagaccgccagaagcgtgcccgacatggacctgagcggcagcttctacgccgccgactgggagcccctgcacagcggcagcctgggcatgggccccatggccaccgagctggagcccctgtgcacccccgtggtgacctgcacccccagctgcaccgcctacaccagcagcttcgtgttcacctaccccgaggccgacagcttccccagctgcgccgccgcccacagaaagggcagcagcagcaacgagcccagcagcgacagcctgagcagccccaccctgctggccctgtga

SEQ ID NO: 2712 - RNA, 1296 nt, synthetic construct
  misc_feature 1..1296: note = AAG53607 variant
  source 1..1296: mol_type = other RNA
atgcccaaccccagacccggcaagcccagcgcccccagcctggccctgggccccagccccggcgccagccccagctggagagccgcccccaaggccagcgacctgctgggcgccagaggccccggcggcaccttccagggcagagacctgagaggcggcgcccacgccagcagcagcagcctgaaccccatgccccccagccagctgcagctgcccaccctgcccctggtgatggtggcccccagcggcgccagactgggccccctgccccacctgcaggccctgctgcaggacagaccccacttcatgcaccagctgagcaccgtggacgcccacgccagaacccccgtgctgcaggtgcaccccctggagagccccgccatgatcagcctgaccccccccaccaccgccaccggcgtgttcagcctgaaggccagacccggcctgccccccggcatcaacgtggccagcctggagtgggtgagcagagagcccgccctgctgtgcaccttccccaaccccagcgcccccagaaaggacagcaccctgagcgccgtgccccagagcagctaccccctgctggccaacggcgtgtgcaagtggcccggctgcgagaaggtgttcgaggagcccgaggacttcctgaagcactgccaggccgaccacctgctggacgagaagggcagagcccagtgcctgctgcagagagagatggtgcagagcctggagcagcagctggtgctggagaaggagaagctgagcgccatgcaggcccacctggccggcaagatggccctgaccaaggccagcagcgtggccagcagcgacaagggcagctgctgcatcgtggccgccggcagccagggccccgtggtgcccgcctggagcggccccagagaggcccccgacagcctgttcgccgtgagaagacacctgtggggcagccacggcaacagcaccttccccgagttcctgcacaacatggactacttcaagttccacaacatgagaccccccttcacctacgccaccctgatcagatgggccatcctggaggcccccgagaagcagagaaccctgaacgagatctaccactggttcaccagaatgttcgccttcttcagaaaccaccccgccacctggaagaacgccatcagacacaacctgagcctgcacaagtgcttcgtgagagtggagagcgagaagggcgccgtgtggaccgtggacgagctggagttcagaaagaagagaagccagagacccagcagatgcagcaaccccacccccggcccctga

SEQ ID NO: 2713 - RNA, 1098 nt, synthetic construct
  misc_feature 1..1098: note = AAA52639 variant
  source 1..1098: mol_type = other RNA
atgtggctgagaagccacagacagctgtgcctggccttcctgctggtgtgcgtgctgagcgtgatcttcttcctgcacatccaccaggacagcttcccccacggcctgggcctgagcatcctgtgccccgacagaagactggtgaccccccccgtggccatcttctgcctgcccggcaccgccatgggccccaacgccagcagcagctgcccccagcaccccgccagcctgagcggcacctggaccgtgtaccccaacggcagattcggcaaccagatgggccagtacgccaccctgctggccctggcccagctgaacggcagaagagccttcatcctgcccgccatgcacgccgccctggcccccgtgttcagaatcaccctgcccgtgctggcccccgaggtggacagcagaaccccctggagagagctgcagctgcacgactggatgagcgaggagtacgccgacctgagagaccccttcctgaagctgagcggcttcccctgcagctggaccttcttccaccacctgagagagcagatcagaagagagttcaccctgcacgaccacctgagagaggaggcccagagcgtgctgggccagctgagactgggcagaaccggcgacagacccagaaccttcgtgggcgtgcacgtgagaagaggcgactacctgcaggtgatgccccagagatggaagggcgtggtgggcgacagcgcctacctgagacaggccatggactggttcagagccagacacgaggcccccgtgttcgtggtgaccagcaacggcatggagtggtgcaaggagaacatcgacaccagccagggcgacgtgaccttcgccggcgacggccaggaggccaccccctggaaggacttcgccctgctgacccagtgcaaccacaccatcatgaccatcggcaccttcggcttctgggccgcctacctggccggcggcgacaccgtgtacctggccaacttcaccctgcccgacagcgagttcctgaagatcttcaagcccgaggccgccttcctgcccgagtgggtgggcatcaacgccgacctgagccccctgtggaccctggccaagccctga

SEQ ID NO: 2714 - RNA, 1380 nt, synthetic construct
  misc_feature 1..1380: note = EAW58359 variant
  source 1..1380: mol_type = other RNA
atggcccccctgtgccccagcccctggctgcccctgctgatccccgcccccgcccccggcctgaccgtgcagctgctgctgagcctgctgctgctggtgcccgtgcacccccagagactgcccagaatgcaggaggacagccccctgggcggcggcagcagcggcgaggacgaccccctgggcgaggaggacctgcccagcgaggaggacagccccagagaggaggacccccccggcgaggaggacctgcccggcgaggaggacctgcccggcgaggaggacctgcccgaggtgaagcccaagagcgaggaggagggcagcctgaagctggaggacctgcccaccgtggaggcccccggcgacccccaggagccccagaacaacgcccacagagacaaggagggcgacgaccagagccactggagatacggcggcgaccccccctggcccagagtgagccccgcctgcgccggcagattccagagccccgtggacatcagaccccagctggccgccttctgccccgccctgagacccctggagctgctgggcttccagctgccccccctgcccgagctgagactgagaaacaacggccacagcgtgcagctgaccctgccccccggcctggagatggccctgggccccggcagagagtacagagccctgcagctgcacctgcactggggcgccgccggcagacccggcagcgagcacaccgtggagggccacagattccccgccgagatccacgtggtgcacctgagcaccgccttcgccagagtggacgaggccctgggcagacccggcggcctggccgtgctggccgccttcctggaggagggccccgaggagaacagcgcctacgagcagctgctgagcagactggaggagatcgccgaggagggcagcgagacccaggtgcccggcctggacatcagcgccctgctgcccagcgacttcagcagatacttccagtacgagggcagcctgaccacccccccctgcgcccagggcgtgatctggaccgtgttcaaccagaccgtgatgctgagcgccaagcagctgcacaccctgagcgacaccctgtggggccccggcgacagcagactgcagctgaacttcagagccacccagcccctgaacggcagagtgatcgaggccagcttccccgccggcgtggacagcagccccagagccgccgagcccgtgcagctgaacagctgcctggccgccggcgacatcctggccctggtgttcggcctgctgttcgccgtgaccagcgtggccttcctggtgcagatgagaagacagcacagaagaggcaccaagggcggcgtgagctacagacccgccgaggtggccgagaccggcgcctga

SEQ ID NO: 2715 - RNA, 417 nt, synthetic construct
  misc_feature 1..417: note = U19142.1 variant
  source 1..417: mol_type = other RNA
atgagctggagaggcagaagcacctacagacccagacccagaagatacgtggagccccccgagatgatcggccccatgagacccgagcagttcagcgacgaggtggagcccgccacccccgaggagggcgagcccgccacccagagacaggaccccgccgccgcccaggagggcgaggacgagggcgccagcgccggccagggccccaagcccgaggccgacagccaggagcagggccacccccagaccggctgcgagtgcgaggacggccccgacggccaggagatggacccccccaaccccgaggaggtgaagacccccgaggaggagatgagaagccactacgtggcccagaccggcatcctgtggctgctgatgaacaactgcttcctgaacctgagccccagaaagccctga

SEQ ID NO: 2716 - RNA, 351 nt, synthetic construct
  misc_feature 1..351: note = AAH69397 variant
  source 1..351: mol_type = other RNA
atgagctggagaggcagaagcacctacagacccagacccagaagatacgtggagccccccgagatgatcggccccatgagacccgagcagttcagcgacgaggtggagcccgccacccccgaggagggcgagcccgccacccagagacaggaccccgccgccgcccaggagggccaggacgagggcgccagcgccggccagggccccaagcccgaggcccacagccaggagcagggccacccccagaccggctgcgagtgcgaggacggccccgacggccaggagatggacccccccaaccccgaggaggtgaagacccccgaggagggcgagaagcagagccagtgctga

SEQ ID NO: 2717 - RNA, 357 nt, synthetic construct
  misc_feature 1..357: note = AAA82746 variant
  source 1..357: mol_type = other RNA
atgaacctgagcagaggcaagagcacctactactggcccagacccagaagatacgtgcagccccccgaggtgatcggccccatgagacccgagcagttcagcgacgaggtggagcccgccacccccgaggagggcgagcccgccacccagagacaggaccccgccgccgcccaggagggcgaggacgagggcgccagcgccggccagggccccaagcccgaggccgacagccaggagcagggccacccccagaccggctgcgagtgcgaggacggccccgacggccaggagatggacccccccaaccccgaggaggtgaagacccccgaggagggcgagaagcagagccagtgctga

SEQ ID NO: 2718 - RNA, 354 nt, synthetic construct
  misc_feature 1..354: note = AAH69470 variant
  source 1..354: mol_type = other RNA
atgagctggagaggcagaagcacctactactggcccagacccagaagatacgtgcagccccccgagatgatcggccccatgagacccgagcagttcagcgacgaggtggagcccgccacccccgaggagggcgagcccgccacccagagacaggaccccgccgccgcccaggagggcgaggacgagggcgccagcgccggccagggccccaagcccgaggccgacagccaggagcagggccacccccagaccggctgcgagtgcgaggacggccccgacggccaggagatggacccccccaaccccgaggaggtgaagacccccgaggagggcgagggccagagccagtgctga

SEQ ID NO: 2719 - RNA, 354 nt, synthetic construct
  misc_feature 1..354: note = AAA82748 variant
  source 1..354: mol_type = other RNA
atgagctggagaggcagaagcacctactactggcccagacccagaagatacgtgcagccccccgaggtgatcggccccatgagacccgagcagttcagcgacgaggtggagcccgccacccccgaggagggcgagcccgccacccagagacaggaccccgccgccgcccaggagggcgaggacgagggcgccagcgccggccagggccccaagcccgaggccgacagccaggagcagggccacccccagaccggctgcgagtgcgaggacggccccgacggccaggagatggacccccccaaccccgaggaggtgaagacccccgaggagggcgagaagcagagccagtgctga

SEQ ID NO: 2720 - RNA, 354 nt, synthetic construct
  misc_feature 1..354: note = AAA82749 variant
  source 1..354: mol_type = other RNA
atgagctggagaggcagaagcacctactactggcccagacccagaagatacgtgcagccccccgaggtgatcggccccatgagacccgagcagttcagcgacgaggtggagcccgccacccccgaggagggcgagcccgccacccagagacaggaccccgccgccgcccaggagggcgaggacgagggcgccagcgccggccagggccccaagcccgaggccgacagccaggagcagggccacccccagaccggctgcgagtgcgaggacggccccgacggccaggaggtggacccccccaaccccgaggaggtgaagacccccgaggagggcgagaagcagagccagtgctga

SEQ ID NO: 2721 - RNA, 354 nt, synthetic construct
  misc_feature 1..354: note = AAC25989 variant
  source 1..354: mol_type = other RNA
atgagctggagaggcagaagcacctactactggcccagacccagaagatacgtgcagccccccgagatgatcggccccatgagacccgagcagttcagcgacgaggtggagcccgccacccccgaggagggcgagcccgccacccagagacaggaccccgccgccgcccaggagggcgaggacgagggcgccagcgccggccagggccccaagcccgaggcccacagccaggagcagggccacccccagaccggctgcgagtgcgaggacggccccgacggccaggagatggacccccccaaccccgaggaggtgaagacccccgaggagggcgagaagcagagccagtgctga

SEQ ID NO: 2722 - RNA, 351 nt, synthetic construct
  misc_feature 1..351: note = AAC33676 variant
  source 1..351: mol_type = other RNA
atgagctggagaggcagaagcacctacagacccagacccagaagatacgtggagccccccgagatgatcggccccatgagacccgagcagttcagcgacgaggtggagcccgccacccccgaggagggcgagcccgccacccagagacaggaccccgccgccgcccaggagggcgaggacgagggcgccagcgccggccagggccccaagcccgaggccgacagccaggagcagggccacccccagaccggctgcgagtgcgaggacggccccgacggccaggagatggacccccccaaccccgaggaggtgaagacccccgaggagggcgagaagcagagccagtgctga

SEQ ID NO: 2723 - RNA, 1344 nt, synthetic construct
  misc_feature 1..1344: note = AAA35657 variant
  source 1..1344: mol_type = other RNA
atggagctgctgaagctgaacagaagcgtgcagggcaccggccccggccccggcgccagcctgtgcagacccggcgcccccctgctgaacagcagcagcgtgggcaacctgagctgcgagccccccagaatcagaggcgccggcaccagagagctggagctggccatcagaatcaccctgtacgccgtgatcttcctgatgagcgtgggcggcaacatgctgatcatcgtggtgctgggcctgagcagaagactgagaaccgtgaccaacgccttcctgctgagcctggccgtgagcgacctgctgctggccgtggcctgcatgcccttcaccctgctgcccaacctgatgggcaccttcatcttcggcaccgtgatctgcaaggccgtgagctacctgatgggcgtgagcgtgagcgtgagcaccctgagcctggtggccatcgccctggagagatacagcgccatctgcagacccctgcaggccagagtgtggcagaccagaagccacgccgccagagtgatcgtggccacctggctgctgagcggcctgctgatggtgccctaccccgtgtacaccgtggtgcagcccgtgggccccagagtgctgcagtgcgtgcacagatggcccagcgccagagtgagacagacctggagcgtgctgctgctgctgctgctgttcttcatccccggcgtggtgatggccgtggcctacggcctgatcagcagagagctgtacctgggcctgagattcgacggcgacagcgacagcgacagccagagcagagtgagaaaccagggcggcctgcccggcgccgtgcaccagaacggcagatgcagacccgagaccggcgccgtgggcgaggacagcgacggctgctacgtgcagctgcccagaagcagacccgccctggagctgaccgccctgaccgcccccggccccggcagcggcagcagacccacccaggccaagctgctggccaagaagagagtggtgagaatgctgctggtgatcgtggtgctgttcttcctgtgctggctgcccgtgtacagcgccaacacctggagagccttcgacggccccggcgcccacagagccctgagcggcgcccccatcagcttcatccacctgctgagctacgccagcgcctgcgtgaaccccctggtgtactgcttcatgcacagaagattcagacaggcctgcctggagacctgcgccagatgctgccccagaccccccagagccagacccagagccctgcccgacgaggacccccccacccccagcatcgccagcctgagcagactgagctacaccaccatcagcaccctgggccccggctga

SEQ ID NO: 2724 - RNA, 2226 nt, synthetic construct
  misc_feature 1..2226: note = AAD22449 variant
  source 1..2226: mol_type = other RNA
atggccctgttcaccccctggaagctgagcagccagaagctgggcttcttcctggtgaccttcggcttcatctggggcatgatgctgctgcacttcaccatccagcagagaacccagcccgagagcagcagcatgctgagagagcagatcctggacctgagcaagagatacatcaaggccctggccgaggagaacagaaacgtggtggacggcccctacgccggcgtgatgaccgcctacgacctgaagaagaccctggccgtgctgctggacaacatcctgcagagaatcggcaagctggagagcaaggtggacaacctggtggtgaacggcaccggcaccaacagcaccaacagcaccaccgccgtgcccagcctggtggccctggagaagatcaacgtggccgacatcatcaacggcgcccaggagaagtgcgtgctgccccccatggacggctacccccactgcgagggcaagatcaagtggatgaaggacatgtggagaagcgacccctgctacgccgactacggcgtggacggcagcacctgcagcttcttcatctacctgagcgaggtggagaactggtgcccccacctgccctggagagccaagaacccctacgaggaggccgaccacaacagcctggccgagatcagaaccgacttcaacatcctgtacagcatgatgaagaagcacgaggagttcagatggatgagactgagaatcagaagaatggccgacgcctggatccaggccatcaagagcctggccgagaagcagaacctggagaagagaaagagaaagaaggtgctggtgcacctgggcctgctgaccaaggagagcggcttcaagatcgccgagaccgccttcagcggcggccccctgggcgagctggtgcagtggagcgacctgatcaccagcctgtacctgctgggccacgacatcagaatcagcgccagcctggccgagctgaaggagatcatgaagaaggtggtgggcaacagaagcggctgccccaccgtgggcgacagaatcgtggagctgatctacatcgacatcgtgggcctggcccagttcaagaagaccctgggccccagctgggtgcactaccagtgcatgctgagagtgctggacagcttcggcaccgagcccgagttcaaccacgccaactacgcccagagcaagggccacaagaccccctggggcaagtggaacctgaacccccagcagttctacaccatgttcccccacacccccgacaacagcttcctgggcttcgtggtggagcagcacctgaacagcagcgacatccaccacatcaacgagatcaagagacagaaccagagcctggtgtacggcaaggtggacagcttctggaagaacaagaagatctacctggacatcatccacacctacatggaggtgcacgccaccgtgtacggcagcagcaccaagaacatccccagctacgtgaagaaccacggcatcctgagcggcagagacctgcagttcctgctgagagagaccaagctgttcgtgggcctgggcttcccctacgagggccccgcccccctggaggccatcgccaacggctgcgccttcctgaaccccaagttcaacccccccaagagcagcaagaacaccgacttcttcatcggcaagcccaccctgagagagctgaccagccagcacccctacgccgaggtgttcatcggcagaccccacgtgtggaccgtggacctgaacaaccaggaggaggtggaggacgccgtgaaggccatcctgaaccagaagatcgagccctacatgccctacgagttcacctgcgagggcatgctgcagagaatcaacgccttcatcgagaagcaggacttctgccacggccaggtgatgtggccccccctgagcgccctgcaggtgaagctggccgagcccggccagagctgcaagcaggtgtgccaggagagccagctgatctgcgagcccagcttcttccagcacctgaacaaggacaaggacatgctgaagtacaaggtgacctgccagagcagcgagctggccaaggacatcctggtgcccagcttcgaccccaagaacaagcactgcgtgttccagggcgacctgctgctgttcagctgcgccggcgcccaccccagacaccagagagtgtgcccctgcagagacttcatcaagggccaggtggccctgtgcaaggactgcctgtga

SEQ ID NO: 2725 - RNA, 1743 nt, synthetic construct
  misc_feature 1..1743: note = EAX11770 variant
  source 1..1743: mol_type = other RNA
atggccggcaccgtgagaaccgcctgcctggtggtggccatgctgctgagcctggacttccccggccaggcccagccccccccccccccccccgacgccacctgccaccaggtgagaagcttcttccagagactgcagcccggcctgaagtgggtgcccgagacccccgtgcccggcagcgacctgcaggtgtgcctgcccaagggccccacctgctgcagcagaaagatggaggagaagtaccagctgaccgccagactgaacatggagcagctgctgcagagcgccagcatggagctgaagttcctgatcatccagaacgccgccgtgttccaggaggccttcgagatcgtggtgagacacgccaagaactacaccaacgccatgttcaagaacaactaccccagcctgaccccccaggccttcgagttcgtgggcgagttcttcaccgacgtgagcctgtacatcctgggcagcgacatcaacgtggacgacatggtgaacgagctgttcgacagcctgttccccgtgatctacacccagctgatgaaccccggcctgcccgacagcgccctggacatcaacgagtgcctgagaggcgccagaagagacctgaaggtgttcggcaacttccccaagctgatcatgacccaggtgagcaagagcctgcaggtgaccagaatcttcctgcaggccctgaacctgggcatcgaggtgatcaacaccaccgaccacctgaagttcagcaaggactgcggcagaatgctgaccagaatgtggtactgcagctactgccagggcctgatgatggtgaagccctgcggcggctactgcaacgtggtgatgcagggctgcatggccggcgtggtggagatcgacaagtactggagagagtacatcctgagcctggaggagctggtgaacggcatgtacagaatctacgacatggagaacgtgctgctgggcctgttcagcaccatccacgacagcatccagtacgtgcagaagaacgccggcaagctgaccaccaccatcggcaagctgtgcgcccacagccagcagagacagtacagaagcgcctactaccccgaggacctgttcatcgacaagaaggtgctgaaggtggcccacgtggagcacgaggagaccctgagcagcagaagaagagagctgatccagaagctgaagagcttcatcagcttctacagcgccctgcccggctacatctgcagccacagccccgtggccgagaacgacaccctgtgctggaacggccaggagctggtggagagatacagccagaaggccgccagaaacggcatgaagaaccagttcaacctgcacgagctgaagatgaagggccccgagcccgtggtgagccagatcatcgacaagctgaagcacatcaaccagctgctgagaaccatgagcatgcccaagggcagagtgctggacaagaacctggacgaggagggcttcgagagcggcgactgcggcgacgacgaggacgagtgcatcggcggcagcggcgacggcatgatcaaggtgaagaaccagctgagattcctggccgagctggcctacgacctggacgtggacgacgcccccggcaacagccagcaggccacccccaaggacaacgagatcagcaccttccacaacctgggcaacgtgcacagccccctgaagctgctgaccagcatggccatcagcgtggtgtgcttcttcttcctggtgcactga

SEQ ID NO: 2726 - RNA, 1743 nt, synthetic construct; identical to SEQ ID NO: 2725
  misc_feature 1..1743: note = AAA93471 variant
  source 1..1743: mol_type = other RNA

SEQ ID NO: 2727 - RNA, 1743 nt, synthetic construct
  misc_feature 1..1743: note = AAH35972 variant
  source 1..1743: mol_type = other RNA
atggccggcaccgtgagaaccgcctgcctggtggtggccatgctgctgagcctggacttccccggccaggcccagccccccccccccccccccgacgccacctgccaccaggtgagaagcttcttccagagactgcagcccggcctgaagtgggtgcccgagacccccgtgcccggcagcgacctgcaggtgtgcctgcccaagggccccacctgctgcagcagaaagatggaggagaagtaccagctgaccgccagactgaacatggagcagctgctgcagagcgccagcatggagctgaagttcctgatcatccagaacgccgccgtgttccaggaggccttcgagatcgtggtgagacacgccaagaactacaccaacgccatgttcaagaacaactaccccagcctgaccccccaggccttcgagttcgtgggcgagttcttcaccgacgtgagcctgtacatcctgggcagcgacatcaacgtggacgacatggtgaacgagctgttcgacagcctgttccccgtgatctacacccagctgatgaaccccggcctgcccgacagcgccctggacatcaacgagtgcctgagaggcgccagaagagacctgaaggtgttcggcaacttccccaagctgatcatgacccaggtgagcaagagcctgcaggtgaccagaatcttcctgcaggccctgaacctgggcatcgaggtgatcaacaccaccgaccacctgaagttcagcaaggactgcggcagaatgctgaccagaatgtggtactgcagctactgccagggcctgatgatggtgaagccctgcggcggctactgcaacgtggtgatgcagggctgcatggccggcgtggtggagatcgacaagtactggagagagtacatcctgagcctggaggagctggtgaacggcatgtacagaatctacgacatggagaacgtgctgctgggcctgttcagcaccatccacgacagcatccagtacgtgcagaagaacgccggcaagctgaccaccaccatcggcaagctgtgcgcccacagccagcagagacagtacagattcgcctactaccccgaggacctgttcatcgacaagaaggtgctgaaggtggcccacgtggagcacgaggagaccctgagcagcagaagaagagagctgatccagaagctgaagagcttcatcagcttctacagcgccctgcccggctacatctgcagccacagccccgtggccgagaacgacaccctgtgctggaacggccaggagctggtggagagatacagccagaaggccgccagaaacggcatgaagaaccagttcaacctgcacgagctgaagatgaagggccccgagcccgtggtgagccagatcatcgacaagctgaagcacatcaaccagctgctgagaaccatgagcatgcccaagggcagagtgctggacaagaacctggacgaggagggcttcgagagcggcgactgcggcgacgacgaggacgagtgcatcggcggcagcggcgacggcatgatcaaggtgaagaaccagctgagattcctggccgagctggcctacgacctggacgtggacgacgcccccggcaacagccagcaggccacccccaaggacaacgagatcagcaccttccacaacctgggcaacgtgcacagccccctgaagctgctgaccagcatggccatcagcgtggtgtgcttcttcttcctggtgcactga

SEQ ID NO: 2728 - RNA, 1683 nt, synthetic construct
  misc_feature 1..1683: note = EAW93784 variant
  source 1..1683: mol_type = other RNA
atggagtgcctgtactacttcctgggcttcctgctgctggccgccagactgcccctggacgccgccaagagattccacgacgtgctgggcaacgagagacccagcgcctacatgagagagcacaaccagctgaacggctggagcagcgacgagaacgactggaacgagaagctgtaccccgtgtggaagagaggcgacatgagatggaagaacagctggaagggcggcagagtgcaggccgtgctgaccagcgacagccccgccctggtgggcagcaacatcaccttcgccgtgaacctgatcttccccagatgccagaaggaggacgccaacggcaacatcgtgtacgagaagaactgcagaaacgaggccggcctgagcgccgacccctacgtgtacaactggaccgcctggagcgaggacagcgacggcgagaacggcaccggccagagccaccacaacgtgttccccgacggcaagcccttcccccaccaccccggctggagaagatggaacttcatctacgtgttccacaccctgggccagtacttccagaagctgggcagatgcagcgtgagagtgagcgtgaacaccgccaacgtgaccctgggcccccagctgatggaggtgaccgtgtacagaagacacggcagagcctacgtgcccatcgcccaggtgaaggacgtgtacgtggtgaccgaccagatccccgtgttcgtgaccatgttccagaagaacgacagaaacagcagcgacgagaccttcctgaaggacctgcccatcatgttcgacgtgctgatccacgaccccagccacttcctgaactacagcaccatcaactacaagtggagcttcggcgacaacaccggcctgttcgtgagcaccaaccacaccgtgaaccacacctacgtgctgaacggcaccttcagcctgaacctgaccgtgaaggccgccgcccccggcccctgccccccccccccccccccccccagacccagcaagcccacccccagcctgggccccgccggcgacaaccccctggagctgagcagaatccccgacgagaactgccagatcaacagatacggccacttccaggccaccatcaccatcgtggagggcatcctggaggtgaacatcatccagatgaccgacgtgctgatgcccgtgccctggcccgagagcagcctgatcgacttcgtggtgacctgccagggcagcatccccaccgaggtgtgcaccatcatcagcgaccccacctgcgagatcacccagaacaccgtgtgcagccccgtggacgtggacgagatgtgcctgctgaccgtgagaagaaccttcaacggcagcggcacctactgcgtgaacctgaccctgggcgacgacaccagcctggccctgaccagcaccctgatcagcgtgcccgacagagaccccgccagccccctgagaatggccaacagcgccctgatcagcgtgggctgcctggccatcttcgtgaccgtgatcagcctgctggtgtacaagaagcacaaggagtacaaccccatcgagaacagccccggcaacgtggtgagaagcaagggcctgagcgtgttcctgaacagagccaaggccgtgttcttccccggcaaccaggagaaggaccccctgctgaagaaccaggagttcaagggcgtgagctga

SEQ ID NO: 2729 - RNA, 1719 nt, synthetic construct
  misc_feature 1..1719: note = AAH32783 variant
  source 1..1719: mol_type = other RNA
atggagtgcctgtactacttcctgggcttcctgctgctggccgccagactgcccctggacgccgccaagagattccacgacgtgctgggcaacgagagacccagcgcctacatgagagagcacaaccagctgaacggctggagcagcgacgagaacgactggaacgagaagctgtaccccgtgtggaagagaggcgacatgagatggaagaacagctggaagggcggcagagtgcaggccgtgctgaccagcgacagccccgccctggtgggcagcaacatcaccttcgccgtgaacctgatcttccccagatgccagaaggaggacgccaacggcaacatcgtgtacgagaagaactgcagaaacgaggccggcctgagcgccgacccctacgtgtacaactggaccgcctggagcgaggacagcgacggcgagaacggcaccggccagagccaccacaacgtgttccccgacggcaagcccttcccccaccaccccggctggagaagatggaacttcatctacgtgttccacaccctgggccagtacttccagaagctgggcagatgcagcgtgagagtgagcgtgaacaccgccaacgtgaccctgggcccccagctgatggaggtgaccgtgtacagaagacacggcagagcctacgtgcccatcgcccaggtgaaggacgtgtacgtggtgaccgaccagatccccgtgttcgtgaccatgttccagaagaacgacagaaacagcagcgacgagaccttcctgaaggacctgcccatcatgttcgacgtgctgatccacgaccccagccacttcctgaactacagcaccatcaactacaagtggagcttcggcgacaacaccggcctgttcgtgagcaccaaccacaccgtgaaccacacctacgtgctgaacggcaccttcagcctgaacctgaccgtgaaggccgccgcccccggcccctgccccccccccccccccccccccagacccagcaagcccacccccagcctggccaccaccctgaagagctacgacagcaacacccccggccccgccggcgacaaccccctggagctgagcagaatccccgacgagaactgccagatcaacagatacggccacttccaggccaccatcaccatcgtggagggcatcctggaggtgaacatcatccagatgaccgacgtgctgatgcccgtgccctggcccgagagcagcctgatcgacttcgtggtgacctgccagggcagcatccccaccgaggtgtgcaccatcatcagcgaccccacctgcgagatcacccagaacaccgtgtgcagccccgtggacgtggacgagatgtgcctgctgaccgtgagaagaaccttcaacggcagcggcacctactgcgtgaacctgaccctgggcgacgacaccagcctggccctgaccagcaccctgatcagcgtgcccgacagagaccccgccagccccctgagaatggccaacagcgccctgatcagcgtgggctgcctggccatcttcgtgaccgtgatcagcctgctggtgtacaagaagcacaaggagtacaaccccatcgagaacagccccggcaacgtggtgagaagcaagggcctgagcgtgttcctgaacagagccaaggccgtgttcttccccggcaaccaggagaaggaccccctgctgaagaaccaggagttcaagggcgtgagctga

SEQ ID NO: 2730 - RNA, 621 nt, synthetic construct
  misc_feature 1..621: note = CAD43718 variant
  source 1..621: mol_type = other RNA
atggagtgcctgtactacttcctgggcttcctgctgctggccgccagactgcccctggacgccgccaagagattccacgacgtgctgggcaacgagagacccagcgcctacatgagagagcacaaccagctgaacggctggagcagcgacgagaacgactggaacgagaagctgtaccccgtgtggaagagaggcgacatgagatggaagaacagctggaagggcggcagagtgcaggccgtgctgaccagcgacagccccgccctggtgggcagcaacatcaccttcgccgtgaacctgatcttccccagatgccagaaggaggacgccaacggcaacatcgtgtacgagaagaactgcagaaacgaggccggcctgagcgccgacccctacgtgtacaactggaccgcctggagcgaggacagcgacggcgagaacggcaccggccagagccaccacaacgtgttccccgacggcaagcccttcccccaccaccccggctggagaagatggaacttcatctacgtgttccacaccctggactggctgctgcagacccccaagctgctgctgtacctgagcctgaagttccagcccagcctgttcctgctgtacaactga

SEQ ID NO: 2731 - RNA, 621 nt, synthetic construct
  misc_feature 1..621: note = AAH11595 variant
  source 1..621: mol_type = other RNA
atggagtgcctgtactacttcctgggcttcctgctgctggccgccagactgcccctggacgccgccaagagattccacgacgtgctgggcaacgagagacccagcgcctacatgagagagcacaaccagctgaacggctggagcagcgacgagaacgactggaacgagaagctgtaccccgtgtggaagagaggcgacatgagatggaagaacagctggaagggcggcagagtgcaggccgtgctgaccagcgacagccccgccctggtgggcagcaacatcaccttcgccgtgaacctgatcttccccagatgccagaaggaggacgccaacggcaacatcgtgtacgagaagaactgcagaaacgaggccggcctgagcgccgacccctacgtgtacaactggaccgcctggagcgaggacagcgacggcgagaacggcaccggccagagccaccacaacgtgttccccgacggcaagcccttcccccaccaccccggctggagaagatggaacttcatctacgtgttccacaccctgggctggctgctgcagacccccaagctgctgctgtacctgagcctgaagttccagcccagcctgttcctgctgtacaactga

SEQ ID NO: 2732 - RNA, 2640 nt, synthetic construct
  misc_feature 1..2640: note = CCDS5600.1 variant
  source 1..2640: mol_type = other RNA
atgaagatgctgaccagactgcaggtgctgaccctggccctgttcagcaagggcttcctgctgagcctgggcgaccacaacttcctgagaagagagatcaagatcgagggcgacctggtgctgggcggcctgttccccatcaacgagaagggcaccggcaccgaggagtgcggcagaatcaacgaggacagaggcatccagagactggaggccatgctgttcgccatcgacgagatcaacaaggacgactacctgctgcccggcgtgaagctgggcgtgcacatcctggacacctgcagcagagacacctacgccctggagcagagcctggagttcgtgagagccagcctgaccaaggtggacgaggccgagtacatgtgccccgacggcagctacgccatccaggagaacatccccctgctgatcgccggcgtgatcggcggcagctacagcagcgtgagcatccaggtggccaacctgctgagactgttccagatcccccagatcagctacgccagcaccagcgccaagctgagcgacaagagcagatacgactacttcgccagaaccgtgccccccgacttctaccaggccaaggccatggccgagatcctgagattcttcaactggacctacgtgagcaccgtggccagcgagggcgactacggcgagaccggcatcgaggccttcgagcaggaggccagactgagaaacatctgcatcgccaccgccgagaaggtgggcagaagcaacatcagaaagagctacgacagcgtgatcagagagctgctgcagaagcccaacgccagagtggtggtgctgttcatgagaagcgacgacagcagagagctgatcgccgccgccagcagagccaacgccagcttcacctgggtggccagcgacggctggggcgcccaggagagcatcatcaagggcagcgagcacgtggcctacggcgccatcaccctggagctggccagccagcccgtgagacagttcgacagatacttccagagcctgaacccctacaacaaccacagaaacccctggttcagagacttctgggagcagaagttccagtgcagcctgcagaacaagagaaaccacagaagagtgtgcgacaagcacctggccatcgacagcagcaactacgagcaggagagcaagatcatgttcgtggtgaacgccgtgtacgccatggcccacgccctgcacaagatgcagagaaccctgtgccccaacaccaccaagctgtgcgacgccatgaagatcctggacggcaagaagctgtacaaggactacctgctgaagatcaacttcaccgcccccttcaaccccaacaaggacgccgacagcatcgtgaagttcgacaccttcggcgacggcatgggcagatacaacgtgttcaacttccagaacgtgggcggcaagtacagctacctgaaggtgggccactgggccgagaccctgagcctggacgtgaacagcatccactggagcagaaacagcgtgcccaccagccagtgcagcgacccctgcgcccccaacgagatgaagaacatgcagcccggcgacgtgtgctgctggatctgcatcccctgcgagccctacgagtacctggccgacgagttcacctgcatggactgcggcagcggccagtggcccaccgccgacctgaccggctgctacgacctgcccgaggactacatcagatgggaggacgcctgggccatcggccccgtgaccatcgcctgcctgggcttcatgtgcacctgcatggtggtgaccgtgttcatcaagcacaacaacacccccctggtgaaggccagcggcagagagctgtgctacatcctgctgttcggcgtgggcctgagctactgcatgaccttcttcttcatcgccaagcccagccccgtgatctgcgccctgagaagactgggcctgggcagcagcttcgccatctgctacagcgccctgctgaccaagaccaactgcatcgccagaatcttcgacggcgtgaagaacggcgcccagagacccaagttcatcagccccagcagccaggtgttcatctgcctgggcctgatcctggtgcagatcgtgatggtgagcgtgtggctgatcctggaggcccccggcaccagaagatacaccctggccgagaagagagagaccgtgatcctgaagtgcaacgtgaaggacagcagcatgctgatcagcctgacctacgacgtgatcctggtgatcctgtgcaccgtgtacgccttcaagaccagaaagtgccccgagaacttcaacgaggccaagttcatcggcttcaccatgtacaccacctgcatcatctggctggccttcctgcccatcttctacgtgaccagcagcgactacagagtgcagaccaccaccatgtgcatcagcgtgagcctgagcggcttcgtggtgctgggctgcctgttcgcccccaaggtgcacatcatcctgttccagccccagaagaacgtggtgacccacagactgcacctgaacagattcagcgtgagcggcaccggcaccacctacagccagagcagcgccagcacctacgtgcccaccgtgtgcaacggcagagaggtgctggacagcaccaccagcagcctgtga

SEQ ID NO: 2733 - RNA, 1947 nt, synthetic construct
  misc_feature 1..1947: note = CCDS4977.1 variant
  source 1..1947: mol_type = other RNA
atgagccaccacggcggcgcccccaaggccagcacctgggtggtggccagcagaagaagcagcaccgtgagcagagcccccgagagaagacccgccgaggagctgaacagaaccggccccgagggctacagcgtgggcagaggcggcagatggagaggcaccagcagaccccccgaggccgtggccgccggccacgaggagctgcccctgtgcttcgccctgaagagccacttcgtgggcgccgtgatcggcagaggcggcagcaagatcaagaacatccagagcaccaccaacaccaccatccagatcatccaggagcagcccgagagcctggtgaagatcttcggcagcaaggccatgcagaccaaggccaaggccgtgatcgacaacttcgtgaagaagctggaggagaactacaacagcgagtgcggcatcgacaccgccttccagcccagcgtgggcaaggacggcagcaccgacaacaacgtggtggccggcgacagacccctgatcgactgggaccagatcagagaggagggcctgaagtggcagaagaccaagtgggccgacctgccccccatcaagaagaacttctacaaggagagcaccgccaccagcgccatgagcaaggtggaggccgacagctggagaaaggagaacttcaacatcacctgggacgacctgaaggacggcgagaagagacccatccccaaccccacctgcaccttcgacgacgccttccagtgctaccccgaggtgatggagaacatcaagaaggccggcttccagaagcccacccccatccagagccaggcctggcccatcgtgctgcagggcatcgacctgatcggcgtggcccagaccggcaccggcaagaccctgtgctacctgatgcccggcttcatccacctggtgctgcagcccagcctgaagggccagagaaacagacccggcatgctggtgctgacccccaccagagagctggccctgcaggtggagggcgagtgctgcaagtacagctacaagggcctgagaagcgtgtgcgtgtacggcggcggcaacagagacgagcagatcgaggagctgaagaagggcgtggacatcatcatcgccacccccggcagactgaacgacctgcagatgagcaacttcgtgaacctgaagaacatcacctacctggtgctggacgaggccgacaagatgctggacatgggcttcgagccccagatcatgaagatcctgctggacgtgagacccgacagacagaccgtgatgaccagcgccacctggccccacagcgtgcacagactggcccagagctacctgaaggagcccatgatcgtgtacgtgggcaccctggacctggtggccgtgagcagcgtgaagcagaacatcatcgtgaccaccgaggaggagaagtggagccacatgcagaccttcctgcagagcatgagcagcaccgacaaggtgatcgtgttcgtgagcagaaaggccgtggccgaccacctgagcagcgacctgatcctgggcaacatcagcgtggagagcctgcacggcgacagagagcagagagacagagagaaggccctggagaacttcaagaccggcaaggtgagaatcctgatcgccaccgacctggccagcagaggcctggacgtgcacgacgtgacccacgtgtacaacttcgacttccccagaaacatcgaggagtacgtgcacagaatcggcagaaccggcagagccggcagaaccggcgtgagcatcaccaccctgaccagaaacgactggagagtggccagcgagctgatcaacatcctggagagagccaaccagagcatccccgaggagctggtgagcatggccgagagattcaaggcccaccagcagaagagagagatggagagaaagatggagagaccccagggcagacccaagaagttccactga

SEQ ID NO: 2734 - RNA, 1209 nt, synthetic construct
  misc_feature 1..1209: note = ACD02430 variant
  source 1..1209: mol_type = other RNA
atggcccagaaggagggcggcagaaccgtgccctgctgcagcagacccaaggtggccgccctgaccgccggcaccctgctgctgctgaccgccatcggcgccgccagctgggccatcgtggccgtgctgctgagaagcgaccaggagcccctgtaccccgtgcaggtgagcagcgccgacgccagactgatggtgttcgacaagaccgagggcacctggagactgctgtgcagcagcagaagcaacgccagagtggccggcctgagctgcgaggagatgggcttcctgagagccctgacccacagcgagctggacgtgagaaccgccggcgccaacggcaccagcggcttcttctgcgtggacgagggcagactgccccacacccagagactgctggaggtgatcagcgtgtgcgactgccccagaggcagattcctggccgccatctgccaggactgcggcagaagaaagctgcccgtggacagaatcgtgggcggcagagacaccagcctgggcagatggccctggcaggtgagcctgagatacgacggcgcccacctgtgcggcggcagcctgctgagcggcgactgggtgctgaccgccgcccactgcttccccgagagaaacagagtgctgagcagatggagagtgttcgccggcgccgtggcccaggccagcccccacggcctgcagctgggcgtgcaggccgtggtgtaccacggcggctacctgcccttcagagaccccaacagcgaggagaacagcaacgacatcgccctggtgcacctgagcagccccctgcccctgaccgagtacatccagcccgtgtgcctgcccgccgccggccaggccctggtggacggcaagatctgcaccgtgaccggctggggcaacacccagtactacggccagcaggccggcgtgctgcaggaggccagagtgcccatcatcagcaacgacgtgtgcaacggcgccgacttctacggcaaccagatcaagcccaagatgttctgcgccggctaccccgagggcggcatcgacgcctgccagggcgacagcggcggccccttcgtgtgcgaggacagcatcagcagaacccccagatggagactgtgcggcatcgtgagctggggcaccggctgcgccctggcccagaagcccggcgtgtacaccaaggtgagcgacttcagagagtggatcttccagtga

SEQ ID NO: 2735 - RNA, 1254 nt, synthetic construct
  misc_feature 1..1254: note = AAA36013 variant
  source 1..1254: mol_type = other RNA
atggcccagaaggagggcggcagaaccgtgccctgctgcagcagacccaaggtggccgccctgaccgccggcaccctgctgctgctgaccgccatcggcgccgccagctgggccatcgtggccgtgctgctgagaagcgaccaggagcccctgtaccccgtgcaggtgagcagcgccgacgccagactgatggtgttcgacaagaccgagggcacctggagactgctgtgcagcagcagaagcaacgccagagtggccggcctgagctgcgaggagatgggcttcctgagagccctgacccacagcgagctggacgtgagaaccgccggcgccaacggcaccagcggcttcttctgcgtggacgagggcagactgccccacacccagagactgctggaggtgatcagcgtgtgcgactgccccagaggcagattcctggccgccatctgccaggactgcggcagaagaaagctgcccgtggacagaatcgtgggcggcagagacaccagcctgggcagatggccctggcaggtgagcctgagatacgacggcgcccacctgtgcggcggcagcctgctgagcggcgactgggtgctgaccgccgcccactgcttccccgagagaaacagagtgctgagcagatggagagtgttcgccggcgccgtggcccaggccagcccccacggcctgcagctgggcgtgcaggccgtggtgtaccacggcggctacctgcccttcagagaccccaacagcgaggagaacagcaacgacatcgccctggtgcacctgagcagccccctgcccctgaccgagtacatccagcccgtgtgcctgcccgccgccggccaggccctggtggacggcaagatctgcaccgtgaccggctggggcaacacccagtactacggccagcaggccggcgtgctgcaggaggccagagtgcccatcatcagcaacgacgtgtgcaacggcgccgacttctacggcaaccagatcaagcccaagatgttctgcgccggctaccccgagggcggcatcgacgcctgccagggcgacagcggcggccccttcgtgtgcgaggacagcatcagcagaacccccagatggagactgtgcggcatcgtgagctggggcaccggctgcgccctggcccagaagcccggcgtgtacaccaaggtgagcgacttcagagagtggatcttccaggccatcaagacccacagcgaggccagcggcatggtgacccagctgtga

SEQ ID NO: 2736 - RNA, 2940 nt, synthetic construct
  misc_feature 1..2940: note = BAG62073 variant
  source 1..2940: mol_type = other RNA
atggagctggccgccctgtgcagatggggcctgctgctggccctgctgccccccggcgccgccagcacccaggacaactacctgagcaccgacgtgggcagctgcaccctggtgtgccccctgcacaaccaggaggtgaccgccgaggacggcacccagagatgcgagaagtgcagcaagccctgcgccagagtgtgctacggcctgggcatggagcacctgagagaggtgagagccgtgaccagcgccaacatccaggagttcgccggctgcaagaagatcttcggcagcctggccttcctgcccgagagcttcgacggcgaccccgccagcaacaccgcccccctgcagcccgagcagctgcaggtgttcgagaccctggaggagatcaccggctacctgtacatcagcgcctggcccgacagcctgcccgacctgagcgtgttccagaacctgcaggtgatcagaggcagaatcctgcacaacggcgcctacagcctgaccctgcagggcctgggcatcagctggctgggcctgagaagcctgagagagctgggcagcggcctggccctgatccaccacaacacccacctgtgcttcgtgcacaccgtgccctgggaccagctgttcagaaacccccaccaggccctgctgcacaccgccaacagacccgaggacgagtgcgtgggcgagggcctggcctgccaccagctgtgcgccagaggccactgctggggccccggccccacccagtgcgtgaactgcagccagttcctgagaggccaggagtgcgtggaggagtgcagagtgctgcagggcctgcccagagagtacgtgaacgccagacactgcctgccctgccaccccgagtgccagccccagaacggcagcgtgacctgcttcggccccgaggccgaccagtgcgtggcctgcgcccactacaaggacccccccttctgcgtggccagatgccccagcggcgtgaagcccgacctgagctacatgcccatctggaagttccccgacgaggagggcgcctgccagccctgccccatcaactgcacccacagctgcgtggacctggacgacaagggctgccccgccgagcagagagccagccccctgaccagcatcatcagcgccgtggtgggcatcctgctggtggtggtgctgggcgtggtgttcggcatcctgatcaagagaagacagcagaagatcagaaagtacaccatgagaagactgctgcaggagaccgagctggtggagcccctgacccccagcggcgccatgcccaaccaggcccagatgagaatcctgaaggagaccgagctgagaaaggtgaaggtgctgggcagcggcgccttcggcaccgtgtacaagggcatctggatccccgacggcgagaacgtgaagatccccgtggccatcaaggtgctgagagagaacaccagccccaaggccaacaaggagatcctggacgaggcctacgtgatggccggcgtgggcagcccctacgtgagcagactgctgggcatctgcctgaccagcaccgtgcagctggtgacccagctgatgccctacggctgcctgctggaccacgtgagagagaacagaggcagactgggcagccaggacctgctgaactggtgcatgcagatcgccaagggcatgagctacctggaggacgtgagactggtgcacagagacctggccgccagaaacgtgctggtgaagagccccaaccacgtgaagatcaccgacttcggcctggccagactgctggacatcgacgagaccgagtaccacgccgacggcggcaaggtgcccatcaagtggatggccctggagagcatcctgagaagaagattcacccaccagagcgacgtgtggagctacggcgtgaccgtgtgggagctgatgaccttcggcgccaagccctacgacggcatccccgccagagagatccccgacctgctggagaagggcgagagactgccccagccccccatctgcaccatcgacgtgtacatgatcatggtgaagtgctggatgatcgacagcgagtgcagacccagattcagagagctggtgagcgagttcagcagaatggccagagacccccagagattcgtggtgatccagaacgaggacctgggccccgccagccccctggacagcaccttctacagaagcctgctggaggacgacgacatgggcgacctggtggacgccgaggagtacctggtgccccagcagggcttcttctgccccgaccccgcccccggcgccggcggcatggtgcaccacagacacagaagcagcagcaccagaagcggcggcggcgacctgaccctgggcctggagcccagcgaggaggaggcccccagaagccccctggcccccagcgagggcgccggcagcgacgtgttcgacggcgacctgggcatgggcgccgccaagggcctgcagagcctgcccacccacgaccccagccccctgcagagatacagcgaggaccccaccgtgcccctgcccagcgagaccgacggctacgtggcccccctgacctgcagcccccagcccgagtacgtgaaccagcccgacgtgagaccccagccccccagccccagagagggccccctgcccgccgccagacccgccggcgccaccctggagagacccaagaccctgagccccggcaagaacggcgtggtgaaggacgtgttcgccttcggcggcgccgtggagaaccccgagtacctgaccccccagggcggcgccgccccccagccccaccccccccccgccttcagccccgccttcgacaacctgtactactgggaccaggacccccccgagagaggcgccccccccagcaccttcaagggcacccccaccgccgagaaccccgagtacctgggcctggacgtgcccgtgtga

SEQ ID NO: 2737 - RNA, 264 nt, synthetic construct
  misc_feature 1..264: note = CCQ43016 variant
  source 1..264: mol_type = other RNA
atgatgagaatgaagaccttcgtgatgatccacttccacctgatgaacggcggcaaggccaagctgtacagcagaccccacgccaagctgctgcccgagcagagagtgaccgacaagaccggcgcccccgtggagtggcccggccagacccagtgcagcaccgagacccagaccctggccgccatgcccgcccaggccgtgatgagagtgacctgcaccgtggtggacatgcacaagagcgagtgcgcccccgcccagacctga

SEQ ID NO: 2738 - RNA, 3768 nt, synthetic construct
  misc_feature 1..3768: note = AAI67147 variant
  source 1..3768: mol_type = other RNA
atggagctggccgccctgtgcagatggggcctgctgctggccctgctgccccccggcgccgccagcacccaggtgtgcaccggcaccgacatgaagctgagactgcccgccagccccgagacccacctggacatgctgagacacctgtaccagggctgccaggtggtgcagggcaacctggagctgacctacctgcccaccaacgccagcctgagcttcctgcaggacatccaggaggtgcagggctacgtgctgatcgcccacaaccaggtgagacaggtgcccctgcagagactgagaatcgtgagaggcacccagctgttcgaggacaactacgccctggccgtgctggacaacggcgaccccctgaacaacaccacccccgtgaccggcgccagccccggcggcctgagagagctgcagctgagaagcctgaccgagatcctgaagggcggcgtgctgatccagagaaacccccagctgtgctaccaggacaccatcctgtggaaggacatcttccacaagaacaaccagctggccctgaccctgatcgacaccaacagaagcagagcctgccacccctgcagccccatgtgcaagggcagcagatgctggggcgagagcagcgaggactgccagagcctgaccagaaccgtgtgcgccggcggctgcgccagatgcaagggccccctgcccaccgactgctgccacgagcagtgcgccgccggctgcaccggccccaagcacagcgactgcctggcctgcctgcacttcaaccacagcggcatctgcgagctgcactgccccgccctggtgacctacaacaccgacaccttcgagagcatgcccaaccccgagggcagatacaccttcggcgccagctgcgtgaccgcctgcccctacaactacctgagcaccgacgtgggcagctgcaccctggtgtgccccctgcacaaccaggaggtgaccgccgaggacggcacccagagatgcgagaagtgcagcaagccctgcgccagagtgtgctacggcctgggcatggagcacctgagagaggtgagagccgtgaccagcgccaacatccaggagttcgccggctgcaagaagatcttcggcagcctggccttcctgcccgagagcttcgacggcgaccccgccagcaacaccgcccccctgcagcccgagcagctgcaggtgttcgagaccctggaggagatcaccggctacctgtacatcagcgcctggcccgacagcctgcccgacctgagcgtgttccagaacctgcaggtgatcagaggcagaatcctgcacaacggcgcctacagcctgaccctgcagggcctgggcatcagctggctgggcctgagaagcctgagagagctgggcagcggcctggccctgatccaccacaacacccacctgtgcttcgtgcacaccgtgccctgggaccagctgttcagaaacccccaccaggccctgctgcacaccgccaacagacccgaggacgagtgcgtgggcgagggcctggcctgccaccagctgtgcgccagaggccactgctggggccccggccccacccagtgcgtgaactgcagccagttcctgagaggccaggagtgcgtggaggagtgcagagtgctgcagggcctgcccagagagtacgtgaacgccagacactgcctgccctgccaccccgagtgccagccccagaacggcagcgtgacctgcttcggccccgaggccgaccagtgcgtggcctgcgcccactacaaggacccccccttctgcgtggccagatgccccagcggcgtgaagcccgacctgagctacatgcccatctggaagttccccgacgaggagggcgcctgccagccctgccccatcaactgcacccacagctgcgtggacctggacgacaagggctgccccgccgagcagagagccagccccctgaccagcatcatcagcgccgtggtgggcatcctgctggtggtggtgctgggcgtggtgttcggcatcctgatcaagagaagacagcagaagatcagaaagtacaccatgagaagactgctgcaggagaccgagctggtggagcccctgacccccagcggcgccatgcccaaccaggcccagatgagaatcctgaaggagaccgagctgagaaaggtgaaggtgctgggcagcggcgccttcggcaccgtgtacaagggcatctggatccccgacggcgagaacgtgaagatccccgtggccatcaaggtgctgagagagaacaccagccccaaggccaacaaggagatcctggacgaggcctacgtgatggccggcgtgggcagcccctacgtgagcagactgctgggcatctgcctgaccagcaccgtgcagctggtgacccagctgatgccctacggctgcctgctggaccacgtgagagagaacagaggcagactgggcagccaggacctgctgaactggtgcatgcagatcgccaagggcatgagctacctggaggacgtgagactggtgcacagagacctggccgccagaaacgtgctggtgaagagccccaaccacgtgaagatcaccgacttcggcctggccagactgctggacatcgacgagaccgagtaccacgccgacggcggcaaggtgcccatcaagtggatggccctggagagcatcctgagaagaagattcacccaccagagcgacgtgtggagctacggcgtgaccgtgtgggagctgatgaccttcggcgccaagccctacgacggcatccccgccagagagatccccgacctgctggagaagggcgagagactgccccagccccccatctgcaccatcgacgtgtacatgatcatggtgaagtgctggatgatcgacagcgagtgcagacccagattcagagagctggtgagcgagttcagcagaatggccagagacccccagagattcgtggtgatccagaacgaggacctgggccccgccagccccctggacagcaccttctacagaagcctgctggaggacgacgacatgggcgacctggtggacgccgaggagtacctggtgccccagcagggcttcttctgccccgaccccgcccccggcgccggcggcatggtgcaccacagacacagaagcagcagcaccagaagcggcggcggcgacctgaccctgggcctggagcccagcgaggaggaggcccccagaagccccctggcccccagcgagggcgccggcagcgacgtgttcgacggcgacctgggcatgggcgccgccaagggcctgcagagcctgcccacccacgaccccagccccctgcagagatacagcgaggaccccaccgtgcccctgcccagcgagaccgacggctacgtggcccccctgacctgcagcccccagcccgagtacgtgaaccagcccgacgtgagaccccagccccccagccccagagagggccccctgcccgccgccagacccgccggcgccaccctggagagacccaagaccctgagccccggcaagaacggcgtggtgaaggacgtgttcgccttcggcggcgccgtggagaaccccgagtacctgaccccccagggcggcgccgccccccagccccaccccccccccgccttcagccccgccttcgacaacctgtactactgggaccaggacccccccgagagaggcgccccccccagcaccttcaagggcacccccaccgccgagaaccccgagtacctgggcctggacgtgcccgtgtga

SEQ ID NO: 2739 - RNA, 1260 nt, synthetic construct
  misc_feature 1..1260: note = AAD56009 variant
  source 1..1260: mol_type = other RNA
atggagctggccgccctgtgcagatggggcctgctgctggccctgctgccccccggcgccgccagcacccaggtgtgcaccggcaccgacatgaagctgagactgcccgccagccccgagacccacctggacatgctgagacacctgtaccagggctgccaggtggtgcagggcaacctggagctgacctacctgcccaccaacgccagcctgagcttcctgcaggacatccaggaggtgcagggctacgtgctgatcgcccacaaccaggtgagacaggtgcccctgcagagactgagaatcgtgagaggcacccagctgttcgaggacaactacgccctggccgtgctggacaacggcgaccccctgaacaacaccacccccgtgaccggcgccagccccggcggcctgagagagctgcagctgagaagcctgaccgagatcctgaagggcggcgtgctgatccagagaaacccccagctgtgctaccaggacaccatcctgtggaaggacatcttccacaagaacaaccagctggccctgaccctgatcgacaccaacagaagcagagcctgccacccctgcagccccatgtgcaagggcagcagatgctggggcgagagcagcgaggactgccagagcctgaccagaaccgtgtgcgccggcggctgcgccagatgcaagggccccctgcccaccgactgctgccacgagcagtgcgccgccggctgcaccggccccaagcacagcgactgcctggcctgcctgcacttcaaccacagcggcatctgcgagctgcactgccccgccctggtgacctacaacaccgacaccttcgagagcatgcccaaccccgagggcagatacaccttcggcgccagctgcgtgaccgcctgcccctacaactacctgagcaccgacgtgggcagctgcaccctggtgtgccccctgcacaaccaggaggtgaccgccgaggacggcacccagagatgcgagaagtgcagcaagccctgcgccagaggcacccacagcctgccccccagacccgccgccgtgcccgtgcccctgagaatgcagcccggccccgcccaccccgtgctgagcttcctgagacccagctgggacctggtgagcgccttctacagcctgcccctggcccccctgagccccaccagcgtgcccatcagccccgtgagcgtgggcagaggccccgaccccgacgcccacgtggccgtggacctgagcagatacgagggctga

SEQ ID NO: 2740 - RNA, 546 nt, synthetic construct
  misc_feature 1..546: note = U70863.1 variant
  source 1..546: mol_type = other RNA
ggcagccacagcatgagatacttcttcaccagcgtgagcagacccggcagaggcgagcccagattcatcgccgtgggctacgtggacgacacccagttcgtgagattcgacagcgacgccgccagccagagaatggagcccagagccccctggatcgagcaggagggccccgagtactgggacggcgagaccagaaaggtgaaggcccacagccagacccacagagtggacctgggcaccctgagaggctactacaaccagagcgaggccggcagccacaccgtgcagagaatgtacggctgcgacgtgggcagcgactggagattcctgagaggctaccaccagtacgcctacgacggcaaggactacatcgccctgaaggaggacctgagaagctggaccgccgccgacatggccgcccagaccaccaagcacaagtgggagaccgcccacgtggccgagcagctgagagcctacctggagggcacctgcgtggagtggctgagaagatacctggagaacggcaaggagaccctgcagagaacc

SEQ ID NO: 2741 - RNA, 543 nt, synthetic construct
  misc_feature 1..543: note = AH009136.2 variant
  source 1..543: mol_type = other RNA
agccacagcatgagatacttcttcaccagcgtgagcagacccggcagaggcgagcccagattcatcgccgtgggctacgtggacgacacccagttcgtgagattcgacagcgacgccgccagccagagaatggagcccagagccccctggatcgagcaggagggccccgagtactgggacggcgagaccagaaaggtgaaggcccacagccagacccacagagtggacctgggcaccctgagaggctactacaaccagagcgaggccggcagccacaccgtgcagagaatgtacggctgcgacgtgggcagcgactggagattcctgagaggctaccaccagtacgcctacgacggcaaggactacatcgccctgaaggaggacctgagaagctggaccgccgccgacatggccgcccagaccaccaagcacaagtgggaggccgcccacgtggccgagcagctgagagcctacctggagggcacctgcgtggagtggctgagaagatacctggagaacggcaaggagaccctgcagagaacc

SEQ ID NO: 2742 - RNA, 705 nt, synthetic construct
  misc_feature 1..705: note = AAG09781 variant
  source 1..705: mol_type = other RNA
atgctgagagtgcccgagcccagacccggcgaggccaaggccgagggcgccgccccccccacccccagcaagcccctgaccagcttcctgatccaggacatcctgagagacggcgcccagagacagggcggcagaaccagcagccagagacagagagaccccgagcccgagcccgagcccgagcccgagggcggcagaagcagagccggcgcccagaacgaccagctgagcaccggccccagagccgcccccgaggaggccgagaccctggccgagaccgagcccgagagacacctgggcagctacctgctggacagcgagaacaccagcggcgccctgcccagactgccccagacccccaagcagccccagaagagaagcagagccgccttcagccacacccaggtgatcgagctggagagaaagttcagccaccagaagtacctgagcgcccccgagagagcccacctggccaagaacctgaagctgaccgagacccaggtgaagatctggttccagaacagaagatacaagaccaagagaaagcagctgagcagcgagctgggcgacctggagaagcacagcagcctgcccgccctgaaggaggaggccttcagcagagccagcctggtgagcgtgtacaacagctacccctactacccctacctgtactgcgtgggcagctggagccccgccttctggtga

SEQ ID NO: 2743 - RNA, 942 nt, synthetic construct
  misc_feature 1..942: note = BAG37303 variant
  source 1..942: mol_type = other RNA
atggccagcttcagaaagctgaccctgagcgagaaggtgccccccaaccaccccagcagaaagaaggtgaacttcctggacatgagcctggacgacatcatcatctacaaggagctggagggcaccaacgccgaggaggagaagaacaagagacagaaccacagcaagaaggagagccccagcagacagcagagcaaggcccacagacacagacacagaagagactacagcagatgcagaagcaacagcgaggagggcaaccacgacaagaagcccagccagaagcccagcggcttcaagagcggccagcaccccctgaacggccagcccctgatcgagcaggagaagtgcagcgacaactacgaggcccaggccgagaagaaccagggccagagcgagggcaaccagcaccagagcgagggcaaccccgacaagagcgaggagagccagggccagcccgaggagaaccaccacagcgagagaagcagaaaccacctggagagaagcctgagccagagcgacagaagccagggccagctgaagagacaccacccccagtacgagagaagccacggccagtacaagagaagccacggccagagcgagagaagccacggccacagcgagagaagccacggccacagcgagagaagccacggccacagcgagagaagccacggccacagcaagagaagcagaagccagggcgacctggtggacacccagagcgacctgatcgccacccagagagacctgatcgccacccagaaggacctgatcgccacccagagagacctgatcgccacccagagagacctgatcgtgacccagagagacctggtggccaccgagagagacctgatcaaccagagcggcagaagccacggccagagcgagagacaccagagatacagcaccggcaagaacaccatcaccacctga

SEQ ID NO: 2744 - RNA, 942 nt, synthetic construct
  misc_feature 1..942: note = AAI28135 variant
  source 1..942: mol_type = other RNA
atggccagcttcagaaagctgaccctgagcgagaaggtgccccccaaccaccccagcagaaagaaggtgaacttcctggacatgagcctggacgacatcatcatctacaaggagctggagggcaccaacgccgaggaggagaagaacaagagacagaaccacagcaagaaggagagccccagcagacagcagagcaaggcccacagacacagacacagaagaggctacagcagatgcagaagcaacagcgaggagggcaaccacgacaagaagcccagccagaagcccagcggcttcaagagcggccagcaccccctgaacggccagcccctgatcgagcaggagaagtgcagcgacaactacgaggcccaggccgagaagaaccagggccagagcgagggcaaccagcaccagagcgagggcaaccccgacaagagcgaggagagccagggccagcccgaggagaaccaccacagcgagagaagcagaaaccacctggagagaagcctgagccagagcgacagaagccagggccagctgaagagacaccacccccagtacgagagaagccacggccagtacaagagaagccacggccagagcgagagaagccacggccacagcgagagaagccacggccacagcgagagaagccacggccacagcgagagaagccacggccacagcaagagaagcagaagccagggcgacctggtggacacccagagcgacctgatcgccacccagagagacctgatcgccacccagaaggacctgatcgccacccagagagacctgatcgccacccagagagacctgatcgtgacccagagagacctggtggccaccgagagagacctgatcaaccagagcggcagaagccacggccagagcgagagacaccagagatacagcaccggcaagaacaccatcaccacctga

SEQ ID NO: 2745 - RNA, 384 nt, synthetic construct
  misc_feature 1..384: note = 12543784 variant
  source 1..384: mol_type = other RNA
atgatcaagaagaacctgaagaagctgggcatcgaggagacctacctgaacatcatcaaggccatctacgacagacccaccgccagcatccagaagaccgagaacctgagcaccaagaccggcaccagccaggagtaccacctgagccccctgtggttctacatcgtgctggagatcctggccagcaccatcagacaggagaagaacctgaaggacatccacaccgagaaggaggaggtgaagctgagcctgttcgccgacgccatgatcctgtacctgaagaagcccaacgacagcaccagaaagctgctggagctgatcaagaagatccacagcagctgcagaatcaagatcaacatccacttcgccttctgcagccagtga

SEQ ID NO: 2746 - RNA, 1926 nt, synthetic construct
  misc_feature 1..1926: note = AAA63226 variant
  source 1..1926: mol_type = other RNA
atggccaaggccgccgccatcggcatcgacctgggcaccacctacagctgcgtgggcgtgttccagcacggcaaggtggagatcatcgccaacgaccagggcaacagaaccacccccagctacgtggccttcaccgacaccgagagactgatcggcgacgccgccaagaaccaggtggccctgaacccccagaacaccgtgttcgacgccaagagactgatcggcagaaagttcggcgaccccgtggtgcagagcgacatgaagcactggcccttccaggtgatcaacgacggcgacaagcccaaggtgcaggtgagctacaagggcgagaccaaggccttctaccccgaggagatcagcagcatggtgctgaccaagatgaaggagatcgccgaggcctacctgggctaccccgtgaccaacgccgtgatcaccgtgcccgcctacttcaacgacagccagagacaggccaccaaggacgccggcgtgatcgccggcctgaacgtgctgagaatcatcaacgagcccaccgccgccgccatcgcctacggcctggacagaaccggcaagggcgagagaaacgtgctgatcttcgacctgggcggcggcaccttcgacgtgagcatcctgaccatcgacgacggcatcttcgaggtgaaggccaccgccggcgacacccacctgggcggcgaggacttcgacaacagactggtgaaccacttcgtggaggagttcaagagaaagcacaagaaggacatcagccagaacaagagagccgtgagaagactgagaaccgcctgcgagagagccaagagaaccctgagcagcagcacccaggccagcctggagatcgacagcctgttcgagggcatcgacttctacaccagcatcaccagagccagattcgaggagctgtgcagcgacctgttcagaagcaccctggagcccgtggagaaggccctgagagacgccaagctggacaaggcccagatccacgacctggtgctggtgggcggcagcaccagaatccccaaggtgcagaagctgctgcaggacttcttcaacggcagagacctgaacaagagcatcaaccccgacgaggccgtggcctacggcgccgccgtgcaggccgccatcctgatgggcgacaagagcgagaacgtgcaggacctgctgctgctggacgtggcccccctgagcctgggcctggagaccgccggcggcgtgatgaccgccctgatcaagagaaacagcaccatccccaccaagcagacccagatcttcaccacctacagcgacaaccagcccggcgtgctgatccaggtgtacgagggcgagagagccatgaccaaggacaacaacctgctgggcagattcgagctgagcggcatcccccccgcccccagaggcgtgccccagatcgaggtgaccttcgacatcgacgccaacggcatcctgaacgtgaccgccaccgacaagagcaccggcaaggccaacaagatcaccatcaccaacgacaagggcagactgagcaaggaggagatcgagagaatggtgcaggaggccgagaagtacaaggccgaggacgaggtgcagagagagagagtgagcgccaagaacgccctggagagctacgccttcaacatgaagagcgccgtggaggacgagggcctgaagggcaagatcagcgaggccgacaagaagaaggtgctggacaagtgccaggaggtgatcagctggctggacgccaacaccctggccgagaaggacgagttcgagcacaagagaaaggagctggagcaggtgtgcaaccccatcatcagcggcctgtaccagggcgccggcggccccggccccggcggcttcggcgcccagggccccaagggcggcagcggcagcggccccaccatcgaggaggtggactga

SEQ ID NO: 2747 - RNA, 1926 nt, synthetic construct; identical to SEQ ID NO: 2746
  misc_feature 1..1926: note = AAA63227 variant
  source 1..1926: mol_type = other RNA

SEQ ID NO: 2748 - RNA, 627 nt, synthetic construct
  misc_feature 1..627: note = AAI21098 variant
  source 1..627: mol_type = other RNA
atggccctgggccagaagctgttcatcaccatgagcagaggcgccggcagactgcagggcaccctgtgggccctggtgttcctgggcatcctggtgggcatggtggtgcccagccccgccggcaccagagccaacaacaccctgctggacagcagaggctggggcaccctgctgagcagaagcagagccggcctggccggcgagatcgccggcgtgaactgggagagcggctacctggtgggcatcaagagacagagaagactgtactgcaacgtgggcatcggcttccacctgcaggtgctgcccgacggcagaatcagcggcacccacgaggagaacccctacagcctgctggagatcagcaccgtggagagaggcgtggtgagcctgttcggcgtgagaagcgccctgttcgtggccatgaacagcaagggcagactgtacgccacccccagcttccaggaggagtgcaagttcagagagaccctgctgcccaacaactacaacgcctacgagagcgacctgtaccagggcacctacatcgccctgagcaagtacggcagagtgaagagaggcagcaaggtgagccccatcatgaccgtgacccacttcctgcccagaatctga

SEQ ID NO: 2749 - RNA, 1569 nt, synthetic construct
  misc_feature 1..1569: note = BAA74724 variant
  source 1..1569: mol_type = other RNA
atgcccagagcccccagatgcagagccgtgagaagcctgctgagaagccactacagagaggtgctgcccctggccaccttcgtgagaagactgggcccccagggctggagactggtgcagagaggcgaccccgccgccttcagagccctggtggcccagtgcctggtgtgcgtgccctgggacgccagacccccccccgccgcccccagcttcagacaggtgagctgcctgaaggagctggtggccagagtgctgcagagactgtgcgagagaggcgccaagaacgtgctggccttcggcttcgccctgctggacggcgccagaggcggcccccccgaggccttcaccaccagcgtgagaagctacctgcccaacaccgtgaccgacgccctgagaggcagcggcgcctggggcctgctgctgagaagagtgggcgacgacgtgctggtgcacctgctggccagatgcgccctgttcgtgctggtggcccccagctgcgcctaccaggtgtgcggcccccccctgtaccagctgggcgccgccacccaggccagaccccccccccacgccagcggccccagaagaagactgggctgcgagagagcctggaaccacagcgtgagagaggccggcgtgcccctgggcctgcccgcccccggcgccagaagaagaggcggcagcgccagcagaagcctgcccctgcccaagagacccagaagaggcgccgcccccgagcccgagagaacccccgtgggccagggcagctgggcccaccccggcagaaccagaggccccagcgacagaggcttctgcgtggtgagccccgccagacccgccgaggaggccaccagcctggagggcgccctgagcggcaccagacacagccaccccagcgtgggcagacagcaccacgccggcccccccagcaccagcagaccccccagaccctgggacaccccctgcccccccgtgtacgccgagaccaagcacttcctgtacagcagcggcgacaaggagcagctgagacccagcttcctgctgagcagcctgagacccatcctgaccggcgccagaagactggtggagaccatcttcctgggcagcagccccggctgccagggcctgcccgccggctgccccgcctgccccagcgccaccggcaagtgcggcccctgcttctggagctgcctgggcaccaccagaagcgcccccaccggctgcagcagcagaagaaccgccagatgcgagctgagaagcccccagcagcccgtgagcgtgcccggcagaagccccagagccctgtggagaccccccagaagaagaacccagacccccgtggcctggtgcagctgcagcgccagcaccgcccccctggccggcgtgagactgagagccggcctgcccgcccccgccggcgcccccagacccctgggcctgcaggcccagagaagaagattcctgagaaacaccaagaagttcatcagcctgggcaagcacgccaagctgagcctgcaggagctgacctggaagatgagcgtgagagactgcgcctggctgagaagaagcccc

SEQ ID NO: 2750 - RNA, 1680 nt, synthetic construct
  misc_feature 1..1680: note = BAA23606 variant
  source 1..1680: mol_type = other RNA
atgagactgcacagactgagagccagactgagcgccgtggcctgcggcctgctgctgctgctggtgagaggccagggccaggacagcgccagccccatcagaaccacccacaccggccaggtgctgggcagcctggtgcacgtgaagggcgccaacgccggcgtgcagaccttcctgggcatccccttcgccaagccccccctgggccccctgagattcgccccccccgagccccccgagagctggagcggcgtgagagacggcaccacccaccccgccatgtgcctgcaggacctgaccgccgtggagagcgagttcctgagccagttcaacatgaccttccccagcgacagcatgagcgaggactgcctgtacctgagcatctacacccccgcccacagccacgagggcagcaacctgcccgtgatggtgtggatccacggcggcgccctggtgttcggcatggccagcctgtacgacggcagcatgctggccgccctggagaacgtggtggtggtgatcatccagtacagactgggcgtgctgggcttcttcagcaccggcgacaagcacgccaccggcaactggggctacctggaccaggtggccgccctgagatgggtgcagcagaacatcgcccacttcggcggcaaccccgacagagtgaccatcttcggcgagagcgccggcggcaccagcgtgagcagcctggtggtgagccccatcagccagggcctgttccacggcgccatcatggagagcggcgtggccctgctgcccggcctgatcgccagcagcgccgacgtgatcagcaccgtggtggccaacctgagcgcctgcgaccaggtggacagcgaggccctggtgggctgcctgagaggcaagagcaaggaggagatcctggccatcaacaagcccttcaagatgatccccggcgtggtggacggcgtgttcctgcccagacacccccaggagctgctggccagcgccgacttccagcccgtgcccagcatcgtgggcgtgaacaacaacgagttcggctggctgatccccaaggtgatgagaatctacgacacccagaaggagatggacagagaggccagccaggccgccctgcagaagatgctgaccctgctgatgctgccccccaccttcggcgacctgctgagagaggagtacatcggcgacaacggcgacccccagaccctgcaggcccagttccaggagatgatggccgacagcatgttcgtgatccccgccctgcaggtggcccacttccagtgcagcagagcccccgtgtacttctacgagttccagcaccagcccagctggctgaagaacatcagacccccccacatgaaggccgaccacggcgacgagctgcccttcgtgttcagaagcttcttcggcggcaactacatcaagttcaccgaggaggaggagcagctgagcagaaagatgatgaagtactgggccaacttcgccagaaacggcaaccccaacggcgagggcctgccccactggcccctgttcgaccaggaggagcagtacctgcagctgaacctgcagcccgccgtgggcagagccctgaaggcccacagactgcagttctggaagaaggccctgccccagaagatccaggagctggaggagcccgaggagagacacaccgagctgtga

SEQ ID NO: 2751 - RNA, 1740 nt, synthetic construct
  misc_feature 1..1740: note = AAH65269 variant
  source 1..1740: mol_type = other RNA
atgaacaagctgtacatcggcaacctgagcgagaacgccgcccccagcgacctggagagcatcttcaaggacgccaagatccccgtgagcggccccttcctggtgaagaccggctacgccttcgtggactgccccgacgagagctgggccctgaaggccatcgaggccctgagcggcaagatcgagctgcacggcaagcccatcgaggtggagcacagcgtgcccaagagacagagaatcagaaagctgcagatcagaaacatccccccccacctgcagtgggaggtgctggacagcctgctggtgcagtacggcgtggtggagagctgcgagcaggtgaacaccgacagcgagaccgccgtggtgaacgtgacctacagcagcaaggaccaggccagacaggccctggacaagctgaacggcttccagctggagaacttcaccctgaaggtggcctacatccccgacgagatggccgcccagcagaaccccctgcagcagcccagaggcagaagaggcctgggccagagaggcagcagcagacagggcagccccggcagcgtgagcaagcagaagccctgcgacctgcccctgagactgctggtgcccacccagttcgtgggcgccatcatcggcaaggagggcgccaccatcagaaacatcaccaagcagacccagagcaagatcgacgtgcacagaaaggagaacgccggcgccgccgagaagagcatcaccatcctgagcacccccgagggcaccagcgccgcctgcaagagcatcctggagatcatgcacaaggaggcccaggacatcaagttcaccgaggagatccccctgaagatcctggcccacaacaacttcgtgggcagactgatcggcaaggagggcagaaacctgaagaagatcgagcaggacaccgacaccaagatcaccatcagccccctgcaggagctgaccctgtacaaccccgagagaaccatcaccgtgaagggcaacgtggagacctgcgccaaggccgaggaggagatcatgaagaagatcagagagagctacgagaacgacatcgccagcatgaacctgcaggcccacctgatccccggcctgaacctgaacgccctgggcctgttcccccccaccagcggcatgcccccccccaccagcggcccccccagcgccatgacccccccctacccccagttcgagcagagcgagaccgagaccgtgcacctgttcatccccgccctgagcgtgggcgccatcatcggcaagcagggccagcacatcaagcagctgagcagattcgccggcgccagcatcaagatcgcccccgccgaggcccccgacgccaaggtgagaatggtgatcatcaccggcccccccgaggcccagttcaaggcccagggcagaatctacggcaagatcaaggaggagaacttcgtgagccccaaggaggaggtgaagctggaggcccacatcagagtgcccagcttcgccgccggcagagtgatcggcaagggcggcaagaccgtgaacgagctgcagaacctgagcagcgccgaggtggtggtgcccagagaccagacccccgacgagaacgaccaggtggtggtgaagatcaccggccacttctacgcctgccaggtggcccagagaaagatccaggagatcctgacccaggtgaagcagcaccagcagcagaaggccctgcagagcggccccccccagagcagaagaaagtga

SEQ ID NO: 2752 - RNA, 537 nt, synthetic construct
  misc_feature 1..537: note = AAA63207 variant
  source 1..537: mol_type = other RNA
atgcacagcagcgccctgctgtgctgcctggtgctgctgaccggcgtgagagccagccccggccagggcacccagagcgagaacagctgcacccacttccccggcaacctgcccaacatgctgagagacctgagagacgccttcagcagagtgaagaccttcttccagatgaaggaccagctggacaacctgctgctgaaggagagcctgctggaggacttcaagggctacctgggctgccaggccctgagcgagatgatccagttctacctggaggaggtgatgccccaggccgagaaccaggaccccgacatcaaggcccacgtgaacagcctgggcgagaacctgaagaccctgagactgagactgagaagatgccacagattcctgccctgcgagaacaagagcaaggccgtggagcaggtgaagaacgccttcaacaagctgcaggagaagggcatctacaaggccatgagcgagttcgacatcttcatcaactacatcgaggcctacatgaccatgaagatcagaaactga

SEQ ID NO: 2753 - RNA, 1143 nt, synthetic construct
  misc_feature 1..1143: note = AAB17170 variant
  source 1..1143: mol_type = other RNA
atggccttcgtgtgcctggccatcggctgcctgtacaccttcctgatcagcaccaccttcggctgcaccagcagcagcgacaccgagatcaaggtgaaccccccccaggacttcgagatcgtggaccccggctacctgggctacctgtacctgcagtggcagccccccctgagcctggaccacttcaaggagtgcaccgtggagtacgagctgaagtacagaaacatcggcagcgagacctggaagaccatcatcaccaagaacctgcactacaaggacggcttcgacctgaacaagggcatcgaggccaagatccacaccctgctgccctggcagtgcaccaacggcagcgaggtgcagagcagctgggccgagaccacctactggatcagcccccagggcatccccgagaccaaggtgcaggacatggactgcgtgtactacaactggcagtacctgctgtgcagctggaagcccggcatcggcgtgctgctggacaccaactacaacctgttctactggtacgagggcctggaccacgccctgcagtgcgtggactacatcaaggccgacggccagaacatcggctgcagattcccctacctggaggccagcgactacaaggacttctacatctgcgtgaacggcagcagcgagaacaagcccatcagaagcagctacttcaccttccagctgcagaacatcgtgaagcccctgccccccgtgtacctgaccttcaccagagagagcagctgcgagatcaagctgaagtggagcatccccctgggccccatccccgccagatgcttcgactacgagatcgagatcagagaggacgacaccaccctggtgaccgccaccgtggagaacgagacctacaccctgaagaccaccaacgagaccagacagctgtgcttcgtggtgagaagcaaggtgaacatctactgcagcgacgacggcatctggagcgagtggagcgacaagcagtgctgggagggcgaggacctgagcaagaagaccctgctgagattctggctgcccttcggcttcatcctgatcctggtgatcttcgtgaccggcctgctgctgagaaagcccaacacctaccccaagatgatccccgagttcttctgcgacacctga

SEQ ID NO: 2754 - RNA, 819 nt, synthetic construct
  misc_feature 1..819: note = AAA67527 variant
  source 1..819: mol_type = other RNA
atggacagctacctgctgatgtggggcctgctgaccttcatcatggtgcccggctgccaggccgagctgtgcgacgacgacccccccgagatcccccacgccaccttcaaggccatggcctacaaggagggcaccatgctgaactgcgagtgcaagagaggcttcagaagaatcaagagcggcagcctgtacatgctgtgcaccggcaacagcagccacagcagctgggacaaccagtgccagtgcaccagcagcgccaccagaaacaccaccaagcaggtgaccccccagcccgaggagcagaaggagagaaagaccaccgagatgcagagccccatgcagcccgtggaccaggccagcctgcccggccactgcagagagccccccccctgggagaacgaggccaccgagagaatctaccacttcgtggtgggccagatggtgtactaccagtgcgtgcagggctacagagccctgcacagaggccccgccgagagcgtgtgcaagatgacccacggcaagaccagatggacccagccccagctgatctgcaccggcgagatggagaccagccagttccccggcgaggagaagccccaggccagccccgagggcagacccgagagcgagaccagctgcctggtgaccaccaccgacttccagatccagaccgagatggccgccaccatggagaccagcatcttcaccaccgagtaccaggtggccgtggccggctgcgtgttcctgctgatcagcgtgctgctgctgagcggcctgacctggcagagaagacagagaaagagcagaagaaccatctga

SEQ ID NO: 2755 - RNA, 1656 nt, synthetic construct
  misc_feature 1..1656: note = AAA59143 variant
  source 1..1656: mol_type = other RNA
atggccgcccccgccctgagctggagactgcccctgctgatcctgctgctgcccctggccaccagctgggccagcgccgccgtgaacggcaccagccagttcacctgcttctacaacagcagagccaacatcagctgcgtgtggagccaggacggcgccctgcaggacaccagctgccaggtgcacgcctggcccgacagaagaagatggaaccagacctgcgagctgctgcccgtgagccaggccagctgggcctgcaacctgatcctgggcgcccccgacagccagaagctgaccaccgtggacatcgtgaccctgagagtgctgtgcagagagggcgtgagatggagagtgatggccatccaggacttcaagcccttcgagaacctgagactgatggcccccatcagcctgcaggtggtgcacgtggagacccacagatgcaacatcagctgggagatcagccaggccagccactacttcgagagacacctggagttcgaggccagaaccctgagccccggccacacctgggaggaggcccccctgctgaccctgaagcagaagcaggagtggatctgcctggagaccctgacccccgacacccagtacgagttccaggtgagagtgaagcccctgcagggcgagttcaccacctggagcccctggagccagcccctggccttcagaaccaagcccgccgccctgggcaaggacaccatcccctggctgggccacctgctggtgggcctgagcggcgccttcggcttcatcatcctggtgtacctgctgatcaactgcagaaacaccggcccctggctgaagaaggtgctgaagtgcaacacccccgaccccagcaagttcttcagccagctgagcagcgagcacggcggcgacgtgcagaagtggctgagcagccccttccccagcagcagcttcagccccggcggcctggcccccgagatcagccccctggaggtgctggagagagacaaggtgacccagctgctgctgcagcaggacaaggtgcccgagcccgccagcctgagcagcaaccacagcctgaccagctgcttcaccaaccagggctacttcttcttccacctgcccgacgccctggagatcgaggcctgccaggtgtacttcacctacgacccctacagcgaggaggaccccgacgagggcgtggccggcgcccccaccggcagcagcccccagcccctgcagcccctgagcggcgaggacgacgcctactgcaccttccccagcagagacgacctgctgctgttcagccccagcctgctgggcggccccagcccccccagcaccgcccccggcggcagcggcgccggcgaggagagaatgccccccagcctgcaggagagagtgcccagagactgggacccccagcccctgggcccccccacccccggcgtgcccgacctggtggacttccagcccccccccgagctggtgctgagagaggccggcgaggaggtgcccgacgccggccccagagagggcgtgagcttcccctggagcagaccccccggccagggcgagttcagagccctgaacgccagactgcccctgaacaccgacgcctacctgagcctgcaggagctgcagggccaggaccccacccacctggtgtga

SEQ ID NO: 2756 - RNA, 1110 nt, synthetic construct
  misc_feature 1..1110: note = AAA59145 variant
  source 1..1110: mol_type = other RNA
atgctgaagcccagcctgcccttcaccagcctgctgttcctgcagctgcccctgctgggcgtgggcctgaacaccaccatcctgacccccaacggcaacgaggacaccaccgccgacttcttcctgaccaccatgcccaccgacagcctgagcgtgagcaccctgcccctgcccgaggtgcagtgcttcgtgttcaacgtggagtacatgaactgcacctggaacagcagcagcgagccccagcccaccaacctgaccctgcactactggtacaagaacagcgacaacgacaaggtgcagaagtgcagccactacctgttcagcgaggagatcaccagcggctgccagctgcagaagaaggagatccacctgtaccagaccttcgtggtgcagctgcaggaccccagagagcccagaagacaggccacccagatgctgaagctgcagaacctggtgatcccctgggcccccgagaacctgaccctgcacaagctgagcgagagccagctggagctgaactggaacaacagattcctgaaccactgcctggagcacctggtgcagtacagaaccgactgggaccacagctggaccgagcagagcgtggactacagacacaagttcagcctgcccagcgtggacggccagaagagatacaccttcagagtgagaagcagattcaaccccctgtgcggcagcgcccagcactggagcgagtggagccaccccatccactggggcagcaacaccagcaaggagaaccccttcctgttcgccctggaggccgtggtgatcagcgtgggcagcatgggcctgatcatcagcctgctgtgcgtgtacttctggctggagagaaccatgcccagaatccccaccctgaagaacctggaggacctggtgaccgagtaccacggcaacttcagcgcctggagcggcgtgagcaagggcctggccgagagcctgcagcccgactacagcgagagactgtgcctggtgagcgagatcccccccaagggcggcgccctgggcgagggccccggcgccagcccctgcaaccagcacagcccctactgggcccccccctgctacaccctgaagcccgagacctga

SEQ ID NO: 2757 - RNA, 405 nt, synthetic construct
  misc_feature 1..405: note = AAA74469 variant
  source 1..405: mol_type = other RNA
atgagaatgctgctgcacctgagcctgctggccctgggcgccgcctacgtgtacgccatccccaccgagatccccaccagcgccctggtgaaggagaccctggccctgctgagcacccacagaaccctgctgatcgccaacgagaccctgagaatccccgtgcccgtgcacaagaaccaccagctgtgcaccgaggagatcttccagggcatcggcaccctggagagccagaccgtgcagggcggcaccgtggagagactgttcaagaacctgagcctgatcaagaagtacatcgacggccagaagaagaagtgcggcgaggagagaagaagagtgaaccagttcctggactacctgcaggagttcctgggcgtgatgaacaccgagtggatcatcgagagctga

SEQ ID NO: 2758 - RNA, 555 nt, synthetic construct
  misc_feature 1..555: note = AAH06487 variant
  source 1..555: mol_type = other RNA
atggtgagaaagctgaagttccacgagcagaagctgctgaagcaggtggacttcctgaactgggaggtgaccgaccacaacctgcacgagctgagagtgctgagaagatacagactgcagagaagagaggactacaccagatacaaccagctgagcagagccgtgagagagctggccagaagactgagagacctgcccgagagagaccagttcagagtgagagccagcgccgccctgctggacaagctgtacgccctgggcctggtgcccaccagaggcagcctggagctgtgcgacttcgtgaccgccagcagcttctgcagaagaagactgcccaccgtgctgctgaagctgagaatggcccagcacctgcaggccgccgtggccttcgtggagcagggccacgtgagagtgggccccgacgtggtgaccgaccccgccttcctggtgaccagaagcatggaggacttcgtgacctgggtggacagcagcaagatcaagagacacgtgctggagtacaacgaggagagagacgacttcgacctggaggcctga

SEQ ID NO: 2759 - RNA, 3150 nt, synthetic construct
  misc_feature 1..3150: note = AAH08786 variant
  source 1..3150: mol_type = other RNA
atgggcagcagaacccccgagagccccctgcacgccgtgcagctgagatggggccccagaagaagaccccccctgctgcccctgctgctgctgctgctgccccccccccccagagtgggcggcttcaacctggacgccgaggcccccgccgtgctgagcggcccccccggcagcttcttcggcttcagcgtggagttctacagacccggcaccgacggcgtgagcgtgctggtgggcgcccccaaggccaacaccagccagcccggcgtgctgcagggcggcgccgtgtacctgtgcccctggggcgccagccccacccagtgcacccccatcgagttcgacagcaagggcagcagactgctggagagcagcctgagcagcagcgagggcgaggagcccgtggagtacaagagcctgcagtggttcggcgccaccgtgagagcccacggcagcagcatcctggcctgcgcccccctgtacagctggagaaccgagaaggagcccctgagcgaccccgtgggcacctgctacctgagcaccgacaacttcaccagaatcctggagtacgccccctgcagaagcgacttcagctgggccgccggccagggctactgccagggcggcttcagcgccgagttcaccaagaccggcagagtggtgctgggcggccccggcagctacttctggcagggccagatcctgagcgccacccaggagcagatcgccgagagctactaccccgagtacctgatcaacctggtgcagggccagctgcagaccagacaggccagcagcatctacgacgacagctacctgggctacagcgtggccgtgggcgagttcagcggcgacgacaccgaggacttcgtggccggcgtgcccaagggcaacctgacctacggctacgtgaccatcctgaacggcagcgacatcagaagcctgtacaacttcagcggcgagcagatggccagctacttcggctacgccgtggccgccaccgacgtgaacggcgacggcctggacgacctgctggtgggcgcccccctgctgatggacagaacccccgacggcagaccccaggaggtgggcagagtgtacgtgtacctgcagcaccccgccggcatcgagcccacccccaccctgaccctgaccggccacgacgagttcggcagattcggcagcagcctgacccccctgggcgacctggaccaggacggctacaacgacgtggccatcggcgcccccttcggcggcgagacccagcagggcgtggtgttcgtgttccccggcggccccggcggcctgggcagcaagcccagccaggtgctgcagcccctgtgggccgccagccacacccccgacttcttcggcagcgccctgagaggcggcagagacctggacggcaacggctaccccgacctgatcgtgggcagcttcggcgtggacaaggccgtggtgtacagaggcagacccatcgtgagcgccagcgccagcctgaccatcttccccgccatgttcaaccccgaggagagaagctgcagcctggagggcaaccccgtggcctgcatcaacctgagcttctgcctgaacgccagcggcaagcacgtggccgacagcatcggcttcaccgtggagctgcagctggactggcagaagcagaagggcggcgtgagaagagccctgttcctggccagcagacaggccaccctgacccagaccctgctgatccagaacggcgccagagaggactgcagagagatgaagatctacctgagaaacgagagcgagttcagagacaagctgagccccatccacatcgccctgaacttcagcctggacccccaggcccccgtggacagccacggcctgagacccgccctgcactaccagagcaagagcagaatcgaggacaaggcccagatcctgctggactgcggcgaggacaacatctgcgtgcccgacctgcagctggaggtgttcggcgagcagaaccacgtgtacctgggcgacaagaacgccctgaacctgaccttccacgcccagaacgtgggcgagggcggcgcctacgaggccgagctgagagtgaccgccccccccgaggccgagtacagcggcctggtgagacaccccggcaacttcagcagcctgagctgcgactacttcgccgtgaaccagagcagactgctggtgtgcgacctgggcaaccccatgaaggccggcgccagcctgtggggcggcctgagattcaccgtgccccacctgagagacaccaagaagaccatccagttcgacttccagatcctgagcaagaacctgaacaacagccagagcgacgtggtgagcttcagactgagcgtggaggcccaggcccaggtgaccctgaacggcgtgagcaagcccgaggccgtgctgttccccgtgagcgactggcaccccagagaccagccccagaaggaggaggacctgggccccgccgtgcaccacgtgtacgagctgatcaaccagggccccagcagcatcagccagggcgtgctggagctgagctgcccccaggccctggagggccagcagctgctgtacgtgaccagagtgaccggcctgaactgcaccaccaaccaccccatcaaccccaagggcctggagctggaccccgagggcagcctgcaccaccagcagaagagagaggcccccagcagaagcagcgccagcagcggcccccagatcctgaagtgccccgaggccgagtgcttcagactgagatgcgagctgggccccctgcaccagcaggagagccagagcctgcagctgcacttcagagtgtgggccaagaccttcctgcagagagagcaccagcccttcagcctgcagtgcgaggccgtgtacaaggccctgaagatgccctacagaatcctgcccagacagctgccccagaaggagagacaggtggccaccgccgtgcagtggaccaaggccgagggcagctacggcgtgcccctgtggatcatcatcctggccatcctgttcggcctgctgctgctgggcctgctgatctacatcctgtacaagctgggcttcttcaagagaagcctgccctacggcaccgccatggagaaggcccagctgaagccccccgccaccagcgacgcctga

SEQ ID NO: 2760 - RNA, 2397 nt, synthetic construct
  misc_feature 1..2397: note = AAH20057 variant
  source 1..2397: mol_type = other RNA
atgaacctgcagcccatcttctggatcggcctgatcagcagcgtgtgctgcgtgttcgcccagaccgacgagaacagatgcctgaaggccaacgccaagagctgcggcgagtgcatccaggccggccccaactgcggctggtgcaccaacagcaccttcctgcaggagggcatgcccaccagcgccagatgcgacgacctggaggccctgaagaagaagggctgcccccccgacgacatcgagaaccccagaggcagcaaggacatcaagaagaacaagaacgtgaccaacagaagcaagggcaccgccgagaagctgaagcccgaggacatcacccagatccagccccagcagctggtgctgagactgagaagcggcgagccccagaccttcaccctgaagttcaagagagccgaggactaccccatcgacctgtactacctgatggacctgagctacagcatgaaggacgacctggagaacgtgaagagcctgggcaccgacctgatgaacgagatgagaagaatcaccagcgacttcagaatcggcttcggcagcttcgtggagaagaccgtgatgccctacatcagcaccacccccgccaagctgagaaacccctgcaccagcgagcagaactgcaccagccccttcagctacaagaacgtgctgagcctgaccaacaagggcgaggtgttcaacgagctggtgggcaagcagagaatcagcggcaacctggacagccccgagggcggcttcgacgccatcatgcaggtggccgtgtgcggcagcctgatcggctggagaaacgtgaccagactgctggtgttcagcaccgacgccggcttccacttcgccggcgacggcaagctgggcggcatcgtgctgcccaacgacggccagtgccacctggagaacaacatgtacaccatgagccactactacgactaccccagcatcgcccacctggtgcagaagctgagcgagaacaacatccagaccatcttcgccgtgaccgaggagttccagcccgtgtacaaggagctgaagaacctgatccccaagagcgccgtgggcaccctgagcgccaacagcagcaacgtgatccagctgatcatcgacgcctacaacagcctgagcagcgaggtgatcctggagaacggcaagctgagcgagggcgtgaccatcagctacaagagctactgcaagaacggcgtgaacggcaccggcgagaacggcagaaagtgcagcaacatcagcatcggcgacgaggtgcagttcgagatcagcatcaccagcaacaagtgccccaagaaggacagcgacagcttcaagatcagacccctgggcttcaccgaggaggtggaggtgatcctgcagtacatctgcgagtgcgagtgccagagcgagggcatccccgagagccccaagtgccacgagggcaacggcaccttcgagtgcggcgcctgcagatgcaacgagggcagagtgggcagacactgcgagtgcagcaccgacgaggtgaacagcgaggacatggacgcctactgcagaaaggagaacagcagcgagatctgcagcaacaacggcgagtgcgtgtgcggccagtgcgtgtgcagaaagagagacaacaccaacgagatctacagcggcaagttctgcgagtgcgacaacttcaactgcgacagaagcaacggcctgatctgcggcggcaacggcgtgtgcaagtgcagagtgtgcgagtgcaaccccaactacaccggcagcgcctgcgactgcagcctggacaccagcacctgcgaggccagcaacggccagatctgcaacggcagaggcatctgcgagtgcggcgtgtgcaagtgcaccgaccccaagttccagggccagacctgcgagatgtgccagacctgcctgggcgtgtgcgccgagcacaaggagtgcgtgcagtgcagagccttcaacaagggcgagaagaaggacacctgcacccaggagtgcagctacttcaacatcaccaaggtggagagcagagacaagctgccccagcccgtgcagcccgaccccgtgagccactgcaaggagaaggacgtggacgactgctggttctacttcacctacagcgtgaacggcaacaacgaggtgatggtgcacgtggtggagaaccccgagtgccccaccggccccgacatcatccccatcgtggccggcgtggtggccggcatcgtgctgatcggcctggccctgctgctgatctggaagctgctgatgatcatccacgacagaagagagttcgccaagttcgagaaggagaagatgaacgccaagtgggacaccggcgagaaccccatctacaagagcgccgtgaccaccgtggtgaaccccaagtacgagggcaagtga

SEQ ID NO: 2761 - RNA, 2367 nt, synthetic construct
  misc_feature 1..2367: note = AAA36122 variant
  source 1..2367: mol_type = other RNA
atgggcatcgagctgctgtgcctgttcttcctgttcctgggcagaaacgaccacgtgcagggcggctgcgccctgggcggcgccgagacctgcgaggactgcctgctgatcggcccccagtgcgcctggtgcgcccaggagaacttcacccaccccagcggcgtgggcgagagatgcgacacccccgccaacctgctggccaagggctgccagctgaacttcatcgagaaccccgtgagccaggtggagatcctgaagaacaagcccctgagcgtgggcagacagaagaacagcagcgacatcgtgcagatcgccccccagagcctgatcctgaagctgagacccggcggcgcccagaccctgcaggtgcacgtgagacagaccgaggactaccccgtggacctgtactacctgatggacctgagcgccagcatggacgacgacctgaacaccatcaaggagctgggcagcagactgagcaaggagatgagcaagctgaccagcaacttcagactgggcttcggcagcttcgtggagaagcccgtgagccccttcgtgaagaccacccccgaggagatcgccaacccctgcagcagcatcccctacttctgcctgcccaccttcggcttcaagcacatcctgcccctgaccaacgacgccgagagattcaacgagatcgtgaagaaccagaagatcagcgccaacatcgacacccccgagggcggcttcgacgccatcatgcaggccgccgtgtgcaaggagaagatcggctggagaaacgacagcctgcacctgctggtgttcgtgagcgacgccgacagccacttcggcatggacagcaagctggccggcatcgtgatccccaacgacggcctgtgccacctggacagcaagaacgagtacagcatgagcaccgtgctggagtaccccaccatcggccagctgatcgacaagctggtgcagaacaacgtgctgctgatcttcgccgtgacccaggagcaggtgcacctgtacgagaactacgccaagctgatccccggcgccaccgtgggcctgctgcagaaggacagcggcaacatcctgcagctgatcatcagcgcctacgaggagctgagaagcgaggtggagctggaggtgctgggcgacaccgagggcctgaacctgagcttcaccgccatctgcaacaacggcaccctgttccagcaccagaagaagtgcagccacatgaaggtgggcgacaccgccagcttcagcgtgaccgtgaacatcccccactgcgagagaagaagcagacacatcatcatcaagcccgtgggcctgggcgacgccctggagctgctggtgagccccgagtgcaactgcgactgccagaaggaggtggaggtgaacagcagcaagtgccaccacggcaacggcagcttccagtgcggcgtgtgcgcctgccaccccggccacatgggccccagatgcgagtgcggcgaggacatgctgagcaccgacagctgcaaggaggcccccgaccaccccagctgcagcggcagaggcgactgctactgcggccagtgcatctgccacctgagcccctacggcaacatctacggcccctactgccagtgcgacaacttcagctgcgtgagacacaagggcctgctgtgcggcggcaacggcgactgcgactgcggcgagtgcgtgtgcagaagcggctggaccggcgagtactgcaactgcaccaccagcaccgacagctgcgtgagcgaggacggcgtgctgtgcagcggcagaggcgactgcgtgtgcggcaagtgcgtgtgcaccaaccccggcgccagcggccccacctgcgagagatgccccacctgcggcgacccctgcaacagcaagagaagctgcatcgagtgccacctgagcgccgccggccaggccagagaggagtgcgtggacaagtgcaagctggccggcgccaccatcagcgaggaggaggacttcagcaaggacggcagcgtgagctgcagcctgcagggcgagaacgagtgcctgatcaccttcctgatcaccaccgacaacgagggcaagaccatcatccacagcatcaacgagaaggactgccccaagccccccaacatccccatgatcatgctgggcgtgagcctggccatcctgctgatcggcgtggtgctgctgtgcatctggaagctgctggtgagcttccacgacagaaaggaggtggccaagttcgaggccgagagaagcaaggccaagtggcagaccggcaccaaccccctgtacagaggcagcaccagcaccttcaagaacgtgacctacaagcacagagagaagcagaaggtggacctgagcaccgactgctga

SEQ ID NO: 2762 - RNA, 786 nt, synthetic construct
  misc_feature 1..786: note = EAW71937 variant
  source 1..786: mol_type = other RNA
atgtgggacctggtgctgagcatcgccctgagcgtgggctgcaccggcgccgtgcccctgatccagagcagaatcgtgggcggctgggagtgcgagaagcacagccagccctggcaggtggccgtgtacagccacggctgggcccactgcggcggcgtgctggtgcacccccagtgggtgctgaccgccgcccactgcctgaagaagaacagccaggtgtggctgggcagacacaacctgttcgagcccgaggacaccggccagagagtgcccgtgagccacagcttcccccaccccctgtacaacatgagcctgctgaagcaccagagcctgagacccgacgaggacagcagccacgacctgatgctgctgagactgagcgagcccgccaagatcaccgacgtggtgaaggtgctgggcctgcccacccaggagcccgccctgggcaccacctgctacgccagcggctggggcagcatcgagcccgaggagttcctgagacccagaagcctgcagtgcgtgagcctgcacctgctgagcaacgacatgtgcgccagagcctacagcgagaaggtgaccgagttcatgctgtgcgccggcctgtggaccggcggcaaggacacctgcggcggcgacagcggcggccccctggtgtgcaacggcgtgctgcagggcatcaccagctggggccccgagccctgcgccctgcccgagaagcccgccgtgtacaccaaggtggtgcactacagaaagtggatcaaggacaccatcgccgccaacccctga

SEQ ID NO: 2763 - RNA, 672 nt, synthetic construct
  misc_feature 1..672: note = EAW71938 variant
  source 1..672: mol_type = other RNA
atgtgggacctggtgctgagcatcgccctgagcgtgggctgcaccggcgccgtgcccctgatccagagcagaatcgtgggcggctgggagtgcgagaagcacagccagccctggcaggtggccgtgtacagccacggctgggcccactgcggcggcgtgctggtgcacccccagtgggtgctgaccgccgcccactgcctgaagaagaacagccaggtgtggctgggcagacacaacctgttcgagcccgaggacaccggccagagagtgcccgtgagccacagcttcccccaccccctgtacaacatgagcctgctgaagcaccagagcctgagacccgacgaggacagcagccacgacctgatgctgctgagactgagcgagcccgccaagatcaccgacgtggtgaaggtgctgggcctgcccacccaggagcccgccctgggcaccacctgctacgccagcggctggggcagcatcgagcccgaggagttcctgagacccagaagcctgcagtgcgtgagcctgcacctgctgagcaacgacatgtgcgccagagcctacagcgagaaggtgaccgagttcatgctgtgcgccggcctgtggaccggcggcaaggacacctgcggcgtgagccacccctacagccagcacctggagggcaagggctga

SEQ ID NO: 2764 - RNA, 189 nt, synthetic construct
  misc_feature 1..189: note = BAF98781 variant
  source 1..189: mol_type = other RNA
atgagcctgctgaagcaccagagcctgagacccgacgaggacagcagccacgacctgatgctgctgagactgagcgagcccgccaagatcaccgacgtggtgaaggtgctgggcctgcccacccaggagcccgccctgggcaccacctgctacgccagcggctggggcagcatcgagcccgaggagtga

SEQ ID NO: 2765 - RNA, 735 nt, synthetic construct
  misc_feature 1..735: note = BAG62239 variant
  source 1..735: mol_type = other RNA
atgggcaccctgtggggctgccccggcgccccccccgtgggcgcccacagctgccccctgcccaaggaggtgagcagaaccctgggcagcggcgagggcatggccgtgagccacagaaacaacagcggcatgctgccccccggcagcctgctgagaaacagccaggtgtggctgggcagacacaacctgttcgagcccgaggacaccggcagaagagtgcccgtgagccacagcttcccccaccccctgtacaacatgagcctgctgaagcaccagagcctgagacccgacgaggacagcagccacgacctgatgctgctgagactgagcgagcccgccaagatcaccgacgtggtgaaggtgctgggcctgcccacccaggagcccgccctgggcaccacctgctacgccagcggctggggcagcatcgagcccgaggagttcctgagacccagaagcctgcagtgcgtgagcctgcacctgctgagcaacgacatgtgcgccagagcctacagcgagaaggtgaccgagttcatgctgtgcgccggcctgtggaccggcggcaaggacacctgcggcggcgacagcggcggccccctggtgtgcaacggcgtgctgcagggcatcaccagctggggccccgagccctgcgccctgcccgagaagcccgccgtgtacaccaaggtggtgcactacagaaagtggatcaaggacaccatcgccgccaacccctga

SEQ ID NO: 2766 - RNA, 786 nt, synthetic construct; identical to SEQ ID NO: 2762
  misc_feature 1..786: note = AAA74454 variant
  source 1..786: mol_type = other RNA

SEQ ID NO: 2767 - RNA, 150 nt, synthetic construct
  misc_feature 1..150: note = AAR10469 variant
  source 1..150: mol_type = other RNA
atgtgggacctggtgctgagcatcgccctgagcgtgggctgcaccggcatcgccagaagcggctgggtgggcaccacctgcctgagcctgaagacccaggccagaggcagcctgagcgccaccgccagccacaccagaagcaccatctga

SEQ ID NO: 2768 - RNA, 543 nt, synthetic construct
  misc_feature 1..543: note = AAR10468 variant
  source 1..543: mol_type = other RNA
atgtgggacctggtgctgagcatcgccctgagcgtgggctgcaccggcgccgtgcccctgatccagagcagaatcgtgggcggctgggagtgcgagaagcacagccagccctggcaggtggccgtgtacagccacggctgggcccactgcggcggcgtgctggtgcacccccagtgggtgctgaccgccgcccactgcctgaagaagaacagccaggtgtggctgggcagacacaacctgttcgagcccgaggacaccggccagagagtgcccgtgagccacagcttcccccaccccctgtacaacatgagcctgctgaagcaccagagcctgagacccgacgaggacagcagccacgacctgatgctgctgagactgagcgagcccgccaagatcaccgacgtggtgaaggtgctgggcctgcccacccaggagcccgccctgggcaccacctgctacgccagcggctggggcagcatcgagcccgaggagtgcacccccggccccgacggcgtggccggcagccccgacgcctgggtgtga

SEQ ID NO: 2769 - RNA, 765 nt, synthetic construct
  misc_feature 1..765: note = EAW71943 variant
  source 1..765: mol_type = other RNA
atggccaccgccggcaacccctggggctggttcctgggctacctgatcctgggcgtggccggcagcctggtgagcggcagctgcagccagatcatcaacggcgaggactgcagcccccacagccagccctggcaggccgccctggtgatggagaacgagctgttctgcagcggcgtgctggtgcacccccagtgggtgctgagcgccgcccactgcttccagaacagctacaccatcggcctgggcctgcacagcctggaggccgaccaggagcccggcagccagatggtggaggccagcctgagcgtgagacaccccgagtacaacagacccctgctggccaacgacctgatgctgatcaagctggacgagagcgtgagcgagagcgacaccatcagaagcatcagcatcgccagccagtgccccaccgccggcaacagctgcctggtgagcggctggggcctgctggccaacggcagaatgcccaccgtgctgcagtgcgtgaacgtgagcgtggtgagcgaggaggtgtgcagcaagctgtacgaccccctgtaccaccccagcatgttctgcgccggcggcggccaggaccagaaggacagctgcaacggcgacagcggcggccccctgatctgcaacggctacctgcagggcctggtgagcttcggcaaggccccctgcggccaggtgggcgtgcccggcgtgtacaccaacctgtgcaagttcaccgagtggatcgagaagaccgtgcaggccagctga

SEQ ID NO: 2770 - RNA, 228 nt, synthetic construct
  misc_feature 1..228: note = AAX30051 variant
  source 1..228: mol_type = other RNA
atggccaccgccggcaacccctggggctggttcctgggctacctgatcctgggcgtggccggcagcctggtgagcggcagctgcagccagatcatcaacggcgaggactgcagcccccacagccagccctggcaggccgccctggtgatggagaacgagctgttctgcagcggcgtgctggtgcacccccagtgggtgctgagcgccgcccactgcttccagaagtga

SEQ ID NO: 2771 - RNA, 588 nt, synthetic construct
  misc_feature 1..588: note = AAL14782 variant
  source 1..588: mol_type = other RNA
atggccaccgccggcaacccctggggctggttcctgggctacctgatcctgggcgtggccggcagcctggtgagcggcagctgcagccagatcatcaacggcgaggactgcagcccccacagccagccctggcaggccgccctggtgatggagaacgagctgttctgcagcggcgtgctggtgcacccccagtgggtgctgagcgccgcccactgcttccagaacagctacaccatcggcctgggcctgcacagcctggaggccgaccaggagcccggcagccagatggtggaggccagcctgagcgtgagacaccccgagtacaacagacccctgctggccaacgacctgatgctgatcaagctggacgagagcgtgagcgagagcgacaccatcagaagcatcagcatcgccagccagtgccccaccgccggcaacagctgcctggtgagcggctggggcctgctggccaacggcgagctgaccggcgtgtgcctgcccagcagcagaagaagcagcgcccagagcagaggcctgacccagagcagcgccagccaggccgagtgcctgccctgctgcagcgcctga

SEQ ID NO: 2772 - RNA, 480 nt, synthetic construct
  misc_feature 1..480: note = AAL14781 variant
  source 1..480: mol_type = other RNA
atggccaccgccggcaacccctggggctggttcctgggctacctgatcctgggcgtggccggcagcctggtgagcggcagctgcagccagatcatcaacggcgaggactgcagcccccacagccagccctggcaggccgccctggtgatggagaacgagctgttctgcagcggcgtgctggtgcacccccagtgggtgctgagcgccgcccactgcttccagaacagctacaccatcggcctgggcctgcacagcctggaggccgaccaggagcccggcagccagatggtggaggccagcctgagcgtgagacaccccgagtacaacagacccctgctggccaacgacctgatgctgatcaagctggacgagagcgtgagcgagagcgacaccatcagaagcatcagcatcgccagccagtgccccaccgccggcaacagctgcctggtgagcggctggggcctgctggccaacggctga

SEQ ID NO: 2773 - RNA, 765 nt, synthetic construct
  misc_feature 1..765: note = AAD21580 variant
  source 1..765: mol_type = other RNA
atggccaccgccggcaacccctggggctggttcctgggctacctgatcctgggcgtggccggcagcctggtgagcggcagctgcagccagatcatcaacggcgaggactgcagcccccacagccagccctggcaggccgccctggtgatggagaacgagctgttctgcagcggcgtgctggtgcacccccagtgggtgctgagcgccgcccactgcttccagaacagctacaccatcggcctgggcctgcacagcctggaggccgaccaggagcccggcagccagatggtggaggccagcctgagcgtgagacaccccgagtacaacagacccctgctggccaacgacctgatgctgatcaagctggacgagagcgtgagcgagagcgacaccatcagaagcatcagcatcgccagccagtgccccaccgccggcaacagctgcctggtgagcggctggggcctgctggccaacggcagaatgcccaccgtgctgcagtgcgtgaacgtgagcgtggtgagcgaggaggtgtgcagcaagctgtacgaccccctgtaccaccccagcatgttctgcgccggcggcggccacgaccagaaggacagctgcaacggcgacagcggcggccccctgatctgcaacggctacctgcagggcctggtgagcttcggcaaggccccctgcggccaggtgggcgtgcccggcgtgtacaccaacctgtgcaagttcaccgagtggatcgagaagaccgtgcaggccagctga

SEQ ID NO: 2774 - RNA, 2673 nt, synthetic construct
  misc_feature 1..2673: note = AAC83230 variant
  source 1..2673: mol_type = other RNA
atgagccagggcatcctgagcccccccgccggcctgctgagcgacgacgacgtggtggtgagccccatgttcgagagcaccgccgccgacctgggcagcgtggtgagaaagaacctgctgagcgactgcagcgtggtgagcaccagcctggaggacaagcagcaggtgcccagcgaggacagcatggagaaggtgaaggtgtacctgagagtgagacccctgctgcccagcgagctggagagacaggaggaccagggctgcgtgagaatcgagaacgtggagaccctggtgctgcaggcccccaaggacagcttcgccctgaagagcaacgagagaggcatcggccaggccacccacagattcaccttcagccagatcttcggccccgaggtgggccaggccagcttcttcaacctgaccgtgaaggagatggtgaaggacgtgctgaagggccagaactggctgatctacacctacggcgtgaccaacagcggcaagacccacaccatccagggcaccatcaaggacggcggcatcctgcccagaagcctggccctgatcttcaacagcctgcagggccagctgcaccccacccccgacctgaagcccctgctgagcaacgaggtgatctggctggacagcaagcagatcagacaggaggagatgaagaagctgagcctgctgaacggcggcctgcaggaggaggagctgagcaccagcctgaagagaagcgtgtacatcgagagcagaatcggcaccagcaccagcttcgacagcggcatcgccggcctgagcagcatcagccagtgcaccagcagcagccagctggacgagaccagccacagatgggcccagcccgacaccgcccccctgcccgtgcccgccaacatcagattcagcatctggatcagcttcttcgagatctacaacgagctgctgtacgacctgctggagccccccagccagcagagaaagagacagaccctgagactgtgcgaggaccagaacggcaacccctacgtgaaggacctgaactggatccacgtgcaggacgccgaggaggcctggaagctgctgaaggtgggcagaaagaaccagagcttcgccagcacccacctgaaccagaacagcagcagaagccacagcatcttcagcatcagaatcctgcacctgcagggcgagggcgacatcgtgcccaagatcagcgagctgagcctgtgcgacctggccggcagcgagagatgcaaggaccagaagagcggcgagagactgaaggaggccggcaacatcaacaccagcctgcacaccctgggcagatgcatcgccgccctgagacagaaccagcagaacagaagcaagcagaacctggtgcccttcagagacagcaagctgaccagagtgttccagggcttcttcaccggcagaggcagaagctgcatgatcgtgaacgtgaacccctgcgccagcacctacgacgagaccctgcacgtggccaagttcagcgccatcgccagccagctggtgcacgccccccccatgcagctgggcttccccagcctgcacagcttcatcaaggagcacagcctgcaggtgagccccagcctggagaagggcgccaaggccgacaccggcctggacgacgacatcgagaacgaggccgacatcagcatgtacggcaaggaggagctgctgcaggtggtggaggccatgaagaccctgctgctgaaggagagacaggagaagctgcagctggagatgcacctgagagacgagatctgcaacgagatggtggagcagatgcagcagagagagcagtggtgcagcgagcacctggacacccagaaggagctgctggaggagatgtacgaggagaagctgaacatcctgaaggagagcctgaccagcttctaccaggaggagatccaggagagagacgagaagatcgaggagctggaggccctgctgcaggaggccagacagcagagcgtggcccaccagcagagcggcagcgagctggccctgagaagaagccagagactggccgccagcgccagcacccagcagctgcaggaggtgaaggccaagctgcagcagtgcaaggccgagctgaacagcaccaccgaggagctgcacaagtaccagaagatgctggagcccccccccagcgccaagcccttcaccatcgacgtggacaagaagctggaggagggccagaagaacatcagactgctgagaaccgagctgcagaagctgggcgagagcctgcagagcgccgagagagcctgctgccacagcaccggcgccggcaagctgagacaggccctgaccacctgcgacgacatcctgatcaagcaggaccagaccctggccgagctgcagaacaacatggtgctggtgaagctggacctgagaaagaaggccgcctgcatcgccgagcagtaccacaccgtgctgaagctgcagggccaggtgagcgccaagaagagactgggcaccaaccaggagaaccagcagcccaaccagcagccccccggcaagaagcccttcctgagaaacctgctgcccagaacccccacctgccagagcagcaccgactgcagcccctacgccagaatcctgagaagcagaagaagccccctgctgaagagcggccccttcggcaagaagtactga

SEQ ID NO: 2775 - RNA, 1113 nt, synthetic construct
  misc_feature 1..1113: note = AAH34621 variant
  source 1..1113: mol_type = other RNA
atggccatcaccctggaggaggccccctggctgggctggctgctggtgaaggccctgatgagattcgccttcatggtggtgaacaacctggtggccatccccagctacatctgctacgtgatcatcctgcagcccctgagagtgctggacagcaagagattctggtacatcgagggcatcatgtacaagtggctgctgggcatggtggccagctggggctggtacgccggctacaccgtgatggagtggggcgaggacatcaaggccgtgagcaaggacgaggccgtgatgctggtgaaccaccaggccaccggcgacgtgtgcaccctgatgatgtgcctgcaggacaagggcctggtggtggcccagatgatgtggctgatggaccacatcttcaagtacaccaacttcggcatcgtgagcctggtgcacggcgacttcttcatcagacagggcagaagctacagagaccagcagctgctgctgctgaagaagcacctggagaacaactacagaagcagagacagaaagtggatcgtgctgttccccgagggcggcttcctgagaaagagaagagagaccagccaggccttcgccaagaagaacaacctgcccttcctgaccaacgtgaccctgcccagaagcggcgccaccaagatcatcctgaacgccctggtggcccagcagaagaacggcagccccgccggcggcgacgccaaggagctggacagcaagagcaagggcctgcagtggatcatcgacaccaccatcgcctaccccaaggccgagcccatcgacatccagacctggatcctgggctacagaaagcccaccgtgacccacgtgcactacagaatcttccccatcaaggacgtgcccctggagaccgacgacctgaccacctggctgtaccagagattcgtggagaaggaggacctgctgagccacttctacgagaccggcgccttcccccccagcaagggccacaaggaggccgtgagcagagagatgaccctgagcaacctgtggatcttcctgatccagagcttcgccttcctgagcggctacatgtggtacaacatcatccagtacttctaccactgcctgttctga

SEQ ID NO: 2776 - RNA, 2178 nt, synthetic construct
  misc_feature 1..2178: note = AAH14924 variant
  source 1..2178: mol_type = other RNA
atggccatggacagcagcctgcaggccagactgttccccggcctggccatcaagatccagagaagcaacggcctgatccacagcgccaacgtgagaaccgtgaacctggagaagagctgcgtgagcgtggagtgggccgagggcggcgccaccaagggcaaggagatcgacttcgacgacgtggccgccatcaaccccgagctgctgcagctgctgcccctgcaccccaaggacaacctgcccctgcaggagaacgtgaccatccagaagcagaagagaagaagcgtgaacagcaagatccccgcccccaaggagagcctgagaagcagaagcaccagaatgagcaccgtgagcgagctgagaatcaccgcccaggagaacgacatggaggtggagctgcccgccgccgccaacagcagaaagcagttcagcgtgccccccgcccccaccagacccagctgccccgccgtggccgagatccccctgagaatggtgagcgaggagatggaggagcaggtgcacagcatcagaggcagcagcagcgccaaccccgtgaacagcgtgagaagaaagagctgcctggtgaaggaggtggagaagatgaagaacaagagagaggagaagaaggcccagaacagcgagatgagaatgaagagagcccaggagtacgacagcagcttccccaactgggagttcgccagaatgatcaaggagttcagagccaccctggagtgccaccccctgaccatgaccgaccccatcgaggagcacagaatctgcgtgtgcgtgagaaagagacccctgaacaagcaggagctggccaagaaggagatcgacgtgatcagcatccccagcaagtgcctgctgctggtgcacgagcccaagctgaaggtggacctgaccaagtacctggagaaccaggccttctgcttcgacttcgccttcgacgagaccgccagcaacgaggtggtgtacagattcaccgccagacccctggtgcagaccatcttcgagggcggcaaggccacctgcttcgcctacggccagaccggcagcggcaagacccacaccatgggcggcgacctgagcggcaaggcccagaacgccagcaagggcatctacgccatggccagcagagacgtgttcctgctgaagaaccagccctgctacagaaagctgggcctggaggtgtacgtgaccttcttcgagatctacaacggcaagctgttcgacctgctgaacaagaaggccaagctgagagtgctggaggacggcaagcagcaggtgcaggtggtgggcctgcaggagcacctggtgaacagcgccgacgacgtgatcaagatgatcgacatgggcagcgcctgcagaaccagcggccagaccttcgccaacagcaacagcagcagaagccacgcctgcttccagatcatcctgagagccaagggcagaatgcacggcaagttcagcctggtggacctggccggcaacgagagaggcgccgacaccagcagcgccgacagacagaccagaatggagggcgccgagatcaacaagagcctgctggccctgaaggagtgcatcagagccctgggccagaacaaggcccacacccccttcagagagagcaagctgacccaggtgctgagagacagcttcatcggcgagaacagcagaacctgcatgatcgccaccatcagccccggcatcagcagctgcgagtacaccctgaacaccctgagatacgccgacagagtgaaggagctgagcccccacagcggccccagcggcgagcagctgatccagatggagaccgaggagatggaggcctgcagcaacggcgccctgatccccggcaacctgagcaaggaggaggaggagctgagcagccagatgagcagcttcaacgaggccatgacccagatcagagagctggaggagaaggccatggaggagctgaaggagatcatccagcagggccccgactggctggagctgagcgagatgaccgagcagcccgactacgacctggagaccttcgtgaacaaggccgagagcgccctggcccagcaggccaagcacttcagcgccctgagagacgtgatcaaggccctgagactggccatgcagctggaggagcaggccagcagacagatcagcagcaagaagagaccccagtga

SEQ ID NO: 2777 - RNA, 342 nt, synthetic construct
  misc_feature 1..342: note = AAH62223 variant
  source 1..342: mol_type = other RNA
atgaacttctacctgctgctggccagcagcatcctgtgcgccctgatcgtgttctggaagtacagaagattccagagaaacaccggcgagatgagcagcaacagcaccgccctggccctggtgagacccagcagcagcggcctgatcaacagcaacaccgacaacaacctggccgtgtacgacctgagcagagacatcctgaacaacttcccccacagcatcgccagacagaagagaatcctggtgaacctgagcatggtggagaacaagctggtggagctggagcacaccctgctgagcaagggcttcagaggcgccagcccccacagaaagagcacctga

SEQ ID NO: 2778 - RNA, 2583 nt, synthetic construct
  misc_feature 1..2583: note = AAA56833 variant
  source 1..2583: mol_type = other RNA
atgggcccctggggctggaagctgagatggaccgtggccctgctgctggccgccgccggcaccgccgtgggcgacagatgcgagagaaacgagttccagtgccaggacggcaagtgcatcagctacaagtgggtgtgcgacggcagcgccgagtgccaggacggcagcgacgagagccaggagacctgcctgagcgtgacctgcaagagcggcgacttcagctgcggcggcagagtgaacagatgcatcccccagttctggagatgcgacggccaggtggactgcgacaacggcagcgacgagcagggctgcccccccaagacctgcagccaggacgagttcagatgccacgacggcaagtgcatcagcagacagttcgtgtgcgacagcgacagagactgcctggacggcagcgacgaggccagctgccccgtgctgacctgcggccccgccagcttccagtgcaacagcagcacctgcatcccccagctgtgggcctgcgacaacgaccccgactgcgaggacggcagcgacgagtggccccagagatgcagaggcctgtacgtgttccagggcgacagcagcccctgcagcgccttcgagttccactgcctgagcggcgagtgcatccacagcagctggagatgcgacggcggccccgactgcaaggacaagagcgacgaggagaactgcgccgtggccacctgcagacccgacgagttccagtgcagcgacggcaactgcatccacggcagcagacagtgcgacagagagtacgactgcaaggacatgagcgacgaggtgggctgcgtgaacgtgaccctgtgcgagggccccaacaagttcaagtgccacagcggcgagtgcatcaccctggacaaggtgtgcaacatggccagagactgcagagactggagcgacgagcccatcaaggagtgcggcaccaacgagtgcctggacaacaacggcggctgcagccacgtgtgcaacgacctgaagatcggctacgagtgcctgtgccccgacggcttccagctggtggcccagagaagatgcgaggacatcgacgagtgccaggaccccgacacctgcagccagctgtgcgtgaacctggagggcggctacaagtgccagtgcgaggagggcttccagctggacccccacaccaaggcctgcaaggccgtgggcagcatcgcctacctgttcttcaccaacagacacgaggtgagaaagatgaccctggacagaagcgagtacaccagcctgatccccaacctgagaaacgtggtggccctggacaccgaggtggccagcaacagaatctactggagcgacctgagccagagaatgatctgcagcacccagctggacagagcccacggcgtgagcagctacgacaccgtgatcagcagagacatccaggcccccgacggcctggccgtggactggatccacagcaacatctactggaccgacagcgtgctgggcaccgtgagcgtggccgacaccaagggcgtgaagagaaagaccctgttcagagagaacggcagcaagcccagagccatcgtggtggaccccgtgcacggcttcatgtactggaccgactggggcacccccgccaagatcaagaagggcggcctgaacggcgtggacatctacagcctggtgaccgagaacatccagtggcccaacggcatcaccctggacctgctgagcggcagactgtactgggtggacagcaagctgcacagcatcagcagcatcgacgtgaacggcggcaacagaaagaccatcctggaggacgagaagagactggcccaccccttcagcctggccgtgttcgaggacaaggtgttctggaccgacatcatcaacgaggccatcttcagcgccaacagactgaccggcagcgacgtgaacctgctggccgagaacctgctgagccccgaggacatggtgctgttccacaacctgacccagcccagaggcgtgaactggtgcgagagaaccaccctgagcaacggcggctgccagtacctgtgcctgcccgccccccagatcaacccccacagccccaagttcacctgcgcctgccccgacggcatgctgctggccagagacatgagaagctgcctgaccgaggccgaggccgccgtggccacccaggagaccagcaccgtgagactgaaggtgagcagcaccgccgtgagaacccagcacaccaccaccagacccgtgcccgacaccagcagactgcccggcgccacccccggcctgaccaccgtggagatcgtgaccatgagccaccaggccctgggcgacgtggccggcagaggcaacgagaagaagcccagcagcgtgagagccctgagcatcgtgctgcccatcgtgctgctggtgttcctgtgcctgggcgtgttcctgctgtggaagaactggagactgaagaacatcaacagcatcaacttcgacaaccccgtgtaccagaagaccaccgaggacgaggtgcacatctgccacaaccaggacggctacagctaccccagcagacagatggtgagcctggaggacgacgtggcctga

SEQ ID NO: 2779 - RNA, 1302 nt, synthetic construct
  misc_feature 1..1302: note = CAA70989 variant
  source 1..1302: mol_type = other RNA
atggtgtggaaggtggccgtgttcctgagcgtggccctgggcatcggcgccgtgcccatcgacgaccccgaggacggcggcaagcactgggtggtgatcgtggccggcagcaacggctggtacaactacagacaccaggccgacgcctgccacgcctaccagatcatccacagaaacggcatccccgacgagcagatcgtggtgatgatgtacgacgacatcgcctacagcgaggacaaccccacccccggcatcgtgatcaacagacccaacggcaccgacgtgtaccagggcgtgcccaaggactacaccggcgaggacgtgaccccccagaacttcctggccgtgctgagaggcgacgccgaggccgtgaagggcatcggcagcggcaaggtgctgaagagcggcccccaggaccacgtgttcatctacttcaccgaccacggcagcaccggcatcctggtgttccccaacgaggacctgcacgtgaaggacctgaacgagaccatccactacatgtacaagcacaagatgtacagaaagatggtgttctacatcgaggcctgcgagagcggcagcatgatgaaccacctgcccgacaacatcaacgtgtacgccaccaccgccgccaaccccagagagagcagctacgcctgctactacgacgagaagagaagcacctacctgggcgactggtacagcgtgaactggatggaggacagcgacgtggaggacctgaccaaggagaccctgcacaagcagtaccacctggtgaagagccacaccaacaccagccacgtgatgcagtacggcaacaagaccatcagcaccatgaaggtgatgcagttccagggcatgaagagaaaggccagcagccccgtgcccctgccccccgtgacccacctggacctgacccccagccccgacgtgcccctgaccatcatgaagagaaagctgatgaacaccaacgacctggaggagagcagacagctgaccgaggagatccagagacacctggacgccagacacctgatcgagaagagcgtgagaaagatcgtgagcctgctggccgccagcgaggccgaggtggagcagctgctgagcgagagagcccccctgaccggccacagctgctaccccgaggccctgctgcacttcagaacccactgcttcaactggcacagccccacctacgagtacgccctgagacacctgtacgtgctggtgaacctgtgcgagaagccctaccccctgcacagaatcaagctgagcatggaccacgtgtgcctgggccactactga

SEQ ID NO: 2780 - RNA, 1797 nt, synthetic construct
  misc_feature 1..1797: note = AAL36991 variant
  source 1..1797: mol_type = other RNA
atgacccccatcgtgaccgtgctgatctgcctgggcctgagcctgggccccagaacccacgtgcagaccggcaccatccccaagcccaccctgtgggccgagcccgacagcgtgatcacccagggcagccccgtgaccctgagctgccagggcagcctggaggcccaggagtacagactgtacagagagaagaagagcgccagctggatcaccagaatcagacccgagctggtgaagaacggccagttccacatccccagcatcacctgggagcacaccggcagatacggctgccagtactacagcagagccagatggagcgagctgagcgaccccctggtgctggtgatgaccggcgcctaccccaagcccaccctgagcgcccagcccagccccgtggtgaccagcggcggcagagtgaccctgcagtgcgagagccaggtggccttcggcggcttcatcctgtgcaaggagggcgaggaggagcacccccagtgcctgaacagccagccccacgccagaggcagcagcagagccatcttcagcgtgggccccgtgagccccaacagaagatggagccacagatgctacggctacgacctgaacagcccctacgtgtggagcagccccagcgacctgctggagctgctggtgcccggcgtgagcaagaagcccagcctgagcgtgcagcccggccccgtggtggcccccggcgagagcctgaccctgcagtgcgtgagcgacgtgggctacgacagattcgtgctgtacaaggagggcgagagagacctgagacagctgcccggcagacagccccaggccggcctgagccaggccaacttcaccctgggccccgtgagcagaagctacggcggccagtacagatgctacggcgcccacaacctgagcagcgagtgcagcgcccccagcgaccccctggacatcctgatcaccggccagatcagaggcacccccttcatcagcgtgcagcccggccccaccgtggccagcggcgagaacgtgaccctgctgtgccagagctggagacagttccacaccttcctgctgaccaaggccggcgccgccgacgcccccctgagactgagaagcatccacgagtaccccaagtaccaggccgagttccccatgagccccgtgaccagcgcccacgccggcacctacagatgctacggcagcctgaacagcgacccctacctgctgagccaccccagcgagcccctggagctggtggtgagcggccccagcatgggcagcagccccccccccaccggccccatcagcacccccgccggccccgaggaccagcccctgacccccaccggcagcgacccccagagcggcctgggcagacacctgggcgtggtgatcggcatcctggtggccgtggtgctgctgctgctgctgctgctgctgctgttcctgatcctgagacacagaagacagggcaagcactggaccagcacccagagaaaggccgacttccagcaccccgccggcgccgtgggccccgagcccaccgacagaggcctgcagtggagaagcagccccgccgccgacgcccaggaggagaacctgtacgccgccgtgaaggacacccagcccgaggacggcgtggagatggacaccagagccgccgccagcgaggccccccaggacgtgacctacgcccagctgcacagcctgaccctgagaagaaaggccaccgagcccccccccagccaggagagagagccccccgccgagcccagcatctacgccaccctggccatccactga

SEQ ID NO: 2781 - RNA, 498 nt, synthetic construct
  misc_feature 1..498: note = CCDS6385.2 variant
  source 1..498: mol_type = other RNA
atggccctgctggccctgctgctggtggtggccctgcccagagtgtggaccgacgccaacctgaccgccagacagagagaccccgaggacagccagagaaccgacgagggcgacaacagagtgtggtgccacgtgtgcgagagagagaacaccttcgagtgccagaaccccagaagatgcaagtggaccgagccctactgcgtgatcgccgccgtgaagatcttccccagattcttcatggtggccaagcagtgcagcgccggctgcgccgccatggagagacccaagcccgaggagaagagattcctgctggaggagcccatgcccttcttctacctgaagtgctgcaagatcagatactgcaacctggagggcccccccatcaacagcagcgtgttcaaggagtacgccggcagcatgggcgagagctgcggcggcctgtggctggccatcctgctgctgctggccagcatcgccgccggcctgagcctgagctga

SEQ ID NO: 2782 - RNA, 375 nt, synthetic construct
  misc_feature 1..375: note = AAA68873 variant
  source 1..375: mol_type = other RNA
atgagcctggagcagaagagccagcactgcaagcccgaggagggcctggacacccaggaggaggccctgggcctggtgggcgtgcaggccgccaccaccgaggagcaggaggccgtgagcagcagcagccccctggtgcccggcaccctgggcgaggtgcccgccgccggcagccccggccccctgaagagcccccagggcgccagcgccatccccaccgccatcgacttcaccctgtggagacagagcatcaagggcagcagcaaccaggaggaggagggccccagcaccagccccgaccccgagagcgtgttcagagccgccctgagcaagaaggtggccgacctgatccacttcctgctgctgaagtactga

SEQ ID NO: 2783 - RNA, 957 nt, synthetic construct
  misc_feature 1..957: note = AAH02455 variant
  source 1..957: mol_type = other RNA
atgctgctgggccagaagagccagagatacaaggccgaggagggcctgcaggcccagggcgaggcccccggcctgatggacgtgcagatccccaccgccgaggagcagaaggccgccagcagcagcagcaccctgatcatgggcaccctggaggaggtgaccgacagcggcagccccagccccccccagagccccgagggcgccagcagcagcctgaccgtgaccgacagcaccctgtggagccagagcgacgagggcagcagcagcaacgaggaggagggccccagcaccagccccgaccccgcccacctggagagcctgttcagagaggccctggacgagaaggtggccgagctggtgagattcctgctgagaaagtaccagatcaaggagcccgtgaccaaggccgagatgctggagagcgtgatcaagaactacaagaaccacttccccgacatcttcagcaaggccagcgagtgcatgcaggtgatcttcggcatcgacgtgaaggaggtggaccccgccggccacagctacatcctggtgacctgcctgggcctgagctacgacggcctgctgggcgacgaccagagcacccccaagaccggcctgctgatcatcgtgctgggcatgatcctgatggagggcagcagagcccccgaggaggccatctgggaggccctgagcgtgatgggcctgtacgacggcagagagcacagcgtgtactggaagctgagaaagctgctgacccaggagtgggtgcaggagaactacctggagtacagacaggcccccggcagcgaccccgtgagatacgagttcctgtggggccccagagccctggccgagaccagctacgtgaaggtgctggagcacgtggtgagagtgaacgccagagtgagaatcagctaccccagcctgcacgaggaggccctgggcgaggagaagggcgtgtga

SEQ ID NO: 2784 - RNA, 1290 nt, synthetic construct
  misc_feature 1..1290: note = AAH04479 variant
  source 1..1290: mol_type = other RNA
atggagacccagttcagaagaggcggcctgggctgcagccccgccagcatcaagagaaagaagaagagagaggacagcggcgacttcggcctgcaggtgagcaccatgttcagcgaggacgacttccagagcaccgagagagccccctacggcccccagctgcagtggagccaggacctgcccagagtgcaggtgttcagagagcaggccaacctggaggacagaagccccagaagaacccagagaatcaccggcggcgagcaggtgctgtggggccccatcacccagatcttccccaccgtgagacccgccgacctgaccagagtgatcatgcccctggagcagagaagccagcactgcaagcccgaggagggcctgcaggcccaggaggaggacctgggcctggtgggcgcccaggccctgcaggccgaggagcaggaggccgccttcttcagcagcaccctgaacgtgggcaccctggaggagctgcccgccgccgagagccccagccccccccagagcccccaggaggagagcttcagccccaccgccatggacgccatcttcggcagcctgagcgacgagggcagcggcagccaggagaaggagggccccagcaccagccccgacctgatcgaccccgagagcttcagccaggacatcctgcacgacaagatcatcgacctggtgcacctgctgctgagaaagtacagagtgaagggcctgatcaccaaggccgagatgctgggcagcgtgatcaagaactacgaggactacttccccgagatcttcagagaggccagcgtgtgcatgcagctgctgttcggcatcgacgtgaaggaggtggaccccaccagccacagctacgtgctggtgaccagcctgaacctgagctacgacggcatccagtgcaacgagcagagcatgcccaagagcggcctgctgatcatcgtgctgggcgtgatcttcatggagggcaactgcatccccgaggaggtgatgtgggaggtgctgagcatcatgggcgtgtacgccggcagagagcacttcctgttcggcgagcccaagagactgctgacccagaactgggtgcaggagaagtacctggtgtacagacaggtgcccggcaccgaccccgcctgctacgagttcctgtggggccccagagcccacgccgagaccagcaagatgaaggtgctggagtacatcgccaacgccaacggcagagaccccaccagctaccccagcctgtacgaggacgccctgagagaggagggcgagggcgtgtga

SEQ ID NO: 2785 - RNA, 1110 nt, synthetic construct
  misc_feature 1..1110: note = EAW99421 variant
  source 1..1110: mol_type = other RNA
atgcccagagcccccaagagacagagatgcatgcccgaggaggacctgcagagccagagcgagacccagggcctggagggcgcccaggcccccctggccgtggaggaggacgccagcagcagcaccagcaccagcagcagcttccccagcagcttccccagcagcagcagcagcagcagcagcagctgctaccccctgatccccagcacccccgaggaggtgagcgccgacgacgagacccccaaccccccccagagcgcccagatcgcctgcagcagccccagcgtggtggccagcctgcccctggaccagagcgacgagggcagcagcagccagaaggaggagagccccagcaccctgcaggtgctgcccgacagcgagagcctgcccagaagcgagatcgacgagaaggtgaccgacctggtgcagttcctgctgttcaagtaccagatgaaggagcccatcaccaaggccgagatcctggagagcgtgatcaagaactacgaggaccacttccccctgctgttcagcgaggccagcgagtgcatgctgctggtgttcggcatcgacgtgaaggaggtggaccccaccggccacagcttcgtgctggtgaccagcctgggcctgacctacgacggcatgctgagcgacgtgcagagcatgcccaagaccggcatcctgatcctgatcctgagcatcatcttcatcgagggctactgcacccccgaggaggtgatctgggaggccctgaacatgatgggcctgtacgacggcatggagcacctgatctacggcgagcccagaaagctgctgacccaggactgggtgcaggagaactacctggagtacagacaggtgcccggcagcgaccccgccagatacgagttcctgtggggccccagagcccacgccgagatcagaaagatgagcctgctgaagttcctggccaaggtgaacggcagcgaccccagaagcttccccctgtggtacgaggaggccctgaaggacgaggaggagagagcccaggacagaatcgccaccaccgacgacaccaccgccatggccagcgccagcagcagcgccaccggcagcttcagctaccccgagtga

SEQ ID NO: 2786 - RNA, 945 nt, synthetic construct
  misc_feature 1..945: note = AAH03408 variant
  source 1..945: mol_type = other RNA
atgcccctggagcagagaagccagcactgcaagcccgaggagggcctggaggcccagggcgaggccctgggcctggtgggcgcccaggcccccgccaccgaggagcaggagaccgccagcagcagcagcaccctggtggaggtgaccctgagagaggtgcccgccgccgagagccccagccccccccacagcccccagggcgccagcaccctgcccaccaccatcaactacaccctgtggagccagagcgacgagggcagcagcaacgaggagcaggagggccccagcaccttccccgacctggagaccagcttccaggtggccctgagcagaaagatggccgagctggtgcacttcctgctgctgaagtacagagccagagagcccttcaccaaggccgagatgctgggcagcgtgatcagaaacttccaggacttcttccccgtgatcttcagcaaggccagcgagtacctgcagctggtgttcggcatcgaggtggtggaggtggtgagaatcggccacctgtacatcctggtgacctgcctgggcctgagctacgacggcctgctgggcgacaaccagatcgtgcccaagaccggcctgctgatcatcgtgctggccatcatcgccaaggagggcgactgcgcccccgaggagaagatctgggaggagctgagcgtgctggaggccagcgacggcagagaggacagcgtgttcgcccaccccagaaagctgctgacccaggacctggtgcaggagaactacctggagtacagacaggtgcccggcagcgaccccgcctgctacgagttcctgtggggccccagagccctggtggagaccagctacgtgaaggtgctgcaccacctgctgaagatcagcggcggcccccacatcagctacccccccctgcacgagtgggccttcagagagggcgaggagtga

SEQ ID NO: 2787 - RNA, 930 nt, synthetic construct
  misc_feature 1..930: note = AAA03229 variant
  source 1..930: mol_type = other RNA
atgagcctggagcagagaagcctgcactgcaagcccgaggaggccctggaggcccagcaggaggccctgggcctggtgtgcgtgcaggccgccaccagcagcagcagccccctggtgctgggcaccctggaggaggtgcccaccgccggcagcaccgaccccccccagagcccccagggcgccagcgccttccccaccaccatcaacttcaccagacagagacagcccagcgagggcagcagcagcagagaggaggagggccccagcaccagctgcatcctggagagcctgttcagagccgtgatcaccaagaaggtggccgacctggtgggcttcctgctgctgaagtacagagccagagagcccgtgaccaaggccgagatgctggagagcgtgatcaagaactacaagcactgcttccccgagatcttcggcaaggccagcgagagcctgcagctggtgttcggcatcgacgtgaaggaggccgaccccaccggccacagctacgtgctggtgacctgcctgggcctgagctacgacggcctgctgggcgacaaccagatcatgcccaagaccggcttcctgatcatcgtgctggtgatgatcgccatggagggcggccacgcccccgaggaggagatctgggaggagctgagcgtgatggaggtgtacgacggcagagagcacagcgcctacggcgagcccagaaagctgctgacccaggacctggtgcaggagaagtacctggagtacagacaggtgcccgacagcgaccccgccagatacgagttcctgtggggccccagagccctggccgagaccagctacgtgaaggtgctggagtacgtgatcaaggtgagcgccagagtgagattcttcttccccagcctgagagaggccgccctgagagaggaggaggagggcgtgtga

SEQ ID NO: 2788 - RNA, 945 nt, synthetic construct
  misc_feature 1..945: note = AAA17729 variant
  source 1..945: mol_type = other RNA
atgcccctggagcagagaagccagcactgcaagcccgaggagggcctggaggccagaggcgaggccctgggcctggtgggcgcccaggcccccgccaccgaggagcagcagaccgccagcagcagcagcaccctggtggaggtgaccctgggcgaggtgcccgccgccgacagccccagccccccccacagcccccagggcgccagcagcttcagcaccaccatcaactacaccctgtggagacagagcgacgagggcagcagcaaccaggaggaggagggccccagaatgttccccgacctggagagcgagttccaggccgccatcagcagaaagatggtggagctggtgcacttcctgctgctgaagtacagagccagagagcccgtgaccaaggccgagatgctggagagcgtgctgagaaactgccaggacttcttccccgtgatcttcagcaaggccagcgagtacctgcagctggtgttcggcatcgaggtggtggaggtggtgcccatcagccacctgtacatcctggtgacctgcctgggcctgagctacgacggcctgctgggcgacaaccaggtgatgcccaagaccggcctgctgatcatcgtgctggccatcatcgccatcgagggcgactgcgcccccgaggagaagatctgggaggagctgagcatgctggaggtgttcgagggcagagaggacagcgtgttcgcccaccccagaaagctgctgatgcaggacctggtgcaggagaactacctggagtacagacaggtgcccggcagcgaccccgcctgctacgagttcctgtggggccccagagccctgatcgagaccagctacgtgaaggtgctgcaccacaccctgaagatcggcggcgagccccacatcagctacccccccctgcacgagagagccctgagagagggcgaggagtga

SEQ ID NO: 2789 - RNA, 945 nt, synthetic construct
  misc_feature 1..945: note = AAA17446 variant
  source 1..945: mol_type = other RNA
atgcccctggagcagagaagccagcactgcaagcccgaggagggcctggaggccagaggcgaggccctgggcctggtgggcgcccaggcccccgccaccgaggagcaggaggccgccagcagcagcagcaccctggtggaggtgaccctgggcgaggtgcccgccgccgagagccccgaccccccccagagcccccagggcgccagcagcctgcccaccaccatgaactaccccctgtggagccagagctacgaggacagcagcaaccaggaggaggagggccccagcaccttccccgacctggagagcgagttccaggccgccctgagcagaaaggtggccgagctggtgcacttcctgctgctgaagtacagagccagagagcccgtgaccaaggccgagatgctgggcagcgtggtgggcaactggcagtacttcttccccgtgatcttcagcaaggccagcagcagcctgcagctggtgttcggcatcgagctgatggaggtggaccccatcggccacctgtacatcttcgccacctgcctgggcctgagctacgacggcctgctgggcgacaaccagatcatgcccaaggccggcctgctgatcatcgtgctggccatcatcgccagagagggcgactgcgcccccgaggagaagatctgggaggagctgagcgtgctggaggtgttcgagggcagagaggacagcatcctgggcgaccccaagaagctgctgacccagcacttcgtgcaggagaactacctggagtacagacaggtgcccggcagcgaccccgcctgctacgagttcctgtggggccccagagccctggtggagaccagctacgtgaaggtgctgcaccacatggtgaagatcagcggcggcccccacatcagctacccccccctgcacgagtgggtgctgagagagggcgaggagtga

SEQ ID NO: 2790 - RNA, 954 nt, synthetic construct
  misc_feature 1..954: note = EAW99410 variant
  source 1..954: mol_type = other RNA
atgagcagcgagcagaagagccagcactgcaagcccgaggagggcgtggaggcccaggaggaggccctgggcctggtgggcgcccaggcccccaccaccgaggagcaggaggccgccgtgagcagcagcagccccctggtgcccggcaccctggaggaggtgcccgccgccgagagcgccggccccccccagagcccccagggcgccagcgccctgcccaccaccatcagcttcacctgctggagacagcccaacgagggcagcagcagccaggaggaggagggccccagcaccagccccgacgccgagagcctgttcagagaggccctgagcaacaaggtggacgagctggcccacttcctgctgagaaagtacagagccaaggagctggtgaccaaggccgagatgctggagagagtgatcaagaactacaagagatgcttccccgtgatcttcggcaaggccagcgagagcctgaagatgatcttcggcatcgacgtgaaggaggtggaccccgccagcaacacctacaccctggtgacctgcctgggcctgagctacgacggcctgctgggcaacaaccagatcttccccaagaccggcctgctgatcatcgtgctgggcaccatcgccatggagggcgacagcgccagcgaggaggagatctgggaggagctgggcgtgatgggcgtgtacgacggcagagagcacaccgtgtacggcgagcccagaaagctgctgacccaggactgggtgcaggagaactacctggagtacagacaggtgcccggcagcaaccccgccagatacgagttcctgtggggccccagagccctggccgagaccagctacgtgaaggtgctggagcacgtggtgagagtgaacgccagagtgagaatcgcctaccccagcctgagagaggccgccctgctggaggaggaggagggcgtgtga

SEQ ID NO: 2791 - RNA, 954 nt, synthetic construct; identical to SEQ ID NO: 2790
  misc_feature 1..954: note = AAA68871 variant
  source 1..954: mol_type = other RNA

SEQ ID NO: 2792 - RNA, 954 nt, synthetic construct
  misc_feature 1..954: note = AAY27261 variant
  source 1..954: mol_type = other RNA
atgagcagcgagcagaagagccagcactgcaagcccgaggagggcgtggaggcccaggaggaggccctgggcctggtgggcgcccaggcccccaccaccgaggagcaggaggccgccgtgagcagcagcagccccctggtgcccggcaccctggaggaggtgcccgccgccgagagcgccggccccccccagagcccccagggcgccagcgccctgcccaccaccatcagcttcacctgctggagacagcccaacgagggcagcagcagccaggaggaggagggccccagcaccagccccgacgccgagagcctgttcagagaggccctgagcaacaaggtggacgagctggcccacttcctgctgagaaagtacagagccaaggagctggtgaccaaggccgagatgctggagagagtgatcaagaactacaagagatgcttccccgtgatcttcggcaaggccagcgagagcctgaagatgatcttcggcatcgacgtgaaggaggtggaccccaccagcaacacctacaccctggtgacctgcctgggcctgagctacgacggcctgctgggcaacaaccagatcttccccaagaccggcctgctgatcatcgtgctgggcaccatcgccatggagggcgacagcgccagcgaggaggagatctgggaggagctgggcgtgatgggcgtgtacgacggcagagagcacaccgtgtacggcgagcccagaaagctgctgacccaggactgggtgcaggagaactacctggagtacagacaggtgcccggcagcaaccccgccagatacgagttcctgtggggccccagagccctggccgagaccagctacgtgaaggtgctggagcacgtggtgagagtgaacgccagagtgagaatcgcctaccccagcctgagagaggccgccctgctggaggaggaggagggcgtgtga

SEQ ID NO: 2793 - RNA, 945 nt, synthetic construct
  misc_feature 1..945: note = BAF82126 variant
  source 1..945: mol_type = other RNA
atgcccctggagcagagaagccagcactgcaagcccgaggagggcctggaggccagaggcgaggccctgggcctggtgggcgcccaggcccccgccaccgaggagcaggaggccgccagcagcagcagcaccctggtggaggtgaccctgggcgaggtgcccgccgccgagagccccgaccccccccagagcccccagggcgccagcagcctgcccaccaccatgaactaccccctgtggagccagagctacgaggacagcagcaaccaggaggaggagggccccagcaccttccccgacctggagagcgagttccaggccgccctgagcagaaagctggccaagctggtgcacttcctgctgctgaagtacagagccagagagcccgtgaccaaggccgagatgctgggcagcgtggtgggcaactggcagtacttcttccccgtgatcttcagcaaggccagcgacagcctgcagctggtgttcggcatcgagctgatggaggtggaccccatcggccacgtgtacatcttcgccacctgcctgggcctgagctacgacggcctgctgggcgacaaccagatcatgcccaagaccggcttcctgatcatcatcctggccatcatcgccaaggagggcgactgcgcccccgaggagaagatctgggaggagctgagcgtgctggaggtgttcgagggcagagaggacatcatcttcggcgaccccaagaagctgctgacccagtacttcgtgcaggagaactacctggagtacagacaggtgcccggcagcgaccccgcctgctacgagttcctgtggggccccagagccctgatcgagaccagctacgtgaaggtgctgcaccacatggtgaagatcagcggcggccccagaatcagctaccccctgctgcacgagtgggccctgagagagggcgaggagtga

SEQ ID NO: 2794 - RNA, 945 nt, synthetic construct
  misc_feature 1..945: note = AAA19006 variant
  source 1..945: mol_type = other RNA
atgcccctggagcagagaagccagcactgcaagcccgaggagggcctggaggccagaggcgaggccctgggcctggtgggcgcccaggcccccgccaccgaggagcaggaggccgccagcagcagcagcaccctggtggaggtgaccctgggcgaggtgcccgccgccgagagccccgaccccccccagagcccccagggcgccagcagcctgcccaccaccatgaactaccccctgtggagccagagctacgaggacagcagcaaccaggaggaggagggccccagcaccttccccgacctggagagcgagttccaggccgccctgagcagaaaggtggccaagctggtgcacttcctgctgctgaagtacagagccagagagcccgtgaccaaggccgagatgctgggcagcgtggtgggcaactggcagtacttcttccccgtgatcttcagcaaggccagcgacagcctgcagctggtgttcggcatcgagctgatggaggtggaccccatcggccacgtgtacatcttcgccacctgcctgggcctgagctacgacggcctgctgggcgacaaccagatcatgcccaagaccggcttcctgatcatcatcctggccatcatcgccaaggagggcgactgcgcccccgaggagaagatctgggaggagctgagcgtgctggaggtgttcgagggcagagaggacagcatcttcggcgaccccaagaagctgctgacccagtacttcgtgcaggagaactacctggagtacagacaggtgcccggcagcgaccccgcctgctacgagttcctgtggggccccagagccctgatcgagaccagctacgtgaaggtgctgcaccacatggtgaagatcagcggcggccccagaatcagctaccccctgctgcacgagtgggccctgagagagggcgaggagtga

SEQ ID NO: 2795 - RNA, 945 nt, synthetic construct
  misc_feature 1..945: note = CAG46567 variant
  source 1..945: mol_type = other RNA
atgcccctggagcagagaagccagcactgcaagcccgaggagggcctggaggccagaggcgaggccctgggcctggtgggcgcccaggcccccgccaccgaggagcaggaggccgccagcagcagcagcaccctggtggaggtgaccctgggcgaggtgcccgccgccgagagccccgaccccccccagagcccccagggcgccagcagcctgcccaccaccatgaactaccccctgtggagccagagctacgaggacagcagcaaccaggaggaggagggccccagcaccttccccgacctggagagcgagttccaggccgccctgagcagaaaggtggccaagctggtgcacttcctgctgctgaagtacagagccagagagcccgtgaccaaggccgagatgctgggcagcgtggtgggcaactggcagtacttcttccccgtgatcttcagcaaggccagcgacagcctgcagctggtgttcggcatcgagctgatggaggtggaccccatcggccacgtgtacatcttcgccacctgcctgggcctgagctacgacggcctgctgggcgacaaccagatcatgcccaagaccggcttcctgatcatcatcctggccatcatcgccaaggagggcgactgcgcccccgaggagaagatctgggaggagctgagcgtgctggaggtgttcgagggcagagaggacagcatcttcggcgaccccaagaagctgctgacccagtacttcgtgcaggagaactacctggagtacagacaggtgcccggcagcgaccccgcctgctacgagttcctgtggggccccagagccctgatcgagaccagctacgtgaaggtgctgcaccacatggtgaagatcagcggcggccccagaatcagctaccccctgctgcacgagtgggccttcagagagggcgaggagtga

SEQ ID NO: 2796 - RNA, 948 nt, synthetic construct
  misc_feature 1..948: note = AAA68877 variant
  source 1..948: mol_type = other RNA
atgagcctggagcagagaagcccccactgcaagcccgacgaggacctggaggcccagggcgaggacctgggcctgatgggcgcccaggagcccaccggcgaggaggaggagaccaccagcagcagcgacagcaaggaggaggaggtgagcgccgccggcagcagcagccccccccagagcccccagggcggcgccagcagcagcatcagcgtgtactacaccctgtggagccagttcgacgagggcagcagcagccaggaggaggaggagcccagcagcagcgtggaccccgcccagctggagttcatgttccaggaggccctgaagctgaaggtggccgagctggtgcacttcctgctgcacaagtacagagtgaaggagcccgtgaccaaggccgagatgctggagagcgtgatcaagaactacaagagatacttccccgtgatcttcggcaaggccagcgagttcatgcaggtgatcttcggcaccgacgtgaaggaggtggaccccgccggccacagctacatcctggtgaccgccctgggcctgagctgcgacagcatgctgggcgacggccacagcatgcccaaggccgccctgctgatcatcgtgctgggcgtgatcctgaccaaggacaactgcgcccccgaggaggtgatctgggaggccctgagcgtgatgggcgtgtacgtgggcaaggagcacatgttctacggcgagcccagaaagctgctgacccaggactgggtgcaggagaactacctggagtacagacaggtgcccggcagcgaccccgcccactacgagttcctgtggggcagcaaggcccacgccgagaccagctacgagaaggtgatcaactacctggtgatgctgaacgccagagagcccatctgctaccccagcctgtacgaggaggtgctgggcgaggagcaggagggcgtgtga

SEQ ID NO: 2797 - RNA, 1044 nt, synthetic construct
  misc_feature 1..1044: note = AAI01309 variant
  source 1..1044: mol_type = other RNA
atgcccagaggccagaagagcaagctgagagccagagagaagagaagacaggccagaggcggcctggaggacctgatcgacgccctggacatcctggaggaggaggaggagagcccccccagcgccagcgcctgcctgaaggacgtgttccagagcagcctggacggcgccagcaacaacccccacggcctgagagaggcccagagcaccagcaccagcgccaccgccgccagccacaccagacaccccgagggcgtgaacgaccagatggaggagagacccatctgcacccaggacctggaggccaccgacagcttccccagaggccccgtggacgagaaggtgatcatcctggtgcactacctgctgtacaagtaccagatgaaggagcccatcaccaaggccgacatgctgagaaacgtgacccagatgagcaagagccagttccccgtgatcctgagcagagccagcgagcacctggagctgatcttcggcctggacctgaaggaggtggagcccaacaagcacatctacgtgctggtgaacaagctggacctgggctgcgacgccaagctgagcgacgagaccggcgtgcccaagaccggcctgctgatgaccgtgctgggcatcatcttcaccaacggcaactgcgtggccgaggaggaggtgtggaaggtgttcaacaccatgggcctgtacgacggcatcgagcacttcatgttcggcgagcccagaaagctgctgaccaaggacctggtgaaggagaactacctggagtaccagcaggtgcccaacagcgacccccccagataccagttcctgtggggccccagagcccacgccgagaccagcaagatgaaggtgctggagttcctggccaaggtgaacgacaccgcccccagcgagttcagcaactggtacaccgaggccctgcaggacgaggaggagagagccagagccagagtggccgccaaggccagagtgagcgccaccgccggcgccagaagcaaggtgaagagcagcaagagcagccagctgcagtga

SEQ ID NO: 2798 - RNA, 975 nt, synthetic construct
  misc_feature 1..975: note = CCDS43927.1 variant
  source 1..975: mol_type = other RNA
atgagccaggaccaggagagccccagatgcacccacgaccagcacctgcagaccttcagcgagacccagagcctggaggtggcccaggtgagcaaggccctggagaagaccctgctgagcagcagccaccccctggtgcccggcaagctgaaggaggcccccgccgccaaggccgagagccccctggaggtgccccagagcttctgcagcagcagcatcgccgtgaccaccaccagcagcagcgagagcgacgaggccagcagcaaccaggaggaggaggacagccccagcagcagcgaggacaccagcgaccccagaaacgtgcccgccgacgccctggaccagaaggtggccttcctggtgaacttcatgctgcacaagtgccagatgaagaagcccatcaccaaggccgacatgctgaagatcatcatcaaggacgacgagagccacttcagcgagatcctgctgagagccagcgagcacctggagatgatcttcggcctggacgtggtggaggtggaccccaccacccactgctacggcctgttcatcaagctgggcctgacctacgacggcatgctgagcggcgagaagggcgtgcccaagaccggcctgctgatcatcgtgctgggcgtgatcttcatgaagggcaacagagccaccgaggaggaggtgtgggaggtgctgaacctgaccggcgtgtacagcggcaagaagcacttcatcttcggcgagcccagaatgctgatcaccaaggacttcgtgaaggagaagtacctggagtaccagcaggtggccaacagcgaccccgccagatacgagttcctgtggggccccagagccaaggccgagaccagcaagatgaaggtgctggagttcgtggccaaggtgcacggcagctacccccacagcttccccagccagtacgccgaggccctgaaggaggaggaggagagagccagagccagaatctga

SEQ ID NO: 2799 - RNA, 1011 nt, synthetic construct
  misc_feature 1..1011: note = CCDS59524.1 variant
  source 1..1011: mol_type = other RNA
atgcccagaggccaggccagcaagagaagagccagagagaagagaagacaggccagaggcgaggaccagtgcctgggcggcgcccaggccaccgccgccgagaaggagaagctgcccagcagcagcagccccgcctgccagagccccccccagagcttccccaacgccggcatcccccaggagagccagagagccagctaccccagcagccccgccagcgccgtgagcctgaccagcagcgacgagggcgccaagggccagaagggcgagagccccaacagcttccacggccccagcagcagcgagagcaccggcagagacctgctgaacaccaagaccggcgagctggtgcagttcctgctgaacaagtacatcagaaaggagcccatcaccagagaggccatgctgaaggtgatcaacagaaagtacaagcagcacttccccgagatcctgagaagaagcaccgagaacgtggaggtggtgttcggcctgtacctgaaggagatggaccccagcagacagagctacgtgctggtgggcaagctggacttccccaaccagggcagcctgagcgacggcggcggcttccccctgagcggcctgctgatggtgctgctgagcaccatcttcatgcacggcaacagagccaccgaggaggagatgtgggagtgcctgaacgccctgggcatgtacaagggcagaaagcacttcatctacggcgagccccaggagctggtgaccaaggacctggtgagagagggctacctggagtaccagcaggtgcccagcagcgacccccccagatacgagttcctgtggggccccagagccagagccgagaccagcaagatgaaggtgctggagttcgtggccaagctgaacgacaccgtggccagcacctacaagagcagatacgaggaggccctgagagaggaggaggagcaggccagagccagagccgtggccagagacagcgccagagccagagccagcagaagcttccagccctga

SEQ ID NO: 2800 - RNA, 1044 nt, synthetic construct
  misc_feature 1..1044: note = AAC23616 variant
  source 1..1044: mol_type = other RNA
atgcccagaggccagaagagcaagctgagagccagagagaagagaagaaaggccagagaggagacccagggcctgaaggtgagacacgccaccgccgccgagaaggaggagtgccccagcagcagccccgtgctgggcgacacccccaccagcagccccgccgccggcatcccccagaagccccagggcgccccccccaccaccaccgccgccgccgccgtgagctgcaccgagagcgacgagggcgccaagtgccagggcgaggagaacgccagcttcagccaggccaccaccagcaccgagagcagcgtgaaggaccccgtggcctgggaggccggcatgctgatgcacttcatcctgagaaagtacaagatgagagagcccatcatgaaggccgacatgctgaaggtggtggacgagaagtacaaggaccacttcaccgagatcctgaacggcgccagcagaagactggagctggtgttcggcctggacctgaaggaggacaaccccagcagccacacctacaccctggtgagcaagctgaacctgaccaacgacggcaacctgagcaacgactgggacttccccagaaacggcctgctgatgcccctgctgggcgtgatcttcctgaagggcaacagcgccaccgaggaggagatctggaagttcatgaacgtgctgggcgcctacgacggcgaggagcacctgatctacggcgagcccagaaagttcatcacccaggacctggtgcaggagaagtacctgaagtacgagcaggtgcccaacagcgacccccccagataccagttcctgtggggccccagagcctacgccgagaccaccaagatgaaggtgctggagttcctggccaagatgaacggcgccacccccagagacttccccagccactacgaggaggccctgagagacgaggaggagagagcccaggtgagaagcagcgtgagagccagaagaagaaccaccgccaccaccttcagagccagaagcagagcccccttcagcagaagcagccaccccatgtga

SEQ ID NO: 2801 - RNA, 960 nt, synthetic construct
  misc_feature 1..960: note = AAD10635 variant
  source 1..960: mol_type = other RNA
atgcccagaggccagaagagcaagctgagagccagagagaagagaagaaaggccagagacgagaccagaggcctgaacgtgccccaggtgaccgaggccgaggaggaggaggccccctgctgcagcagcagcgtgagcggcggcgccgccagcagcagccccgccgccggcatcccccaggagccccagagagcccccaccaccgccgccgccgccgccgccggcgtgagcagcaccaagagcaagaagggcgccaagagccaccagggcgagaagaacgccagcagcagccaggccagcaccagcaccaagagccccagcgaggaccccctgaccagaaagagcggcagcctggtgcagttcctgctgtacaagtacaagatcaagaagagcgtgaccaagggcgagatgctgaagatcgtgggcaagagattcagagagcacttccccgagatcctgaagaaggccagcgagggcctgagcgtggtgttcggcctggagctgaacaaggtgaaccccaacggccacacctacaccttcatcgacaaggtggacctgaccgacgaggagagcctgctgagcagctgggacttccccagaagaaagctgctgatgcccctgctgggcgtgatcttcctgaacggcaacagcgccaccgaggaggagatctgggagttcctgaacatgctgggcgtgtacgacggcgaggagcacagcgtgttcggcgagccctggaagctgatcaccaaggacctggtgcaggagaagtacctggagtacaagcaggtgcccagcagcgacccccccagattccagttcctgtggggccccagagcctacgccgagaccagcaagatgaaggtgctggagttcctggccaaggtgaacggcaccaccccctgcgccttccccacccactacgaggaggccctgaaggacgaggagaaggccggcgtgtga

SEQ ID NO: 2802 - RNA, 1041 nt, synthetic construct
  misc_feature 1..1041: note = AAD10636 variant
  source 1..1041: mol_type = other RNA
atgcccagaggccagaagagcaccctgcacgccagagagaagagacagcagaccagaggccagacccaggaccaccagggcgcccagatcaccgccaccaacaagaagaaggtgagcttcagcagccccctgatcctgggcgccaccatccagaagaagagcgccggcagaagcagaagcgccctgaagaagccccagagagccctgagcaccaccaccagcgtggacgtgagctacaagaagagctacaagggcgccaacagcaagatcgagaagaagcagagcttcagccagggcctgagcagcaccgtgcagagcagaaccgaccccctgatcatgaagaccaacatgctggtgcagttcctgatggagatgtacaagatgaagaagcccatcatgaaggccgacatgctgaagatcgtgcagaagagccacaagaactgcttccccgagatcctgaagaaggccagcttcaacatggaggtggtgttcggcgtggacctgaagaaggtggacagcaccaaggacagctacgtgctggtgagcaagatggacctgcccaacaacggcaccgtgaccagaggcagaggcttccccaagaccggcctgctgctgaacctgctgggcgtgatcttcatgaagggcaactgcgccaccgaggagaagatctgggagttcctgaacaagatgagaatctacgacggcaagaagcacttcatcttcggcgagcccagaaagctgatcacccaggacctggtgaagctgaagtacctggagtacagacaggtgcccaacagcaaccccgccagatacgagttcctgtggggccccagagcccacgccgagaccagcaagatgaaggtgctggagttctgggccaaggtgaacaagaccgtgcccagcgccttccagttctggtacgaggaggccctgagagacgaggaggagagagtgcaggccgccgccatgctgaacgacggcagcagcgccatgggcagaaagtgcagcaaggccaaggccagcagcagcagccacgcctga

SEQ ID NO: 2803 - RNA, 1041 nt, synthetic construct
  misc_feature 1..1041: note = AAC23619 variant
  source 1..1041: mol_type = other RNA
atgcccagaggccagaagagcaagctgagagccagagagaagagacagagaaccagaggccagacccaggacctgaaggtgggccagcccaccgccgccgagaaggaggagagccccagcagcagcagcagcgtgctgagagacaccgccagcagcagcctggccttcggcatcccccaggagccccagagagagccccccaccaccagcgccgccgccgccatgagctgcaccggcagcgacaagggcgacgagagccaggacgaggagaacgccagcagcagccaggccagcaccagcaccgagagaagcctgaaggacagcctgaccagaaagaccaagatgctggtgcagttcctgctgtacaagtacaagatgaaggagcccaccaccaaggccgagatgctgaagatcatcagcaagaagtacaaggagcacttccccgagatcttcagaaaggtgagccagagaaccgagctggtgttcggcctggccctgaaggaggtgaaccccaccacccacagctacatcctggtgagcatgctgggccccaacgacggcaaccagagcagcgcctggaccctgcccagaaacggcctgctgatgcccctgctgagcgtgatcttcctgaacggcaactgcgccagagaggaggagatctgggagttcctgaacatgctgggcatctacgacggcaagagacacctgatcttcggcgagcccagaaagctgatcacccaggacctggtgcaggagaagtacctggagtaccagcaggtgcccaacagcgacccccccagataccagttcctgtggggccccagagcccacgccgagaccagcaagatgaaggtgctggagttcctggccaaggtgaacgacaccacccccaacaacttccccctgctgtacgaggaggccctgagagacgaggaggagagagccggcgccagacccagagtggccgccagaagaggcaccaccgccatgaccagcgcctacagcagagccaccagcagcagcagcagccagcccatgtga

SEQ ID NO: 2804 - RNA, 828 nt, synthetic construct
  misc_feature 1..828: note = CCDS65233.1 variant
  source 1..828: mol_type = other RNA
atgaccagcgccggcgtgttcaacgccggcagcgacgagagagccaacagcagagacgaggagtacccctgcagcagcgaggtgagccccagcaccgagagcagctgcagcaacttcatcaacatcaaggtgggcctgctggagcagttcctgctgtacaagttcaagatgaagcagagaatcctgaaggaggacatgctgaagatcgtgaaccccagataccagaaccagttcgccgagatccacagaagagccagcgagcacatcgaggtggtgttcgccgtggacctgaaggaggtgaaccccacctgccacctgtacgacctggtgagcaagctgaagctgcccaacaacggcagaatccacgtgggcaaggtgctgcccaagaccggcctgctgatgaccttcctggtggtgatcttcctgaagggcaactgcgccaacaaggaggacacctggaagttcctggacatgatgcagatctacgacggcaagaagtactacatctacggcgagcccagaaagctgatcacccaggacttcgtgagactgacctacctggagtaccaccaggtgccctgcagctaccccgcccactaccagttcctgtggggccccagagcctacaccgagaccagcaagatgaaggtgctggagtacctggccaaggtgaacgacatcgcccccggcgccttcagcagccagtacgaggaggccctgcaggacgaggaggagagccccagccagagatgcagcagaaactggcactactgcagcggccaggactgcctgagagccaagttcagcagcttcagccagccctactga

SEQ ID NO: 2805 - RNA, 1224 nt, synthetic construct
  misc_feature 1..1224: note = AAH67286 variant
  source 1..1224: mol_type = other RNA
atgcccagaggccacaagagcaagctgagaacctgcgagaagagacaggagaccaacggccagccccagggcctgaccggcccccaggccaccgccgagaagcaggaggagagccacagcagcagcagcagcagcagagcctgcctgggcgactgcagaagaagcagcgacgccagcatcccccaggagagccagggcgtgagccccaccggcagccccgacgccgtggtgagctacagcaagagcgacgtggccgccaacggccaggacgagaagagccccagcaccagcagagacgccagcgtgccccaggagagccagggcgccagccccaccggcagccccgacgccggcgtgagcggcagcaagtacgacgtggccgccaacggccaggacgagaagagccccagcaccagccacgacgtgagcgtgccccaggagagccagggcgccagccccaccggcagccccgacgccggcgtgagcggcagcaagtacgacgtggccgccgagggcgaggacgaggagagcgtgagcgccagccagaaggccatcatcttcaagagactgagcaaggacgccgtgaagaagaaggcctgcaccctggcccagttcctgcagaagaagttcgagaagaaggagagcatcctgaaggccgacatgctgaagtgcgtgagaagagagtacaagccctacttcccccagatcctgaacagaaccagccagcacctggtggtggccttcggcgtggagctgaaggagatggacagcagcggcgagagctacaccctggtgagcaagctgggcctgcccagcgagggcatcctgagcggcgacaacgccctgcccaagagcggcctgctgatgagcctgctggtggtgatcttcatgaacggcaactgcgccaccgaggaggaggtgtgggagttcctgggcctgctgggcatctacgacggcatcctgcacagcatctacggcgacgccagaaagatcatcaccgaggacctggtgcaggacaagtacgtggtgtacagacaggtgtgcaacagcgaccccccctgctacgagttcctgtggggccccagagcctacgccgagaccaccaagatgagagtgctgagagtgctggccgacagcagcaacaccagccccggcctgtacccccacctgtacgaggacgccctgatcgacgaggtggagagagccctgagactgagagcctga

SEQ ID NO: 2806 - RNA, 3429 nt, synthetic construct
  misc_feature 1..3429: note = CCDS35417.1 variant
  source 1..3429: mol_type = other RNA
atgggcgacaaggacatgcccaccgccggcatgcccagcctgctgcagagcagcagcgagagcccccagagctgccccgagggcgaggacagccagagccccctgcagatcccccagagcagccccgagagcgacgacaccctgtaccccctgcagagcccccagagcagaagcgagggcgaggacagcagcgaccccctgcagagaccccccgagggcaaggacagccagagccccctgcagatcccccagagcagccccgagggcgacgacacccagagccccctgcagaacagccagagcagccccgagggcaaggacagcctgagccccctggagatcagccagagcccccccgagggcgaggacgtgcagagccccctgcagaaccccgccagcagcttcttcagcagcgccctgctgagcatcttccagagcagccccgagagcacccagagccccttcgagggcttcccccagagcgtgctgcagatccccgtgagcgccgccagcagcagcaccctggtgagcatcttccagagcagccccgagagcacccagagccccttcgagggcttcccccagagccccctgcagatccccgtgagcagaagcttcagcagcaccctgctgagcatcttccagagcagccccgagagaacccagagcaccttcgagggcttcgcccagagccccctgcagatccccgtgagccccagcagcagcagcaccctgctgagcctgttccagagcttcagcgagagaacccagagcaccttcgagggcttcgcccagagcagcctgcagatccccgtgagccccagcttcagcagcaccctggtgagcctgttccagagcagccccgagagaacccagagcaccttcgagggcttcccccagagccccctgcagatccccgtgagcagcagcagcagcagcaccctgctgagcctgttccagagcagccccgagagaacccacagcaccttcgagggcttcccccagagcctgctgcagatccccatgaccagcagcttcagcagcaccctgctgagcatcttccagagcagccccgagagcgcccagagcaccttcgagggcttcccccagagccccctgcagatccccggcagccccagcttcagcagcaccctgctgagcctgttccagagcagccccgagagaacccacagcaccttcgagggcttcccccagagccccctgcagatccccatgaccagcagcttcagcagcaccctgctgagcatcctgcagagcagccccgagagcgcccagagcgccttcgagggcttcccccagagccccctgcagatccccgtgagcagcagcttcagctacaccctgctgagcctgttccagagcagccccgagagaacccacagcaccttcgagggcttcccccagagccccctgcagatccccgtgagcagcagcagcagcagcagcaccctgctgagcctgttccagagcagccccgagtgcacccagagcaccttcgagggcttcccccagagccccctgcagatcccccagagcccccccgagggcgagaacacccacagccccctgcagatcgtgcccagcctgcccgagtgggaggacagcctgagcccccactacttcccccagagccccccccagggcgaggacagcctgagcccccactacttcccccagagccccccccagggcgaggacagcctgagcccccactacttcccccagagcccccagggcgaggacagcctgagcccccactacttcccccagagccccccccagggcgaggacagcatgagccccctgtacttcccccagagccccctgcagggcgaggagttccagagcagcctgcagagccccgtgagcatctgcagcagcagcacccccagcagcctgccccagagcttccccgagagcagccagagcccccccgagggccccgtgcagagccccctgcacagcccccagagcccccccgagggcatgcacagccagagccccctgcagagccccgagagcgcccccgagggcgaggacagcctgagccccctgcagatcccccagagccccctggagggcgaggacagcctgagcagcctgcacttcccccagagcccccccgagtgggaggacagcctgagccccctgcacttcccccagttccccccccagggcgaggacttccagagcagcctgcagagccccgtgagcatctgcagcagcagcaccagcctgagcctgccccagagcttccccgagagcccccagagcccccccgagggccccgcccagagccccctgcagagacccgtgagcagcttcttcagctacaccctggccagcctgctgcagagcagccacgagagcccccagagcccccccgagggccccgcccagagccccctgcagagccccgtgagcagcttccccagcagcaccagcagcagcctgagccagagcagccccgtgagcagcttccccagcagcaccagcagcagcctgagcaagagcagccccgagagccccctgcagagccccgtgatcagcttcagcagcagcaccagcctgagccccttcagcgaggagagcagcagccccgtggacgagtacaccagcagcagcgacaccctgctggagagcgacagcctgaccgacagcgagagcctgatcgagagcgagcccctgttcacctacaccctggacgagaaggtggacgagctggccagattcctgctgctgaagtaccaggtgaagcagcccatcaccaaggccgagatgctgaccaacgtgatcagcagatacaccggctacttccccgtgatcttcagaaaggccagagagttcatcgagatcctgttcggcatcagcctgagagaggtggaccccgacgacagctacgtgttcgtgaacaccctggacctgaccagcgagggctgcctgagcgacgagcagggcatgagccagaacagactgctgatcctgatcctgagcatcatcttcatcaagggcacctacgccagcgaggaggtgatctgggacgtgctgagcggcatcggcgtgagagccggcagagagcacttcgccttcggcgagcccagagagctgctgaccaaggtgtgggtgcaggagcactacctggagtacagagaggtgcccaacagcagcccccccagatacgagttcctgtggggccccagagcccacagcgaggtgatcaagagaaaggtggtggagttcctggccatgctgaagaacaccgtgcccatcaccttccccagcagctacaaggacgccctgaaggacgtggaggagagagcccaggccatcatcgacaccaccgacgacagcaccgccaccgagagcgccagcagcagcgtgatgagccccagcttcagcagcgagtga

SEQ ID NO: 2807 - RNA, 1122 nt, synthetic construct
  misc_feature 1..1122: note = AAF07210 variant
  source 1..1122: mol_type = other RNA
atgccccccgtgcccggcgtgcccttcagaaacgtggacaacgacagccccaccagcgtggagctggaggactgggtggacgcccagcaccccaccgacgaggaggaggaggaggccagcagcgccagcagcaccctgtacctggtgttcagccccagcagcttcagcaccagcagcagcctgatcctgggcggccccgaggaggaggaggtgcccagcggcgtgatccccaacctgaccgagagcatccccagcagccccccccagggccccccccagggccccagccagagccccctgagcagctgctgcagcagcttcagctggagcagcttcagcgaggagagcagcagccagaagggcgaggacaccggcacctgccagggcctgcccgacagcgagagcagcttcacctacaccctggacgagaaggtggccgagctggtggagttcctgctgctgaagtacgaggccgaggagcccgtgaccgaggccgagatgctgatgatcgtgatcaagtacaaggactacttccccgtgatcctgaagagagccagagagttcatggagctgctgttcggcctggccctgatcgaggtgggccccgaccacttctgcgtgttcgccaacaccgtgggcctgaccgacgagggcagcgacgacgagggcatgcccgagaacagcctgctgatcatcatcctgagcgtgatcttcatcaagggcaactgcgccagcgaggaggtgatctgggaggtgctgaacgccgtgggcgtgtacgccggcagagagcacttcgtgtacggcgagcccagagagctgctgaccaaggtgtgggtgcagggccactacctggagtacagagaggtgccccacagcagccccccctactacgagttcctgtggggccccagagcccacagcgagagcatcaagaagaaggtgctggagttcctggccaagctgaacaacaccgtgcccagcagcttccccagctggtacaaggacgccctgaaggacgtggaggagagagtgcaggccaccatcgacaccgccgacgacgccaccgtgatggccagcgagagcctgagcgtgatgagcagcaacgtgagcttcagcgagtga

SEQ ID NO: 2808 - RNA, 1932 nt, synthetic construct
  misc_feature 1..1932: note = AAM08355 variant
  source 1..1932: mol_type = other RNA
atgctgctgccctgccactgggtgctggacgccaccttcagcgacggcagcctgggccagtgggtgaagaacacctgcgccacctacgccctgagccccgtggtgctgcccccccagccccagcccagaaagaaggccaccgacaaggactacagcgccttccacctgggccacctgagagaggtgagactgttcctgagaggcggcaccagcgaccagagaatggacagcctggtgctgtgccccacctacttcaagctgtggagaaccctgagcggcagccccggcctgcagctgagcgacctgcacttcggcagccagcccgagggcaagttcagcctgagaagagccgtgagcgtgaagcagagagaggagccccaggactggcccctgaacgagaagagaaccctgtggaaggacagcgacctgcccacctggagaagaggcaccggctacaccctgagcctgcccgccgtgagccccggcaagagactgtggggcgagaaggccggcagcctgcccgagagcgagcccctgttcacctacaccctggacgagaaggtggacaagctggtgcagttcctgctgctgaagtaccaggccaaggagcccctgaccagagccgagatgcagatgaacgtgatcaacacctacaccggctacttccccatgatcttcagaaaggccagagagttcatcgagatcctgttcggcatcagcctgaccgaggtggaccccgaccacttctacgtgttcgtgaacaccctggacctgacctgcgagggcagcctgagcgacgagcagggcatgccccagaacagactgctgatcctgatcctgagcgtgatcttcatcaagggcaactgcgccagcgaggaggtgatctgggaggtgctgaacgccatcggcccctggagcgccctggccggcttcgccgacgtgctgagcagactggccctgtgggagagcgagggccccgaggccttctgcgaggagagcggcctgagaagcgccgagggcagcgtgctggacctggccaacccccagggcctggccggccacagacaggaggacggcagaagaggcctgaccgaggccagcccccagcagaagaagggcggcgaggacgaggacatgcccgccgccggcatgccccccctgccccagagcccccccgagatccccccccagggcccccccaagatcagcccccagggccccccccagagccccccccagagccccctggacagctgcagcagccccctgctgtggaccagactggacgaggagagcagcagcgaggaggaggacaccgccacctggcacgccctgcccgagagcgagagcctgcccagatacgccctggacgagaaggtggccgagctggtgcagttcctgctgctgaagtaccagaccaaggagcccgtgaccaaggccgagatgctgaccaccgtgatcaagaagtacaaggactacttccccatgatcttcggcaaggcccacgagttcatcgagctgatcttcggcatcgccctgaccgacatggaccccgacaaccacagctacttcttcgaggacaccctggacctgacctacgagggcagcctgatcgacgaccagggcatgcccaagaactgcctgctgatcctgatcctgagcatgatcttcatcaagggcagctgcgtgcccgaggaggtgatctgggaggtgctgagcgccatcggccccatccagagacccgccagagaggtgctggagttcctgagcaagctgagcagcatcatccccagcgccttccccagctggtacatggacgccctgaaggacatggaggacagagcccaggccatcatcgacaccaccgacgacgccaccgccatggccagcgccagccccagcgtgatgagcaccaacttctgccccgagtga

SEQ ID NO: 2809 - RNA, 2337 nt, synthetic construct
  misc_feature 1..2337: note = AAG23757 variant
  source 1..2337: mol_type = other RNA
atggcccagaagatggactgcggcgccggcctgctgggcttccaggccgaggccagcgtggaggacagcgccctgctgatgcagaccctgatggaggccatccagatcagcgaggccccccccaccaaccaggccaccgccgccgccagcccccagagcagccagccccccaccgccaacgagatggccgacatccaggtgagcgccgccgccgccagacccaagagcgccttcaaggtgcagaacgccaccaccaagggccccaacggcgtgtacgacttcagccaggcccacaacgccaaggacgtgcccaacacccagcccaaggccgccttcaagagccagaacgccacccccaagggccccaacgccgcctacgacttcagccaggccgccaccaccggcgagctggccgccaacaagagcgagatggccttcaaggcccagaacgccaccaccaaggtgggccccaacgccacctacaacttcagccagagcctgaacgccaacgacctggccaacagcagacccaagacccccttcaaggcctggaacgacaccaccaaggcccccaccgccgacacccagacccagaacgtgaaccaggccaagatggccaccagccaggccgacatcgagaccgaccccggcatcagcgagcccgacggcgccaccgcccagaccagcgccgacggcagccaggcccagaacctggagagcagaaccatcatcagaggcaagagaaccagaaagatcaacaacctgaacgtggaggagaacagcagcggcgaccagagaagagcccccctggccgccggcacctggagaagcgcccccgtgcccgtgaccacccagaacccccccggcgccccccccaacgtgctgtggcagacccccctggcctggcagaaccccagcggctggcagaaccagaccgccagacagaccccccccgccagacagagcccccccgccagacagaccccccccgcctggcagaaccccgtggcctggcagaaccccgtgatctggcccaaccccgtgatctggcagaaccccgtgatctggcccaaccccatcgtgtggcccggccccgtggtgtggcccaaccccctggcctggcagaacccccccggctggcagaccccccccggctggcagaccccccccggctggcagggcccccccgactggcagggcccccccgactggcccctgccccccgactggcccctgccccccgactggcccctgcccaccgactggcccctgccccccgactggatccccgccgactggcccatcccccccgactggcagaacctgagacccagccccaacctgagacccagccccaacagcagagccagccagaaccccggcgccgcccagcccagagacgtggccctgctgcaggagagagccaacaagctggtgaagtacctgatgctgaaggactacaccaaggtgcccatcaagagaagcgagatgctgagagacatcatcagagagtacaccgacgtgtaccccgagatcatcgagagagcctgcttcgtgctggagaagaagttcggcatccagctgaaggagatcgacaaggaggagcacctgtacatcctgatcagcacccccgagagcctggccggcatcctgggcaccaccaaggacacccccaagctgggcctgctgctggtgatcctgggcgtgatcttcatgaacggcaacagagccagcgaggccgtgctgtgggaggccctgagaaagatgggcctgagacccggcgtgagacaccccctgctgggcgacctgagaaagctgctgacctacgagttcgtgaagcagaagtacctggactacagaagagtgcccaacagcaacccccccgagtacgagttcctgtggggcctgagaagctaccacgagaccagcaagatgaaggtgctgagattcatcgccgaggtgcagaagagagaccccagagactggaccgcccagttcatggaggccgccgacgaggccctggacgccctggacgccgccgccgccgaggccgaggccagagccgaggccagaaccagaatgggcatcggcgacgaggccgtgagcggcccctggagctgggacgacatcgagttcgagctgctgacctgggacgaggagggcgacttcggcgacccctggagcagaatccccttcaccttctgggccagataccaccagaacgccagaagcagattcccccagaccttcgccggccccatcatcggccccggcggcaccgccagcgccaacttcgccgccaacttcggcgccatcggcttcttctgggtggagtga

SEQ ID NO: 2810 - RNA, 1821 nt, synthetic construct
  misc_feature 1..1821: note = AAD28598 variant
  source 1..1821: mol_type = other RNA
atgagcgacaccagcgagagcggcgccggcctgaccagattccaggccgaggccagcgagaaggacagcagcagcatgatgcagaccctgctgaccgtgacccagaacgtggaggtgcccgagacccccaaggccagcaaggccctggaggtgagcgaggacgtgaaggtgagcaaggccagcggcgtgagcaaggccaccgaggtgagcaagacccccgaggccagagaggcccccgccacccaggccagcagcaccacccagctgaccgacacccaggtgctggccgccgagaacaagagcctggccgccgacaccaagaagcagaacgccgacccccaggccgtgaccatgcccgccaccgagaccaagaaggtgagccacgtggccgacaccaaggtgaacaccaaggcccaggagaccgaggccgcccccagccaggcccccgccgacgagcccgagcccgagagcgccgccgcccagagccaggagaaccaggacaccagacccaaggtgaaggccaagaaggccagaaaggtgaagcacctggacggcgaggaggacggcagcagcgaccagagccaggccagcggcaccaccggcggcagaagagtgagcaaggccctgatggccagcatggccagaagagccagcagaggccccatcgccttctgggccagaagagccagcagaaccagactggccgcctgggccagaagagccctgctgagcctgagaagccccaaggccagaagaggcaaggccagaagaagagccgccaagctgcagagcagccaggagcccgaggcccccccccccagagacgtggccctgctgcagggcagagccaacgacctggtgaagtacctgctggccaaggaccagaccaagatccccatcaagagaagcgacatgctgaaggacatcatcaaggagtacaccgacgtgtaccccgagatcatcgagagagccggctacagcctggagaaggtgttcggcatccagctgaaggagatcgacaagaacgaccacctgtacatcctgctgagcaccctggagcccaccgacgccggcatcctgggcaccaccaaggacagccccaagctgggcctgctgatggtgctgctgagcatcatcttcatgaacggcaacagaagcagcgaggccgtgatctgggaggtgctgagaaagctgggcctgagacccggcatccaccacagcctgttcggcgacgtgaagaagctgatcaccgacgagttcgtgaagcagaagtacctggactacgccagagtgcccaacagcaacccccccgagtacgagttcttctggggcctgagaagctactacgagaccagcaagatgaaggtgctgaagttcgcctgcaaggtgcagaagaaggaccccaaggagtgggccgcccagtacagagaggccatggaggccgacctgaaggccgccgccgaggccgccgccgaggccaaggccagagccgagatcagagccagaatgggcatcggcctgggcagcgagaacgccgccggcccctgcaactgggacgaggccgacatcggcccctgggccaaggccagaatccaggccggcgccgaggccaaggccaaggcccaggagagcggcagcgccagcaccggcgccagcaccagcaccaacaacagcgccagcgccagcgccagcaccagcggcggcttcagcgccggcgccagcctgaccgccaccctgaccttcggcctgttcgccggcctgggcggcgccggcgccagcaccagcggcagcagcggcgcctgcggcttcagctacaagtga

SEQ ID NO: 2811 - RNA, 2226 nt, synthetic construct
  misc_feature 1..2226: note = AAH63838 variant
  source 1..2226: mol_type = other RNA
atggccgagggcagcttcagcgtgcagagcgagagctacagcgtggaggacatggacgagggcagcgacgaggtgggcgaggaggagatggtggagggcaacgactacgaggagttcggcgccttcggcggctacggcaccctgaccagcttcgacatccacatcctgagagccttcggcagcctgggccccggcctgagaatcctgagcaacgagccctgggagctggagaaccccgtgctggcccagaccctggtggaggccctgcagctggaccccgagaccctggccaacgagaccgccgccagagccgccaacgtggccagagccgccgccagcaacagagccgccagagccgccgccgccgccgccagaaccgccttcagccaggtggtggccagccacagagtggccaccccccaggtgagcggcgaggacacccagcccaccacctacgccgccgaggcccagggccccacccccgagccccccctggccagcccccagaccagccagatgctggtgaccagcaagatggccgcccccgaggcccccgccaccagcgcccagagccagaccggcagccccgcccaggaggccgccaccgagggccccagcagcgcctgcgccttcagccaggccccctgcgccagagaggtggacgccaacagacccagcaccgccttcctgggccagaacgacgtgttcgacttcacccagcccgccggcgtgagcggcatggccttccccagacccaagagacccgcccccgcccaggaggccgccaccgagggccccagcgccgccagcggcgtgccccagaccggccccggcagagaggtggccgccaccagacccaagaccaccaagagcggcaaggccctggccaagaccagatgggtggagccccagaacgtggtggccgccgccgccgccaaggccaagatggccaccagcatccccgagcccgagggcgccgccgccgccaccgcccagcacagcgccgagccctgggccagaatgggcggcaagagaaccaagaagagcaagcacctggacgacgagtacgagagcagcgaggaggagagagagacccccgccgtgccccccacctggagagccagccagcccagcctgaccgtgagagcccagctggcccccagaccccccatggcccccagaagccagatccccagcagacacgtgctgtgcctgccccccagaaacgtgaccctgctgcaggagagagccaacaagctggtgaagtacctgatgatcaaggactacaagaagatccccatcaagagagccgacatgctgaaggacgtgatcagagagtacgacgagcacttccccgagatcatcgagagagccacctacaccctggagaagaagttcggcatccacctgaaggagatcgacaaggaggagcacctgtacatcctggtgtgcaccagagacagcagcgccagactgctgggcaagaccaaggacacccccagactgagcctgctgctggtgatcctgggcgtgatcttcatgaacggcaacagagccagcgaggccgtgctgtgggaggccctgagaaagatgggcctgagacccggcgtgagacaccccttcctgggcgacctgagaaagctgatcaccgacgacttcgtgaagcagaagtacctggagtacaagaagatccccaacagcaacccccccgagtacgagttcctgtggggcctgagagccagacacgagaccagcaagatgagagtgctgagattcatcgcccagaaccagaacagagaccccagagagtggaaggcccacttcctggaggccgtggacgacgccttcaagaccatggacgtggacatggccgaggagcacgccagagcccagatgagagcccagatgaacatcggcgacgaggccctgatcggcagatggagctgggacgacatccaggtggagctgctgacctgggacgaggacggcgacttcggcgacgcctgggccagaatccccttcgccttctgggccagataccaccagtacatcctgaacagcaacagagccaacagaagagccacctggagagccggcgtgagcagcggcaccaacggcggcgccagcaccagcgtgctggacggccccagcaccagcagcaccatcagaaccagaaacgccgccagagccggcgccagcttcttcagctggatccagcacagatga

SEQ ID NO: 2812 - RNA, 1122 nt, synthetic construct
  misc_feature 1..1122: note = CAG33449 variant
  source 1..1122: mol_type = other RNA
atgccccccgtgcccggcgtgcccttcagaaacgtggacaacgacagccccaccagcgtggagctggaggactgggtggacgcccagcaccccaccgacgaggaggaggaggaggccagcagcgccagcagcaccctgtacctggtgttcagccccagcagcttcagcaccagcagcagcctgatcctgggcggccccgaggaggaggaggtgcccagcggcgtgatccccaacctgaccgagagcatccccagcagccccccccagggccccccccagggccccagccagagccccctgagcagctgctgcagcagcttcagctggagcagcttcagcgaggagagcagcagccagaagggcgaggacaccggcacctgccagggcctgcccgacagcgagagcagcttcacctacaccctggacgagaaggtggccgagctggtggagttcctgctgctgaagtacgaggccgaggagcccgtgaccgaggccgagatgctgatgatcgtgatcaagtacaaggactacttccccgtgatcctgaagagagccagagagttcatggagctgctgttcggcctggccctgatcgaggtgggccccgaccacttctgcgtgttcgccaacaccgtgggcctgaccgacgagggcagcgacgacgagggcatgcccgagaacagcctgctgatcatcatcctgagcgtgatcttcatcaagggcaactgcgccagcgaggaggtgatctgggaggtgctgaacgccgtgggcgtgtacgccggcagagagcacttcgtgtacggcgagcccagagagctgctgaccaaggtgtgggtgcagggccactacctggagtacagagaggtgccccacagcagccccccctactacgagttcctgtggggccccagagcccacagcgagagcatcaagaagaaggtgctggagttcctggccaagctgaacaacaccgtgcccagcagcttccccagctggtacaaggacgccctgaaggacgtggaggagagagtgcaggccaccatcgacaccgccgacgacgccaccgtgatggccagcgagagcctgagcgtgatgagcagcaacgtgagcttcagcgactga

SEQ ID NO: 2813 - RNA, 2874 nt, synthetic construct
  misc_feature 1..2874: note = AAM08354 variant
  source 1..2874: mol_type = other RNA
atgagcctggtgagccagaacagcagaagaagaagaagaagagtggccaaggccaccgcccacaacagcagctggggcgagatgcaggcccccaacgcccccggcctgcccgccgacgtgcccggcagcgacgtgccccagggccccagcgacagccagatcctgcagggcctgtgcgccagcgagggccccagcaccagcgtgctgcccaccagcgccgagggccccagcaccttcgtgccccccaccatcagcgaggccagcagcgccagcggccagcccaccatcagcgagggccccggcaccagcgtgctgcccacccccagcgagggcctgagcaccagcggcccccccaccatcagcaagggcctgtgcaccagcgtgaccctggccgccagcgagggcagaaacaccagcagaccccccaccagcagcgaggagcccagcaccagcgtgccccccaccgccagcgaggtgcccagcaccagcctgccccccacccccggcgagggcaccagcaccagcgtgccccccaccgcctacgagggccccagcaccagcgtggtgcccacccccgacgagggccccagcaccagcgtgctgcccacccccggcgagggccccggcaccagcgtgcccctggccgccaccgagggcctgagcaccagcgtgcaggccacccccgacgagggccccagcaccagcgtgccccccaccgccaccgagggcctgagcacccccgtgccccccaccagagacgagggccccagcaccagcgtgcccgccacccccggcgagggccccagcaccagcgtgctgcccgccgccagcgacggccagagcatcagcctggtgcccaccagaggcaagggcagcagcaccagcgtgccccccaccgccaccgagggcctgagcaccagcgtgcagcccaccgccggcgagggcagcagcaccagcgtgccccccacccccggcggcggcctgagcaccagcgtgccccccaccgccaccgaggagctgagcaccagcgtgccccccacccccggcgagggccccagcaccagcgtgctgcccatccccggcgagggcctgagcaccagcgtgccccccaccgccagcgacggcagcgacaccagcgtgccccccacccccggcgagggcgccagcaccctggtgcagcccaccgcccccgacggccccggcagcagcgtgctgcccaaccccggcgagggccccagcaccctgttcagcagcagcgccagcgtggacagaaaccccagcaagtgcagcctggtgctgcccagccccagagtgaccaaggccagcgtggacagcgacagcgagggccccaagggcgccgagggccccatcgagttcgaggtgctgagagactgcgagagccccaacagcatcagcatcatgggcctgaacaccagcagagtggccatcaccctgaagccccaggaccccatggagcagaacgtggccgagctgctgcagttcctgctggtgaaggaccagagcaagtaccccatcagagagagcgagatgagagagtacatcgtgaaggagtacagaaaccagttccccgagatcctgagaagagccgccgcccacctggagtgcatcttcagattcgagctgagagagctggaccccgaggcccacacctacatcctgctgaacaagctgggccccgtgcccttcgagggcctggaggagagccccaacggccccaagatgggcctgctgatgatgatcctgggccagatcttcctgaacggcaaccaggccaaggaggccgagatctgggagatgctgtggagaatgggcgtgcagagagagagaagactgagcatcttcggcaaccccaagagactgctgagcgtggagttcgtgtggcagagatacctggactacagacccgtgaccgactgcaagcccgtggagtacgagttcttctggggccccagaagccacctggagaccaccaagatgaagatcctgaagttcatggccaagatctacaacaaggaccccatggactggcccgagaagtacaacgaggccctggaggaggacgccgccagagccttcgccgagggctggcaggccctgccccacttcagaagacccttcttcgaggaggccgccgccgaggtgcccagccccgacagcgaggtgagcagctacagcagcaagtacgccccccacagctggcccgagagcagactggagagcaaggccagaaagctggtgcagctgttcctgctgatggacagcaccaagctgcccatccccaagaagggcatcctgtactacatcggcagagagtgcagcaaggtgttccccgacctgctgaacagagccgccagaaccctgaaccacgtgtacggcaccgagctggtggtgctggaccccagaaaccacagctacaccctgtacaacagaagagagatggaggagaccgaggagatcgtggacagccccaacagacccggcaacaacttcctgatgcaggtgctgagcttcatcttcatcatgggcaaccacgccagagagagcgccgtgtgggccttcctgagaggcctgggcgtgcaggccggcagaaagcacgtgatcacctgcagatacctgagccagagatacatcgacagcctgagagtgcccgacagcgaccccgtgcagtacgagttcgtgtggggccccagagccagactggagaccagcaagatgaaggccctgagatacgtggccagaatccacagaaaggagccccaggactggccccagcagtacagagaggccatggaggacgaggccaacagagccgacgtgggccacagacagatcttcgtgcacaacttcagatga

SEQ ID NO: 2814 - RNA, 1572 nt, synthetic construct
  misc_feature 1..1572: note = AAH93964 variant
  source 1..1572: mol_type = other RNA
atgagcctggtgagccagaacgccagacactgcagcgccgagatcaccgccgactacggcgacggcagaggcgagatccaggccaccaacgccagcggcagccccaccagcatgctggtggtggacgccccccagtgcccccaggcccccatcaacagccagtgcgtgaacaccagccaggccgtgcaggaccccaacgacctggaggtgctgatcgacgagcagagcagaagactgggcgccctgagagtgcacgaccccctggaggacagaagcatcgccctggtgaacttcatgagaatgaagagccagaccgagggcagcatccagcagagcgagatgctggagttcctgagagagtacagcgaccagttccccgagatcctgagaagagccagcgcccacctggaccaggtgttcggcctgaacctgagagtgatcgacccccaggccgacacctacaacctggtgagcaagagaggcttccagatcaccgacagaatcgccgagagcctggacatgcccaaggccagcctgctggccctggtgctgggccacatcctgctgaacggcaacagagccagagaggccagcatctgggacctgctgctgaaggtggacatgtgggacaagccccagagaatcaacaacctgttcggcaacaccagaaacctgctgaccaccgacttcgtgtgcatgagattcctggagtactggcccgtgtacggcaccaaccccctggagttcgagttcctgtggggcagcagagcccacagagagatcaccaagatggaggccctgaagttcgtgagcgacgcccacgacgaggagccctggagctggcccgaggagtacaacaaggccctggagggcgacaagaccaaggagagaagcctgaccgccggcctggagttctggagcgaggacaccatgaacgacaaggccaacgacctggtgcagctggccatcagcgtgaccgaggagatgctgcccatccaccaggacgagctgctggcccacaccggcaaggagttcgaggacgtgttccccaacatcctgaacagagccaccctgatcctggacatgttctacggcctgagcctgatcgaggtggacaccagcgagcacatctacctgctggtgcagcagcccgagagcgaggaggagcaggtgatgctggagagcctgggcagacccacccaggagtacgtgatgcccatcctgggcctgatcttcctgatgggcaacagagtgaaggaggccaacgtgtggaacctgctgagaagattcagcgtggacgtgggcagaaagcacagcatcaccagaaagctgatgagacagagatacctggagtgcagacccctgagctacagcaaccccgtggagtacgagctgctgtggggccccagagcccaccacgagaccatcaagatgaaggtgctggagtacatggccagactgtacagaaagagaccccagaactggcccgagcagtacagagaggccgtggaggacgaggaggccagagccaagagcgaggccaccatcatgttcttcctggaccccacctga

SEQ ID NO: 2815 - RNA, 924 nt, synthetic construct
  misc_feature 1..924: note = CCDS3269.1 variant
  source 1..924: mol_type = other RNA
atgctgcagacccccgagagcagaggcctgcccgtgccccaggccgagggcgagaaggacggcggccacgacggcgagaccagagcccccaccgccagccaggagagacccaaggaggagctgggcgccggcagagaggagggcgccgccgagcccgccctgaccagaaagggcgccagagccctggccgccaaggccctggccagaagaagagcctacagaagactgaacagaaccgtggccgagctggtgcagttcctgctggtgaaggacaagaagaagagccccatcaccagaagcgagatggtgaagtacgtgatcggcgacctgaagatcctgttccccgacatcatcgccagagccgccgagcacctgagatacgtgttcggcttcgagctgaagcagttcgacagaaagcaccacacctacatcctgatcaacaagctgaagcccctggaggaggaggaggaggaggacctgggcggcgacggccccagactgggcctgctgatgatgatcctgggcctgatctacatgagaggcaacagcgccagagaggcccaggtgtgggagatgctgagaagactgggcgtgcagcccagcaagtaccacttcctgttcggctaccccaagagactgatcatggaggacttcgtgcagcagagatacctgagctacagaagagtgccccacaccaacccccccgagtacgagttcagctggggccccagaagcaacctggagatcagcaagatggaggtgctgggcttcgtggccaagctgcacaagaaggagccccagcactggcccgtgcagtacagagaggccctggccgacgaggccgacagagccagagccaaggccagagccgaggccagcatgagagccagagccagcgccagagccggcatccacctgtggtga

SEQ ID NO: 2816 - RNA, 660 nt, synthetic construct
  misc_feature 1..660: note = AAD31314 variant
  source 1..660: mol_type = other RNA
atgcccagaggcagaaagagcagaagaagaagaaacgccagagccgccgaggagaacagaaacaacagaaagatccaggccagcgaggccagcgagacccccatggccgccagcgtggtggccagcacccccgaggacgacctgagcggccccgaggaggaccccagcacccccgaggaggccagcaccacccccgaggaggccagcagcaccgcccaggcccagaagcccagcgtgcccagaagcaacttccagggcaccaagaagagcctgctgatgagcatcctggccctgatcttcatcatgggcaacagcgccaaggaggccctggtgtggaaggtgctgggcaagctgggcatgcagcccggcagacagcacagcatcttcggcgaccccaagaagatcgtgaccgaggagttcgtgagaagaggctacctgatctacaagcccgtgcccagaagcagccccgtggagtacgagttcttctggggccccagagcccacgtggagagcagcaagctgaaggtgatgcacttcgtggccagagtgagaaacagatgcagcaaggactggccctgcaactacgactgggacagcgacgacgacgccgaggtggaggccatcctgaacagcggcgccagaggctacagcgccccctga

SEQ ID NO: 2817 - RNA, 3750 nt, synthetic construct
  misc_feature 1..3750: note = CCDS73700.1 variant
  source 1..3750: mol_type = other RNA
atgagccagctgagcaagaacctgggcgacagcagcccccccgccgaggcccccaagccccccgtgtacagcagacccaccgtgctgatgagagccccccccgccagcagcagagccccccccgtgccctgggaccccccccccatcgacctgcaggccagcctggccgcctggcaggccccccagcccgcctgggaggccccccagggccagctgcccgcccccgtggtgcccatgacccagccccccgccctgggcggccccatcgtgcccgccccccccctgggcggccccatgggcaagccccccacccccggcgtgctgatggtgcacccccccccccccggcgcccccatggcccagccccccacccccggcgtgctgatggtgcaccccagcgcccccggcgcccccatggcccacccccccccccccggcacccccatgagccacccccccccccccggcacccccatggcccacccccccccccccggcacccccatggcccacccccccccccccggcacccccatggtgcacccccccccccccggcacccccatggcccacccccccccccccggcacccccatggcccacccccccccccccggcacccccatggcccacccccccccccccggcacccccatggcccacccccccccccccggcacccccatggcccagccccccgcccccggcgtgctgatggcccagcccctgacccccggcgtgctgatggtgcagcccgccgcccccggcgcccccatggtgcagcccccccccgccgccatgatgacccagccccagcccagcggcgcccccatggccaagccccccggccccggcgtgctgatgatccacccccccggcgccagagcccccatgacccagccccccgccagcggcgcccccatggcccagcccgccgccccccccgcccagcccatggccccccccgcccagcccatggccagctgggccccccaggcccagcccctgatcctgcagatccagagccaggtgatcagagcccccccccaggtgccccagggcccccaggccccccccgcccagctggccaccccccccggctggcaggccaccagccccggctggcaggccacccagcagggctggcaggccacccccctgacctggcagaccacccaggtgacctggcaggcccccgccgtgacctggcaggtgcccccccccatgagacagggccccccccccatcagacccggccccccccccatcagacccggccccccccccgtgagacaggccccccccctgatcagacaggccccccccgtgatcagacaggccccccccgtgatcagacaggccccccccgtgatcagacaggcccccgccgtgatcagacaggccccccccgtgatcagacaggccccccccgtgatcagacaggccccccccgtgatcagacaggccccccccctgatcagacaggcccccccccccatcagacccgccccccaggtgctggccacccagccccccctgtggcaggccctgcccccccccccccccctgagacaggccccccaggccagactgcccgccccccaggtgcaggccgccccccaggtgcccaccgccccccccgccacccaggtgcccgccgccccccccgccggcccccaggtgccccagcccgtgctgcccgcccccctgagcgcccccctgagcgccccccaggccgtgcactgccccagcatcatctggcaggcccccaagggccagccccccgtgccccacgagatccccaccagcatggagttccaggaggtgcagcagacccaggccctggcctggcaggcccagaaggcccccacccacatctggcagcccctgcccgcccaggaggcccagagacaggccccccccctggtgcagctggagcagcccttccagggcgccccccccagccagaaggccgtgcagatccagctgcccccccagcaggcccaggccagcggcccccaggccgaggtgcccaccctgcccctgcagcccagctggcaggccccccccgccgtgctgcaggcccagcccggcccccccgtggccgccgccaacttccccctgggcagcgccaagagcctgatgacccccagcggcgagtgcagagccagcagcatcgacagaagaggcagcagcaaggagagaagaaccagcagcaaggagagaagagcccccagcaaggacagaatgatcttcgccgccaccttctgcgcccccaaggccgtgagcgccgccagagcccacctgcccgccgcctggaagaacctgcccgccacccccgagaccttcgcccccagcagcagcgtgttccccgccaccagccagttccagcccgccagcctgaacgccttcaagggccccagcgccgccagcgagacccccaagagcctgccctacgccctgcaggaccccttcgcctgcgtggaggccctgcccgccgtgccctgggtgccccagcccaacatgaacgccagcaaggccagccaggccgtgcccaccttcctgatggccaccgccgccgccccccaggccaccgccaccacccaggaggccagcaagaccagcgtggagccccccagaagaagcggcaaggccaccagaaagaagaagcacctggaggcccaggaggacagcagaggccacaccctggccttccacgactggcagggccccagaccctgggagaacctgaacctgagcgactgggaggtgcagagccccatccaggtgagcggcgactgggagcaccccaacacccccagaggcctgagcggctgggagggccccagcaccagcagaatcctgagcggctgggagggccccagcgccagctgggccctgagcgcctgggagggccccagcaccagcagagccctgggcctgagcgagagccccggcagcagcctgcccgtggtggtgagcgaggtggccagcgtgagccccggcagcagcgccacccaggacaacagcaaggtggaggcccagcccctgagccccctggacgagagagccaacgccctggtgcagttcctgctggtgaaggaccaggccaaggtgcccgtgcagagaagcgagatggtgaaggtgatcctgagagagtacaaggacgagtgcctggacatcatcaacagagccaacaacaagctggagtgcgccttcggctaccagctgaaggagatcgacaccaagaaccacgcctacatcatcatcaacaagctgggctaccacaccggcaacctggtggccagctacctggacagacccaagttcggcctgctgatggtggtgctgagcctgatcttcatgaagggcaactgcgtgagagaggacctgatcttcaacttcctgttcaagctgggcctggacgtgagagagaccaacggcctgttcggcaacaccaagaagctgatcaccgaggtgttcgtgagacagaagtacctggagtacagaagaatcccctacaccgagcccgccgagtacgagttcctgtggggccccagagccttcctggagaccagcaagatgctggtgctgagattcctggccaagctgcacaagaaggacccccagagctggcccttccactacctggaggccctggccgagtgcgagtgggaggacaccgacgaggacgagcccgacaccggcgacagcgcccacggccccaccagcagacccccccccagatga

SEQ ID NO: 2818 - RNA, 282 nt, synthetic construct
  misc_feature 1..282: note = AAC39608 variant
  source 1..282: mol_type = other RNA
atgaagctgctgatggtgctgatgctggccgccctgagccagcactgctacgccggcagcggctgccccctgctggagaacgtgatcagcaagaccatcaacccccaggtgagcaagaccgagtacaaggagctgctgcaggagttcatcgacgacaacgccaccaccaacgccatcgacgagctgaaggagtgcttcctgaaccagaccgacgagaccctgagcaacgtggaggtgttcatgcagctgatctacgacagcagcctgtgcgacctgttctga

SEQ ID NO: 2819 - RNA, 363 nt, synthetic construct
  misc_feature 1..363: note = AAH67220 variant
  source 1..363: mol_type = other RNA
atgaagctgctgatggtgctgatgctggccgccctgagccagcactgctacgccggcagcggctgccccctgctggagaacgtgatcagcaagaccatcaacccccaggtgagcaagaccgagtacaaggagctgctgcaggagttcatcgacgacaacgccaccaccaacgccatcgacgagctgaaggagtgcttcctgaaccagaccgacgagaccctgagcaacgtggaggtgttcatggtgatcagcttcagcagctacaagctgttcaagagccccgaccagggccaggtgggcagcagcttcctgaccgacaacgccaaggccaccagcgagcaggccttcagctacatcggctga

SEQ ID NO: 2820 - RNA, 357 nt, synthetic construct
  misc_feature 1..357: note = AAA19238 variant
  source 1..357: mol_type = other RNA
atgcccagagaggacgcccacttcatctacggctaccccaagaagggccacggccacagctacaccaccgccgaggaggccgccggcatcggcatcctgaccgtgatcctgggcgtgctgctgctgatcggctgctggtactgcagaagaagaaacggctacagagccctgatggacaagagcctgcacgtgggcacccagtgcgccctgaccagaagatgcccccaggagggcttcgaccacagagacagcaaggtgagcctgcaggagaagaactgcgagcccgtggtgcccaacgccccccccgcctacgagaagctgagcgccgagcagagcccccccccctacagcccctga

SEQ ID NO: 2821 - RNA, 1482 nt, synthetic construct
  misc_feature 1..1482: note = EAW93427 variant
  source 1..1482: mol_type = other RNA
atgctgcccagatgggagctggccctgtacctgctggccagcctgggcttccacttctacagcttctacgaggtgtacaaggtgagcagagagcacgaggaggagctggaccaggagttcgagctggagaccgacaccctgttcggcggcctgaagaaggacgccaccgacttcgagtggagcttctggatggagtggggcaagcagtggctggtgtggctgctgctgggccacatggtggtgagccagatggccaccctgctggccagaaagcacagaccctggatcctgatgctgtacggcatgtgggcctgctggtgcgtgctgggcacccccggcgtggccatggtgctgctgcacaccaccatcagcttctgcgtggcccagttcagaagccagctgctgacctggctgtgcagcctgctgctgctgagcaccctgagactgcagggcgtggaggaggtgaagagaagatggtacaagaccgagaacgagtactacctgctgcagttcaccctgaccgtgagatgcctgtactacaccagcttcagcctggagctgtgctggcagcagctgcccgccgccagcaccagctacagcttcccctggatgctggcctacgtgttctactaccccgtgctgcacaacggccccatcctgagcttcagcgagttcatcaagcagatgcagcagcaggagcacgacagcctgaaggccagcctgtgcgtgctggccctgggcctgggcagactgctgtgctggtggtggctggccgagctgatggcccacctgatgtacatgcacgccatctacagcagcatccccctgctggagaccgtgagctgctggaccctgggcggcctggccctggcccaggtgctgttcttctacgtgaagtacctggtgctgttcggcgtgcccgccctgctgatgagactggacggcctgaccccccccgccctgcccagatgcgtgagcaccatgttcagcttcaccggcatgtggagatacttcgacgtgggcctgcacaacttcctgatcagatacgtgtacatccccgtgggcggcagccagcacggcctgctgggcaccctgttcagcaccgccatgaccttcgccttcgtgagctactggcacggcggctacgactacctgtggtgctgggccgccctgaactggctgggcgtgaccgtggagaacggcgtgagaagactggtggagaccccctgcatccaggacagcctggccagatacttcagcccccaggccagaagaagattccacgccgccctggccagctgcagcaccagcatgctgatcctgagcaacctggtgttcctgggcggcaacgaggtgggcaagacctactggaacagaatcttcatccagggctggccctgggtgaccctgagcgtgctgggcttcctgtactgctacagccacgtgggcatcgcctgggcccagacctacgccaccgactga

SEQ ID NO: 2822 - RNA, 954 nt, synthetic construct
  misc_feature 1..954: note = AAD41349 variant
  source 1..954: mol_type = other RNA
atggccgtgcagggcagccagagaagactgctgggcagcctgaacagcacccccaccgccatcccccagctgggcctggccgccaaccagaccggcgccagatgcctggaggtgagcatcagcgacggcctgttcctgagcctgggcctggtgagcctggtggagaacgccctggtggtggccaccatcgccaagaacagaaacctgcacagccccatgtactgcttcatctgctgcctggccctgagcgacctgctggtgagcggcagcaacgtgctggagaccgccgtgatcctgctgctggaggccggcgccctggtggccagagccgccgtgctgcagcagctggacaacgtgatcgacgtgatcacctgcagcagcatgctgagcagcctgtgcttcctgggcgccatcgccgtggacagatacatcagcatcttctacgccctgagataccacagcatcgtgaccctgcccagagccagaagagccgtggccgccatctgggtggccagcgtggtgttcagcaccctgttcatcgcctactacgaccacgtggccgtgctgctgtgcctggtggtgttcttcctggccatgctggtgctgatggccgtgctgtacgtgcacatgctggccagagcctgccagcacgcccagggcatcgccagactgcacaagagacagagacccgtgcaccagggcttcggcctgaagggcgccgtgaccctgaccatcctgctgggcatcttcttcctgtgctggggccccttcttcctgcacctgaccctgatcgtgctgtgccccgagcaccccacctgcggctgcatcttcaagaacttcaacctgttcctggccctgatcatctgcaacgccatcatcgaccccctgatctacgccttccacagccaggagctgagaagaaccctgaaggaggtgctgacctgcagctggtga

SEQ ID NO: 2823 - RNA, 954 nt, synthetic construct; identical to SEQ ID NO: 2822
  misc_feature 1..954: note = AHC09522 variant
  source 1..954: mol_type = other RNA

SEQ ID NO: 2824 - RNA, 954 nt, synthetic construct
  misc_feature 1..954: note = AHC09804 variant
  source 1..954: mol_type = other RNA
atggccgtgcagggcagccagagaagactgctgggcagcctgaacagcacccccaccgccatcccccagctgggcctggccgccaaccagaccggcgccagatgcctggaggtgagcatcagcgacggcctgttcctgagcctgggcctggtgagcctggtggagaacgccctggtggtggccaccatcgccaagaacagaaacctgcacagccccatgtactgcttcatctgctgcctggccctgagcgacctgctggtgagcggcagcaacgtgctggagaccgccgtgatcctgctgctggaggccggcgccctggtggccagagccgccgtgctgcagcagctggacaacgtgatcgacgtgatcacctgcagcagcatgctgagcagcctgtgcttcctgggcgccatcgccgtggacagatacatcagcatcttctacgccctgagataccacagcatcgtgaccctgcccagagccagacaggccgtggccgccatctgggtggccagcgtggtgttcagcaccctgttcatcgcctactacgaccacgtggccgtgctgctgtgcctggtggtgttcttcctggccatgctggtgctgatggccgtgctgtacgtgcacatgctggccagagcctgccagcacgcccagggcatcgccagactgcacaagagacagagacccgtgcaccagggcttcggcctgaagggcgccgtgaccctgaccatcctgctgggcatcttcttcctgtgctggggccccttcttcctgcacctgaccctgatcgtgctgtgccccgagcaccccacctgcggctgcatcttcaagaacttcaacctgttcctggccctgatcatctgcaacgccatcatcgaccccctgatctacgccttccacagccaggagctgagaagaaccctgaaggaggtgctgacctgcagctggtga

SEQ ID NO: 2825 - RNA, 954 nt, synthetic construct
  misc_feature 1..954: note = BAE94313 variant
  source 1..954: mol_type = other RNA
atggccgtgcagggcagccagagaagactgctgggcagcctgaacagcacccccaccgccatcccccagctgggcctggccgccaaccagaccggcgccagatgcctggaggtgagcatcagcgacggcctgttcctgagcctgggcctggtgagcctggtggagaacgccctggtggtggccaccatcgccaagaacagaaacctgcacagccccatgtactgcttcatctgctgcctggccctgagcgacctgctggtgagcggcagcaacgtgctggagaccgccgtgatcctgctgctggaggccggcgccctggtggccagagccgccgtgctgcagcagctggacaacgtgaccgacgtgatcacctgcagcagcatgctgagcagcctgtgcttcctgggcgccatcgccgtggacagatacatcagcatcttctacgccctgagataccacagcatcgtgaccctgcccagagccagaagagccgtggccgccatctgggtggccagcgtggtgttcagcaccctgttcatcgcctactacgaccacgtggccgtgctgctgtgcctggtggtgttcttcctggccatgctggtgctgatggccgtgctgtacgtgcacatgctggccagagcctgccagcacgcccagggcatcgccagactgcacaagagacagagacccgtgcaccagggcttcggcctgaagggcgccgtgaccctgaccatcctgctgggcatcttcttcctgtgctggggccccttcttcctgcacctgaccctgatcgtgctgtgccccgagcaccccacctgcggctgcatcttcaagaacttcaacctgttcctggccctgatcatctgcaacgccatcatcgaccccctgatctacgccttccacagccaggagctgagaagaaccctgaaggaggtgctgacctgcagctggtga

SEQ ID NO: 2826 - RNA, 954 nt, synthetic construct
  misc_feature 1..954: note = AHC09531 variant
  source 1..954: mol_type = other RNA
atggccgtgcagggcagccagagaagactgctgggcagcctgaacagcacccccaccgccatcccccagctgggcctggccgccaaccagaccggcgccagatgcctggaggtgagcatcagcgacggcctgttcctgagcctgggcctggtgagcctggtggagaacgccctggtggtggccaccatcgccaagaacagaaacctgcacagccccatgtactgcttcatctgctgcctggccctgagcgacctgctggtgagcggcagcaacatgctggagaccgccgtgatcctgctgctggaggccggcgccctggtggccagagccgccgtgctgcagcagctggacaacgtgatcgacgtgatcacctgcagcagcatgctgagcagcctgtgcttcctgggcgccatcgccgtggacagatacatcagcatcttctacgccctgagataccacagcatcgtgaccctgcccagagccagaagagccgtggccgccatctgggtggccagcgtggtgttcagcaccctgttcatcgcctactacgaccacgtggccgtgctgctgtgcctggtggtgttcttcctggccatgctggtgctgatggccgtgctgtacgtgcacatgctggccagagcctgccagcacgcccagggcatcgccagactgcacaagagacagagacccgtgcaccagggcttcggcctgaagggcgccgtgaccctgaccatcctgctgggcatcttcttcctgtgctggggccccttcttcctgcacctgaccctgatcgtgctgtgccccgagcaccccacctgcggctgcatcttcaagaacttcaacctgttcctggccctgatcatctgcaacgccatcatcgaccccctgatctacgccttccacagccaggagctgagaagaaccctgaaggaggtgctgacctgcagctggtga

SEQ ID NO: 2827 - RNA, 954 nt, synthetic construct
  misc_feature 1..954: note = BAE94311 variant
  source 1..954: mol_type = other RNA
atggccgtgcagggcagccagagaagactgctgggcagcctgaacagcacccccaccgccatcccccagctgggcctggccgccaaccagaccggcgccagatgcctggaggtgagcatcagcgacggcctgttcctgagcctgggcctggtgagcctggtggagaacgccctggtggtggccaccatcgccaagaaccagaacctgcacagccccatgtactgcttcatctgctgcctggccctgagcgacctgctggtgagcggcagcaacgtgctggagaccgccgtgatcctgctgctggaggccggcgccctggtggccagagccgccgtgctgcagcagctggacaacgtgatcgacgtgatcacctgcagcagcatgctgagcagcctgtgcttcctgggcgccatcgccgtggacagatacatcagcatcttctacgccctgagataccacagcatcgtgaccctgcccagagccagacaggccgtggccgccatctgggtggccagcgtggtgttcagcaccctgttcatcgcctactacgaccacgtggccgtgctgctgtgcctggtggtgttcttcctggccatgctggtgctgatggccgtgctgtacgtgcacatgctggccagagcctgccagcacgcccagggcatcgccagactgcacaagagacagagacccgtgcaccagggcttcggcctgaagggcgccgtgaccctgaccatcctgctgggcatcttcttcctgtgctggggccccttcttcctgcacctgaccctgatcgtgctgtgccccgagcaccccacctgcggctgcatcttcaagaacttcaacctgttcctggccctgatcatctgcaacgccatcatcgaccccctgatctacgccttccacagccaggagctgagaagaaccctgaaggaggtgctgacctgcagctggtga

SEQ ID NO: 2828 - RNA, 954 nt, synthetic construct
  misc_feature 1..954: note = BAE94309 variant
  source 1..954: mol_type = other RNA
atggccgtgcagggcagccagagaagactgctgggcagcctgaacagcacccccaccgccatcccccagctgggcctggccgccaaccagaccggcgccagatgcctggaggtgagcatcagcgacggcctgttcctgagcctgggcctggtgagcctggtggagaacgccctggtggtggccaccatcgccaagaacagaaacctgcacagccccatgtactgcttcatctgctgcctggccctgagcgacctgctggtgagcggcagcaacgtgctggagaccgccgtgatcctgctgctggaggccggcgccctggtggccagagccgccgtgctgcagcagctggacaacgtgatcgacgtgatcacctgcagcagcatgctgagcagcctgtgcttcctgggcgccatcgccgtggacagatacatcagcatcttctacgccctgagataccacagcatcgtgaccctgcccagagccagacaggccgtgggcgccatctgggtggccagcgtggtgttcagcaccctgttcatcgcctactacgaccacgtggccgtgctgctgtgcctggtggtgttcttcctggccatgctggtgctgatggccgtgctgtacgtgcacatgctggccagagcctgccagcacgcccagggcatcgccagactgcacaagagacagagacccgtgcaccagggcttcggcctgaagggcgccgtgaccctgaccatcctgctgggcatcttcttcctgtgctggggccccttcttcctgcacctgaccctgatcgtgctgtgccccgagcaccccacctgcggctgcatcttcaagaacttcaacctgttcctggccctgatcatctgcaacgccatcatcgaccccctgatctacgccttccacagccaggagctgagaagaaccctgaaggaggtgctgacctgcagctggtga

SEQ ID NO: 2829 - RNA, 954 nt, synthetic construct
  misc_feature 1..954: note = BAE94308 variant
  source 1..954: mol_type = other RNA
atggccgtgcagggcagccagagaagactgctgggcagcctgaacagcacccccaccgccatcccccagctgggcctggccgccaaccagaccggcgccagatgcctggaggtgagcatcagcgacggcctgttcctgagcctgggcctggtgagcctggtggagaacgccctggtggtggccaccatcgccaagaacagaaacctgcacagccccatgtactgcttcatctgctgcctggccctgagcgacctgctggtgagcggcagcaacgtgctggagaccgccgtgatcctgctgctggaggccggcgccctggtggccagagccgccgtgctgcagcagctggacaacgtgaccgacgtgatcacctgcagcagcatgctgagcagcctgtgcttcctgggcgccatcgccgtggacagatacatcagcatcttctacgccctgagataccacagcatcgtgaccctgaccagagccagaagagccgtggccgccatctgggtggccagcgtggtgttcagcaccctgttcatcgcctactacgaccacgtggccgtgctgctgtgcctggtggtgttcttcctggccatgctggtgctgatggccgtgctgtacgtgcacatgctggccagagcctgccagcacgcccagggcatcgccagactgcacaagagacagagacccgtgcaccagggcttcggcctgaagggcgccgtgaccctgaccatcctgctgggcatcttcttcctgtgctggggccccttcttcctgcacctgaccctgatcgtgctgtgccccgagcaccccacctgcggctgcatcttcaagaacttcaacctgttcctggccctgatcatctgcaacgccatcatcgaccccctgatctacgccttccacagccaggagctgagaagaaccctgaaggaggtgctgacctgcagctggtga

SEQ ID NO: 2830 - RNA, 954 nt, synthetic construct
  misc_feature 1..954: note = BAE94307 variant
  source 1..954: mol_type = other RNA
atggccgtgcagggcagccagagaagactgctgggcagcctgaacagcacccccaccgccatcccccagctgggcctggccgccaaccagaccggcgccagatgcctggaggtgagcatcagcgacggcctgttcctgagcctgggcctggtgagcctggtggagaacgccctggtggtggccaccatcgccaagaacagaaacctgcacagccccatgtactgcttcatctgctgcctggccctgagcgacctgctggtgagcggcagcaacatgctggagaccgccgtgatcctgctgctggaggccggcgccctggtggccagagccgccgtgctgcagcagctggacaacgtgatcgacgtgatcacctgcagcagcatgctgagcagcctgtgcttcctgggcgccatcgccgtggacagatacatcagcatcttctacgccctgagataccacagcatcgtgatcctgcccagagccagaagagccgtggccgccatctgggtggccagcgtggtgttcagcaccctgttcatcgcctactacgaccacgtggccgtgctgctgtgcctggtggtgttcttcctggccatgctggtgctgatggccgtgctgtacgtgcacatgctggccagagcctgccagcacgcccagggcatcgccagactgcacaagagacagagacccgtgcaccagggcttcggcctgaagggcgccgtgaccctgaccatcctgctgggcatcttcttcctgtgctggggccccttcttcctgcacctgaccctgatcgtgctgtgccccgagcaccccacctgcggctgcatcttcaagaacttcaacctgttcctggccctgatcatctgcaacgccatcatcgaccccctgatctacgccttccacagccaggagctgagaagaaccctgaaggaggtgctgacctgcagctggtga

SEQ ID NO: 2831 - RNA, 951 nt, synthetic construct
  misc_feature 1..951: note = BAE94306 variant
  source 1..951: mol_type = other RNA
atggccgtgcagggcagccagagaagactgctgggcagcctgaacagcacccccaccgccatcccccagctgggcctggccgccaaccagaccggcgccagatgcctggaggtgagcatcagcgacggcctgttcctgagcctgggcctggtgagcctggtggagaacgccctggtggtggccaccatcgccaagaacagaaacctgcacagccccatgtactgcttcatctgctgcctggccctgagcgacctgctggtgagcggcagcaacgtgctggagaccgccgtgatcctgctgctggaggccggcgccctggtggccagagccgccgtgctgcagcagctggacaacgtgatcgacgtgatcacctgcagcagcatgctgagcagcctgtgcttcctgggcgccatcgccgtggacagatacatcagcatctacgccctgagataccacagcatcgtgaccctgcccagagccagacaggccgtggccgccatctgggtggccagcgtggtgttcagcaccctgttcatcgcctactacgaccacgtggccgtgctgctgtgcctggtggtgttcttcctggccatgctggtgctgatggccgtgctgtacgtgcacatgctggccagagcctgccagcacgcccagggcatcgccagactgcacaagagacagagacccgtgcaccagggcttcggcctgaagggcgccgtgaccctgaccatcctgctgggcatcttcttcctgtgctggggccccttcttcctgcacctgaccctgatcgtgctgtgccccgagcaccccacctgcggctgcatcttcaagaacttcaacctgttcctggccctgatcatctgcaacgccatcatcgaccccctgatctacgccttccacagccaggagctgagaagaaccctgaaggaggtgctgacctgcagctggtga

SEQ ID NO: 2832 - RNA, 954 nt, synthetic construct
  misc_feature 1..954: note = AAQ62977 variant
  source 1..954: mol_type = other RNA
atggccgtgcagggcagccagagaagactgctgggcagcctgaacagcacccccaccgccatcccccagctgggcctggccgccaaccagaccggcgccagatgcctggaggtgagcatcagcgacggcctgttcctgagcctgggcctggtgagcctggtggagaacgccctggtggtggccaccatcgccaagaacagaaacctgcacagccccatgtactgcttcatctgctgcctggccctgagcgacctgctggtgagcggcagcaacgtgctggagaccgccgtgatcctgctgctggaggccggcgccctggtggccagagccgccgtgctgcagcagctggacaacgtgatcgacgtgatcacctgcagcagcatgctgagcagcctgtgcttcctgggcgccatcgccgtggacagatacatcagcatcttctacgccctgagataccacagcatcgtgaccctgcccagagccagaagagccgtggccgccatctgggtggccagcgtggtgttcagcaccctgttcatcgcctactacgaccacgtggccgtgctgctgtgcctggtggtgttcttcctggccatgctggtgctgatggccgtgctgtacgtgcacatgctggccagagcctgccagcacgcccagggcatcgccagactgcacaagagacagagacccgtgcaccagggcttcggcctgaagggcgccgtgaccctgaccatcctgctgggcatcttcttcctgtgctggggccccttcttcctgcacctgaccctgatcatcctgtgccccgagcaccccacctgcggctgcatcttcaagaacttcaacctgttcctggccctgatcatctgcaacgccatcatcgaccccctgatctacgccttccacagccaggagctgagaagaaccctgaaggaggtgctgacctgcagctggtga

SEQ ID NO: 2833 - RNA, 954 nt, synthetic construct
  misc_feature 1..954: note = AAQ62975 variant
  source 1..954: mol_type = other RNA
atggccgtgcagggcagccagagaagactgctgggcagcctgaacagcacccccaccgccatcccccagctgggcctggccgccaaccagaccggcgccagatgcctggaggtgagcatcagcgacggcctgttcctgagcctgggcctggtgagcctggtggagaacgccctggtggtggccaccatcgccaagaacagaaacctgcacagccccatgtactgcttcatctgctgcctggccctgagcgacctgctggtgagcggcagcaacgtgctggagaccgccgtgatcctgctgctggaggccggcgccctggtggccagagccgtggtgctgcagcagctggacaacgtgatcgacgtgatcacctgcagcagcatgctgagcagcctgtgcttcctgggcgccatcgccgtggacagatacatcagcatcttctacgccctgagataccacagcatcgtgaccctgcccagagccagaagagccgtggccgccatctgggtggccagcgtggtgttcagcaccctgttcatcgcctactacgaccacgtggccgtgctgctgtgcctggtggtgttcttcctggccatgctggtgctgatggccgtgctgtacgtgcacatgctggccagagcctgccagcacgcccagggcatcgccagactgcacaagagacagagacccgtgcaccagggcttcggcctgaagggcgccgtgaccctgaccatcctgctgggcatcttcttcctgtgctggggccccttcttcctgcacctgaccctgatcgtgctgtgccccgagcaccccacctgcggctgcatcttcaagaacttcaacctgttcctggccctgatcatctgcaacgccatcatcgaccccctgatctacgccttccacagccaggagctgagaagaaccctgaaggaggtgctgacctgcagctggtga

SEQ ID NO: 2834 - RNA, 954 nt, synthetic construct
  misc_feature 1..954: note = AAQ62974 variant
  source 1..954: mol_type = other RNA
atggccgtgcagggcagccagagaagactgctgggcagcctgaacagcacccccaccgccatcccccagctgggcctggccgccaaccagaccggcgccagatgcctggaggtgagcatcagcgacggcctgttcctgagcctgggcctggtgagcctggtggagaacgccctggtggtggccaccatcgccaagaacagaaacctgcacagccccatgtactgcttcatctgctgcctggccctgagcgacctgctggtgagcggcagcaacgtgctggagaccgccgtgatcctgctgctggaggccggcgccctggtggccagagccgccgtgctgcagcagctggacaacgtgatcgacgtgatcacctgcagcagcatgctgagcagcctgtgcttcctgggcgccatcgccgtggacagatacatcagcatcttctacgccctgagataccacagcatcgtgaccctgcccagagccagaagagccgtggccgccatctgggtggccagcgtggtgttcagcaccctgttcatcgcctactacgaccacgtggccgtgctgctgtgcctggtggtgttcttcctggccatgctggtgctgatggccgtgctgtacgtgcacatgctggccagagcctgccagcacgcccagggcatcgccagactgcacaagagacagagacccgtgcaccagggcttcggcctgaagggcgccgtgaccctgaccatcctgctgggcatcttcttcctgtgctggggccccttcttcctgcacctgaccctgatcgtgctgtgccccgagcaccccacctgcggctgcatcttcaagaacttcaacctgttcctggccctgatcatctgcaacgccatcatcgaccccctgatctacgccttccacagccaggagctgagaagaaccctgaaggaggtgctgaccagaagctggtga

SEQ ID NO: 2835 - RNA, 954 nt, synthetic construct
  misc_feature 1..954: note = AAQ62973 variant
  source 1..954: mol_type = other RNA
atggccgtgcagggcagccagagaagactgctgggcagcctgaacagcacccccaccgccatcccccagctgggcctggccgccaaccagaccggcgccagatgcctggaggtgagcatcagcgacggcctgttcctgagcctgggcctggtgagcctggtggagaacgccctggtggtggccaccatcgccaagaacagaaacctgcacagccccatgtactgcttcatctgctgcctggccctgagcgacctgctggtgagcggcagcaacgtgctggagaccgccgtgatcctgctgctggaggccggcgccctggtggccagagccgccgtgctgcagcagctggacaacgtgatcgacgtgatcacctgcagcagcatgctgagcagcctgtgcttcctgggcgccatcgccgtggacagatacatcagcatcttctacgccctgagataccacagcatcgtgaccctgcccagagccagaagagccgtggccgccatctgggtggccagcgtggtgttcagcaccctgttcatcgcctactacgaccacgtggccgtgctgctgtgcctggtggtgttcttcctggccatgctggtgctgatggccgtgctgtacgtgcacatgctggccagagcctgccagcacgcccagggcatcgccagactgcacaagagacagagacccgtgcaccagggcttcggcctgaagggcgccgtgaccctgaccatcctgctgggcatcttcttcctgtgctggggccccttcttcctgcacctgaccctgatcgtgctgtgccccgagcaccccacctgcggctgcatcttcaagaacttcaacctgttcctggccctgatcatctgcaacgccatcatcgaccccctgatctacgccttccacagccaggagctgagaagaatgctgaaggaggtgctgacctgcagctggtga

SEQ ID NO: 2836 - RNA, 954 nt, synthetic construct
  misc_feature 1..954: note = AAQ62972 variant
  source 1..954: mol_type = other RNA
atggccgtgcagggcagccagagaagactgctgggcagcctgaacagcacccccaccgccatcccccagctgggcctggccgccaaccagaccggcgccagatgcctggaggtgagcatcagcgacggcctgttcctgagcctgggcctggtgagcctggtggagaacgccctggtggtggccaccatcgccaagaacagaaacctgcacagccccatgtactgcttcatctgctgcctggccctgagcgacctgctggtgagcggcagcaacgtgctggagaccgccgtgatcctgctgctggaggccggcgccctggtggccagagccgccgtgctgcagcagctggacaacgtgatcgacgtgatcacctgcagcagcatgctgagcagcctgtgcttcctgggcgccatcgccgtggacagatacatcagcatcttctacgccctgagataccacagcatcgtgaccctgcccagagccagaagagccgtggccgccatctgggtggccagcgtggtgttcagcaccctgttcatcgcctactacgaccacgtggccgtgctgctgtgcctggtggtgttcttcctggccatgctggtgctgatggccgtgctgtacgtgcacatgctggcctgggcctgccagcacgcccagggcatcgccagactgcacaagagacagagacccgtgcaccagggcttcggcctgaagggcgccgtgaccctgaccatcctgctgggcatcttcttcctgtgctggggccccttcttcctgcacctgaccctgatcgtgctgtgccccgagcaccccacctgcggctgcatcttcaagaacttcaacctgttcctggccctgatcatctgcaacgccatcatcgaccccctgatctacgccttccacagccaggagctgagaagaaccctgaaggaggtgctgacctgcagctggtga

SEQ ID NO: 2837 - RNA, 954 nt, synthetic construct
  misc_feature 1..954: note = AAQ62971 variant
  source 1..954: mol_type = other RNA
atggccgtgcagggcagccagagaagactgctgggcagcctgaacagcacccccaccgccatcccccagctgggcctggccgccaaccagaccggcgccagatgcctggaggtgagcatcagcgacggcctgttcctgagcctgggcctggtgagcctggtggagaacgccctggtggtggccaccatcgccaagaacagaaacctgcacagccccatgtactgcttcatctgctgcctggccctgagcgacctgctggtgagcggcagcaacgtgctggagaccgccgtgatcctgctgctggaggccggcgccctggtggccagagccgccgtgctgcagcagctggacaacgtgatcgacgtgatcacctgcagcagcatgctgagcagcctgtgcttcctgggcgccatcgccgtggacagatacatcagcatcttctacgccctgagataccacagcatcgtgaccctgccccaggccagaagagccgtggccgccatctgggtggccagcgtggtgttcagcaccctgttcatcgcctactacgaccacgtggccgtgctgctgtgcctggtggtgttcttcctggccatgctggtgctgatggccgtgctgtacgtgcacatgctggccagagcctgccagcacgcccagggcatcgccagactgcacaagagacagagacccgtgcaccagggcttcggcctgaagggcgccgtgaccctgaccatcctgctgggcatcttcttcctgtgctggggccccttcttcctgcacctgaccctgatcgtgctgtgccccgagcaccccacctgcggctgcatcttcaagaacttcaacctgttcctggccctgatcatctgcaacgccatcatcgaccccctgatctacgccttccacagccaggagctgagaagaaccctgaaggaggtgctgacctgcagctggtga

SEQ ID NO: 2838 - RNA, 954 nt, synthetic construct
  misc_feature 1..954: note = AAQ62970 variant
  source 1..954: mol_type = other RNA
atggccgtgcagggcagccagagaagactgctgggcagcctgaacagcacccccaccgccatcccccagctgggcctggccgccaaccagaccggcgccagatgcctggaggtgagcatcagcgacggcctgttcctgagcctgggcctggtgagcctggtggagaacgccctggtggtggccaccatcgccaagaacagaaacctgcacagccccatgtactgcttcatctgctgcctggccctgctggacctgctggtgagcggcagcaacgtgctggagaccgccgtgatcctgctgctggaggccggcgccctggtggccagagccgccgtgctgcagcagctggacaacgtgatcgacgtgatcacctgcagcagcatgctgagcagcctgtgcttcctgggcgccatcgccgtggacagatacatcagcatcttctacgccctgagataccacagcatcgtgaccctgcccagagccagaagagccgtggccgccatctgggtggccagcgtggtgttcagcaccctgttcatcgcctactacgaccacgtggccgtgctgctgtgcctggtggtgttcttcctggccatgctggtgctgatggccgtgctgtacgtgcacatgctggccagagcctgccagcacgcccagggcatcgccagactgcacaagagacagagacccgtgcaccagggcttcggcctgaagggcgccgtgaccctgaccatcctgctgggcatcttcttcctgtgctggggccccttcttcctgcacctgaccctgatcgtgctgtgccccgagcaccccacctgcggctgcatcttcaagaacttcaacctgttcctggccctgatcatctgcaacgccatcatcgaccccctgatctacgccttccacagccaggagctgagaagaaccctgaaggaggtgctgacctgcagctggtga

SEQ ID NO: 2839 - RNA, 954 nt, synthetic construct
  misc_feature 1..954: note = AAQ62969 variant
  source 1..954: mol_type = other RNA
atggccgtgcagggcagccagagaagactgctgggcagcctgaacagcacccccaccgccatcccccagctgggcctggccgccaaccagaccggcgccagatgcctggaggtgagcatcagcgacggcctgctgctgagcctgggcctggtgagcctggtggagaacgccctggtggtggccaccatcgccaagaacagaaacctgcacagccccatgtactgcttcatctgctgcctggccctgagcgacctgctggtgagcggcagcaacgtgctggagaccgccgtgatcctgctgctggaggccggcgccctggtggccagagccgccgtgctgcagcagctggacaacgtgatcgacgtgatcacctgcagcagcatgctgagcagcctgtgcttcctgggcgccatcgccgtggacagatacatcagcatcttctacgccctgagataccacagcatcgtgaccctgcccagagccagaagagccgtggccgccatctgggtggccagcgtggtgttcagcaccctgttcatcgcctactacgaccacgtggccgtgctgctgtgcctggtggtgttcttcctggccatgctggtgctgatggccgtgctgtacgtgcacatgctggccagagcctgccagcacgcccagggcatcgccagactgcacaagagacagagacccgtgcaccagggcttcggcctgaagggcgccgtgaccctgaccatcctgctgggcatcttcttcctgtgctggggccccttcttcctgcacctgaccctgatcgtgctgtgccccgagcaccccacctgcggctgcatcttcaagaacttcaacctgttcctggccctgatcatctgcaacgccatcatcgaccccctgatctacgccttccacagccaggagctgagaagaaccctgaaggaggtgctgacctgcagctggtga

SEQ ID NO: 2840 - RNA, 954 nt, synthetic construct
  misc_feature 1..954: note = AAO21073 variant
  source 1..954: mol_type = other RNA
atggccgtgcagggcagccagagaagactgctgggcagcctgaacagcacccccaccgccatcccccagctgggcctggccgccaaccagaccggcgccagatgcctggaggtgagcatcagcgacggcctgttcctgagcctgggcctggtgagcctggtggagaacgccctggtggtggccaccatcgccaagaacagaaacctgcacagccccatgtactgcttcatctgctgcctggccctgagcgacctgctggtgagcggcagcaacgtgagagagaccgccgtgatcctgctgctggaggccggcgccctggtggccagagccgccgtgctgcagcagctggacaacgtgatcgacgtgatcacctgcagcagcatgctgagcagcctgtgcttcctgggcgccatcgccgtggacagatacatcagcatcttctacgccctgagataccacagcatcgtgaccctgcccagagccagaagagccgtggccgccatctgggtggccagcgtggtgttcagcaccctgttcatcgcctactacgaccacgtggccgtgctgctgtgcctggtggtgttcttcctggccatgctggtgctgatggccgtgctgtacgtgcacatgctggccagagcctgccagcacgcccagggcatcgccagactgcacaagagacagagacccgtgcaccagggcttcggcctgaagggcgccgtgaccctgaccatcctgctgggcatcttcttcctgtgctggggccccttcttcctgcacctgaccctgatcgtgctgtgccccgagcaccccacctgcggctgcatcttcaagaacttcaacctgttcctggccctgatcatctgcaacgccatcatcgaccccctgatctacgccttccacagccaggagctgagaagaaccctgaaggaggtgctgacctgcagctggtga

SEQ ID NO: 2841 - RNA, 954 nt, synthetic construct
  misc_feature 1..954: note = AHC09567 variant
  source 1..954: mol_type = other RNA
atggccgtgcagggcagccagagaagactgctgggcagcctgaacagcacccccaccgccatcccccagctgggcctggccgccaaccagaccggcgccagatgcctggaggtgagcatcagcgacggcctgttcctgagcctgggcctggtgagcctggtggagaacgccctggtggtggccaccatcgccaagaacagaaacctgcacagccccatgtactgcttcatctgctgcctggccctgcccgacctgctggtgagcggcagcaacgtgctggagaccgccgtgatcctgctgctggaggccggcgccctggtggccagagccgccgtgctgcagcagctggacaacgtgatcgacgtgatcacctgcagcagcatgctgagcagcctgtgcttcctgggcgccatcgccgtggacagatacatcagcatcttctacgccctgagataccacagcatcgtgaccctgcccagagccagaagagccgtggccgccatctgggtggccagcgtggtgttcagcaccctgttcatcgcctactacgaccacgtggccgtgctgctgtgcctggtggtgttcttcctggccatgctggtgctgatggccgtgctgtacgtgcacatgctggccagagcctgccagcacgcccagggcatcgccagactgcacaagagacagagacccgtgcaccagggcttcggcctgaagggcgccgtgaccctgaccatcctgctgggcatcttcttcctgtgctggggccccttcttcctgcacctgaccctgatcgtgctgtgccccgagcaccccacctgcggctgcatcttcaagaacttcaacctgttcctggccctgatcatctgcaacgccatcatcgaccccctgatctacgccttccacagccaggagctgagaagaaccctgaaggaggtgctgacctgcagctggtga

SEQ ID NO: 2842 - RNA, 954 nt, synthetic construct
  misc_feature 1..954: note = AHC09812 variant
  source 1..954: mol_type = other RNA
atggccgtgcagggcagccagagaagactgctgggcagcctgaacagcacccccaccgccatcccccagctgggcctggccgccaaccagaccggcgccagatgcctggaggtgagcatcagcgacggcctgttcctgagcctgggcctggtgagcctggtggagaacgccctggtggtggccaccatcgccaagaacagaaacctgcacagccccatgtactgcttcatctgctgcctggccctgagcgacctgctggtgagcggcagcaacgtgctggagaccgccgtgatcctgctgctggaggccggcgccctggtggccagagccgccgtgctgcagcagctggacaacgtgatcgacgtgatcacctgcagcagcatgctgagcagcctgtgcttcctgggcgccatcgccgtggacagatacatcagcatcttctacgccctgagataccacagcatcgtgaccctgcccagagccagaagagccgtggccgccatctgggtggccagcgtggtgttcagcaccctgttcatcgcctactacgaccacgtggccgtgctgctgtgcctgatggtgttcttcctggccatgctggtgctgatggccgtgctgtacgtgcacatgctggccagagcctgccagcacgcccagggcatcgccagactgcacaagagacagagacccgtgcaccagggcttcggcctgaagggcgccgtgaccctgaccatcctgctgggcatcttcttcctgtgctggggccccttcttcctgcacctgaccctgatcgtgctgtgccccgagcaccccacctgcggctgcatcttcaagaacttcaacctgttcctggccctgatcatctgcaacgccatcatcgaccccctgatctacgccttccacagccaggagctgagaagaaccctgaaggaggtgctgacctgcagctggtga

SEQ ID NO: 2843 - RNA, 954 nt, synthetic construct
  misc_feature 1..954: note = AHC10192 variant
  source 1..954: mol_type = other RNA
atggccgtgcagggcagccagagaagactgctgggcagcctgaacagcacccccaccgccatcccccagctgggcctggccgccaaccagaccggcgccagatgcctggaggtgagcatcagcgacggcctgttcctgagcctgggcctggtgagcctggtggagaacgccctggtggtggccaccatcgccaagaacagaaacctgcacagccccatgtactgcttcatctgctgcctggccctgagcgacctgctggtgagcggcagcaacgtgctggagaccgccgtgatcctgctgctggaggccggcgccctggtggccagagccgccgtgctgcagcagctggacaacgtgatcgacgtgatcacctgcagcagcatgctgagcagcctgtgcttcctgggcgccatcgccgtggacagatacatcagcatcttctacgccctgagataccacagcatcgtgaccctgcccagagccagaagagccgtggccgccatctgggtggccagcgtggtgttcagcaccctgttcatcgcctactacgaccacgtggccgtgctgctgtgcctggtggtgttcttcctggccatgctggtgctgatggccgtgctgtacgtgcacatgctggccagagcctgccagcacgcccagggcaccgccagactgcacaagagacagagacccgtgcaccagggcttcggcctgaagggcgccgtgaccctgaccatcctgctgggcatcttcttcctgtgctggggccccttcttcctgcacctgaccctgatcgtgctgtgccccgagcaccccacctgcggctgcatcttcaagaacttcaacctgttcctggccctgatcatctgcaacgccatcatcgaccccctgatctacgccttccacagccaggagctgagaagaaccctgaaggaggtgctgacctgcagctggtga

SEQ ID NO: 2844 - RNA, 954 nt, synthetic construct
  misc_feature 1..954: note = AHC09641 variant
  source 1..954: mol_type = other RNA
atggccgtgcagggcagccagagaagactgctgggcagcctgaacagcacccccaccgccatcccccagctgggcctggccgccaaccagaccggcgccagatgcctggaggtgagcatcagcgacggcctgttcctgagcctgggcctggtgagcctggtggagaacgccctggtggtggccaccatcgccaagaacagaaacctgcacagccccatgtactgcttcatctgctgcctggccctgagcgacctgctggtgagcggcagcaacgtgctggagaccgccgtgatcctgctgctggaggccggcgccctggtggccagagccgccgtgctgcagcagctggacaacgtgatcgacgtgatcacctgcagcagcatgctgagcagcctgtgcttcctgggcgccatcgccgtggacagatacatcagcatcttctacgccctgagataccacagcaccgtgaccctgcccagagccagaagagccgtggccgccatctgggtggccagcgtggtgttcagcaccctgttcatcgcctactacgaccacgtggccgtgctgctgtgcctggtggtgttcttcctggccatgctggtgctgatggccgtgctgtacgtgcacatgctggccagagcctgccagcacgcccagggcatcgccagactgcacaagagacagagacccgtgcaccagggcttcggcctgaagggcgccgtgaccctgaccatcctgctgggcatcttcttcctgtgctggggccccttcttcctgcacctgaccctgatcgtgctgtgccccgagcaccccacctgcggctgcatcttcaagaacttcaacctgttcctggccctgatcatctgcaacgccatcatcgaccccctgatctacgccttccacagccaggagctgagaagaaccctgaaggaggtgctgacctgcagctggtga

SEQ ID NO: 2845 - RNA, 954 nt, synthetic construct
  misc_feature 1..954: note = AHC10044 variant
  source 1..954: mol_type = other RNA
atggccgtgcagggcagccagagaagactgctgggcagcctgaacagcacccccaccgccatcccccagctgggcctggccgccaaccagaccggcgccagatacctggaggtgagcatcagcgacggcctgttcctgagcctgggcctggtgagcctggtggagaacgccctggtggtggccaccatcgccaagaacagaaacctgcacagccccatgtactgcttcatctgctgcctggccctgagcgacctgctggtgagcggcagcaacgtgctggagaccgccgtgatcctgctgctggaggccggcgccctggtggccagagccgccgtgctgcagcagctggacaacgtgatcgacgtgatcacctgcagcagcatgctgagcagcctgtgcttcctgggcgccatcgccgtggacagatacatcagcatcttctacgccctgagataccacagcatcgtgaccctgcccagagccagaagagccgtggccgccatctgggtggccagcgtggtgttcagcaccctgttcatcgcctactacgaccacgtggccgtgctgctgtgcctggtggtgttcttcctggccatgctggtgctgatggccgtgctgtacgtgcacatgctggccagagcctgccagcacgcccagggcatcgccagactgcacaagagacagagacccgtgcaccagggcttcggcctgaagggcgccgtgaccctgaccatcctgctgggcatcttcttcctgtgctggggccccttcttcctgcacctgaccctgatcgtgctgtgccccgagcaccccacctgcggctgcatcttcaagaacttcaacctgttcctggccctgatcatctgcaacgccatcatcgaccccctgatctacgccttccacagccaggagctgagaagaaccctgaaggaggtgctgacctgcagctggtga

SEQ ID NO: 2846 - RNA, 954 nt, synthetic construct
  misc_feature 1..954: note = AHC09532 variant
  source 1..954: mol_type = other RNA
atggccgtgcagggcagccagagaagactgctgggcagcctgaacagcacccccaccgccatcccccagctgggcctggccgccaaccagaccggcgccagatgcctggaggtgagcatcagcgacggcctgttcctgagcctgggcctggtgagcctggtggagaacgccctggtgctggccaccatcgccaagaacagaaacctgcacagccccatgtactgcttcatctgctgcctggccctgagcgacctgctggtgagcggcagcaacgtgctggagaccgccgtgatcctgctgctggaggccggcgccctggtggccagagccgccgtgctgcagcagctggacaacgtgatcgacgtgatcacctgcagcagcatgctgagcagcctgtgcttcctgggcgccatcgccgtggacagatacatcagcatcttctacgccctgagataccacagcatcgtgaccctgcccagagccagaagagccgtggccgccatctgggtggccagcgtggtgttcagcaccctgttcatcgcctactacgaccacgtggccgtgctgctgtgcctggtggtgttcttcctggccatgctggtgctgatggccgtgctgtacgtgcacatgctggccagagcctgccagcacgcccagggcatcgccagactgcacaagagacagagacccgtgcaccagggcttcggcctgaagggcgccgtgaccctgaccatcctgctgggcatcttcttcctgtgctggggccccttcttcctgcacctgaccctgatcgtgctgtgccccgagcaccccacctgcggctgcatcttcaagaacttcaacctgttcctggccctgatcatctgcaacgccatcatcgaccccctgatctacgccttccacagccaggagctgagaagaaccctgaaggaggtgctgacctgcagctggtga

SEQ ID NO: 2847 - RNA, 954 nt, synthetic construct
  misc_feature 1..954: note = AHC11042 variant
  source 1..954: mol_type = other RNA
atggccgtgcagggcagccagagaagactgctgggcagcctgaacagcacccccaccgccatcccccagctgggcctggccgccaaccagaccggcgccagatgcctggaggtgagcatcagcgacggcctgttcctgagcctgggcctggtgagcctggtggagaacgccctggtggtggccaccatcgccaagaacagaaacctgcacagccccatgtactgcttcatctgctgcctgcccctgagcgacctgctggtgagcggcagcaacgtgctggagaccgccgtgatcctgctgctggaggccggcgccctggtggccagagccgccgtgctgcagcagctggacaacgtgatcgacgtgatcacctgcagcagcatgctgagcagcctgtgcttcctgggcgccatcgccgtggacagatacatcagcatcttctacgccctgagataccacagcatcgtgaccctgcccagagccagaagagccgtggccgccatctgggtggccagcgtggtgttcagcaccctgttcatcgcctactacgaccacgtggccgtgctgctgtgcctggtggtgttcttcctggccatgctggtgctgatggccgtgctgtacgtgcacatgctggccagagcctgccagcacgcccagggcatcgccagactgcacaagagacagagacccgtgcaccagggcttcggcctgaagggcgccgtgaccctgaccatcctgctgggcatcttcttcctgtgctggggccccttcttcctgcacctgaccctgatcgtgctgtgccccgagcaccccacctgcggctgcatcttcaagaacttcaacctgttcctggccctgatcatctgcaacgccatcatcgaccccctgatctacgccttccacagccaggagctgagaagaaccctgaaggaggtgctgacctgcagctggtga

SEQ ID NO: 2848 - RNA, 954 nt, synthetic construct
  misc_feature 1..954: note = AHC10733 variant
  source 1..954: mol_type = other RNA
atggccgtgcagggcagccagagaagactgctgggcagcctgaacagcacccccaccgccatcccccagctgggcctggccgccaaccagaccggcgccagatgcctggaggtgagcatcagcgacggcctgttcctgagcctgggcctggtgagcctggtggagaacgccctggtggtggccaccatcgccaagaacagaaacctgcacagccccatgtactgcttcatctgctgcctggccctgagcgacctgctggtgagcggcagcaacgtgctggagaccgccgtgatcctgctgctggaggccggcgccctggtggccagagccgccgtgctgcagcagctggacaacgtgatcgacgtgatcacctgcagcagcatgctgagcagcctgtgcttcctgggcgccatcgccgtggacagatacatcagcatcttctacgccctgagataccacagcatcgtgaccctgcccagagccagaagagccgtggccgccatctgggtggccagcgtggtgttcagcaccctgttcatcgcctactacgaccacgtggccgtgctgctgtgcctggtggtgttcttcctggccatgctggtgctgatggccgtgctgtacgtgcacatgctggccagagcctgccagcacgcccagggcatcgccagactgcacaagagacagagacccgtgcaccagggcttcggcctgaagggcgccgtgaccctgaccatcctgctgggcatcttcttcctgtgctggggccccttcttcctgcacctgaccctgatcgtgctgtgccccgagcaccccacctgcggctgcatcttcaagaacttcagcctgttcctggccctgatcatctgcaacgccatcatcgaccccctgatctacgccttccacagccaggagctgagaagaaccctgaaggaggtgctgacctgcagctggtga

SEQ ID NO: 2849 - RNA, 954 nt, synthetic construct
  misc_feature 1..954: note = AHC10696 variant
  source 1..954: mol_type = other RNA
atggccgtgcagggcagccagagaagactgctgggcagcctgaacagcacccccaccgccatcccccagctgggcctggccgccaaccagaccggcgccagatgcctggaggtgagcatcagcgacggcctgttcctgagcctgggcctggtgagcctggtggagaacgccctggtggtggccaccatcgccaagaacagaaacctgcacagccccatgtactgcttcatctgctgcctggccctgagcgacctgctggtgagcggcagcaacgtgctggagaccgccgtgatcctgctgctggaggccggcgccctggtggccagagccgccgtgctgcagcagctggacaacgtgatcgacgtgatcacctgcagcagcatgctgagcagcctgtgcttcctgggcgccatcgccgtggacagatacatcagcatcttctacgccctgagataccacagcatcgtgaccctgcccagagccagaagagccgtggccgccatctgggtggccagcgtggtgttcagcaccctgttcatcgcctactacgaccacgtggccgtgctgctgtgcctggtggtgttcttcctggccatgctggtgctgatggccgtgctgtacgtgcacatgctggccagagcctgccagcacgcccagggcatcgccagactgcacaagagacagagacccgtgcaccagggcttcggcctgaagggcgccgtgaccctgaccatcctgctgggcatcttcttcctgtgctggggccccttcttcctgcacctgaccctgatcgtgctgtgccccgagcaccccacctgcggctgcatcttcaagaacttcaacctgttcctggccctgatcatctgcaacgccatcatcgaccccctgatccacgccttccacagccaggagctgagaagaaccctgaaggaggtgctgacctgcagctggtga

SEQ ID NO: 2850 - RNA, 954 nt, synthetic construct
  misc_feature 1..954: note = AHC09527 variant
  source 1..954: mol_type = other RNA
atggccgtgcagggcagccagagaagactgctgggcagcctgaacagcacccccaccgccatcccccagctgggcctggccgccaaccagaccggcgccagatgcctggaggtgagcatcagcgacggcctgttcctgagcctgggcctggtgagcctggtggagaacgccctggtggtggccaccatcgccaagaacagaaacctgcacagccccatgtactgcttcatctgctgcctggccctgagcgacctgctggtgagcggcagcaacgtgctggagaccgccgtgatcctgctgctggaggccggcgccctggtggccagagccgccgtgctgcagcagctggacaacgtgatcgacgtgatcacctgcagcagcatgctgagcagcctgtgcttcctgggcgccatcgccgtggacagatacatcagcatcttctacgccctgagataccacagcatcgtgaccctgcccagagccagaagagccgtggccgccatctgggtggccagcgtggtgttcagcaccctgttcatcgcctactacgaccacgtggccgtgctgctgtgcctggtggtgttcttcctggccatgctggtgctgatggccgtgctgtacgtgcacatgctggccagagcctgccagcacgcccagggcatcgccagactgcacaagagacagagacccgtgcaccagggcttcggcctgaagggcgccgtgaccctgaccatcctgctgggcatcttcttcctgtgctggggccccttcttcctgcacctgaccctgatcgtgctgtgccccgagcaccccacctgcggctgcatcttcaagaacttcaacctgttcctggccctgatcatctgcaacgccatcatccaccccctgatctacgccttccacagccaggagctgagaagaaccctgaaggaggtgctgacctgcagctggtga

SEQ ID NO: 2851 - RNA, 954 nt, synthetic construct
  misc_feature 1..954: note = AHC10869 variant
  source 1..954: mol_type = other RNA
atggccgtgcagggcagccagagaagactgctgggcagcctgaacagcacccccaccgccatcccccagctgggcctggccgccaaccagaccggcgccagatgcctggaggtgagcatcagcgacggcctgttcctgagcctgggcctggtgagcctggtggagaacgccctggtggtggccaccatcgccaagaacagaaacctgcacagccccatgtactgcttcatctgctgcctggccctgagcgacctgctggtgagcggcagcaacgtgctggagaccgccgtgatcctgctgctggaggccggcgccctggtggccagagccgccgtgctgcagcagctggacaacgtgatcgacgtgatcacctgcagcagcatgctgagcagcctgtgcttcctgggcgccatcgccgtggacagatacatcagcatcttctacgccctgagataccacagcatcgtgaccctgcccagagccagaagagccgtggccgccatctgggtggccagcgtggtgttcagcaccctgttcatcgcctactacgaccacgtggccgtgctgctgtgcctggtggtgttcttcctggccatgctggtgctgatggccgtgctgtacgtgcacatgctggccagagcctgccagcacgcccagggcatcgccagactgcacaagagacagcaccccgtgcaccagggcttcggcctgaagggcgccgtgaccctgaccatcctgctgggcatcttcttcctgtgctggggccccttcttcctgcacctgaccctgatcgtgctgtgccccgagcaccccacctgcggctgcatcttcaagaacttcaacctgttcctggccctgatcatctgcaacgccatcatcgaccccctgatctacgccttccacagccaggagctgagaagaaccctgaaggaggtgctgacctgcagctggtga

SEQ ID NO: 2852 - RNA, 954 nt, synthetic construct
  misc_feature 1..954: note = AHC11615 variant
  source 1..954: mol_type = other RNA
atggccgtgcagggcagccagagaagactgctgggcagcctgaacagcacccccaccgccatcccccagctgggcctggccgccaaccagaccggcgccagatgcctggaggtgagcatcagcgacggcctgttcctgagcctgggcctggtgagcctggtggagaacgccctggtggtggccaccatcgccaagaacagaaacctgcacagccccatgtactgcttcatctgctgcctggccctgagcgacctgctggtgagcggcagcaacgtgctggagaccgccgtgatcctgctgctggaggccggcgccctggtggccagagccgccgtgctgcagcagctggacaacgtgatcgacgtgatcacctgcagcagcatgctgagcagcctgtgcttcctgggcgccatcgccgtggacagatacatcagcatcttctacgccctgagataccacagcatcgtgaccctgcccagagccagaagagccgtggccgccatctgggtggccagcgtggtgttcagcaccctgttcatcgcctactacgaccacgtggccgtgctgctgtgcctggtggtgttcttcctggccatgctggtgctgatggccgtgctgtacgtgcacatgctggccagagcctgccagcacgcccagggcatcgccagactgcacaagagacagagacccgtgcaccagggcttcggcctgaagggcgccgtgaccctgaccatcctgctgggcatcttcttcctgtgctggggccccttcttcctgcacctgaccctgatcgtgctgtgccccgagcaccccacctgcggctgcatcttcaagaacttcaacctgttcctgaccctgatcatctgcaacgccatcatcgaccccctgatctacgccttccacagccaggagctgagaagaaccctgaaggaggtgctgacctgcagctggtga

SEQ ID NO: 2853 - RNA, 954 nt, synthetic construct
  misc_feature 1..954: note = AHC09535 variant
  source 1..954: mol_type = other RNA
atggccgtgcagggcagccagagaagactgctgggcagcctgaacagcacccccaccgccatcccccagctgggcctggccgccaaccagaccggcgccagatgcctggaggtgagcatcagcgacggcctgttcctgagcctgggcctggtgagcctggtggagaacgccctggtggtggccaccatcgccaagaacagaaacctgcacagccccatgtactgcttcatctgctgcctggccctgagcgacctgctggtgagcggcagcaacgtgctggagaccgccgtgatcctgctgctggaggccggcgccctggtggccagagccgccgtgctgcagcagctggacaacgtgatcgacgtgatcacctgcagcagcatgctgagcagcctgtgcttcctgggcgccatcgccgtggaccactacatcagcatcttctacgccctgagataccacagcatcgtgaccctgcccagagccagaagagccgtggccgccatctgggtggccagcgtggtgttcagcaccctgttcatcgcctactacgaccacgtggccgtgctgctgtgcctggtggtgttcttcctggccatgctggtgctgatggccgtgctgtacgtgcacatgctggccagagcctgccagcacgcccagggcatcgccagactgcacaagagacagagacccgtgcaccagggcttcggcctgaagggcgccgtgaccctgaccatcctgctgggcatcttcttcctgtgctggggccccttcttcctgcacctgaccctgatcgtgctgtgccccgagcaccccacctgcggctgcatcttcaagaacttcaacctgttcctggccctgatcatctgcaacgccatcatcgaccccctgatctacgccttccacagccaggagctgagaagaaccctgaaggaggtgctgacctgcagctggtga

SEQ ID NO: 2854 - RNA, 954 nt, synthetic construct
  misc_feature 1..954: note = AHC11840 variant
  source 1..954: mol_type = other RNA
atggccgtgcagggcagccagagaagactgctgggcagcctgaacagcacccccaccgccatcccccagctgggcctggccgccaaccagaccggcgccagatgcctggaggtgagcatcagcgacggcctgttcctgagcctgggcctggtgagcctggtggagaacgccctggtggtggccaccatcgccaagaacagaaacctgcacagccccatgtactgcttcatctgctgcctggccctgagcgacctgctggtgagcggcagcaacgtgctggagaccgccgtgatcctgctgctggaggccggcgccctggtggccagagccgccgtgctgcagcagctggacaacgtgatcgacgtgatcacctgcagcagcatgctgagcagcctgtgcttcctgggcgccatcgccgtggacagatacatcagcatcttctacgccctgagataccacagcatcgtgaccctgcccagagccagaagagccgtggccgccatctgggtggccagcgtggtgttcagcaccctgttcatcgcctactacgaccacgtggccgtgctgctgtgcctggtggtgttcttcctggccatgctggtgctgatggccgtgctgtacgtgcacatgctggccagagcctgccagcacgcccagggcatcgccagactgcacaagagacagagacccgtgcaccagggcttcggcctgaagggcgccgtgaccctgaccatcctgctgggcatcttcttcctgtgctggggccccttcttcctgcacctgaccctgatcgtgctgtgccccgagcaccccacctgcggctgcatcttcaagaacttcaacctgttcctggccctgatcatctgcaacgccatcatcgaccccctgatctacgccttccacaaccaggagctgagaagaaccctgaaggaggtgctgacctgcagctggtga

SEQ ID NO: 2855 - RNA, 954 nt, synthetic construct
  misc_feature 1..954: note = AHC09665 variant
  source 1..954: mol_type = other RNA
atggccgtgcagggcagccagagaagactgctgggcagcctgaacagcacccccaccgccatcccccagctgggcctggccgccaaccagaccggcgccagatgcctggaggtgagcatcagcgacggcctgttcctgagcctgggcctggtgagcctggtggagaacgccctggtggtggccaccatcgccaagaacagaaacctgcacagccccatgtactgcttcatctgctgcctggccctgagcgacctgctggtgagcggcagcaacgtgctggagaccgccgtgatcctgctgctggaggccggcgccctggtggccagagccgccgtgctgcagcagctggacaacgtgatcgacatgatcacctgcagcagcatgctgagcagcctgtgcttcctgggcgccatcgccgtggacagatacatcagcatcttctacgccctgagataccacagcatcgtgaccctgcccagagccagaagagccgtggccgccatctgggtggccagcgtggtgttcagcaccctgttcatcgcctactacgaccacgtggccgtgctgctgtgcctggtggtgttcttcctggccatgctggtgctgatggccgtgctgtacgtgcacatgctggccagagcctgccagcacgcccagggcatcgccagactgcacaagagacagagacccgtgcaccagggcttcggcctgaagggcgccgtgaccctgaccatcctgctgggcatcttcttcctgtgctggggccccttcttcctgcacctgaccctgatcgtgctgtgccccgagcaccccacctgcggctgcatcttcaagaacttcaacctgttcctggccctgatcatctgcaacgccatcatcgaccccctgatctacgccttccacagccaggagctgagaagaaccctgaaggaggtgctgacctgcagctggtga

SEQ ID NO: 2856 - RNA, 954 nt, synthetic construct
  misc_feature 1..954: note = AHC11324 variant
  source 1..954: mol_type = other RNA
atggccgtgcagggcagccagagaagactgctgggcagcctgaacagcacccccaccgccatcccccagctgggcctggccgccaaccagaccggcgccagatgcctggaggtgagcatcagcgacggcctgttcctgagcctgggcctggtgagcctggtggagaacgccctggtggtggccaccatcgccaagaacagaaacctgcacagccccatgtactgcttcatctgctgcctggccctgagcgacctgctggtgagcggcagcaacgtgctggagaccgccgtgatcctgctgctggaggccggcgccctggtggccagagccgccgtgctgcagcagctggacaacgtgatcgacgtgatcacctgcagcagcatgctgagcagcctgtgcttcctgggcgccatcgccgtggacagatacatcagcatcttctacgccctgagataccacagcatcgtgaccctgcccagagccagaagagccgtggccgccatctgggtggccagcgtggtgttcagcaccctgttcatcgcctactacgaccacgtggccgtgctgctgtgcctggtggtgttcttcctggccatgctggtgctgatggccgtgctgtacgtgcacatgctggccagagcctgccagcacgcccagggcatcgccagactgcacaagagacagagacccgtgcaccagggcttcggcctgaagggcgccgtgaccctgaccatcctgctgggcatcttcttcctgtgctggggccccttcttcctgcacctgaccctgatcgtgctgtgccccgagcaccccacctgcggctgcatcttcaagaacttcaacctgttcctggccctgatcatcagaaacgccatcatcgaccccctgatctacgccttccacagccaggagctgagaagaaccctgaaggaggtgctgacctgcagctggtga

SEQ ID NO: 2857 - RNA, 954 nt, synthetic construct
  misc_feature 1..954: note = AHC09521 variant
  source 1..954: mol_type = other RNA
atggccgtgcagggcagccagagaagactgctgggcagcctgaacagcacccccaccgccatcccccagctgggcctggccgccaaccagaccggcgccagatgcctggaggtgagcatcagcgacggcctgttcctgagcctgggcctggtgagcctggtggagaacgccctggtggtggccaccatcgccaagaacagaaacctgcacagccccatgtactgcttcatctgctgcctggccctgagcgacctgctggtgagcggcagcaacgtgctggagaccgccgtgatcctgctgctggaggccggcgccctggtggccagagccgccgtgctgcagcagctggacaacgtgatcgacgtgatcacctgcagcagcatgctgagcagcctgtgcttcctgggcgccatcgccgtggacagatacatcagcatcttctacgccctgagataccacagcatcgtgaccctgccctgggccagaagagccgtggccgccatctgggtggccagcgtggtgttcagcaccctgttcatcgcctactacgaccacgtggccgtgctgctgtgcctggtggtgttcttcctggccatgctggtgctgatggccgtgctgtacgtgcacatgctggccagagcctgccagcacgcccagggcatcgccagactgcacaagagacagagacccgtgcaccagggcttcggcctgaagggcgccgtgaccctgaccatcctgctgggcatcttcttcctgtgctggggccccttcttcctgcacctgaccctgatcgtgctgtgccccgagcaccccacctgcggctgcatcttcaagaacttcaacctgttcctggccctgatcatctgcaacgccatcatcgaccccctgatctacgccttccacagccaggagctgagaagaaccctgaaggaggtgctgacctgcagctggtga

SEQ ID NO: 2858 - RNA, 954 nt, synthetic construct
  misc_feature 1..954: note = AHC11794 variant
  source 1..954: mol_type = other RNA
atggccgtgcagggcagccagagaagactgctgggcagcctgaacagcacccccaccgccatcccccagctgggcctggccgccaaccagaccggcgccagatgcctggaggtgagcatcagcgacggcctgttcctgagcctgggcctggtgagcctggtggagaacgccctggtggtggccaccatcgccaagaacagaaacctgcacagccccatgtactgcttcatctgctgcctggccctgagcgacctgctggtgagcggcagcaacgtgctggagaccgccgtgatcctgctgctggaggccggcgccctggtggccagagccgccgtgctgcagcagctggacaacgtgatcgacgtgatcacctgcagcagcatgctgagcagcctgtgcttcctgggcgccatcgccgtggacagatacatcagcatcttctacgccctgagataccacagcatcgtgaccctgcccagagccagaagagccgtggccgccatctgggtggccagcgtggtgttcagcaccctgttcatcgcctactacgaccacgtggccgtgctgctgtgcctggtggtgttcttcctggccatgctggtgctgatggccgtgctgtacgtgcacatgctggccagagcctgccagcacgcccagggcatcgccagactgcacaagagacagagacccgtgcaccagggcttcggcctgaagggcgccgtgaccctgaccatcctgctgggcatcttcttcctgtgctggggccccttcttcctgcacctgaccctgatcgtgctgtgccccgagcaccccgagtgcggctgcatcttcaagaacttcaacctgttcctggccctgatcatctgcaacgccatcatcgaccccctgatctacgccttccacagccaggagctgagaagaaccctgaaggaggtgctgacctgcagctggtga

SEQ ID NO: 2859 - RNA, 954 nt, synthetic construct
  misc_feature 1..954: note = AHC10874 variant
  source 1..954: mol_type = other RNA
atggccgtgcagggcagccagagaagactgctgggcagcctgaacagcacccccaccgccatcccccagctgggcctggccgccaaccagaccggcgccagatgcctggaggtgagcatcagcgacggcctgttcctgagcctgggcctggtgagcctggtggagaacgccctggtggtggccaccatcgccaagaacagaaacctgcacagccccatgtactgcttcatctgctgcctggccctgagcgagctgctggtgagcggcagcaacgtgctggagaccgccgtgatcctgctgctggaggccggcgccctggtggccagagccgccgtgctgcagcagctggacaacgtgatcgacgtgatcacctgcagcagcatgctgagcagcctgtgcttcctgggcgccatcgccgtggacagatacatcagcatcttctacgccctgagataccacagcatcgtgaccctgcccagagccagaagagccgtggccgccatctgggtggccagcgtggtgttcagcaccctgttcatcgcctactacgaccacgtggccgtgctgctgtgcctggtggtgttcttcctggccatgctggtgctgatggccgtgctgtacgtgcacatgctggccagagcctgccagcacgcccagggcatcgccagactgcacaagagacagagacccgtgcaccagggcttcggcctgaagggcgccgtgaccctgaccatcctgctgggcatcttcttcctgtgctggggccccttcttcctgcacctgaccctgatcgtgctgtgccccgagcaccccacctgcggctgcatcttcaagaacttcaacctgttcctggccctgatcatctgcaacgccatcatcgaccccctgatctacgccttccacagccaggagctgagaagaaccctgaaggaggtgctgacctgcagctggtga

SEQ ID NO: 2860 - RNA, 954 nt, synthetic construct
  misc_feature 1..954: note = AHC09597 variant
  source 1..954: mol_type = other RNA
atggccgtgcagggcagccagagaagactgctgggcagcctgaacagcacccccaccgccatcccccagctgggcctggccgccaaccagaccggcgccagatgcctggaggtgagcatcagcgacggcctgttcctgagcctgggcctggtgagcctggtggagaacgccctggtggtggccaccatcgccaagaacagaaacctgcacagccccatgtactgcttcatctgctgcctggccctgagcgacctgctggtgagcggcagcaacgtgctggagaccgccgtgatcctgctgctggaggccggcgccctggtggccagagccgccgtgctgcagcagctggacaacgtgatcgacgtgatcacctgcagcagcatgctgagcagcctgtgcttcctgggcgccatcgccgtggacagatacatcagcatcttctacgccctgtgctaccacagcatcgtgaccctgcccagagccagaagagccgtggccgccatctgggtggccagcgtggtgttcagcaccctgttcatcgcctactacgaccacgtggccgtgctgctgtgcctggtggtgttcttcctggccatgctggtgctgatggccgtgctgtacgtgcacatgctggccagagcctgccagcacgcccagggcatcgccagactgcacaagagacagagacccgtgcaccagggcttcggcctgaagggcgccgtgaccctgaccatcctgctgggcatcttcttcctgtgctggggccccttcttcctgcacctgaccctgatcgtgctgtgccccgagcaccccacctgcggctgcatcttcaagaacttcaacctgttcctggccctgatcatctgcaacgccatcatcgaccccctgatctacgccttccacagccaggagctgagaagaaccctgaaggaggtgctgacctgcagctggtga

SEQ ID NO: 2861 - RNA, 1665 nt, synthetic construct
  misc_feature 1..1665: note = CCDS816.1 variant
  source 1..1665: mol_type = other RNA
atgaccgcccccggcgccgccggcagatgcccccccaccacctggctgggcagcctgctgctgctggtgtgcctgctggccagcagaagcatcaccgaggaggtgagcgagtactgcagccacatgatcggcagcggccacctgcagagcctgcagagactgatcgacagccagatggagaccagctgccagatcaccttcgagttcgtggaccaggagcagctgaaggaccccgtgtgctacctgaagaaggccttcctgctggtgcaggacatcatggaggacaccatgagattcagagacaacacccccaacgccatcgccatcgtgcagctgcaggagctgagcctgagactgaagagctgcttcaccaaggactacgaggagcacgacaaggcctgcgtgagaaccttctacgagacccccctgcagctgctggagaaggtgaagaacgtgttcaacgagaccaagaacctgctggacaaggactggaacatcttcagcaagaactgcaacaacagcttcgccgagtgcagcagccaggacgtggtgaccaagcccgactgcaactgcctgtaccccaaggccatccccagcagcgaccccgccagcgtgagcccccaccagcccctggcccccagcatggcccccgtggccggcctgacctgggaggacagcgagggcaccgagggcagcagcctgctgcccggcgagcagcccctgcacaccgtggaccccggcagcgccaagcagagaccccccagaagcacctgccagagcttcgagccccccgagacccccgtggtgaaggacagcaccatcggcggcagcccccagcccagacccagcgtgggcgccttcaaccccggcatggaggacatcctggacagcgccatgggcaccaactgggtgcccgaggaggccagcggcgaggccagcgagatccccgtgccccagggcaccgagctgagccccagcagacccggcggcggcagcatgcagaccgagcccgccagacccagcaacttcctgagcgccagcagccccctgcccgccagcgccaagggccagcagcccgccgacgtgaccggcaccgccctgcccagagtgggccccgtgagacccaccggccaggactggaaccacaccccccagaagaccgaccaccccagcgccctgctgagagacccccccgagcccggcagccccagaatcagcagcctgagaccccagggcctgagcaaccccagcaccctgagcgcccagccccagctgagcagaagccacagcagcggcagcgtgctgcccctgggcgagctggagggcagaagaagcaccagagacagaagaagccccgccgagcccgagggcggccccgccagcgagggcgccgccagacccctgcccagattcaacagcgtgcccctgaccgacaccggccacgagagacagagcgagggcagcttcagcccccagctgcaggagagcgtgttccacctgctggtgcccagcgtgatcctggtgctgctggccgtgggcggcctgctgttctacagatggagaagaagaagccaccaggagccccagagagccgacagccccctggagcagcccgagggcagccccctgacccaggacgacagacaggtggagctgcccgtgtga

SEQ ID NO: 2862 - RNA, 1893 nt, synthetic construct
  misc_feature 1..1893: note = EAW85719 variant
  source 1..1893: mol_type = other RNA
atggccctgcccaccgccagacccctgctgggcagctgcggcacccccgccctgggcagcctgctgttcctgctgttcagcctgggctgggtgcagcccagcagaaccctggccggcgagaccggccaggaggccgcccccctggacggcgtgctggccaacccccccaacatcagcagcctgagccccagacagctgctgggcttcccctgcgccgaggtgagcggcctgagcaccgagagagtgagagagctggccgtggccctggcccagaagaacgtgaagctgagcaccgagcagctgagatgcctggcccacagactgagcgagccccccgaggacctggacgccctgcccctggacctgctgctgttcctgaaccccgacgccttcagcggcccccaggcctgcaccagattcttcagcagaatcaccaaggccaacgtggacctgctgcccagaggcgcccccgagagacagagactgctgcccgccgccctggcctgctggggcgtgagaggcagcctgctgagcgaggccgacgtgagagccctgggcggcctggcctgcgacctgcccggcagattcgtggccgagagcgccgaggtgctgctgcccagactggtgagctgccccggccccctggaccaggaccagcaggaggccgccagagccgccctgcagggcggcggccccccctacggcccccccagcacctggagcgtgagcaccatggacgccctgagaggcctgctgcccgtgctgggccagcccatcatcagaagcatcccccagggcatcgtggccgcctggagacagagaagcagcagagaccccagctggagacagcccgagagaaccatcctgagacccagattcagaagagaggtggagaagaccgcctgccccagcggcaagaaggccagagagatcgacgagagcctgatcttctacaagaagtgggagctggaggcctgcgtggacgccgccctgctggccacccagatggacagagtgaacgccatccccttcacctacgagcagctggacgtgctgaagcacaagctggacgagctgtacccccagggctaccccgagagcgtgatccagcacctgggctacctgttcctgaagatgagccccgaggacatcagaaagtggaacgtgaccagcctggagaccctgaaggccctgctggaggtgaacaagggccacgagatgagcccccaggcccccagaagacccctgccccaggtggccaccctgatcgacagattcgtgaagggcagaggccagctggacaaggacaccctggacaccctgaccgccttctaccccggctacctgtgcagcctgagccccgaggagctgagcagcgtgccccccagcagcatctgggccgtgagaccccaggacctggacacctgcgaccccagacagctggacgtgctgtaccccaaggccagactggccttccagaacatgaacggcagcgagtacttcgtgaagatccagagcttcctgggcggcgcccccaccgaggacctgaaggccctgagccagcagaacgtgagcatggacctggccaccttcatgaagctgagaaccgacgccgtgctgcccctgaccgtggccgaggtgcagaagctgctgggcccccacgtggagggcctgaaggccgaggagagacacagacccgtgagagactggatcctgagacagagacaggacgacctggacaccctgggcctgggcctgcagggcggcatccccaacggctacctggtgctggacctgagcatgcaggaggccctgagcggcaccccctgcctgctgggccccggccccgtgctgaccgtgctggccctgctgctggccagcaccctggcctga

SEQ ID NO: 2863 - RNA, 1515 nt, synthetic construct
  misc_feature 1..1515: note = CCDS46865.1 variant
  source 1..1515: mol_type = other RNA
atggaggccctgagagtgcagatgttcatgccctgcagcttcgagagcctgtacctgagcagcgccgagcaccccggcgccagcaagccccccatcagcagcagcagcatgaccagcagaatcctgctgagacagcagctgatgagagagcagatgcaggagcaggagagaagagagcagcagcagaagctgcaggccgcccagttcatgcagcagagagtgcccgtgagccagacccccgccatcaacgtgagcgtgcccaccaccctgcccagcgccacccaggtgcccatggaggtgctgaaggtgcagacccacctggagaaccccaccaagtaccacatccagcaggcccagagacagcaggtgaagcagtacctgagcaccaccctggccaacaagcacgccaaccaggtgctgagcctgccctgccccaaccagcccggcgaccacgtgatgccccccgtgcccggcagcagcgcccccaacagccccatggccatgctgaccctgaacagcaactgcgagaaggagggcttctacaagttcgaggagcagaacagagccgagagcgagtgccccggcatgaacacccacagcagagccagctgcatgcagatggacgacgtgatcgacgacatcatcagcctggagagcagctacaacgaggagatcctgggcctgatggaccccgccctgcagatggccaacaccctgcccgtgagcggcaacctgatcgacctgtacggcaaccagggcctgcccccccccggcctgaccatcagcaacagctgccccgccaacctgcccaacatcaagagagagctgaccgagagcgaggccagagccctggccaaggagagacagaagaaggacaaccacaacctgatcgagagaagaagaagattcaacatcaacgacagaatcaaggagctgggcaccctgatccccaagagcaacgaccccgacatgagatggaacaagggcaccatcctgaaggccagcgtggactacatcagaaagctgcagagagagcagcagagagccaaggagctggagaacagacagaagaagctggagcacgccaacagacacctgctgctgagaatccaggagctggagatgcaggccagagcccacggcctgagcctgatccccagcaccggcctgtgcagccccgacctggtgaacagaatcatcaagcaggagcccgtgctggagaactgcagccaggacctgctgcagcaccacgccgacctgacctgcaccaccaccctggacctgaccgacggcaccatcaccttcaacaacaacctgggcaccggcaccgaggccaaccaggcctacagcgtgcccaccaagatgggcagcaagctggaggacatcctgatggacgacaccctgagccccgtgggcgtgaccgaccccctgctgagcagcgtgagccccggcgccagcaagaccagcagcagaagaagcagcatgagcatggaggagaccgagcacacctgctga

SEQ ID NO: 2864 - RNA, 1260 nt, synthetic construct
  misc_feature 1..1260: note = CCDS2913.1 variant
  source 1..1260: mol_type = other RNA
atgctggagatgctggagtacaaccactaccaggtgcagacccacctggagaaccccaccaagtaccacatccagcaggcccagagacagcaggtgaagcagtacctgagcaccaccctggccaacaagcacgccaaccaggtgctgagcctgccctgccccaaccagcccggcgaccacgtgatgccccccgtgcccggcagcagcgcccccaacagccccatggccatgctgaccctgaacagcaactgcgagaaggagggcttctacaagttcgaggagcagaacagagccgagagcgagtgccccggcatgaacacccacagcagagccagctgcatgcagatggacgacgtgatcgacgacatcatcagcctggagagcagctacaacgaggagatcctgggcctgatggaccccgccctgcagatggccaacaccctgcccgtgagcggcaacctgatcgacctgtacggcaaccagggcctgcccccccccggcctgaccatcagcaacagctgccccgccaacctgcccaacatcaagagagagctgaccgcctgcatcttccccaccgagagcgaggccagagccctggccaaggagagacagaagaaggacaaccacaacctgatcgagagaagaagaagattcaacatcaacgacagaatcaaggagctgggcaccctgatccccaagagcaacgaccccgacatgagatggaacaagggcaccatcctgaaggccagcgtggactacatcagaaagctgcagagagagcagcagagagccaaggagctggagaacagacagaagaagctggagcacgccaacagacacctgctgctgagaatccaggagctggagatgcaggccagagcccacggcctgagcctgatccccagcaccggcctgtgcagccccgacctggtgaacagaatcatcaagcaggagcccgtgctggagaactgcagccaggacctgctgcagcaccacgccgacctgacctgcaccaccaccctggacctgaccgacggcaccatcaccttcaacaacaacctgggcaccggcaccgaggccaaccaggcctacagcgtgcccaccaagatgggcagcaagctggaggacatcctgatggacgacaccctgagccccgtgggcgtgaccgaccccctgctgagcagcgtgagccccggcgccagcaagaccagcagcagaagaagcagcatgagcatggaggagaccgagcacacctgctga

SEQ ID NO: 2865 - RNA, 1581 nt, synthetic construct
  misc_feature 1..1581: note = XM_005264754 variant
  source 1..1581: mol_type = other RNA
atgcagagcgagagcggcatcgtgcccgacttcgaggtgggcgaggagttccacgaggagcccaagacctactacgagctgaagagccagcccctgaagagcagcagcagcgccgagcaccccggcgccagcaagccccccatcagcagcagcagcatgaccagcagaatcctgctgagacagcagctgatgagagagcagatgcaggagcaggagagaagagagcagcagcagaagctgcaggccgcccagttcatgcagcagagagtgcccgtgagccagacccccgccatcaacgtgagcgtgcccaccaccctgcccagcgccacccaggtgcccatggaggtgctgaaggtgcagacccacctggagaaccccaccaagtaccacatccagcaggcccagagacagcaggtgaagcagtacctgagcaccaccctggccaacaagcacgccaaccaggtgctgagcctgccctgccccaaccagcccggcgaccacgtgatgccccccgtgcccggcagcagcgcccccaacagccccatggccatgctgaccctgaacagcaactgcgagaaggagggcttctacaagttcgaggagcagaacagagccgagagcgagtgccccggcatgaacacccacagcagagccagctgcatgcagatggacgacgtgatcgacgacatcatcagcctggagagcagctacaacgaggagatcctgggcctgatggaccccgccctgcagatggccaacaccctgcccgtgagcggcaacctgatcgacctgtacggcaaccagggcctgcccccccccggcctgaccatcagcaacagctgccccgccaacctgcccaacatcaagagagagctgaccgcctgcatcttccccaccgagagcgaggccagagccctggccaaggagagacagaagaaggacaaccacaacctgatcgagagaagaagaagattcaacatcaacgacagaatcaaggagctgggcaccctgatccccaagagcaacgaccccgacatgagatggaacaagggcaccatcctgaaggccagcgtggactacatcagaaagctgcagagagagcagcagagagccaaggagctggagaacagacagaagaagctggagcacgccaacagacacctgctgctgagaatccaggagctggagatgcaggccagagcccacggcctgagcctgatccccagcaccggcctgtgcagccccgacctggtgaacagaatcatcaagcaggagcccgtgctggagaactgcagccaggacctgctgcagcaccacgccgacctgacctgcaccaccaccctggacctgaccgacggcaccatcaccttcaacaacaacctgggcaccggcaccgaggccaaccaggcctacagcgtgcccaccaagatgggcagcaagctggaggacatcctgatggacgacaccctgagccccgtgggcgtgaccgaccccctgctgagcagcgtgagccccggcgccagcaagaccagcagcagaagaagcagcatgagcatggaggagaccgagcacacctgctga

SEQ ID NO: 2866 - RNA, 1065 nt, synthetic construct
  misc_feature 1..1065: note = BAG52140 variant
  source 1..1065: mol_type = other RNA
atggcccccgccgcctggctgagaagcgccgccgccagagccctgctgccccccatgctgctgctgctgctgcagcccccccccctgctggccagagccctgccccccgacgtgcaccacctgcacgccgagagaagaggcccccagccctggcacgccgccctgcccagcagccccgcccccgcccccgccacccaggaggcccccagacccgccagcagcctgagaccccccagatgcggcgtgcccgaccccagcgacggcctgagcgccagaaacagacagaagagaatcctgagattcccctggcagctggtgcaggagcaggtgagacagaccatggccgaggccctgaaggtgtggagcgacgtgacccccctgaccttcaccgaggtgcacgagggcagagccgacatcatgatcgacttcgccagatactggcacggcgacgacctgcccttcgacggccccggcggcatcctggcccacgccttcttccccaagacccacagagagggcgacgtgcacttcgactacgacgagacctggaccatcggcgacgaccagggcaccgacctgctgcaggtggccgcccacgagttcggccacgtgctgggcctgcagcacaccaccgccgccaaggccctgatgagcgccttctacaccttcagataccccctgagcctgagccccgacgactgcagaggcgtgcagcacctgtacggccagccctggcccaccgtgaccagcagaacccccgccctgggcccccaggccggcatcgacaccaacgagatcgcccccctggagcccgacgccccccccgacgcctgcgaggccagcttcgacgccgtgagcaccatcagaggcgagctgttcttcttcaaggccggcttcgtgtggagactgagaggcggccagctgcagcccggctaccccgccctggccagcagacactggcagggcctgcccagccccgtggacgccgccttcgaggacgcccagggccacatctggttcttccagggcaccaccggcgtgagcacccccgcccccggcgtgtga

SEQ ID NO: 2867 - RNA, 804 nt, synthetic construct
  misc_feature 1..804: note = AAV40839 variant
  source 1..804: mol_type = other RNA
atgagactgaccgtgctgtgcgccgtgtgcctgctgcccggcagcctggccctgcccctgccccaggaggccggcggcatgagcgagctgcagtgggagcaggcccaggactacctgaagagattctacctgtacgacagcgagaccaagaacgccaacagcctggaggccaagctgaaggagatgcagaagttcttcggcctgcccatcaccggcatgctgaacagcagagtgatcgagatcatgcagaagcccagatgcggcgtgcccgacgtggccgagtacagcctgttccccaacagccccaagtggaccagcaaggtggtgacctacagaatcgtgagctacaccagagacctgccccacatcaccgtggacagactggtgagcaaggccctgaacatgtggggcaaggagatccccctgcacttcagaaaggtggtgtggggcaccgccgacatcatgatcggcttcgccagaggcgcccacggcgacagctaccccttcgacggccccggcaacaccctggcccacgccttcgcccccggcaccggcctgggcggcgacgcccacttcgacgaggacgagagatggaccgacggcagcagcctgggcatcaacttcctgtacgccgccacccacgagctgggccacagcctgggcatgggccacagcagcgaccccaacgccgtgatgtaccccacctacggcaacggcgacccccagaacttcaagctgagccaggacgacatcaagggcatccagaagctgtacggcaagagaagcaacagcagaaagaagtga

SEQ ID NO: 2868 - RNA, 3768 nt, synthetic construct
  misc_feature 1..3768: note = J05582.1 variant
  source 1..3768: mol_type = other RNA
atgacccccggcacccagagccccttcttcctgctgctgctgctgaccgtgctgaccgtggtgaccggcagcggccacgccagcagcacccccggcggcgagaaggagaccagcgccacccagagaagcagcgtgcccagcagcaccgagaagaacgccgtgagcatgaccagcagcgtgctgagcagccacagccccggcagcggcagcagcaccacccagggccaggacgtgaccctggcccccgccaccgagcccgccagcggcagcgccgccacctggggccaggacgtgaccagcgtgcccgtgaccagacccgccctgggcagcaccaccccccccgcccacgacgtgaccagcgcccccgacaacaagcccgcccccggcagcaccgccccccccgcccacggcgtgaccagcgcccccgacaccagacccgcccccggcagcaccgccccccccgcccacggcgtgaccagcgcccccgacaccagacccgcccccggcagcaccgccccccccgcccacggcgtgaccagcgcccccgacaccagacccgcccccggcagcaccgccccccccgcccacggcgtgaccagcgcccccgacaccagacccgcccccggcagcaccgccccccccgcccacggcgtgaccagcgcccccgacaccagacccgcccccggcagcaccgccccccccgcccacggcgtgaccagcgcccccgacaccagacccgcccccggcagcaccgccccccccgcccacggcgtgaccagcgcccccgacaccagacccgcccccggcagcaccgccccccccgcccacggcgtgaccagcgcccccgacaccagacccgcccccggcagcaccgccccccccgcccacggcgtgaccagcgcccccgacaccagacccgcccccggcagcaccgccccccccgcccacggcgtgaccagcgcccccgacaccagacccgcccccggcagcaccgccccccccgcccacggcgtgaccagcgcccccgacaccagacccgcccccggcagcaccgccccccccgcccacggcgtgaccagcgcccccgacaccagacccgcccccggcagcaccgccccccccgcccacggcgtgaccagcgcccccgacaccagacccgcccccggcagcaccgccccccccgcccacggcgtgaccagcgcccccgacaccagacccgcccccggcagcaccgccccccccgcccacggcgtgaccagcgcccccgacaccagacccgcccccggcagcaccgccccccccgcccacggcgtgaccagcgcccccgacaccagacccgcccccggcagcaccgccccccccgcccacggcgtgaccagcgcccccgacaccagacccgcccccggcagcaccgccccccccgcccacggcgtgaccagcgcccccgacaccagacccgcccccggcagcaccgccccccccgcccacggcgtgaccagcgcccccgacaccagacccgcccccggcagcaccgccccccccgcccacggcgtgaccagcgcccccgacaccagacccgcccccggcagcaccgccccccccgcccacggcgtgaccagcgcccccgacaccagacccgcccccggcagcaccgccccccccgcccacggcgtgaccagcgcccccgacaccagacccgcccccggcagcaccgccccccccgcccacggcgtgaccagcgcccccgacaccagacccgcccccggcagcaccgccccccccgcccacggcgtgaccagcgcccccgacaccagacccgcccccggcagcaccgccccccccgcccacggcgtgaccagcgcccccgacaccagacccgcccccggcagcaccgccccccccgcccacggcgtgaccagcgcccccgacaccagacccgcccccggcagcaccgccccccccgcccacggcgtgaccagcgcccccgacaccagacccgcccccggcagcaccgccccccccgcccacggcgtgaccagcgcccccgacaccagacccgcccccggcagcaccgccccccccgcccacggcgtgaccagcgcccccgacaccagacccgcccccggcagcaccgccccccccgcccacggcgtgaccagcgcccccgacaccagacccgcccccggcagcaccgccccccccgcccacggcgtgaccagcgcccccgacaccagacccgcccccggcagcaccgccccccccgcccacggcgtgaccagcgcccccgacaccagacccgcccccggcagcaccgccccccccgcccacggcgtgaccagcgcccccgacaccagacccgcccccggcagcaccgccccccccgcccacggcgtgaccagcgcccccgacaccagacccgcccccggcagcaccgccccccccgcccacggcgtgaccagcgcccccgacaccagacccgcccccggcagcaccgccccccccgcccacggcgtgaccagcgcccccgacaccagacccgcccccggcagcaccgccccccccgcccacggcgtgaccagcgcccccgacaccagacccgcccccggcagcaccgccccccccgcccacggcgtgaccagcgcccccgacaccagacccgcccccggcagcaccgccccccccgcccacggcgtgaccagcgcccccgacaccagacccgcccccggcagcaccgccccccccgcccacggcgtgaccagcgcccccgacaccagacccgcccccggcagcaccgccccccccgcccacggcgtgaccagcgcccccgacaacagacccgccctgggcagcaccgccccccccgtgcacaacgtgaccagcgccagcggcagcgccagcggcagcgccagcaccctggtgcacaacggcaccagcgccagagccaccaccacccccgccagcaagagcacccccttcagcatccccagccaccacagcgacacccccaccaccctggccagccacagcaccaagaccgacgccagcagcacccaccacagcagcgtgccccccctgaccagcagcaaccacagcaccagcccccagctgagcaccggcgtgagcttcttcttcctgagcttccacatcagcaacctgcagttcaacagcagcctggaggaccccagcaccgactactaccaggagctgcagagagacatcagcgagatgttcctgcagatctacaagcagggcggcttcctgggcctgagcaacatcaagttcagacccggcagcgtggtggtgcagctgaccctggccttcagagagggcaccatcaacgtgcacgacgtggagacccagttcaaccagtacaagaccgaggccgccagcagatacaacctgaccatcagcgacgtgagcgtgagcgacgtgcccttccccttcagcgcccagagcggcgccggcgtgcccggctggggcatcgccctgctggtgctggtgtgcgtgctggtggccctggccatcgtgtacctgatcgccctggccgtgtgccagtgcagaagaaagaactacggccagctggacatcttccccgccagagacacctaccaccccatgagcgagtaccccacctaccacacccacggcagatacgtgccccccagcagcaccgacagaagcccctacgagaaggtgagcgccggcaacggcggcagcagcctgagctacaccaaccccgccgtggccgccgccagcgccaacctgtga

SEQ ID NO: 2869 - RNA, 2136 nt, synthetic construct
  misc_feature 1..2136: note = NM_032853 variant
  source 1..2136: mol_type = other RNA
atgatggccgacgccaagtacgtgctgtgcagatgggagaagagactgtggcccgccaaggtgctggccagaaccgccaccagcaccaagaacaagagaagaaaggagtacttcctggccgtgcagatcctgagcctggaggagaagatcaaggtgaagagcaccgaggtggagatcctggagaagagccagatcgaggccatcgccagcagcctggccagccagaacgaggtgcccgccgcccccctggaggagctggcctacagaagaagcctgagagtggccctggacgtgctgagcgagggcagcatctggagccaggagagcagcgccggcaccggcagagccgacagaagcctgagaggcaagcccatggagcacgtgagcagcccctgcgacagcaacagcagcagcctgcccagaggcgacgtgctgggcagcagcagaccccacagaagaagaccctgcgtgcagcagagcctgagcagcagcttcacctgcgagaaggaccccgagtgcaaggtggaccacaagaagggcctgagaaagagcgagaaccccagaggccccctggtgctgcccgccggcggcggcgcccaggacgagagcggcagcagaatccaccacaagaactggaccctggccagcaagagaggcggcaacagcgcccagaaggccagcctgtgcctgaacggcagcagcctgagcgaggacgacaccgagagagacatgggcagcaagggcggcagctgggccgcccccagcctgcccagcggcgtgagagaggacgacccctgcgccaacgccgagggccacgaccccggcctgcccctgggcagcctgaccgccccccccgcccccgagcccagcgcctgcagcgagcccggcgagtgccccgccaagaagagacccagactggacggcagccagagaccccccgccgtgcagctggagcccatggccgccggcgccgcccccagccccggccccggccccggccccagagagagcgtgacccccagaagcaccgccagactgggccccccccccagccacgccagcgccgacgccaccagatgcctgccctgccccgacagccagaagctggagaaggagtgccagagcagcgaggagagcatgggcagcaacagcatgagaagcatcctggaggaggacgaggaggacgaggagccccccagagtgctgctgtaccacgagcccagaagcttcgaggtgggcatgctggtgtggcacaagcacaagaagtaccccttctggcccgccgtggtgaagagcgtgagacagagagacaagaaggccagcgtgctgtacatcgagggccacatgaaccccaagatgaagggcttcaccgtgagcctgaagagcctgaagcacttcgactgcaaggagaagcagaccctgctgaaccaggccagagaggacttcaaccaggacatcggctggtgcgtgagcctgatcaccgactacagagtgagactgggctgcggcagcttcgccggcagcttcctggagtactacgccgccgacatcagctaccccgtgagaaagagcatccagcaggacgtgctgggcaccaagctgccccagctgagcaagggcagccccgaggagcccgtggtgggctgccccctgggccagagacagccctgcagaaagatgctgcccgacagaagcagagccgccagagacagagccaaccagaagctggtggagtacatcgtgaaggccaagggcgccgagagccacctgagagccatcctgaagagcagaaagcccagcagatggctgcagaccttcctgagcagcagccagtacgtgacctgcgtggagacctacctggaggacgagggccagctggacctggtggtgaagtacctgcagggcgtgtaccaggaggtgggcgccaaggtgctgcagagaaccaacggcgacagaatcagattcatcctggacgtgctgctgcccgaggccatcatctgcgccatcagcgccgtggacgaggtggactacaagaccgccgaggagaagtacatcaagggccccagcctgagctacagagagaaggagatcttcgacaaccagctgctggaggagagaaacagaagaagaagatga

SEQ ID NO: 2870 - RNA, 438 nt, synthetic construct
  misc_feature 1..438: note = AAD44697 variant
  source 1..438: mol_type = other RNA
atgaccgtgcacaacctgtacctgttcgacagaaacggcgtgtgcctgcactacagcgagtggcacagaaagaagcaggccggcatccccaaggaggaggagtacaagctgatgtacggcatgctgttcagcatcagaagcttcgtgagcaagatgagccccctggacatgaaggacggcttcctggccttccagaccagcagatacaagctgcactactacgagacccccaccggcatcaaggtggtgatgaacaccgacctgggcgtgggccccatcagagacgtgctgcaccacatctacagcgccctgtacgtggagctggtggtgaagaaccccctgtgccccctgggccagaccgtgcagagcgagctgttcagaagcagactggacagctacgtgagaagcctgcccttcttcagcgccagagccggctga

SEQ ID NO: 2871 - RNA, 1395 nt, synthetic construct
  misc_feature 1..1395: note = AAH02712 variant
  source 1..1395: mol_type = other RNA
atgcccagctgcagcaccagcaccatgcccggcatgatctgcaagaaccccgacctggagttcgacagcctgcagccctgcttctaccccgacgaggacgacttctacttcggcggccccgacagcaccccccccggcgaggacatctggaagaagttcgagctgctgcccaccccccccctgagccccagcagaggcttcgccgagcacagcagcgagccccccagctgggtgaccgagatgctgctggagaacgagctgtggggcagccccgccgaggaggacgccttcggcctgggcggcctgggcggcctgacccccaaccccgtgatcctgcaggactgcatgtggagcggcttcagcgccagagagaagctggagagagccgtgagcgagaagctgcagcacggcagaggcccccccaccgccggcagcaccgcccagagccccggcgccggcgccgccagccccgccggcagaggccacggcggcgccgccggcgccggcagagccggcgccgccctgcccgccgagctggcccaccccgccgccgagtgcgtggaccccgccgtggtgttccccttccccgtgaacaagagagagcccgcccccgtgcccgccgcccccgccagcgcccccgccgccggccccgccgtggccagcggcgccggcatcgccgcccccgccggcgcccccggcgtggccccccccagacccggcggcagacagaccagcggcggcgaccacaaggccctgagcaccagcggcgaggacaccctgagcgacagcgacgacgaggacgacgaggaggaggacgaggaggaggagatcgacgtggtgaccgtggagaagagaagaagcagcagcaacaccaaggccgtgaccaccttcaccatcaccgtgagacccaagaacgccgccctgggccccggcagagcccagagcagcgagctgatcctgaagagatgcctgcccatccaccagcagcacaactacgccgcccccagcccctacgtggagagcgaggacgcccccccccagaagaagatcaagagcgaggccagccccagacccctgaagagcgtgatcccccccaaggccaagagcctgagccccagaaacagcgacagcgaggacagcgagagaagaagaaaccacaacatcctggagagacagagaagaaacgacctgagaagcagcttcctgaccctgagagaccacgtgcccgagctggtgaagaacgagaaggccgccaaggtggtgatcctgaagaaggccaccgagtacgtgcacagcctgcaggccgaggagcaccagctgctgctggagaaggagaagctgcaggccagacagcagcagctgctgaagaagatcgagcacgccagaacctgctga

SEQ ID NO: 2872 - RNA, 3132 nt, synthetic construct
  misc_feature 1..3132: note = AAC78645 variant
  source 1..3132: mol_type = other RNA
atgcccctgctggagggcagcgtgggcgtggaggacctggtgctgctggagcccctggtggaggagagcctgctgaagaacctgcagctgagatacgagaacaaggagatctacacctacatcggcaacgtggtgatcagcgtgaacccctaccagcagctgcccatctacggccccgagttcatcgccaagtaccaggactacaccttctacgagctgaagccccacatctacgccctggccaacgtggcctaccagagcctgagagacagagacagagaccagtgcatcctgatcaccggcgagagcggcagcggcaagaccgaggccagcaagctggtgatgagctacgtggccgccgtgtgcggcaagggcgagcaggtgaacagcgtgaaggagcagctgctgcagagcaaccccgtgctggaggccttcggcaacgccaagaccatcagaaacaacaacagcagcagattcggcaagtacatggacatcgagttcgacttcaagggcagccccctgggcggcgtgatcaccaactacctgctggagaagagcagactggtgaagcagctgaagggcgagagaaacttccacatcttctaccagctgctggccggcgccgacgagcagctgctgaaggccctgaagctggagagagacaccaccggctacgcctacctgaaccacgaggtgagcagagtggacggcatggacgacgccagcagcttcagagccgtgcagagcgccatggccgtgatcggcttcagcgaggaggagatcagacaggtgctggaggtgaccagcatggtgctgaagctgggcaacgtgctggtggccgacgagttccaggccagcggcatccccgccagcggcatcagagacggcagaggcgtgagagagatcggcgagatggtgggcctgaacagcgaggaggtggagagagccctgtgcagcagaaccatggagaccgccaaggagaaggtggtgaccgccctgaacgtgatgcaggcccagtacgccagagacgccctggccaagaacatctacagcagactgttcgactggatcgtgaacagaatcaacgagagcatcaaggtgggcatcggcgagaagaagaaggtgatgggcgtgctggacatctacggcttcgagatcctggaggacaacagcttcgagcagttcgtgatcaactactgcaacgagaagctgcagcaggtgttcatcgagatgaccctgaaggaggagcaggaggagtacaagagagagggcatcccctggaccaaggtggactacttcgacaacggcatcatctgcaagctgatcgagcacaaccagagaggcatcctggccatgctggacgaggagtgcctgagacccggcgtggtgagcgacagcaccttcctggccaagctgaaccagctgttcagcaagcacggccactacgagagcaaggtgacccagaacgcccagagacagtacgaccacaccatgggcctgagctgcttcagaatctgccactacgccggcaaggtgacctacaacgtgaccagcttcatcgacaagaacaacgacctgctgttcagagacctgctgcaggccatgtggaaggcccagcaccccctgctgagaagcctgttccccgagggcaaccccaagcaggccagcctgaagagaccccccaccgccggcgcccagttcaagagcagcgtggccatcctgatgaagaacctgtacagcaagagccccaactacatcagatgcatcaagcccaacgagcaccagcagagaggccagttcagcagcgacctggtggccacccaggccagatacctgggcctgctggagaacgtgagagtgagaagagccggctacgcccacagacagggctacggccccttcctggagagatacagactgctgagcagaagcacctggccccactggaacggcggcgacagagagggcgtggagaaggtgctgggcgagctgagcatgagcagcggcgagctggccttcggcaagaccaagatcttcatcagaagccccaagaccctgttctacctggaggagcagagaagactgagactgcagcagctggccaccctgatccagaagatctacagaggctggagatgcagaacccactaccagctgatgagaaagagccagatcctgatcagcagctggttcagaggcaacatgcagaagaagtgctacggcaagatcaaggccagcgtgctgctgatccaggccttcgtgagaggctggaaggccagaaagaactacagaaagtacttcagaagcgaggccgccctgaccctggccgacttcatctacaagagcatggtgcagaagttcctgctgggcctgaagaacaacctgcccagcaccaacgtgctggacaagacctggcccgccgccccctacaagtgcctgagcaccgccaaccaggagctgcagcagctgttctaccagtggaagtgcaagagattcagagaccagctgagccccaagcaggtggagatcctgagagagaagctgtgcgccagcgagctgttcaagggcaagaaggccagctacccccagagcgtgcccatccccttctgcggcgactacatcggcctgcagggcaaccccaagctgcagaagctgaagggcggcgaggagggccccgtgctgatggccgaggccgtgaagaaggtgaacagaggcaacggcaagaccagcagcagaatcctgctgctgaccaagggccacgtgatcctgaccgacaccaagaagagccaggccaagatcgtgatcggcctggacaacgtggccggcgtgagcgtgaccagcctgaaggacggcctgttcagcctgcacctgagcgagatgagcagcgtgggcagcaagggcgacttcctgctggtgagcgagcacgtgatcgagctgctgaccaagatgtacagagccgtgctggacgccacccagagacagctgaccgtgaccgtgaccgagaagttcagcgtgagattcaaggagaacagcgtggccgtgaaggtggtgcagggccccgccggcggcgacaacagcaagctgagatacaagaagaagggcagccactgcctggaggtgaccgtgcagtga

SEQ ID NO: 2873 - RNA, 3411 nt, synthetic construct
  misc_feature 1..3411: note = AAH53558 variant
  source 1..3411: mol_type = other RNA
atggccaagatggaggtgaagaccagcctgctggacaacatgatcggcgtgggcgacatggtgctgctggagcccctgaacgaggagaccttcatcaacaacctgaagaagagattcgaccacagcgagatctacacctacatcggcagcgtggtgatcagcgtgaacccctacagaagcctgcccatctacagccccgagaaggtggaggagtacagaaacagaaacttctacgagctgagcccccacatcttcgccctgagcgacgaggcctacagaagcctgagagaccaggacaaggaccagtgcatcctgatcaccggcgagagcggcgccggcaagaccgaggccagcaagctggtgatgagctacgtggccgccgtgtgcggcaagggcgccgaggtgaaccaggtgaaggagcagctgctgcagagcaaccccgtgctggaggccttcggcaacgccaagaccgtgagaaacgacaacagcagcagattcggcaagtacatggacatcgagttcgacttcaagggcgaccccctgggcggcgtgatcagcaactacctgctggagaagagcagagtggtgaagcagcccagaggcgagagaaacttccacgtgttctaccagctgctgagcggcgccagcgaggagctgctgaacaagctgaagctggagagagacttcagcagatacaactacctgagcctggacagcgccaaggtgaacggcgtggacgacgccgccaacttcagaaccgtgagaaacgccatgcagatcgtgggcttcatggaccacgaggccgagagcgtgctggccgtggtggccgccgtgctgaagctgggcaacatcgagttcaagcccgagagcagagtgaacggcctggacgagagcaagatcaaggacaagaacgagctgaaggagatctgcgagctgaccggcatcgaccagagcgtgctggagagagccttcagcttcagaaccgtggaggccaagcaggagaaggtgagcaccaccctgaacgtggcccaggcctactacgccagagacgccctggccaagaacctgtacagcagactgttcagctggctggtgaacagaatcaacgagagcatcaaggcccagaccaaggtgagaaagaaggtgatgggcgtgctggacatctacggcttcgagatcttcgaggacaacagcttcgagcagttcatcatcaactactgcaacgagaagctgcagcagatcttcatcgagctgaccctgaaggaggagcaggaggagtacatcagagaggacatcgagtggacccacatcgactacttcaacaacgccatcatctgcgacctgatcgagaacaacaccaacggcatcctggccatgctggacgaggagtgcctgagacccggcaccgtgaccgacgagaccttcctggagaagctgaaccaggtgtgcgccacccaccagcacttcgagagcagaatgagcaagtgcagcagattcctgaacgacaccagcctgccccacagctgcttcagaatccagcactacgccggcaaggtgctgtaccaggtggagggcttcgtggacaagaacaacgacctgctgtacagagacctgagccaggccatgtggaaggccagccacgccctgatcaagagcctgttccccgagggcaaccccgccaagatcaacctgaagagaccccccaccgccggcagccagttcaaggccagcgtggccaccctgatgaagaacctgcagaccaagaaccccaactacatcagatgcatcaagcccaacgacaagaaggccgcccacatcttcaacgaggccctggtgtgccaccagatcagatacctgggcctgctggagaacgtgagagtgagaagagccggctacgccttcagacaggcctacgagccctgcctggagagatacaagatgctgtgcaagcagacctggccccactggaagggccccgccagaagcggcgtggaggtgctgttcaacgagctggagatccccgtggaggagtacagcttcggcagaagcaagatcttcatcagaaaccccagaaccctgttcaagctggaggacctgagaaagcagagactggaggacctggccaccctgatccagaagatctacagaggctggaagtgcagaacccacttcctgctgatgaagaagagccagatcgtgatcgccgcctggtacagaagatacgcccagcagaagagataccagcagaccaagagcagcgccctggtgatccagagctacatcagaggctggaaggccagaaagatcctgagagagctgaagcaccagaagagatgcaaggaggccgtgaccaccatcgccgcctactggcacggcacccaggccagaagagagctgagaagactgaaggaggaggccagaaacaagcacgccatcgccgtgatctgggcctactggctgggcagcaaggccagaagagagctgaagagactgaaggaggaggccagaagaaagcacgccgtggccgtgatctgggcctactggctgggcctgaaggtgagaagagagtacagaaagttcttcagagccaacgccggcaagaagatctacgagttcaccctgcagagaatcgtgcagaagtacttcctggagatgaagaacaagatgcccagcctgagccccatcgacaagaactggcccagcagaccctacctgttcctggacagcacccacaaggagctgaagagaatcttccacctgtggagatgcaagaagtacagagaccagttcaccgaccagcagaagctgatctacgaggagaagctggaggccagcgagctgttcaaggacaagaaggccctgtaccccagcagcgtgggccagcccttccagggcgcctacctggagatcaacaagaaccccaagtacaagaagctgaaggacgccatcgaggagaagatcatcatcgccgaggtggtgaacaagatcaacagagccaacggcaagagcaccagcagaatcttcctgctgaccaacaacaacctgctgctggccgaccagaagagcggccagatcaagagcgaggtgcccctggtggacgtgaccaaggtgagcatgagcagccagaacgacggcttcttcgccgtgcacctgaaggagggcagcgaggccgccagcaagggcgacttcctgttcagcagcgaccacctgatcgagatggccaccaagctgtacagaaccaccctgagccagaccaagcagaagctgaacatcgagatcagcgacgagttcctggtgcagttcagacaggacaaggtgtgcgtgaagttcatccagggcaaccagaagaacggcagcgtgcccacctgcaagagaaagaacaacagactgctggaggtggccgtgccctga

SEQ ID NO: 2874 - RNA, 3192 nt, synthetic construct
  misc_feature 1..3192: note = CCDS42226.1 variant
  source 1..3192: mol_type = other RNA
atggccctgcaggtggagctggtgcccaccggcgagatcatcagagtggtgcacccccacagaccctgcaagctggccctgggcagcgacggcgtgagagtgaccatggagagcgccctgaccgccagagacagagtgggcgtgcaggacttcgtgctgctggagaacttcaccagcgaggccgccttcatcgagaacctgagaagaagattcagagagaacctgatctacacctacatcggccccgtgctggtgagcgtgaacccctacagagacctgcagatctacagcagacagcacatggagagatacagaggcgtgagcttctacgaggtgcccccccacctgttcgccgtggccgacaccgtgtacagagccctgagaaccgagagaagagaccaggccgtgatgatcagcggcgagagcggcgccggcaagaccgaggccaccaagagactgctgcagttctacgccgagacctgccccgcccccgagagaggcggcgccgtgagagacagactgctgcagagcaaccccgtgctggaggccttcggcaacgccaagaccctgagaaacgacaacagcagcagattcggcaagtacatggacgtgcagttcgacttcaagggcgcccccgtgggcggccacatcctgagctacctgctggagaagagcagagtggtgcaccagaaccacggcgagagaaacttccacatcttctaccagctgctggagggcggcgaggaggagaccctgagaagactgggcctggagagaaacccccagagctacctgtacctggtgaagggccagtgcgccaaggtgagcagcatcaacgacaagagcgactggaaggtggtgagaaaggccctgaccgtgatcgacttcaccgaggacgaggtggaggacctgctgagcatcgtggccagcgtgctgcacctgggcaacatccacttcgccgccaacgaggagagcaacgcccaggtgaccaccgagaaccagctgaagtacctgaccagactgctgagcgtggagggcagcaccctgagagaggccctgacccacagaaagatcatcgccaagggcgaggagctgctgagccccctgaacctggagcaggccgcctacgccagagacgccctggccaaggccgtgtacagcagaaccttcacctggctggtgggcaagatcaacagaagcctggccagcaaggacgtggagagccccagctggagaagcaccaccgtgctgggcctgctggacatctacggcttcgaggtgttccagcacaacagcttcgagcagttctgcatcaactactgcaacgagaagctgcagcagctgttcatcgagctgaccctgaagagcgagcaggaggagtacgaggccgagggcatcgcctgggagcccgtgcagtacttcaacaacaagatcatctgcgacctggtggaggagaagttcaagggcatcatcagcatcctggacgaggagtgcctgagacccggcgaggccaccgacctgaccttcctggagaagctggaggacaccgtgaagcaccacccccacttcctgacccacaagctggccgaccagagaaccagaaagagcctgggcagaggcgagttcagactgctgcactacgccggcgaggtgacctacagcgtgaccggcttcctggacaagaacaacgacctgctgttcagaaacctgaaggagaccatgtgcagcagcaagaaccccatcatgagccagtgcttcgacagaagcgagctgagcgacaagaagagacccgagaccgtggccacccagttcaagatgagcctgctgcagctggtggagatcctgcagagcaaggagcccgcctacgtgagatgcatcaagcccaacgacgccaagcagcccggcagattcgacgaggtgctgatcagacaccaggtgaagtacctgggcctgctggagaacctgagagtgagaagagccggcttcgcctacagaagaaagtacgaggccttcctgcagagatacaagagcctgtgccccgagacctggcccacctgggccggcagaccccaggacggcgtggccgtgctggtgagacacctgggctacaagcccgaggagtacaagatgggcagaaccaagatcttcatcagattccccaagaccctgttcgccaccgaggacgccctggaggtgagaagacagagcctggccaccaagatccaggccgcctggagaggcttccactggagacagaagttcctgagagtgaagagaagcgccatctgcatccagagctggtggagaggcaccctgggcagaagaaaggccgccaagagaaagtgggccgcccagaccatcagaagactgatcagaggcttcgtgctgagacacgcccccagatgccccgagaacgccttcttcctggaccacgtgagaaccagcttcctgctgaacctgagaagacagctgccccagaacgtgctggacaccagctggcccacccccccccccgccctgagagaggccagcgagctgctgagagagctgtgcatcaagaacatggtgtggaagtactgcagaagcatcagccccgagtggaagcagcagctgcagcagaaggccgtggccagcgagatcttcaagggcaagaaggacaactacccccagagcgtgcccagactgttcatcagcaccagactgggcaccgacgagatcagccccagagtgctgcaggccctgggcagcgagcccatccagtacgccgtgcccgtggtgaagtacgacagaaagggctacaagcccagaagcagacagctgctgctgacccccaacgccgtggtgatcgtggaggacgccaaggtgaagcagagaatcgactacgccaacctgaccggcatcagcgtgagcagcctgagcgacagcctgttcgtgctgcacgtgcagagagccgacaacaagcagaagggcgacgtggtgctgcagagcgaccacgtgatcgagaccctgaccaagaccgccctgagcgccaacagagtgaacagcatcaacatcaaccagggcagcatcaccttcgccggcggccccggcagagacggcaccatcgacttcacccccggcagcgagctgctgatcaccaaggccaagaacggccacctggccgtggtggcccccagactgaacagcagatga

SEQ ID NO: 2875 - RNA, 3021 nt, synthetic construct
  misc_feature 1..3021: note = AAI46764 variant
  source 1..3021: mol_type = other RNA
atggccgagcaggagagcctggagttcggcaaggccgacttcgtgctgatggacaccgtgagcatgcccgagttcatggccaacctgagactgagattcgagaagggcagaatctacaccttcatcggcgaggtggtggtgagcgtgaacccctacaagctgctgaacatctacggcagagacaccatcgagcagtacaagggcagagagctgtacgagagacccccccacctgttcgccatcgccgacgccgcctacaaggccatgaagagaagaagcaaggacacctgcatcgtgatcagcggcgagagcggcgccggcaagaccgaggccagcaagtacatcatgcagtacatcgccgccatcaccaaccccagccagagagccgaggtggagagagtgaagaacatgctgctgaagagcaactgcgtgctggaggccttcggcaacgccaagaccaacagaaacgacaacagcagcagattcggcaagtacatggacatcaacttcgacttcaagggcgaccccatcggcggccacatcaacaactacctgctggagaagagcagagtgatcgtgcagcagcccggcgagagaagcttccacagcttctaccagctgctgcagggcggcagcgagcagatgctgagaagcctgcacctgcagaagagcctgagcagctacaactacatccacgtgggcgcccagctgaagagcagcatcaacgacgccgccgagttcagagtggtggccgacgccatgaaggtgatcggcttcaagcccgaggagatccagaccgtgtacaagatcctggccgccatcctgcacctgggcaacctgaagttcgtggtggacggcgacacccccctgatcgagaacggcaaggtggtgagcatcatcgccgagctgctgagcaccaagaccgacatggtggagaaggccctgctgtacagaaccgtggccaccggcagagacatcatcgacaagcagcacaccgagcaggaggccagctacggcagagacgccttcgccaaggccatctacgagagactgttctgctggatcgtgaccagaatcaacgacatcatcgaggtgaagaactacgacaccaccatccacggcaagaacaccgtgatcggcgtgctggacatctacggcttcgagatcttcgacaacaacagcttcgagcagttctgcatcaactactgcaacgagaagctgcagcagctgttcatccagctggtgctgaagcaggagcaggaggagtaccagagagagggcatcccctggaagcacatcgactacttcaacaaccagatcatcgtggacctggtggagcagcagcacaagggcatcatcgccatcctggacgacgcctgcatgaacgtgggcaaggtgaccgacgagatgttcctggaggccctgaacagcaagctgggcaagcacgcccacttcagcagcagaaagctgtgcgccagcgacaagatcctggagttcgacagagacttcagaatcagacactacgccggcgacgtggtgtacagcgtgatcggcttcatcgacaagaacaaggacaccctgttccaggacttcaagagactgatgtacaacagcagcaaccccgtgctgaagaacatgtggcccgagggcaagctgagcatcaccgaggtgaccaagagacccctgaccgccgccaccctgttcaagaacagcatgatcgccctggtggacaacctggccagcaaggagccctactacgtgagatgcatcaagcccaacgacaagaagagcccccagatcttcgacgacgagagatgcagacaccaggtggagtacctgggcctgctggagaacgtgagagtgagaagagccggcttcgccttcagacagacctacgagaagttcctgcacagatacaagatgatcagcgagttcacctggcccaaccacgacctgcccagcgacaaggaggccgtgaagaagctgatcgagagatgcggcttccaggacgacgtggcctacggcaagaccaagatcttcatcagaacccccagaaccctgttcaccctggaggagctgagagcccagatgctgatcagaatcgtgctgttcctgcagaaggtgtggagaggcaccctggccagaatgagatacaagagaaccaaggccgccctgaccatcatcagatactacagaagatacaaggtgaagagctacatccacgaggtggccagaagattccacggcgtgaagaccatgagagactacggcaagcacgtgaagtggcccagcccccccaaggtgctgagaagattcgaggaggccctgcagaccatcttcaacagatggagagccagccagctgatcaagagcatccccgccagcgacctgccccaggtgagagccaaggtggccgccgtggagatgctgaagggccagagagccgacctgggcctgcagagagcctgggagggcaactacctggccagcaagcccgacaccccccagaccagcggcaccttcgtgcccgtggccaacgagctgaagagaaaggacaagtacatgaacgtgctgttcagctgccacgtgagaaaggtgaacagattcagcaaggtggaggacagagccatcttcgtgaccgacagacacctgtacaagatggaccccaccaagcagtacaaggtgatgaagaccatccccctgtacaacctgaccggcctgagcgtgagcaacggcaaggaccagctggtggtgttccacaccaaggacaacaaggacctgatcgtgtgcctgttcagcaagcagcccacccacgagagcagaatcggcgagctggtgggcgtgctggtgaaccacttcaagagcgagaagagacacctgcaggtgaacgtgaccaaccccgtgcagtgcagcctgcacggcaagaagtgcaccgtgagcgtggagaccagactgaaccagccccagcccgacttcaccaagaacagaagcggcttcatcctgagcgtgcccggcaactga

SEQ ID NO: 2876 - RNA, 3327 nt, synthetic construct
  misc_feature 1..3327: note = CCDS32254.1 variant
  source 1..3327: mol_type = other RNA
atgggcagcaagggcgtgtaccagtaccactggcagagccacaacgtgaagcacagcggcgtggacgacatggtgctgctgagcaagatcaccgagaacagcatcgtggagaacctgaagaagagatacatggacgactacatcttcacctacatcggcagcgtgctgatcagcgtgaaccccttcaagcagatgccctacttcggcgagaaggagatcgagatgtaccagggcgccgcccagtacgagaaccccccccacatctacgccctggccgacaacatgtacagaaacatgatcatcgacagagagaaccagtgcgtgatcatcagcggcgagagcggcgccggcaagaccgtggccgccaagtacatcatgagctacatcagcagagtgagcggcggcggcaccaaggtgcagcacgtgaaggacatcatcctgcagagcaaccccctgctggaggccttcggcaacgccaagaccgtgagaaacaacaacagcagcagattcggcaagtacttcgagatccagttcagccccggcggcgagcccgacggcggcaagatcagcaacttcctgctggagaagagcagagtggtgatgagaaaccccggcgagagaagcttccacatcttctaccagctgatcgagggcgccagcgccgagcagaagcacagcctgggcatcaccagcatggactactactactacctgagcctgagcggcagctacaaggtggacgacatcgacgacagaagagagttccaggagaccctgcacgccatgaacgtgatcggcatcttcgccgaggagcagaccctggtgctgcagatcgtggccggcatcctgcacctgggcaacatcagcttcaaggaggtgggcaactacgccgccgtggagagcgaggagttcctggccttccccgcctacctgctgggcatcaaccaggacagactgaaggagaagctgaccagcagacagatggacagcaagtggggcggcaagagcgagagcatccacgtgaccctgaacgtggagcaggcctgctacaccagagacgccctggccaaggccctgcacgccagagtgttcgacttcctggtggacagcatcaacaaggccatggagaaggaccacgaggagtacaacatcggcgtgctggacatctacggcttcgagatcttccagaagaacggcttcgagcagttctgcatcaacttcgtgaacgagaagctgcagcagatcttcatcgagctgaccctgaaggccgagcaggaggagtacgtgcaggagggcatcagatggacccccatcgagtacttcaacaacaagatcgtgtgcgacctgatcgagaacaaggtgaacccccccggcatcatgagcatcctggacgacgtgtgcgccaccatgcacgccgtgggcgagggcgccgaccagaccctgctgcagaagctgcagatgcagatcggcagccacgagcacttcaacagctggaaccagggcttcatcatccaccactacgccggcaaggtgagctacgacatggacggcttctgcgagagaaacagagacgtgctgttcatggacctgatcgagctgatgcagagcagcgagctgcccttcatcaagagcctgttccccgagaacctgcaggccgacaagaagggcagacccaccaccgccggcagcaagatcaagaagcaggccaacgacctggtgagcaccctgatgaagtgcaccccccactacatcagatgcatcaagcccaacgagaccaagaagcccagagactgggaggagagcagagtgaagcaccaggtggagtacctgggcctgaaggagaacatcagagtgagaagagccggctacgcctacagaagaatcttccagaagttcctgcagagatacgccatcctgaccaaggccacctggcccagctggcagggcgaggagaagcagggcgtgctgcacctgctgcagagcgtgaacatggacagcgaccagttccagctgggcagaagcaaggtgttcatcaaggcccccgagagcctgttcctgctggaggagatgagagagagaaagtacgacggctacgccagagtgatccagaagagctggagaaagttcgtggccagaaagaagtacgtgcagatgagagaggaggccagcgacctgctgctgaacaagaaggagagaagaagaaacagcatcaacagaaacttcatcggcgactacatcggcatggaggagcaccccgagctgcagcagttcgtgggcaagagagagaagatcgacttcgccgacaccgtgaccaagtacgacagaagattcaagggcgtgaagagagacctgctgctgacccccaagtgcctgtacctgatcggcagagagaaggtgaagcagggccccgacaagggcctggtgaaggaggtgctgaagagaaagatcgagatcgagagaatcctgagcgtgagcctgagcaccatgcaggacgacatcttcatcctgcacgagcaggagtacgacagcctgctggagagcgtgttcaagaccgagttcctgagcctgctggccaagagatacgaggagaagacccagaagcagctgcccctgaagttcagcaacaccctggagctgaagctgaagaaggagaactggggcccctggagcgccggcggcagcagacaggtgcagttccaccagggcttcggcgacctggccgtgctgaagcccagcaacaaggtgctgcaggtgagcatcggccccggcctgcccaagaacagcagacccaccagaagaaacaccacccagaacaccggctacagcagcggcacccagaacgccaactaccccgtgagagccgccccccccccccccggctaccaccagaacggcgtgatcagaaaccagtacgtgccctacccccacgcccccggcagccagagaagcaaccagaagagcctgtacaccagcatggccagaccccccctgcccagacagcagagcaccagcagcgacagagtgagccagacccccgagagcctggacttcctgaaggtgcccgaccagggcgccgccggcgtgagaagacagaccaccagcagacccccccccgccggcggcagacccaagccccagcccaagcccaagccccaggtgccccagtgcaaggccctgtacgcctacgacgcccaggacaccgacgagctgagcttcaacgccaacgacatcatcgacatcatcaaggaggaccccagcggctggtggaccggcagactgagaggcaagcagggcctgttccccaacaactacgtgaccaagatctga

SEQ ID NO: 2877 - RNA, 3297 nt, synthetic construct
  misc_feature 1..3297: note = AAH28071 variant
  source 1..3297: mol_type = other RNA
atgggcagcaaggagagattccactggcagagccacaacgtgaagcagagcggcgtggacgacatggtgctgctgccccagatcaccgaggacgccatcgccgccaacctgagaaagagattcatggacgactacatcttcacctacatcggcagcgtgctgatcagcgtgaaccccttcaagcagatgccctacttcaccgacagagagatcgacctgtaccagggcgccgcccagtacgagaaccccccccacatctacgccctgaccgacaacatgtacagaaacatgctgatcgactgcgagaaccagtgcgtgatcatcagcggcgagagcggcgccggcaagaccgtggccgccaagtacatcatgggctacatcagcaaggtgagcggcggcggcgagaaggtgcagcacgtgaaggacatcatcctgcagagcaaccccctgctggaggccttcggcaacgccaagaccgtgagaaacaacaacagcagcagattcggcaagtacttcgagatccagttcagcagaggcggcgagcccgacggcggcaagatcagcaacttcctgctggagaagagcagagtggtgatgcagaacgagaacgagagaaacttccacatctactaccagctgctggagggcgccagccaggagcagagacagaacctgggcctgatgacccccgactactactactacctgaaccagagcgacacctaccaggtggacggcaccgacgacagaagcgacttcggcgagaccctgagcgccatgcaggtgatcggcatcccccccagcatccagcagctggtgctgcagctggtggccggcatcctgcacctgggcaacatcagcttctgcgaggacggcaactacgccagagtggagagcgtggacctgctggccttccccgcctacctgctgggcatcgacagcggcagactgcaggagaagctgaccagcagaaagatggacagcagatggggcggcagaagcgagagcatcaacgtgaccctgaacgtggagcaggccgcctacaccagagacgccctggccaagggcctgtacgccagactgttcgacttcctggtggaggccatcaacagagccatgcagaagccccaggaggagtacagcatcggcgtgctggacatctacggcttcgagatcttccagaagaacggcttcgagcagttctgcatcaacttcgtgaacgagaagctgcagcagatcttcatcgagctgaccctgaaggccgagcaggaggagtacgtgcaggagggcatcagatggacccccatccagtacttcaacaacaaggtggtgtgcgacctgatcgagaacaagctgagcccccccggcatcatgagcgtgctggacgacgtgtgcgccaccatgcacgccaccggcggcggcgccgaccagaccctgctgcagaagctgcaggccgccgtgggcacccacgagcacttcaacagctggagcgccggcttcgtgatccaccactacgccggcaaggtgagctacgacgtgagcggcttctgcgagagaaacagagacgtgctgttcagcgacctgatcgagctgatgcagaccagcgagcaggccttcctgagaatgctgttccccgagaagctggacggcgacaagaagggcagacccagcaccgccggcagcaagatcaagaagcaggccaacgacctggtggccaccctgatgagatgcaccccccactacatcagatgcatcaagcccaacgagaccaagagacccagagactgggaggagaacagagtgaagcaccaggtggagtacctgggcctgaaggagaacatcagagtgagaagagccggcttcgcctacagaagacagttcgccaagttcctgcagagatacgccatcctgacccccgagacctggcccagatggagaggcgacgagagacagggcgtgcagcacctgctgagagccgtgaacatggagcccgaccagtaccagatgggcagcaccaaggtgttcgtgaagaaccccgagagcctgttcctgctggaggaggtgagagagagaaagttcgacggcttcgccagaaccatccagaaggcctggagaagacacgtggccgtgagaaagtacgaggagatgagagaggaggccagcaacatcctgctgaacaagaaggagagaagaagaaacagcatcaacagaaacttcgtgggcgactacctgggcctggaggagagacccgagctgagacagttcctgggcaagagagagagagtggacttcgccgacagcgtgaccaagtacgacagaagattcaagcccatcaagagagacctgatcctgacccccaagtgcgtgtacgtgatcggcagagagaaggtgaagaagggccccgagaagggccaggtgtgcgaggtgctgaagaagaaggtggacatccaggccctgagaggcgtgagcctgagcaccagacaggacgacttcttcatcctgcaggaggacgccgccgacagcttcctggagagcgtgttcaagaccgagttcgtgagcctgctgtgcaagagattcgaggaggccaccagaagacccctgcccctgaccttcagcgacaccctgcagttcagagtgaagaaggagggctggggcggcggcggcaccagaagcgtgaccttcagcagaggcttcggcgacctggccgtgctgaaggtgggcggcagaaccctgaccgtgagcgtgggcgacggcctgcccaagagcagcaagcccaccagaaagggcatggccaagggcaagcccagaagaagcagccaggcccccaccagagccgcccccgccccccccagaggcatggacagaaacggcgtgccccccagcgccagaggcggccccctgcccctggagatcatgagcggcggcggcacccacagaccccccagaggcccccccagcaccagcctgggcgccagcagaagacccagagccagaccccccagcgagcacaacaccgagttcctgaacgtgcccgaccagggcatggccggcatgcagagaaagagaagcgtgggccagagacccgtgcccggcgtgggcagacccaagccccagcccagaacccacggccccagatgcagagccctgtaccagtacgtgggccaggacgtggacgagctgagcttcaacgtgaacgaggtgatcgagatcctgatggaggaccccagcggctggtggaagggcagactgcacggccaggagggcctgttccccggcaactacgtggagaagatctga

SEQ ID NO: 2878 - RNA, 3057 nt, synthetic construct
  misc_feature 1..3057: note = CCDS34629.1 variant
  source 1..3057: mol_type = other RNA
atggaggacgaggagggccccgagtacggcaagcccgacttcgtgctgctggaccaggtgaccatggaggacttcatgagaaacctgcagctgagattcgagaagggcagaatctacacctacatcggcgaggtgctggtgagcgtgaacccctaccaggagctgcccctgtacggccccgaggccatcgccagataccagggcagagagctgtacgagagacccccccacctgtacgccgtggccaacgccgcctacaaggccatgaagcacagaagcagagacacctgcatcgtgatcagcggcgagagcggcgccggcaagaccgaggccagcaagcacatcatgcagtacatcgccgccgtgaccaaccccagccagagagccgaggtggagagagtgaaggacgtgctgctgaagagcacctgcgtgctggaggccttcggcaacgccagaaccaacagaaaccacaacagcagcagattcggcaagtacatggacatcaacttcgacttcaagggcgaccccatcggcggccacatccacagctacctgctggagaagagcagagtgctgaagcagcacgtgggcgagagaaacttccacgccttctaccagctgctgagaggcagcgaggacaagcagctgcacgagctgcacctggagagaaaccccgccgtgtacaacttcacccaccagggcgccggcctgaacatgaccgtgcacagcgccctggacagcgacgagcagagccaccaggccgtgaccgaggccatgagagtgatcggcttcagccccgaggaggtggagagcgtgcacagaatcctggccgccatcctgcacctgggcaacatcgagttcgtggagaccgaggagggcggcctgcagaaggagggcctggccgtggccgaggaggccctggtggaccacgtggccgagctgaccgccacccccagagacctggtgctgagaagcctgctggccagaaccgtggccagcggcggcagagagctgatcgagaagggccacaccgccgccgaggccagctacgccagagacgcctgcgccaaggccgtgtaccagagactgttcgagtgggtggtgaacagaatcaacagcgtgatggagcccagaggcagagaccccagaagagacggcaaggacaccgtgatcggcgtgctggacatctacggcttcgaggtgttccccgtgaacagcttcgagcagttctgcatcaactactgcaacgagaagctgcagcagctgttcatccagctgatcctgaagcaggagcaggaggagtacgagagagagggcatcacctggcagagcgtggagtacttcaacaacgccaccatcgtggacctggtggagagaccccacagaggcatcctggccgtgctggacgaggcctgcagcagcgccggcaccatcaccgacagaatcttcctgcagaccctggacatgcaccacagacaccacctgcactacaccagcagacagctgtgccccaccgacaagaccatggagttcggcagagacttcagaatcaagcactacgccggcgacgtgacctacagcgtggagggcttcatcgacaagaacagagacttcctgttccaggacttcaagagactgctgtacaacagcaccgaccccaccctgagagccatgtggcccgacggccagcaggacatcaccgaggtgaccaagagacccctgaccgccggcaccctgttcaagaacagcatggtggccctggtggagaacctggccagcaaggagcccttctacgtgagatgcatcaagcccaacgaggacaaggtggccggcaagctggacgagaaccactgcagacaccaggtggcctacctgggcctgctggagaacgtgagagtgagaagagccggcttcgccagcagacagccctacagcagattcctgctgagatacaagatgacctgcgagtacacctggcccaaccacctgctgggcagcgacaaggccgccgtgagcgccctgctggagcagcacggcctgcagggcgacgtggccttcggccacagcaagctgttcatcagaagccccagaaccctggtgaccctggagcagagcagagccagactgatccccatcatcgtgctgctgctgcagaaggcctggagaggcaccctggccagatggagatgcagaagactgagagccatctacaccatcatgagatggttcagaagacacaaggtgagagcccacctggccgagctgcagagaagattccaggccgccagacagccccccctgtacggcagagacctggtgtggcccctgccccccgccgtgctgcagcccttccaggacacctgccacgccctgttctgcagatggagagccagacagctggtgaagaacatcccccccagcgacatgccccagatcaaggccaaggtggccgccatgggcgccctgcagggcctgagacaggactggggctgcagaagagcctgggccagagactacctgagcagcgccaccgacaaccccaccgccagcagcctgttcgcccagagactgaagaccctgcaggacaaggacggcttcggcgccgtgctgttcagcagccacgtgagaaaggtgaacagattccacaagatcagaaacagagccctgctgctgaccgaccagcacctgtacaagctggaccccgacagacagtacagagtgatgagagccgtgcccctggaggccgtgaccggcctgagcgtgaccagcggcggcgaccagctggtggtgctgcacgccagaggccaggacgacctggtggtgtgcctgcacagaagcagaccccccctggacaacagagtgggcgagctggtgggcgtgctggccgcccactgccagggcgagggcagaaccctggaggtgagagtgagcgactgcatccccctgagccacagaggcgtgagaagactgatcagcgtggagcccagacccgagcagcccgagcccgacttcagatgcgccagaggcagcttcaccctgctgtggcccagcagatga

SEQ ID NO: 2879 - RNA, 3069 nt, synthetic construct
  misc_feature 1..3069: note = CCDS53826.1 variant
  source 1..3069: mol_type = other RNA
atggagggcgccctgaccgccagagacaaggtgggcgtgcaggacttcgtgctgctggacgcctacaccagcgagagcgccttcgtggacaacctgagaaagagattcagcgagaacctgatctacacctacatcggcaccctgctggtgagcgtgaacccctaccaggagctgggcatctacaccgtgagccagatggagctgtaccagggcgtgaacttcttcgagctgcccccccacgtgtacgccatcgccgacaacgcctacagaatgatgtgcgccgagctgaacaaccacttcatcctgatcagcggcgagagcggcgccggcaagaccgaggccagcaagaagatcctggagtacttcgccgtgacctgccccatgacccagagcctgcagatcgccagagacagactgctgttcagcaaccccgtgctggaggccttcggcaacgccagaaccctgagaaacgacaacagcagcagattcggcaagtacatggacatccagttcgacttccagggcatccccgtgggcggccacatcatcagctacctgatcgagaagagcagagtggtgtaccagaacgagggcgagagaaacttccacatcttctaccagctgctggccggcggcgaggaggagagactgagctacctgggcctggagagagacccccagctgtacaagtacctgagccagggccactgcgccaaggagagcagcatcagcgacaagaacgactggaagaccgtgagcaacgccttcagcgtgatcgacttcaccgaggccgacctggagaacctgttcggcatcatcgccagcgtgctgcacctgggcaacatcggcttcgaggaggacgaccagggctgcgccaccatccccgacacccacgagatcaagtggatcgccaagctgctgggcgtgcaccccagcgtgctgctggaggccctgacccacagaaagatcgaggccaagaccgaggaggtgatctgccccctgaccctggagctgagcgtgtacgccagagacgccatggccaaggccgtgtacggcagaaccttcacctggctggtgaacaagatcaacagcagcctggtgaacaaggacttcaccagaaagaccgtgatcggcctgctggacatctacggcttcgaggtgttcgacaagaacggcttcgagcagttctgcatcaactactgcaacgagaagctgcagcagctgctgatcgagagaaccctgaaggccgagcaggccgagtacgagatggagggcatcgagtgggagcccatcaagtacttcaacaacaagatcatctgcgacctggtggaggagagacacaagggcatcatcagcatcctggacgaggagtgcatcagacccggccccgccaccgacctgagcttcctggagaagctggaggagaaggtgggcaagcacgcccacttcgagaccagaaagctggccggccccaagggcagaaagagaatcggctggatggagttcagactgctgcactacgccggcgaggtgacctactgcaccaagggcttcctggagaagaacaacgacctgctgtacagacacctgaaggaggtgctgtgcaagagcaagaacatcatcctgagagagtgcttcctgctggccgagctggagaacagaagaagaccccccaccgtgggcacccagttcaagaacagcctgagcagcctgctggagaccctgatcagcaaggagcccagctacatcagatgcatcaagcccaacgacagaaaggagcccagcaagttcgacgacttcctgatcagacaccagatcaagtacctgggcctgatggagcacctgagagtgagaagagccggcttcgcctacagaagaaagtacgagcacttcctgcagagatacaagagcctgtgccccgacacctggccccactggcacggcccccccgccgagggcgtggagagactgatcaagtacatcggctacaagcccgaggagtacaagctgggcaagaccaagatcttcatcagattccccagaaccctgttcgccaccgaggacgccttcgagttcagcaagcaccagctggtggccagaatccaggccacctacaagagatgcctgggcagaagagagtacgtgaagaagagacaggccgccatcaagctggaggcccactggagaggcgccctggccagaaaggccatccagagaagaaagtgggccgtgagaatcatcagaaagttcatcaagggcttcatcagcagaaacaagcccctgtgccccgacaacgaggagttcatcgtgttcgtgagaaagaactacatcctgaacctgagataccacctgcccaagaccgtgctggacaagagctggctgagaccccccggcatcctggagaacgccagcgacctgctgagaaagatgtgcgtgagaaacctggtgcagaagtactgcagaggcatcaccgccgagagaaaggccatgatgcagcagaaggtggtgaccagcgagatcttcagaggcagaaaggacggctacaccgagagcctgaaccagcccttcgtgaacagcagaatcgacgagggcgacatcaaccccaaggtgctgcagctgatcagccacgagaagatccagtacggcgtgcccgtgatcaagtacgacagaaagggcttcaaggccagacagagacagctgatcctgacccagaaggccgcctacgtggtggagctggccaagatcaagcagaagatcgagtacagcgccctgaagggcgtgagcaccagcaacctgagcgacggcatcctggtgatccacgtgagccccgaggacagcaagcagaagggcgacgccgtgctgcagtgcggccacgtgttcgaggccgtgaccaagctggtgatgctggtgaagaaggagaacatcgtgaacgtggtgcagggcagcctgcagttcttcatcagccccggcaaggagggcaccatcgtgttcgacaccggcctggaggagcaggtgtacaagaacaagaacggccagctgaccgtggtgagcgtgagaagaaagagctga

SEQ ID NO: 2880 - RNA, 2379 nt, synthetic construct
  misc_feature 1..2379: note = BAC84969 variant
  source 1..2379: mol_type = other RNA
atgatcaccgtgaaccccgacggcaagatcatggtgagaagatgcctggtgaccctgagacccttcagactgttcgtgctgggcatcggcttcttcaccctgtgcttcctgatgaccagcctgggcggccagttcagcgccagaagactgggcgacagccccttcaccatcagaaccgaggtgatgggcggccccgagagcagaggcgtgctgagaaagatgagcgacctgctggagctgatggtgaagagaatggacgccctggccagactggagaacagcagcgagctgcacagagccggcggcgacctgcacttccccgccgacagaatgccccccggcgccggcctgatggagagaatccaggccatcgcccagaacgtgagcgacatcgccgtgaaggtggaccagatcctgagacacagcctgctgctgcacagcaaggtgagcgagggcagaagagaccagtgcgaggcccccagcgaccccaagttccccgactgcagcggcaaggtggagtggatgagagccagatggaccagcgacccctgctacgccttcttcggcgtggacggcaccgagtgcagcttcctgatctacctgagcgaggtggagtggttctgcccccccctgccctggagaaaccagaccgccgcccagagagcccccaagcccctgcccaaggtgcaggccgtgttcagaagcaacctgagccacctgctggacctgatgggcagcggcaaggagagcctgatcttcatgaagaagagaaccaagagactgaccgcccagtgggccctggccgcccagagactggcccagaagctgggcgccacccagagagaccagaagcagatcctggtgcacatcggcttcctgaccgaggagagcggcgacgtgttcagccccagagtgctgaagggcggccccctgggcgagatggtgcagtgggccgacatcctgaccgccctgtacgtgctgggccacggcctgagagtgaccgtgagcctgaaggagctgcagagcaacctgggcgtgccccccggcagaggcagctgccccctgaccatgcccctgcccttcgacctgatctacaccgactaccacggcctgcagcagatgaagagacacatgggcctgagcttcaagaagtacagatgcagaatcagagtgatcgacaccttcggcaccgagcccgcctacaaccacgaggagtacgccaccctgcacggctacagaaccaactggggctactggaacctgaaccccaagcagttcatgaccatgttcccccacacccccgacaacagcttcatgggcttcgtgagcgaggagctgaacgagaccgagaagagactgatcaagggcggcaaggccagcaacatggccgtggtgtacggcaaggaggccagcatctggaagctgcagggcaaggagaagttcctgggcatcctgaacaagtacatggagatccacggcaccgtgtactacgagagccagagaccccccgaggtgcccgccttcgtgaagaaccacggcctgctgccccagcccgagttccagcagctgctgagaaaggccaagctgttcatcggcttcggcttcccctacgagggccccgcccccctggaggccatcgccaacggctgcatcttcctgcagagcagattcagccccccccacagcagcctgaaccacgagttcttcagaggcaagcccaccagcagagaggtgttcagccagcacccctacgccgagaacttcatcggcaagccccacgtgtggaccgtggactacaacaacagcgaggagttcgaggccgccatcaaggccatcatgagaacccaggtggacccctacctgccctacgagtacacctgcgagggcatgctggagagaatccacgcctacatccagcaccaggacttctgcagagcccccgaccccgccctgcccgaggcccacgccccccagagccccttcgtgctggcccccaacgccacccacctggagtgggccagaaacaccagcctggcccccggcgcctggccccccgcccacgccctgagagcctggctggccgtgcccggcagagcctgcaccgacacctgcctggaccacggcctgatctgcgagcccagcttcttccccttcctgaacagccaggacgccttcctgaagctgcaggtgccctgcgacagcaccgagagcgagatgaaccacctgtaccccgccttcgcccagcccggccaggagtgctacctgcagaaggagcccctgctgttcagctgcgccggcagcaacaccaagtacagaagactgtgcccctgcagagacttcagaaagggccaggtggccctgtgccagggctgcctgtga

SEQ ID NO: 2881 - RNA, 36 nt, synthetic construct; identical to SEQ ID NO: 1369
  misc_feature 1..36: note = AF164963.1 variant
  source 1..36: mol_type = other RNA

SEQ ID NO: 2882 - RNA, 2211 nt, synthetic construct
  misc_feature 1..2211: note = AAI11702 variant
  source 1..2211: mol_type = other RNA
atgaaggagatgagcgccaacaccgtgctggacagccagagacagcagaagcactacggcatcaccagccccatcagcctggccagccccaaggagatcgaccacatctacacccagaagctgatcgacgccatgaagcccttcggcgtgttcgaggacgaggaggagctgaaccacagactggtggtgctgggcaagctgaacaacctggtgaaggagtggatcagcgacgtgagcgagagcaagaacctgccccccagcgtggtggccaccgtgggcggcaagatcttcaccttcggcagctacagactgggcgtgcacaccaagggcgccgacatcgacgccctgtgcgtggcccccagacacgtggagagaagcgacttcttccagagcttcttcgagaagctgaagcaccaggacggcatcagaaacctgagagccgtggaggacgccttcgtgcccgtgatcaagttcgagttcgacggcatcgagatcgacctggtgttcgccagactggccatccagaccatcagcgacaacctggacctgagagacgacagcagactgagaagcctggacatcagatgcatcagaagcctgaacggctgcagagtgaccgacgagatcctgcacctggtgcccaacaaggagaccttcagactgaccctgagagccgtgaagctgtgggccaagagaagaggcatctacagcaacatgctgggcttcctgggcggcgtgagctgggccatgctggtggccagaacctgccagctgtaccccaacgccgccgccagcaccctggtgcacaagttcttcctggtgttcagcaagtgggagtggcccaaccccgtgctgctgaagcagcccgaggagagcaacctgaacctgcccgtgtgggaccccagagtgaaccccagcgacagataccacctgatgcccatcatcacccccgcctacccccagcagaacagcacctacaacgtgagcaccagcaccagaaccgtgatggtggaggagttcaagcagggcctggccgtgaccgacgagatcctgcagggcaagagcgactggagcaagctgctggagccccccaacttcttccagaagtacagacactacatcgtgctgaccgccagcgccagcaccgaggagaaccacctggagtgggtgggcctggtggagagcaagatcagagtgctggtgggcaacctggagagaaacgagttcatcaccctggcccacgtgaacccccagagcttccccggcaacaaggagcaccacaaggacaacaactacgtgagcatgtggttcctgggcatcatcttcagaagagtggagaacgccgagagcgtgaacatcgacctgacctacgacatccagagcttcaccgacaccgtgtacagacaggccaacaacatcaacatgctgaaggagggcatgaagatcgaggccacccacgtgaagaagaagcagctgcaccactacctgcccgccgagatcctgcagaagaagaagaagcagagcctgagcgacgtgaacagaagcagcggcggcctgcagagcaagagactgagcctggacagcagctgcctggacagcagcagagacaccgacaacggcacccccttcaacagccccgccagcaagagcgacagccccagcgtgggcgagaccgagagaaacagcgccgagcccgccgccgtgatcgtggagaagcccctgagcgtgccccccgcccagggcctgagcatccccgtgatcggcgccaaggtggacagcaccgtgaagaccgtgagcccccccaccgtgtgcaccatccccaccgtggtgggcagaaacgtgatccccagaatcaccaccccccacaaccccgcccagggccagccccacctgaacggcatgagcaacatcaccaagaccgtgacccccaagagaagccacagccccagcatcgacggcacccccaagagactgaaggacgtggagaagttcatcagactggagagcaccttcaaggaccccagaaccgccgaggagagaaagagaaagagcgtggacgccatcggcggcgagagcatgcccatccccaccatcgacaccagcagaaagaagagactgcccagcaaggagctgcccgacagcagcagccccgtgcccgccaacaacatcagagtgatcaagaacagcatcagactgaccctgaacagatga

SEQ ID NO: 2883 - RNA, 1377 nt, synthetic construct
  misc_feature 1..1377: note = AAG28389 variant
  source 1..1377: mol_type = other RNA
atgagcaccgagggcggcttcggcggcaccagcagcagcgacgcccagcagagcctgcagagcttctggcccagagtgatggaggagatcagaaacctgaccgtgaaggacttcagagtgcaggagctgcccctggccagaatcaagaagatcatgaagctggacgaggacgtgaagatgatcagcgccgaggcccccgtgctgttcgccaaggccgcccagatcttcatcaccgagctgaccctgagagcctggatccacaccgaggacaacaagagaagaaccctgcagagaaacgacatcgccatggccatcaccaagttcgaccagttcgacttcctgatcgacatcgtgcccagagacgagctgaagccccccaagagacaggaggaggtgagacagagcgtgacccccgccgagcccgtgcagtactacttcaccctggcccagcagcccaccgccgtgcaggtgcagggccagcagcagggccagcagaccaccagcagcaccaccaccatccagcccggccagatcatcatcgcccagccccagcagggccagaccacccccgtgaccatgcaggtgggcgagggccagcaggtgcagatcgtgcaggcccagccccagggccaggcccagcaggcccagagcggcaccggccagaccatgcaggtgatgcagcagatcatcaccaacaccggcgagatccagcagatccccgtgcagctgaacgccggccagctgcagtacatcagactggcccagcccgtgagcggcacccaggtggtgcagggccagatccagaccctggccaccaacgcccagcagggccagagaaacgccagccagggcaagcccagaagatgcctgaaggagaccctgcagatcacccagaccgaggtgcagcagggccagcagcagttcagccagttcaccgacggccagagaaacagcgtgcagcaggccagagtgagcgagctgaccggcgaggccgagcccagagaggtgaaggccaccggcaacagcaccccctgcaccagcagcctgcccaccacccacccccccagccacagagccggcgccagctgcgtgtgctgcagccagccccagcagagcagcaccagccccccccccagcgacgccctgcagtgggtggtggtggaggtgagcggcacccccaaccagctggagacccacagagagctgcacgcccccctgcccggcatgaccagcctgagccccctgcaccccagccagcagctgtaccagatccagcaggtgaccatgcccgccggccaggacctggcccagcccatgttcatccagagcgccaaccagcccagcgacggccaggccccccaggtgaccggcgactga

SEQ ID NO: 2884 - RNA, 2802 nt, synthetic construct
  misc_feature 1..2802: note = CCDS33423.1 variant
  source 1..2802: mol_type = other RNA
atgagaatggccgccaccgcctgggccggcctgcagggcccccccctgcccaccctgtgccccgccgtgagaaccggcctgtactgcagagaccaggcccacgccgagagatgggccatgaccagcgagaccagcagcggcagccactgcgccagaagcagaatgctgagaagaagagcccaggaggaggacagcaccgtgctgatcgacgtgagcccccccgaggccgagaagagaggcagctacggcagcaccgcccacgccagcgagcccggcggccagcaggccgccgcctgcagagccggcagccccgccaagcccagaatcgccgacttcgtgctggtgtgggaggaggacctgaagctggacagacagcaggacagcgccgccagagacagaaccgacatgcacagaacctggagagagaccttcctggacaacctgagagccgccggcctgtgcgtggaccagcaggacgtgcaggacggcaacaccaccgtgcactacgccctgctgagcgccagctgggccgtgctgtgctactacgccgaggacctgagactgaagctgcccctgcaggagctgcccaaccaggccagcaactggagcgccggcctgctggcctggctgggcatccccaacgtgctgctggaggtggtgcccgacgtgccccccgagtactacagctgcagattcagagtgaacaagctgcccagattcctgggcagcgacaaccaggacaccttcttcaccagcaccaagagacaccagatcctgttcgagatcctggccaagaccccctacggccacgagaagaagaacctgctgggcatccaccagctgctggccgagggcgtgctgagcgccgccttccccctgcacgacggccccttcaagaccccccccgagggcccccaggcccccagactgaaccagagacaggtgctgttccagcactgggccagatggggcaagtggaacaagtaccagcccctggaccacgtgagaagatacttcggcgagaaggtggccctgtacttcgcctggctgggcttctacaccggctggctgctgcccgccgccgtggtgggcaccctggtgttcctggtgggctgcttcctggtgttcagcgacatccccacccaggagctgtgcggcagcaaggacagcttcgagatgtgccccctgtgcctggactgccccttctggctgctgagcagcgcctgcgccctggcccaggccggcagactgttcgaccacggcggcaccgtgttcttcagcctgttcatggccctgtgggccgtgctgctgctggagtactggaagagaaagagcgccaccctggcctacagatgggactgcagcgactacgaggacaccgaggagagacccagaccccagttcgccgccagcgcccccatgaccgcccccaaccccatcaccggcgaggacgagccctacttccccgagagaagcagagccagaagaatgctggccggcagcgtggtgatcgtggtgatggtggccgtggtggtgatgtgcctggtgagcatcatcctgtacagagccatcatggccatcgtggtgagcagaagcggcaacaccctgctggccgcctgggccagcagaatcgccagcctgaccggcagcgtggtgaacctggtgttcatcctgatcctgagcaagatctacgtgagcctggcccacgtgctgaccagatgggagatgcacagaacccagaccaagttcgaggacgccttcaccctgaaggtgttcatcttccagttcgtgaacttctacagcagccccgtgtacatcgccttcttcaagggcagattcgtgggctaccccggcaactaccacaccctgttcggcgtgagaaacgaggagtgcgccgccggcggctgcctgatcgagctggcccaggagctgctggtgatcatggtgggcaagcaggtgatcaacaacatgcaggaggtgctgatccccaagctgaagggctggtggcagaagttcagactgagaagcaagaagagaaaggccggcgccagcgccggcgccagccagggcccctgggaggacgactacgagctggtgccctgcgagggcctgttcgacgagtacctggagatggtgctgcagttcggcttcgtgaccatcttcgtggccgcctgccccctggcccccctgttcgccctgctgaacaactgggtggagatcagactggacgccagaaagttcgtgtgcgagtacagaagacccgtggccgagagagcccaggacatcggcatctggttccacatcctggccggcctgacccacctggccgtgatcagcaacgccttcctgctggccttcagcagcgacttcctgcccagagcctactacagatggaccagagcccacgacctgagaggcttcctgaacttcaccctggccagagcccccagcagcttcgccgccgcccacaacagaacctgcagatacagagccttcagagacgacgacggccactacagccagacctactggaacctgctggccatcagactggccttcgtgatcgtgttcgagcacgtggtgttcagcgtgggcagactgctggacctgctggtgcccgacatccccgagagcgtggagatcaaggtgaagagagagtactacctggccaagcaggccctggccgagaacgaggtgctgttcggcaccaacggcaccaaggacgagcagcccgagggcagcgagctgagcagccactggacccccttcaccgtgcccaaggccagccagctgcagcagtga

SEQ ID NO: 2885 - RNA, 885 nt, synthetic construct
  misc_feature 1..885: note = AAA36380 variant
  source 1..885: mol_type = other RNA
atggaggacagcatggacatggacatgagccccctgagaccccagaactacctgttcggctgcgagctgaaggccgacaaggactaccacttcaaggtggacaacgacgagaacgagcaccagctgagcctgagaaccgtgagcctgggcgccggcgccaaggacgagctgcacatcgtggaggccgaggccatgaactacgagggcagccccatcaaggtgaccctggccaccctgaagatgagcgtgcagcccaccgtgagcctgggcggcttcgagatcaccccccccgtggtgctgagactgaagtgcggcagcggccccgtgcacatcagcggccagcacctggtggccgtggaggaggacgccgagagcgaggacgaggaggaggaggacgtgaagctgctgagcatcagcggcaagagaagcgcccccggcggcggcagcaaggtgccccagaagaaggtgaagctggccgccgacgaggacgacgacgacgacgacgaggaggacgacgacgaggacgacgacgacgacgacttcgacgacgaggaggccgaggagaaggcccccgtgaagaagagcatcagagacacccccgccaagaacgcccagaagagcaaccagaacggcaaggacagcaagcccagcagcacccccagaagcaagggccaggagagcttcaagaagcaggagaagacccccaagacccccaagggccccagcagcgtggaggacatcaaggccaagatgcaggccagcatcgagaagggcggcagcctgcccaaggtggaggccaagttcatcaactacgtgaagaactgcttcagaatgaccgaccaggaggccatccaggacctgtggcagtggagaaagagcctgtga

SEQ ID NO: 2886 - RNA, 3915 nt, synthetic construct
  misc_feature 1..3915: note = CCDS47686.1 variant
  source 1..3915: mol_type = other RNA
atgcagctgaagatcatgcccaagaagaagagactgagcgccggcagagtgcccctgatcctgttcctgtgccagatgatcagcgccctggaggtgcccctggaccccaagctgctggaggacctggtgcagccccccaccatcacccagcagagccccaaggactacatcatcgaccccagagagaacatcgtgatccagtgcgaggccaagggcaagcccccccccagcttcagctggaccagaaacggcacccacttcgacatcgacaaggaccccctggtgaccatgaagcccggcaccggcaccctgatcatcaacatcatgagcgagggcaaggccgagacctacgagggcgtgtaccagtgcaccgccagaaacgagagaggcgccgccgtgagcaacaacatcgtggtgagacccagcagaagccccctgtggaccaaggagaagctggagcccatcaccctgcagagcggccagagcctggtgctgccctgcagaccccccatcggcctgcccccccccatcatcttctggatggacaacagcttccagagactgccccagagcgagagagtgagccagggcctgaacggcgacctgtacttcagcaacgtgctgcccgaggacaccagagaggactacatctgctacgccagattcaaccacacccagaccatccagcagaagcagcccatcagcgtgaaggtgatcagcgtggacgagctgaacgacaccatcgccgccaacctgagcgacaccgagttctacggcgccaagagcagcagagagagaccccccaccttcctgacccccgagggcaacgccagcaacaaggaggagctgagaggcaacgtgctgagcctggagtgcatcgccgagggcctgcccacccccatcatctactgggccaaggaggacggcatgctgcccaagaacagaaccgtgtacaagaacttcgagaagaccctgcagatcatccacgtgagcgaggccgacagcggcaactaccagtgcatcgccaagaacgccctgggcgccatccaccacaccatcagcgtgagagtgaaggccgccccctactggatcaccgccccccagaacctggtgctgagccccggcgaggacggcaccctgatctgcagagccaacggcaaccccaagcccagaatcagctggctgaccaacggcgtgcccatcgagatcgcccccgacgaccccagcagaaagatcgacggcgacaccatcatcttcagcaacgtgcaggagagaagcagcgccgtgtaccagtgcaacgccagcaacgagtacggctacctgctggccaacgccttcgtgaacgtgctggccgagccccccagaatcctgacccccgccaacaccctgtaccaggtgatcgccaacagacccgccctgctggactgcgccttcttcggcagccccctgcccaccatcgagtggttcaagggcgccaagggcagcgccctgcacgaggacatctacgtgctgcacgagaacggcaccctggagatccccgtggcccagaaggacagcaccggcacctacacctgcgtggccagaaacaagctgggcatggccaagaacgaggtgcacctggagatcaaggaccccacctggatcgtgaagcagcccgagtacgccgtggtgcagagaggcagcatggtgagcttcgagtgcaaggtgaagcacgaccacaccctgagcctgaccgtgctgtggctgaaggacaacagagagctgcccagcgacgagagattcaccgtggacaaggaccacctggtggtggccgacgtgagcgacgacgacagcggcacctacacctgcgtggccaacaccaccctggacagcgtgagcgccagcgccgtgctgagcgtggtggcccccacccccacccccgcccccgtgtacgacgtgcccaacccccccttcgacctggagctgaccgaccagctggacaagagcgtgcagctgagctggacccccggcgacgacaacaacagccccatcaccaagttcatcatcgagtacgaggacgccatgcacaagcccggcctgtggcaccaccagaccgaggtgagcggcacccagaccaccgcccagctgaagctgagcccctacgtgaactacagcttcagagtgatggccgtgaacagcatcggcaagagcctgcccagcgaggccagcgagcagtacctgaccaaggccagcgagcccgacaagaaccccaccgccgtggagggcctgggcagcgagcccgacaacctggtgatcacctggaagcccctgaacggcttcgagagcaacggccccggcctgcagtacaaggtgagctggagacagaaggacggcgacgacgagtggaccagcgtggtggtggccaacgtgagcaagtacatcgtgagcggcacccccaccttcgtgccctacctgatcaaggtgcaggccctgaacgacatgggcttcgcccccgagcccgccgtggtgatgggccacagcggcgaggacctgcccatggtggcccccggcaacgtgagagtgaacgtggtgaacagcaccctggccgaggtgcactgggaccccgtgcccctgaagagcatcagaggccacctgcagggctacagaatctactactggaagacccagagcagcagcaagagaaacagaagacacatcgagaagaagatcctgaccttccagggcagcaagacccacggcatgctgcccggcctggagcccttcagccactacaccctgaacgtgagagtggtgaacggcaagggcgagggccccgccagccccgacagagtgttcaacacccccgagggcgtgcccagcgcccccagcagcctgaagatcgtgaaccccaccctggacagcctgaccctggagtgggacccccccagccaccccaacggcatcctgaccgagtacaccctgaagtaccagcccatcaacagcacccacgagctgggccccctggtggacctgaagatccccgccaacaagaccagatggaccctgaagaacctgaacttcagcaccagatacaagttctacttctacgcccagaccagcgccggcagcggcagccagatcaccgaggaggccgtgaccaccgtggacgaggccggcatcctgccccccgacgtgggcgccggcaaggtgcaggccgtgaaccccagaatcagcaacctgaccgccgccgccgccgagacctacgccaacatcagctgggagtacgagggccccgagcacgtgaacttctacgtggagtacggcgtggccggcagcaaggaggagtggagaaaggagatcgtgaacggcagcagaagcttcttcggcctgaagggcctgatgcccggcaccgcctacaaggtgagagtgggcgccgtgggcgacagcggcttcgtgagcagcgaggacgtgttcgagaccggccccgccatggccagcagacaggtggacatcgccacccagggctggttcatcggcctgatgtgcgccgtggccctgctgatcctgatcctgctgatcgtgtgcttcatcagaagaaacaagggcggcaagtaccccgtgaaggagaaggaggacgcccacgccgaccccgagatccagcccatgaaggaggacgacggcaccttcggcgagtacagcgacgccgaggaccacaagcccctgaagaagggcagcagaacccccagcgacagaaccgtgaagaaggaggacagcgacgacagcctggtggactacggcgagggcgtgaacggccagttcaacgaggacggcagcttcatcggccagtacagcggcaagaaggagaaggagcccgccgagggcaacgagagcagcgaggcccccagccccgtgaacgccatgaacagcttcgtgtga

SEQ ID NO: 2887 - RNA, 1305 nt, synthetic construct
  misc_feature 1..1305: note = AAB51320 variant
  source 1..1305: mol_type = other RNA
atgagcatcgagaagatctgggccagagagatcctggacagcagaggcaaccccaccgtggaggtggacctgtacaccgccaagggcctgttcagagccgccgtgcccagcggcgccagcaccggcatctacgaggccctggagctgagagacggcgacaagcagagatacctgggcaagggcgtgctgaaggccgtggaccacatcaacagcaccatcgcccccgccctgatcagcagcggcctgagcgtggtggagcaggagaagctggacaacctgatgctggagctggacggcaccgagaacaagagcaagttcggcgccaacgccatcctgggcgtgagcctggccgtgtgcaaggccggcgccgccgagagagagctgcccctgtacagacacatcgcccagctggccggcaacagcgacctgatcctgcccgtgcccgccttcaacgtgatcaacggcggcagccacgccggcaacaagctggccatgcaggagttcatgatcctgcccgtgggcgccgagagcttcagagacgccatgagactgggcgccgaggtgtaccacaccctgaagggcgtgatcaaggacaagtacggcaaggacgccaccaacgtgggcgacgagggcggcttcgcccccaacatcctggagaacagcgaggccctggagctggtgaaggaggccatcgacaaggccggctacaccgagaagatcgtgatcggcatggacgtggccgccagcgagttctacagagacggcaagtacgacctggacttcaagagccccaccgaccccagcagatacatcaccggcgaccagctgggcgccctgtaccaggacttcgtgagagactaccccgtggtgagcatcgaggaccccttcgaccaggacgactgggccgcctggagcaagttcaccgccaacgtgggcatccagatcgtgggcgacgacctgaccgtgaccaaccccaagagaatcgagagagccgtggaggagaaggcctgcaactgcctgctgctgaaggtgaaccagatcggcagcgtgaccgaggccatccaggcctgcaagctggcccaggagaacggctggggcgtgatggtgagccacagaagcggcgagaccgaggacaccttcatcgccgacctggtggtgggcctgtgcaccggccagatcaagaccggcgccccctgcagaagcgagagactggccaagtacaaccagctgatgagaatcgaggaggagctgggcgacgaggccagattcgccggccacaacttcagaaaccccagcgtgctgtga

SEQ ID NO: 2888 - RNA, 1395 nt, synthetic construct
  misc_feature 1..1395: note = AAH08489 variant
  source 1..1395: mol_type = other RNA
atggagaccctgagcttccccagatacaacgtggccgagatcgtgatccacatcagaaacaagatcctgaccggcgccgacggcaagaacctgaccaagaacgacctgtaccccaaccccaagcccgaggtgctgcacatgatctacatgagagccctgcagatcgtgtacggcatcagactggagcacttctacatgatgcccgtgaacagcgaggtgatgtacccccacctgatggagggcttcctgcccttcagcaacctggtgacccacctggacagcttcctgcccatctgcagagtgaacgacttcgagaccgccgacatcctgtgccccaaggccaagagaaccagcagattcctgagcggcatcatcaacttcatccacttcagagaggcctgcagagagacctacatggagttcctgtggcagtacaagagcagcgccgacaagatgcagcagctgaacgccgcccaccaggaggccctgatgaagctggagagactggacagcgtgcccgtggaggagcaggaggagttcaagcagctgagcgacggcatccaggagctgcagcagagcctgaaccaggacttccaccagaagaccatcgtgctgcaggagggcaacagccagaagaagagcaacatcagcgagaagaccaagagactgaacgagctgaagctgagcgtggtgagcctgaaggagatccaggagagcctgaagaccaagatcgtggacagccccgagaagctgaagaactacaaggagaagatgaaggacaccgtgcagaagctgaagaacgccagacaggaggtggtggagaagtacgagatctacggcgacagcgtggactgcctgcccagctgccagctggaggtgcagctgtaccagaagaagatccaggacctgagcgacaacagagagaagctggccagcatcctgaaggagagcctgaacctggaggaccagatcgagagcgacgagagcgagctgaagaagctgaagaccgaggagaacagcttcaagagactgatgatcgtgaagaaggagaagctggccaccgcccagttcaagatcaacaagaagcacgaggacgtgaagcagtacaagagaaccgtgatcgaggactgcaacaaggtgcaggagaagagaggcgccgtgtacgagagagtgaccaccatcaaccaggagatccagaagatcaagctgggcatccagcagctgaaggacgccgccgagagagagaagctgaagagccaggagatcttcctgaacctgaagaccgccctggagaagtaccacgacggcatcgagaaggccgccgaggacagctacgccaagatcgacgagaagaccgccgagctgaagagaaagatgttcaagatgagcacctga

SEQ ID NO: 2889 - RNA, 543 nt, synthetic construct
  misc_feature 1..543: note = AAB49693 variant
  source 1..543: mol_type = other RNA
atgcaggccgagggcagaggcaccggcggcagcaccggcgacgccgacggccccggcggccccggcatccccgacggccccggcggcaacgccggcggccccggcgaggccggcgccaccggcggcagaggccccagaggcgccggcgccgccagagccagcggccccggcggcggcgcccccagaggcccccacggcggcgccgccagcggcctgaacggctgctgcagatgcggcgccagaggccccgagagcagactgctggagttctacctggccatgcccttcgccacccccatggaggccgagctggccagaagaagcctggcccaggacgccccccccctgcccgtgcccggcgtgctgctgaaggagttcaccgtgagcggcaacatcctgaccatcagactgaccgccgccgaccacagacagctgcagctgagcatcagcagctgcctgcagcagctgagcctgctgatgtggatcacccagtgcttcctgcccgtgttcctggcccagccccccagcggccagagaagatga

SEQ ID NO: 2890 - RNA, 1215 nt, synthetic construct
  misc_feature 1..1215: note = CCDS14134.2 variant
  source 1..1215: mol_type = other RNA
atggccagccccagactgggcaccttctgctgccccaccagagacgccgccacccagctggtgctgagcttccagcccagagccttccacgccctgtgcctgggcagcggcggcctgagactggccctgggcctgctgcagctgctgcccggcagaagacccgccggccccggcagccccgccaccagcccccccgccagcgtgagaatcctgagagccgccgccgcctgcgacctgctgggctgcctgggcatggtgatcagaagcaccgtgtggctgggcttccccaacttcgtggacagcgtgagcgacatgaaccacaccgagatctggcccgccgccttctgcgtgggcagcgccatgtggatccagctgctgtacagcgcctgcttctggtggctgttctgctacgccgtggacgcctacctggtgatcagaagaagcgccggcctgagcaccatcctgctgtaccacatcatggcctggggcctggccaccctgctgtgcgtggagggcgccgccatgctgtactaccccagcgtgagcagatgcgagagaggcctggaccacgccatcccccactacgtgaccatgtacctgcccctgctgctggtgctggtggccaaccccatcctgttccagaagaccgtgaccgccgtggccagcctgctgaagggcagacagggcatctacaccgagaacgagagaagaatgggcgccgtgatcaagatcagattcttcaagatcatgctggtgctgatcatctgctggctgagcaacatcatcaacgagagcctgctgttctacctggagatgcagaccgacatcaacggcggcagcctgaagcccgtgagaaccgccgccaagaccacctggttcatcatgggcatcctgaaccccgcccagggcttcctgctgagcctggccttctacggctggaccggctgcagcctgggcttccagagccccagaaaggagatccagtgggagagcctgaccaccagcgccgccgagggcgcccaccccagccccctgatgccccacgagaaccccgccagcggcaaggtgagccaggtgggcggccagaccagcgacgaggccctgagcatgctgagcgagggcagcgacgccagcaccatcgagatccacaccgccagcgagagctgcaacaagaacgagggcgaccccgccctgcccacccacggcgacctgtga

SEQ ID NO: 2891 - RNA, 3141 nt, synthetic construct
  misc_feature 1..3141: note = AAH38180 variant
  source 1..3141: mol_type = other RNA
atggccagcagcgtgggcaacgtggccgacagcaccgagcccaccaagagaatgctgagcttccagggcctggccgagctggcccacagagagtaccaggccggcgacttcgaggccgccgagagacactgcatgcagctgtggagacaggagcccgacaacaccggcgtgctgctgctgctgagcagcatccacttccagtgcagaagactggacagaagcgcccacttcagcaccctggccatcaagcagaaccccctgctggccgaggcctacagcaacctgggcaacgtgtacaaggagagaggccagctgcaggaggccatcgagcactacagacacgccctgagactgaagcccgacttcatcgacggctacatcaacctggccgccgccctggtggccgccggcgacatggagggcgccgtgcaggcctacgtgagcgccctgcagtacaaccccgacctgtactgcgtgagaagcgacctgggcaacctgctgaaggccctgggcagactggaggaggccaaggcctgctacctgaaggccatcgagacccagcccaacttcgccgtggcctggagcaacctgggctgcgtgttcaacgcccagggcgagatctggctggccatccaccacttcgagaaggccgtgaccctggaccccaacttcctggacgcctacatcaacctgggcaacgtgctgaaggaggccagaatcttcgacagagccgtggccgcctacctgagagccctgagcctgagccccaaccacgccgtggtgcacggcaacctggcctgcgtgtactacgagcagggcctgatcgacctggccatcgacacctacagaagagccatcgagctgcagccccacttccccgacgcctactgcaacctggccaacgccctgaaggagaagggcagcgtggccgaggccgaggactgctacaacaccgccctgagactgtgccccacccacgccgacagcctgaacaacctggccaacatcaagagagagcagggcaacatcgaggaggccgtgagactgtacagaaaggccctggaggtgttccccgagttcgccgccgcccacagcaacctggccagcgtgctgcagcagcagggcaagctgcaggaggccctgatgcactacaaggaggccatcagaatcagccccaccttcgccgacgcctacagcaacatgggcaacaccctgaaggagatgcaggacgtgcagggcgccctgcagtgctacaccagagccatccagatcaaccccgccttcgccgacgcccacagcaacctggccagcatccacaaggacagcggcaacatccccgaggccatcgccagctacagaaccgccctgaagctgaagcccgacttccccgacgcctactgcaacctggcccactgcctgcagatcgtgtgcgactggaccgactacgacgagagaatgaagaagctggtgagcatcgtggccgaccagctggagaagaacagactgcccagcgtgcacccccaccacagcatgctgtaccccctgagccacggcttcagaaaggccatcgccgagagacacggcaacctgtgcctggacaagatcaacgtgctgcacaagcccccctacgagcaccccaaggacctgaagctgagcgacggcagactgagagtgggctacgtgagcagcgacttcggcaaccaccccaccagccacctgatgcagagcatccccggcatgcacaaccccgacaagttcgaggtgttctgctacgccctgagccccgacgacggcaccaacttcagagtgaaggtgatggccgaggccaaccacttcatcgacctgagccagatcccctgcaacggcaaggccgccgacagaatccaccaggacggcatccacatcctggtgaacatgaacggctacaccaagggcgccagaaacgagctgttcgccctgagacccgcccccatccaggccatgtggctgggctaccccggcaccagcggcgccctgttcatggactacatcatcaccgaccaggagaccagccccgccgaggtggccgagcagtacagcgagaagctggcctacatgccccacaccttcttcatcggcgaccacgccaacatgttcccccacctgaagaagaaggccgtgatcgacttcaagagcaacggccacatctacgacaacagaatcgtgctgaacggcatcgacctgaaggccttcctggacagcctgcccgacgtgaagatcgtgaagatgaagtgccccgacggcggcgacaacgccgacagcagcaacaccgccctgaacatgcccgtgatccccatgaacaccatcgccgaggccgtgatcgagatgatcaacagaggccagatccagatcaccatcaacggcttcagcatcagcaacggcctggccaccacccagatcaacaacaaggccgccaccggcgaggaggtgcccagaaccatcatcgtgaccaccagaagccagtacggcctgcccgaggacgccatcgtgtactgcaacttcaaccagctgtacaagatcgaccccagcaccctgcagatgtgggccaacatcctgaagagagtgcccaacagcgtgctgtggctgctgagattccccgccgtgggcgagcccaacatccagcagtacgcccagaacatgggcctgccccagaacagaatcatcttcagccccgtggcccccaaggaggagcacgtgagaagaggccagctggccgacgtgtgcctggacacccccctgtgcaacggccacaccaccggcatggacgtgctgtgggccggcacccccatggtgaccatgcccggcgagaccctggccagcagagtggccgccagccagctgacctgcctgggctgcctggagctgatcgccaagaacagacaggagtacgaggacatcgccgtgaagctgggcaccgacctggagtacctgaagaaggtgagaggcaaggtgtggaagcagagaatcagcagccccctgttcaacaccaagcagtacaccatggagctggagagactgtacctgcagatgtgggagcactacgccgccggcaacaagcccgaccacatgatcaagcccgtggaggtgaccgagagcgcctga

SEQ ID NO: 2892 - RNA, 441 nt, synthetic construct
  misc_feature 1..441: note = BAG57972 variant
  source 1..441: mol_type = other RNA
atggccgccgagaccctgctgagcagcctgctgggcctgctgctgctgggcctgctgctgcccgccagcctgaccggcggcgtgggcagcctgaacctggaggagctgagcgagatgagatacggcatcgagatcctgcccctgcccgtgatgggcggccagagccagagcagcgacgtggtgatcgtgagcagcaagtacaagcagagatacgagtgcagactgcccgtgggcgccatccacttccagagagagagagaggaggagacccccgcctaccagggccccggcatccccgagctgctgagccccatgagagacgccccctgcctgctgaagaccaaggactggtggacctacgagttctgctacggcagacacatccagcagtaccacatggaggacagcgagatcaagggcctgcaggccgccagcagctga

SEQ ID NO: 2893 - RNA, 1221 nt, synthetic construct
  misc_feature 1..1221: note = BAG65333 variant
  source 1..1221: mol_type = other RNA
atggccgccgagaccctgctgagcagcctgctgggcctgctgctgctgggcctgctgctgcccgccagcctgaccggcggcgtgggcagcctgaacctggaggagctgagcgagatgagatacggcatcgagatcctgcccctgcccgtgatgggcggccagagccagagcagcgacgtggtgatcgtgagcagcaagtacaagcagagatacgagtgcagactgcccgccggcgccatccacttccagagagagagagaggaggagacccccgcctaccagggccccggcatccccgagctgctgagccccatgagagacgccccctgcctgctgaagaccaaggactggtggacctacgagttctgctacggcagacacatccagcagtaccacatggaggacagcgccagcggcgcccccaacgacttccagaacaacgtgcaggtgaaggtgatcagaagccccgccgacctgatcagattcatcgaggagctgaagggcggcaccaagaagggcaagcccaacatcggccaggagcagcccgtggacgacgccgccgaggtgccccagagagagcccgagaaggagagaggcgaccccgagagacagagagagatggaggaggaggaggacgaggacgaggacgaggacgaggacgaggacgagagacagctgctgggcgagttcgagaaggagctggagggcatcctgctgcccagcgacagagacagactgagaagcgaggtgaaggccggcatggagagagagctggagaacatcatccaggagaccgagaaggagctggaccccgacggcctgaagaaggagagcgagagagacagagccatgctggccctgaccagcaccctgaacaagctgatcaagagactggaggagaagcagagccccgagctggtgaagaagcacaagaagaagagagtggtgcccaagaagcccccccccagcccccagcccaccggcaagatcgagatcaagatcgtgagaccctgggccgagggcaccgaggagggcgccagatggctgaccgacgaggacaccagaaacctgaaggagatcttcttcaacatcctggtgcccggcgccgaggaggcccagaaggagagacagagacagaaggagctggagagcaactacagaagagtgtggggcagccccggcggcgagggcaccggcgacctggacgagttcgacttctga

SEQ ID NO: 2894 - RNA, 2223 nt, synthetic construct
  misc_feature 1..2223: note = BAH13933 variant
  source 1..2223: mol_type = other RNA
atggccgtggagaccctgctgagcagcctgctgggcctgctgctgctgggcctgctgctgcccgccagcctgaccggcggcgtgggcagcctgaacctggaggagctgagcgagatgagatacggcatcgagatcctgcccctgcccgtgatgggcggccagagccagagcagcgacgtggtgatcgtgagcagcaagtacaagcagagatacgagtgcagactgcccgccggcgccatccacttccagagagagagagaggaggagacccccgcctaccagggccccggcatccccgagctgctgagccccatgagagacgccccctgcctgctgaagaccaaggactggtggacctacgagttctgctacggcagacacatccagcagtaccacatggaggacagcgagatcaagggcgaggtgctgtacctgggctactaccagagcgccttcgactgggacgacgagaccgccaaggccagcaagcagcacagactgaagagataccacagccagacctacggcaacggcagcaagtgcgacctgaacggcagacccagagaggccgaggtgagattcctgtgcgacgagggcgccggcatcagcggcgactacatcgacagagtggacgagcccctgagctgcagctacgtgctgaccatcagaacccccagactgtgcccccaccccctgctgagacccccccccagcgccgccccccaggccatcctgtgccaccccagcctgcagcccgaggagtacatggcctacgtgcagagacaggccgacagcaagcagtacggcgacaagatcatcgaggagctgcaggacctgggcccccaggtgtggagcgagaccaagagcggcgtggccccccagaagatggccggcagaaccctgttccacctgttcagagagatccacttccacttcttccccagccccgacctgaccgtgctgaccgactggtggggcggcggcggcgtggagaagtaccacggccccagcagcctgggcgacagaggcggcgagggcacccccagctacctgctgcccagcgtgagccccctgctgagcgaccagagcctgcccgtgctgtgcaccctgggcgccagccccaccaaggacgacagcaaggacagcgacttctggaagatgctgaacgagcccgaggaccaggcccccggcggcgaggaggtgcccgccgaggagcaggaccccagccccgaggccgccgacagcgccagcggcgcccccaacgacttccagaacaacgtgcaggtgaaggtgatcagaagccccgccgacctgatcagattcatcgaggagctgaagggcggcaccaagaagggcaagcccaacatcggccaggagcagcccgtggacgacgccgccgaggtgccccagagagagcccgagaaggagagaggcgaccccgagagacagagagagatggaggaggaggaggacgaggacgaggacgaggacgaggacgaggacgagagacagctgctgggcgagttcgagaaggagctggagggcatcctgctgcccagcgacagagacagactgagaagcgaggtgaaggccggcatggagagagagctggagaacatcatccaggagaccgagaaggagctggaccccgacggcctgaagaaggagagcgagagagacagagccatgctggccctgaccagcaccctgaacaagctgatcaagagactggaggagaagcagagccccgagctggtgaagaagcacaagaagaagagagtggtgcccaagaagcccccccccagcccccagcccaccgaggaggaccccgagcacagagtgagagtgagagtgaccaagctgagactgggcggccccaaccaggacctgaccgtgctggagatgaagagagagaacccccagctgaagcagatcgagggcctggtgaaggagctgctggagagagagggcctgaccgccgccggcaagatcgagatcaagatcgtgagaccctgggccgagggcaccgaggagggcgccagatggctgaccgacgaggacaccagaaacctgaaggagatcttcttcaacatcctggtgcccggcgccgaggaggcccagaaggagagacagagacagaaggagctggagagcaactacagaagagtgtggggcagccccggcggcgagggcaccggcgacctggacgagttcgacttctga

SEQ ID NO: 2895 - RNA, 2004 nt, synthetic construct
  misc_feature 1..2004: note = AAB06495 variant
  source 1..2004: mol_type = other RNA
atggccgccgagaccctgctgagcagcctgctgggcctgctgctgctgggcctgctgctgcccgccagcctgaccggcggcgtgggcagcctgaacctggaggagctgagcgagatgagatacggcatcgagatcctgcccctgcccgtgatgggcggccagagccagagcagcgacgtggtgatcgtgagcagcaagtacaagcagagatacgagtgcagactgcccgccggcgccatccacttccagagagagagagaggaggagacccccgcctaccagggccccggcatccccgagctgctgagccccatgagagacgccccctgcctgctgaagaccaaggactggtggacctacgagttctgctacggcagacacatccagcagtaccacatggaggacagcgagatcaagggcgaggtgctgtacctgggctactaccagagcgccttcgactgggacgacgagaccgccaaggccagcaagcagcacagactgaagagataccacagccagacctacggcaacggcagcaagtgcgacctgaacggcagacccagagaggccgaggtgagattcctgtgcgacgagggcgccggcatcagcggcgactacatcgacagagtggacgagcccctgagctgcagctacgtgctgaccatcagaacccccagactgtgcccccaccccctgctgagacccccccccagcgccgccccccaggccatcctgtgccaccccagcctgcagcccgaggagtacatggcctacgtgcagagacaggccgacagcaagcagtacggcgacaagatcatcgaggagctgcaggacctgggcccccaggtgtggagcgagaccaagagcggcgtggccccccagaagatggccggcgccagccccaccaaggacgacagcaaggacagcgacttctggaagatgctgaacgagcccgaggaccaggcccccggcggcgaggaggtgcccgccgaggagcaggaccccagccccgaggccgccgacagcgccagcggcgcccccaacgacttccagaacaacgtgcaggtgaaggtgatcagaagccccgccgacctgatcagattcatcgaggagctgaagggcggcaccaagaagggcaagcccaacatcggccaggagcagcccgtggacgacgccgccgaggtgccccagagagagcccgagaaggagagaggcgaccccgagagacagagagagatggaggaggaggaggacgaggacgaggacgaggacgaggacgaggacgagagacagctgctgggcgagttcgagaaggagctggagggcatcctgctgcccagcgacagagacagactgagaagcgaggtgaaggccggcatggagagagagctggagaacatcatccaggagaccgagaaggagctggaccccgacggcctgaagaaggagagcgagagagacagagccatgctggccctgaccagcaccctgaacaagctgatcaagagactggaggagaagcagagccccgagctggtgaagaagcacaagaagaagagagtggtgcccaagaagcccccccccagcccccagcccaccgaggaggaccccgagcacagagtgagagtgagagtgaccaagctgagactgggcggccccaaccaggacctgaccgtgctggagatgaagagagagaacccccagctgaagcagatcgagggcctggtgaaggagctgctggagagagagggcctgaccgccgccggcaagatcgagatcaagatcgtgagaccctgggccgagggcaccgaggagggcgccagatggctgaccgacgaggacaccagaaacctgaaggagatcttcttcaacatcctggtgcccggcgccgaggaggcccagaaggagagacagagacagaaggagctggagagcaactacagaagagtgtggggcagccccggcggcgagggcaccggcgacctggacgagttcgacttctga

SEQ ID NO: 2896 - RNA, 303 nt, synthetic construct
  misc_feature 1..303: note = AAI13433 variant
  source 1..303: mol_type = other RNA
atgagagccctgaccctgctggccctgctggccctggccgccctgtgcatcgccggccaggccggcgccaagcccagcggcgccgagagcagcaagggcgccgccttcgtgagcaagcaggagggcagcgaggtggtgaagagacccagaagatacctgtaccagtggctgggcgcccccgtgccctaccccgaccccctggagcccagaagagaggtgtgcgagctgaaccccgactgcgacgagctggccgaccacatcggcttccaggaggcctacagaagattctacggccccgtgtga

SEQ ID NO: 2897 - RNA, 945 nt, synthetic construct
  misc_feature 1..945: note = EAX06008 variant
  source 1..945: mol_type = other RNA
atgagaatcgccgtgatctgcttctgcctgctgggcatcacctgcgccatccccgtgaagcaggccgacagcggcagcagcgaggagaagcagctgtacaacaagtaccccgacgccgtggccacctggctgaaccccgaccccagccagaagcagaacctgctggccccccagaacgccgtgagcagcgaggagaccaacgacttcaagcaggagaccctgcccagcaagagcaacgagagccacgaccacatggacgacatggacgacgaggacgacgacgaccacgtggacagccaggacagcatcgacagcaacgacagcgacgacgtggacgacaccgacgacagccaccagagcgacgagagccaccacagcgacgagagcgacgagctggtgaccgacttccccaccgacctgcccgccaccgaggtgttcacccccgtggtgcccaccgtggacacctacgacggcagaggcgacagcgtggtgtacggcctgagaagcaagagcaagaagttcagaagacccgacatccagtaccccgacgccaccgacgaggacatcaccagccacatggagagcgaggagctgaacggcgcctacaaggccatccccgtggcccaggacctgaacgcccccagcgactgggacagcagaggcaaggacagctacgagaccagccagctggacgaccagagcgccgagacccacagccacaagcagagcagactgtacaagagaaaggccaacgacgagagcaacgagcacagcgacgtgatcgacagccaggagctgagcaaggtgagcagagagttccacagccacgagttccacagccacgaggacatgctggtggtggaccccaagagcaaggaggaggacaagcacctgaagttcagaatcagccacgagctggacagcgccagcagcgaggtgaactga

SEQ ID NO: 2898 - RNA, 903 nt, synthetic construct
  misc_feature 1..903: note = EAX06009 variant
  source 1..903: mol_type = other RNA
atgagaatcgccgtgatctgcttctgcctgctgggcatcacctgcgccatccccgtgaagcaggccgacagcggcagcagcgaggagaagcagctgtacaacaagtaccccgacgccgtggccacctggctgaaccccgaccccagccagaagcagaacctgctggccccccagaccctgcccagcaagagcaacgagagccacgaccacatggacgacatggacgacgaggacgacgacgaccacgtggacagccaggacagcatcgacagcaacgacagcgacgacgtggacgacaccgacgacagccaccagagcgacgagagccaccacagcgacgagagcgacgagctggtgaccgacttccccaccgacctgcccgccaccgaggtgttcacccccgtggtgcccaccgtggacacctacgacggcagaggcgacagcgtggtgtacggcctgagaagcaagagcaagaagttcagaagacccgacatccagtaccccgacgccaccgacgaggacatcaccagccacatggagagcgaggagctgaacggcgcctacaaggccatccccgtggcccaggacctgaacgcccccagcgactgggacagcagaggcaaggacagctacgagaccagccagctggacgaccagagcgccgagacccacagccacaagcagagcagactgtacaagagaaaggccaacgacgagagcaacgagcacagcgacgtgatcgacagccaggagctgagcaaggtgagcagagagttccacagccacgagttccacagccacgaggacatgctggtggtggaccccaagagcaaggaggaggacaagcacctgaagttcagaatcagccacgagctggacagcgccagcagcgaggtgaactga

SEQ ID NO: 2899 - RNA, 864 nt, synthetic construct
  misc_feature 1..864: note = EAX06010 variant
  source 1..864: mol_type = other RNA
atgagaatcgccgtgatctgcttctgcctgctgggcatcacctgcgccatccccgtgaagcaggccgacagcggcagcagcgaggagaagcagaacgccgtgagcagcgaggagaccaacgacttcaagcaggagaccctgcccagcaagagcaacgagagccacgaccacatggacgacatggacgacgaggacgacgacgaccacgtggacagccaggacagcatcgacagcaacgacagcgacgacgtggacgacaccgacgacagccaccagagcgacgagagccaccacagcgacgagagcgacgagctggtgaccgacttccccaccgacctgcccgccaccgaggtgttcacccccgtggtgcccaccgtggacacctacgacggcagaggcgacagcgtggtgtacggcctgagaagcaagagcaagaagttcagaagacccgacatccagtaccccgacgccaccgacgaggacatcaccagccacatggagagcgaggagctgaacggcgcctacaaggccatccccgtggcccaggacctgaacgcccccagcgactgggacagcagaggcaaggacagctacgagaccagccagctggacgaccagagcgccgagacccacagccacaagcagagcagactgtacaagagaaaggccaacgacgagagcaacgagcacagcgacgtgatcgacagccaggagctgagcaaggtgagcagagagttccacagccacgagttccacagccacgaggacatgctggtggtggaccccaagagcaaggaggaggacaagcacctgaagttcagaatcagccacgagctggacagcgccagcagcgaggtgaactga

SEQ ID NO: 2900 - RNA, 984 nt, synthetic construct
  misc_feature 1..984: note = BAH12087 variant
  source 1..984: mol_type = other RNA
atgggcatcgtgcccagaagcctggacaagaaggcccacagagtgcagttccagctgaacagaatcaaggccaagatcgagctgccctggggcagcctgcagctggactgcctgatgaagaccctgaaggagctgtacaacaagtaccccgacgccgtggccacctggctgaaccccgaccccagccagaagcagaacctgctggccccccagaacgccgtgagcagcgaggagaccaacgacttcaagcaggagaccctgcccagcaagagcaacgagagccacgaccacatggacgacatggacgacgaggacgacgacgaccacgtggacagccaggacagcatcgacagcaacgacagcgacgacgtggacgacaccgacgacagccaccagagcgacgagagccaccacagcgacgagagcgacgagctggtgaccgacttccccaccgacctgcccgccaccgaggtgttcacccccgtggtgcccaccgtggacacctacgacggcagaggcgacagcgtggtgtacggcctgagaagcaagagcaagaagttcagaagacccgacatccagtaccccgacgccaccgacgaggacatcaccagccacatggagagcgaggagctgaacggcgcctacaaggccatccccgtggcccaggacctgaacgcccccagcgactgggacagcagaggcaaggacagctacgagaccagccagctggacgaccagagcgccgagacccacagccacaagcagagcagactgtacaagagaaaggccaacgacgagagcaacgagcacagcgacgtgatcgacagccaggagctgagcaaggtgagcagagagttccacagccacgagttccacagccacgaggacatgctggtggtggaccccaagagcaaggaggaggacaagcacctgaagttcagaatcagccacgagctggacagcgccagcagcgaggtgaactga

SEQ ID NO: 2901 - RNA, 879 nt, synthetic construct
  misc_feature 1..879: note = AEA49030 variant
  source 1..879: mol_type = other RNA
atgagaatcgccgtgatctgcttctgcctgctgggcatcacctgcgccatccccgtgaagcaggccgacagcggcagcagcgaggagaagcagctgtacaacaagtaccccgacgccgtggccacctggctgaaccccgaccccagccagaagcagaacctgctggccccccagaacgccgtgagcagcgaggagaccaacgacttcaagcaggagaccctgcccagcaagagcaacgagagccacgaccacatggacgacatggacgacgaggacgacgacagccaccagagcgacgagagccaccacagcgacgagagcgacgagctggtgaccgacttccccaccgacctgcccgccaccgaggtgttcacccccgtggtgcccaccgtggacacctacgacggcagaggcgacagcgtggtgtacggcctgagaagcaagagcaagaagttcagaagacccgacatccagtaccccgacgccaccgacgaggacatcaccagccacatggagagcgaggagctgaacggcgcctacaaggccatccccgtggcccaggacctgaacgcccccagcgactgggacagcagaggcaaggacagctacgagaccagccagctggacgaccagagcgccgagacccacagccacaagcagagcagactgtacaagagaaaggccaacgacgagagcaacgagcacagcgacgtgatcgacagccaggagctgagcaaggtgagcagagagttccacagccacgagttccacagccacgaggacatgctggtggtggaccccaagagcaaggaggaggacaagcacctgaagttcagaatcagccacgagctggacagcgccagcagcgaggtgaactga

SEQ ID NO: 2902 - RNA, 945 nt, synthetic construct; identical to SEQ ID NO: 2897
  misc_feature 1..945: note = AAA86886 variant
  source 1..945: mol_type = other RNA

SEQ ID NO: 2903 - RNA, 1182 nt, synthetic construct
  misc_feature 1..1182: note = AAA59988 variant
  source 1..1182: mol_type = other RNA
atggaggagccccagagcgaccccagcgtggagccccccctgagccaggagaccttcagcgacctgtggaagctgctgcccgagaacaacgtgctgagccccctgcccagccaggccatggacgacctgatgctgagccccgacgacatcgagcagtggttcaccgaggaccccggccccgacgaggcccccagaatgcccgaggccgccccccccgtggcccccgcccccgccgcccccacccccgccgcccccgcccccgcccccagctggcccctgagcagcagcgtgcccagccagaagacctaccagggcagctacggcttcagactgggcttcctgcacagcggcaccgccaagagcgtgacctgcacctacagccccgccctgaacaagatgttctgccagctggccaagacctgccccgtgcagctgtgggtggacagcacccccccccccggcaccagagtgagagccatggccatctacaagcagagccagcacatgaccgaggtggtgagaagatgcccccaccacgagagatgcagcgacagcgacggcctggcccccccccagcacctgatcagagtggagggcaacctgagagtggagtacctggacgacagaaacaccttcagacacagcgtggtggtgccctacgagccccccgaggtgggcagcgactgcaccaccatccactacaactacatgtgcaacagcagctgcatgggcggcatgaacagaagacccatcctgaccatcatcaccctggaggacagcagcggcaacctgctgggcagaaacagcttcgaggtgagagtgtgcgcctgccccggcagagacagaagaaccgaggaggagaacctgagaaagaagggcgagccccaccacgagctgccccccggcagcaccaagagagccctgcccaacaacaccagcagcagcccccagcccaagaagaagcccctggacggcgagtacttcaccctgcagatcagaggcagagagagattcgagatgttcagagagctgaacgaggccctggagctgaaggacgcccaggccggcaaggagcccggcggcagcagagcccacagcagccacctgaagagcaagaagggccagagcaccagcagacacaagaagctgatgttcaagaccgagggccccgacagcgactga

SEQ ID NO: 2904 - RNA, 309 nt, synthetic construct
  misc_feature 1..309: note = AAF88037 variant
  source 1..309: mol_type = other RNA
atgagcgccagagtgagaagcagaagcagaggcagaggcgacggccaggaggcccccgacgtggtggccttcgtggcccccggcgagagccagcaggaggagccccccaccgacaaccaggacatcgagcccggccaggagagagagggcaccccccccatcgaggagagaaaggtggagggcgactgccaggagatggacctggagaagaccagaagcgagagaggcgacggcagcgacgtgaaggagaagaccccccccaaccccaagcacgccaagaccaaggaggccggcgacggccagccctga

SEQ ID NO: 2905 - RNA, 1209 nt, synthetic construct
  misc_feature 1..1209: note = AAA60003 variant
  source 1..1209: mol_type = other RNA
atgcagatgagccccgccctgacctgcctggtgctgggcctggccctggtgttcggcgagggcagcgccgtgcaccacccccccagctacgtggcccacctggccagcgacttcggcgtgagagtgttccagcaggtggcccaggccagcaaggacagaaacgtggtgttcagcccctacggcgtggccagcgtgctggccatgctgcagctgaccaccggcggcgagacccagcagcagatccaggccgccatgggcttcaagatcgacgacaagggcatggcccccgccctgagacacctgtacaaggagctgatgggcccctggaacaaggacgagatcagcaccaccgacgccatcttcgtgcagagagacctgaagctggtgcagggcttcatgccccacttcttcagactgttcagaagcaccgtgaagcaggtggacttcagcgaggtggagagagccagattcatcatcaacgactgggtgaagacccacaccaagggcatgatcagcaacctgctgggcaagggcgccgtggaccagctgaccagactggtgctggtgaacgccctgtacttcaacggccagtggaagacccccttccccgacagcagcacccacagaagactgttccacaagagcgacggcagcaccgtgagcgtgcccatgatggcccagaccaacaagttcaactacaccgagttcaccacccccgacggccactactacgacatcctggagctgccctaccacggcgacaccctgagcatgttcatcgccgccccctacgagaaggaggtgcccctgagcgccctgaccaacatcctgagcgcccagctgatcagccactggaagggcaacatgaccagactgcccagactgctggtgctgcccaagttcagcctggagaccgaggtggacctgagaaagcccctggagaacctgggcatgaccgacatgttcagacagttccaggccgacttcaccagcctgagcgaccaggagcccctgcacgtggcccaggccctgcagaaggtgaagatcgaggtgaacgagagcggcaccgtggccagcagcagcaccgccgtgatcgtgagcgccagaatggcccccgaggagatcatcatggacagacccttcctgttcgtggtgagacacaaccccaccggcaccgtgctgttcatgggccaggtgatggagccctga

SEQ ID NO: 2906 - RNA, 1248 nt, synthetic construct
  misc_feature 1..1248: note = AAA36797 variant
  source 1..1248: mol_type = other RNA
atggaggacctgtgcgtggccaacaccctgttcgccctgaacctgttcaagcacctggccaaggccagccccacccagaacctgttcctgagcccctggagcatcagcagcaccatggccatggtgtacatgggcagcagaggcagcaccgaggaccagatggccaaggtgctgcagttcaacgaggtgggcgccaacgccgtgacccccatgacccccgagaacttcaccagctgcggcttcatgcagcagatccagaagggcagctaccccgacgccatcctgcaggcccaggccgccgacaagatccacagcagcttcagaagcctgagcagcgccatcaacgccagcaccggcaactacctgctggagagcgtgaacaagctgttcggcgagaagagcgccagcttcagagaggagtacatcagactgtgccagaagtactacagcagcgagccccaggccgtggacttcctggagtgcgccgaggaggccagaaagaagatcaacagctgggtgaagacccagaccaagggcaagatccccaacctgctgcccgagggcagcgtggacggcgacaccagaatggtgctggtgaacgccgtgtacttcaagggcaagtggaagacccccttcgagaagaagctgaacggcctgtaccccttcagagtgaacagcgcccagagaacccccgtgcagatgatgtacctgagagagaagctgaacatcggctacatcgaggacctgaaggcccagatcctggagctgccctacgccggcgacgtgagcatgttcctgctgctgcccgacgagatcgccgacgtgagcaccggcctggagctgctggagagcgagatcacctacgacaagctgaacaagtggaccagcaaggacaagatggccgaggacgaggtggaggtgtacatcccccagttcaagctggaggagcactacgagctgagaagcatcctgagaagcatgggcatggaggacgccttcaacaagggcagagccaacttcagcggcatgagcgagagaaacgacctgttcctgagcgaggtgttccaccaggccatggtggacgtgaacgaggagggcaccgaggccgccgccggcaccggcggcgtgatgaccggcagaaccggccacggcggcccccagttcgtggccgaccaccccttcctgttcctgatcatgcacaagatcaccaactgcatcctgttcttcggcagattcagcagcccctga

SEQ ID NO: 2907 - RNA, 528 nt, synthetic construct
  misc_feature 1..528: note = AAA60020 variant
  source 1..528: mol_type = other RNA
atgctgccccccatggccctgcccagcgtgagctggatgctgctgagctgcctgatgctgctgagccaggtgcagggcgaggagccccagagagagctgcccagcgccagaatcagatgccccaagggcagcaaggcctacggcagccactgctacgccctgttcctgagccccaagagctggaccgacgccgacctggcctgccagaagagacccagcggcaacctggtgagcgtgctgagcggcgccgagggcagcttcgtgagcagcctggtgaagagcatcggcaacagctacagctacgtgtggatcggcctgcacgaccccacccagggcaccgagcccaacggcgagggctgggagtggagcagcagcgacgtgatgaactacttcgcctgggagagaaaccccagcaccatcagcagccccggccactgcgccagcctgagcagaagcaccgccttcctgagatggaaggactacaactgcaacgtgagactgccctacgtgtgcaagttcaccgactga

SEQ ID NO: 2908 - RNA, 528 nt, synthetic construct; identical to SEQ ID NO: 2907
  misc_feature 1..528: note = AAT11159 variant
  source 1..528: mol_type = other RNA

SEQ ID NO: 2909 - RNA, 381 nt, synthetic construct
  misc_feature 1..381: note = AAH39863 variant
  source 1..381: mol_type = other RNA
atggacaagagcctgctgctggagctgcccatcctgctgtgctgcttcagagccctgagcggcagcctgagcatgagaaacgacgccgtgaacgagatcgtggccgtgaagaacaacttccccgtgatcgagatcgtgcagtgcagaatgtgccacctgcagttccccggcgagaagtgcagcagaggcagaggcatctgcaccgccaccaccgaggaggcctgcatggtgggcagaatgttcaagagagacggcaacccctggctgaccttcatgggctgcctgaagaactgcgccgacgtgaagggcatcagatggagcgtgtacctggtgaacttcagatgctgcagaagccacgacctgtgcaacgaggacctgtga

SEQ ID NO: 2910 - RNA, 1440 nt, synthetic construct
  misc_feature 1..1440: note = CCDS42826.1 variant
  source 1..1440: mol_type = other RNA
atgaccaccctggccggcgccgtgcccagaatgatgagacccggccccggccagaactaccccagaagcggcttccccctggaggtgagcacccccctgggccagggcagagtgaaccagctgggcggcgtgttcatcaacggcagacccctgcccaaccacatcagacacaagatcgtggagatggcccaccacggcatcagaccctgcgtgatcagcagacagctgagagtgagccacggctgcgtgagcaagatcctgtgcagataccaggagaccggcagcatcagacccggcgccatcggcggcagcaagcccaagcaggtgaccacccccgacgtggagaagaagatcgaggagtacaagagagagaaccccggcatgttcagctgggagatcagagacaagctgctgaaggacgccgtgtgcgacagaaacaccgtgcccagcgtgagcagcatcagcagaatcctgagaagcaagttcggcaagggcgaggaggaggaggccgacctggagagaaaggaggccgaggagagcgagaagaaggccaagcacagcatcgacggcatcctgagcgagagagccagcgccccccagagcgacgagggcagcgacatcgacagcgagcccgacctgcccctgaagagaaagcagagaagaagcagaaccaccttcaccgccgagcagctggaggagctggagagagccttcgagagaacccactaccccgacatctacaccagagaggagctggcccagagagccaagctgaccgaggccagagtgcaggtgtggttcagcaacagaagagccagatggagaaagcaggccggcgccaaccagctgatggccttcaaccacctgatccccggcggcttcccccccaccgccatgcccaccctgcccacctaccagctgagcgagaccagctaccagcccaccagcatcccccaggccgtgagcgaccccagcagcaccgtgcacagaccccagcccctgccccccagcaccgtgcaccagagcaccatccccagcaaccccgacagcagcagcgcctactgcctgcccagcaccagacacggcttcagcagctacaccgacagcttcgtgccccccagcggccccagcaaccccatgaaccccaccatcggcaacggcctgagcccccaggtgatgggcctgctgaccaaccacggcggcgtgccccaccagccccagaccgactacgccctgagccccctgaccggcggcctggagcccaccaccaccgtgagcgccagctgcagccagagactggaccacatgaagagcctggacagcctgcccaccagccagagctactgcccccccacctacagcaccaccggctacagcatggaccccgtgaccggctaccagtacggccagtacggccagagcaagccctggaccttctga

SEQ ID NO: 2911 - RNA, 1176 nt, synthetic construct
  misc_feature 1..1176: note = AAA58397 variant
  source 1..1176: mol_type = other RNA
atggacctggagaagaactaccccacccccagaaccagcagaaccggccacggcggcgtgaaccagctgggcggcgtgttcgtgaacggcagacccctgcccgacgtggtgagacagagaatcgtggagctggcccaccagggcgtgagaccctgcgacatcagcagacagctgagagtgagccacggctgcgtgagcaagatcctgggcagatactacgagaccggcagcatcaagcccggcgtgatcggcggcagcaagcccaaggtggccacccccaaggtggtggagaagatcgccgagtacaagagacagaaccccaccatgttcgcctgggagatcagagacagactgctggccgagagagtgtgcgacaacgacaccgtgcccagcgtgagcagcatcaacagaatcatcagaaccaaggtgcagcagccccccaaccagcccgtgcccgccagcagccacagcatcgtgagcaccggcagcgtgacccaggtgagcagcgtgagcaccgacagcgccggcagcagctacagcatcagcggcatcctgggcatcaccagccccagcgccgacaccaacaagagaaagagagacgagggcatccaggagagccccgtgcccaacggccacagcctgcccggcagagacttcctgagaaagcagatgagaggcgacctgttcacccagcagcagctggaggtgctggacagagtgttcgagagacagcactacagcgacatcttcaccaccaccgagcccatcaagcccgagcagaccaccgagtacagcgccatggccagcctggccggcggcctggacgacatgaaggccaacctggccagccccacccccgccgacatcggcagcagcgtgcccggcccccagagctaccccatcgtgaccggcagagacctggccagcaccaccctgcccggctaccccccccacgtgccccccgccggccagggcagctacagcgcccccaccctgaccggcatggtgcccggcagcgagttcagcggcagcccctacagccacccccagtacagcagctacaacgacagctggagattccccaaccccggcctgctgggcagcccctactactacagcgccgccgccagaggcgccgccccccccgccgccgccaccgcctacgacagacactga

SEQ ID NO: 2912 - RNA, 873 nt, synthetic construct
  misc_feature 1..873: note = AAF25807 variant
  source 1..873: mol_type = other RNA
atgagaatcttcgccgtgttcatcttcatgacctactggcacctgctgaacgccttcaccgtgaccgtgcccaaggacctgtacgtggtggagtacggcagcaacatgaccatcgagtgcaagttccccgtggagaagcagctggacctggccgccctgatcgtgtactgggagatggaggacaagaacatcatccagttcgtgcacggcgaggaggacctgaaggtgcagcacagcagctacagacagagagccagactgctgaaggaccagctgagcctgggcaacgccgccctgcagatcaccgacgtgaagctgcaggacgccggcgtgtacagatgcatgatcagctacggcggcgccgactacaagagaatcaccgtgaaggtgaacgccccctacaacaagatcaaccagagaatcctggtggtggaccccgtgaccagcgagcacgagctgacctgccaggccgagggctaccccaaggccgaggtgatctggaccagcagcgaccaccaggtgctgagcggcaagaccaccaccaccaacagcaagagagaggagaagctgttcaacgtgaccagcaccctgagaatcaacaccaccaccaacgagatcttctactgcaccttcagaagactggaccccgaggagaaccacaccgccgagctggtgatccccgagctgcccctggcccacccccccaacgagagaacccacctggtgatcctgggcgccatcctgctgtgcctgggcgtggccctgaccttcatcttcagactgagaaagggcagaatgatggacgtgaagaagtgcggcatccaggacaccaacagcaagaagcagagcgacacccacctggaggagacctga

SEQ ID NO: 2913 - RNA, 867 nt, synthetic construct
  misc_feature 1..867: note = AAH74740 variant
  source 1..867: mol_type = other RNA
atgcagatcccccaggccccctggcccgtggtgtgggccgtgctgcagctgggctggagacccggctggttcctggacagccccgacagaccctggaacccccccaccttcagccccgccctgctggtggtgaccgagggcgacaacgccaccttcacctgcagcttcagcaacaccagcgagagcttcgtgctgaactggtacagaatgagccccagcaaccagaccgacaagctggccgccttccccgaggacagaagccagcccggccaggactgcagattcagagtgacccagctgcccaacggcagagacttccacatgagcgtggtgagagccagaagaaacgacagcggcacctacctgtgcggcgccatcagcctggcccccaaggcccagatcaaggagagcctgagagccgagctgagagtgaccgagagaagagccgaggtgcccaccgcccaccccagccccagccccagacccgccggccagttccagaccctggtggtgggcgtggtgggcggcctgctgggcagcctggtgctgctggtgtgggtgctggccgtgatctgcagcagagccgccagaggcaccatcggcgccagaagaaccggccagcccctgaaggaggaccccagcgccgtgcccgtgttcagcgtggactacggcgagctggacttccagtggagagagaagacccccgagccccccgtgccctgcgtgcccgagcagaccgagtacgccaccatcgtgttccccagcggcatgggcaccagcagccccgccagaagaggcagcgccgacggccccagaagcgcccagcccctgagacccgaggacggccactgcagctggcccctgtga

SEQ ID NO: 2914 - RNA, 1008 nt, synthetic construct
  misc_feature 1..1008: note = AAC95296 variant
  source 1..1008: mol_type = other RNA
atgggcagcgccagccccggcctgagcagcgtgagccccagccacctgctgctgccccccgacaccgtgagcagaaccggcctggagaaggccgccgccggcgccgtgggcctggagagaagagactggagccccagcccccccgccacccccgagcagggcctgagcgccttctacctgagctacttcgacatgctgtaccccgaggacagcagctgggccgccaaggcccccggcgccagcagcagagaggagccccccgaggagcccgagcagtgccccgtgatcgacagccaggcccccgccggcagcctggacctggtgcccggcggcctgaccctggaggagcacagcctggagcaggtgcagagcatggtggtgggcgaggtgctgaaggacatcgagaccgcctgcaagctgctgaacatcaccgccgaccccatggactggagccccagcaacgtgcagaagtggctgctgtggaccgagcaccagtacagactgccccccatgggcaaggccttccaggagctggccggcaaggagctgtgcgccatgagcgaggagcagttcagacagagaagccccctgggcggcgacgtgctgcacgcccacctggacatctggaagagcgccgcctggatgaaggagagaaccagccccggcgccatccactactgcgccagcaccagcgaggagagctggaccgacagcgaggtggacagcagctgcagcggccagcccatccacctgtggcagttcctgaaggagctgctgctgaagccccacagctacggcagattcatcagatggctgaacaaggagaagggcatcttcaagatcgaggacagcgcccaggtggccagactgtggggcatcagaaagaacagacccgccatgaactacgacaagctgagcagaagcatcagacagtactacaagaagggcatcatcagaaagcccgacatcagccagagactggtgtaccagttcgtgcaccccatctga

SEQ ID NO: 2915 - RNA, 2217 nt, synthetic construct
  misc_feature 1..2217: note = AAA36429 variant
  source 1..2217: mol_type = other RNA
atgcagcccagatgggcccagggcgccaccatgtggctgggcgtgctgctgaccctgctgctgtgcagcagcctggagggccaggagaacagcttcaccatcaacagcgtggacatgaagagcctgcccgactggaccgtgcagaacggcaagaacctgaccctgcagtgcttcgccgacgtgagcaccaccagccacgtgaagccccagcaccagatgctgttctacaaggacgacgtgctgttctacaacatcagcagcatgaagagcaccgagagctacttcatccccgaggtgagaatctacgacagcggcacctacaagtgcaccgtgatcgtgaacaacaaggagaagaccaccgccgagtaccagctgctggtggagggcgtgcccagccccagagtgaccctggacaagaaggaggccatccagggcggcatcgtgagagtgaactgcagcgtgcccgaggagaaggcccccatccacttcaccatcgagaagctggagctgaacgagaagatggtgaagctgaagagagagaagaacagcagagaccagaacttcgtgatcctggagttccccgtggaggagcaggacagagtgctgagcttcagatgccaggccagaatcatcagcggcatccacatgcagaccagcgagagcaccaagagcgagctggtgaccgtgaccgagagcttcagcacccccaagttccacatcagccccaccggcatgatcatggagggcgcccagctgcacatcaagtgcaccatccaggtgacccacctggcccaggagttccccgagatcatcatccagaaggacaaggccatcgtggcccacaacagacacggcaacaaggccgtgtacagcgtgatggccatggtggagcacagcggcaactacacctgcaaggtggagagcagcagaatcagcaaggtgagcagcatcgtggtgaacatcaccgagctgttcagcaagcccgagctggagagcagcttcacccacctggaccagggcgagagactgaacctgagctgcagcatccccggcgccccccccgccaacttcaccatccagaaggaggacaccatcgtgagccagacccaggacttcaccaagatcgccagcaagagcgacagcggcacctacatctgcaccgccggcatcgacaaggtggtgaagaagagcaacaccgtgcagatcgtggtgtgcgagatgctgagccagcccagaatcagctacgacgcccagttcgaggtgatcaagggccagaccatcgaggtgagatgcgagagcatcagcggcaccctgcccatcagctaccagctgctgaagaccagcaaggtgctggagaacagcaccaagaacagcaacgaccccgccgtgttcaaggacaaccccaccgaggacgtggagtaccagtgcgtggccgacaactgccacagccacgccaagatgctgagcgaggtgctgagagtgaaggtgatcgcccccgtggacgaggtgcagatcagcatcctgagcagcaaggtggtggagagcggcgaggacatcgtgctgcagtgcgccgtgaacgagggcagcggccccatcacctacaagttctacagagagaaggagggcaagcccttctaccagatgaccagcaacgccacccaggccttctggaccaagcagaaggccagcaaggagcaggagggcgagtactactgcaccgccttcaacagagccaaccacgccagcagcgtgcccagaagcaagatcctgaccgtgagagtgatcctggccccctggaagaagggcctgatcgccgtggtgatcatcggcgtgatcatcgccctgctgatcatcgccgccaagtgctacttcctgagaaaggccaaggccaagcagatgcccgtggagatgagcagacccgccgtgcccctgctgaacagcaacaacgagaagatgagcgaccccaacatggaggccaacagccactacggccacaacgacgacgtgagaaaccacgccatgaagcccatcaacgacaacaaggagcccctgaacagcgacgtgcagtacaccgaggtgcaggtgagcagcgccgagagccacaaggacctgggcaagaaggacaccgagaccgtgtacagcgaggtgagaaaggccgtgcccgacgccgtggagagcagatacagcagaaccgagggcagcctggacggcacctga

SEQ ID NO: 2916 - RNA, 2736 nt, synthetic construct
  misc_feature 1..2736: note = AAG23134 variant
  source 1..2736: mol_type = other RNA
atggcccagctgttcctgcccctgctggccgccctggtgctggcccaggcccccgccgccctggccgacgtgctggagggcgacagcagcgaggacagagccttcagagtgagaatcgccggcgacgcccccctgcagggcgtgctgggcggcgccctgaccatcccctgccacgtgcactacctgagacccccccccagcagaagagccgtgctgggcagccccagagtgaagtggaccttcctgagcagaggcagagaggccgaggtgctggtggccagaggcgtgagagtgaaggtgaacgaggcctacagattcagagtggccctgcccgcctaccccgccagcctgaccgacgtgagcctggccctgagcgagctgagacccaacgacagcggcatctacagatgcgaggtgcagcacggcatcgacgacagcagcgacgccgtggaggtgaaggtgaagggcgtggtgttcctgtacagagagggcagcgccagatacgccttcagcttcagcggcgcccaggaggcctgcgccagaatcggcgcccacatcgccacccccgagcagctgtacgccgcctacctgggcggctacgagcagtgcgacgccggctggctgagcgaccagaccgtgagataccccatccagacccccagagaggcctgctacggcgacatggacggcttccccggcgtgagaaactacggcgtggtggaccccgacgacctgtacgacgtgtactgctacgccgaggacctgaacggcgagctgttcctgggcgacccccccgagaagctgaccctggaggaggccagagcctactgccaggagagaggcgccgagatcgccaccaccggccagctgtacgccgcctgggacggcggcctggaccactgcagccccggctggctggccgacggcagcgtgagataccccatcgtgacccccagccagagatgcggcggcggcctgcccggcgtgaagaccctgttcctgttccccaaccagaccggcttccccaacaagcacagcagattcaacgtgtactgcttcagagacagcgcccagcccagcgccatccccgaggccagcaaccccgccagcaaccccgccagcgacggcctggaggccatcgtgaccgtgaccgagaccctggaggagctgcagctgccccaggaggccaccgagagcgagagcagaggcgccatctacagcatccccatcatggaggacggcggcggcggcagcagcacccccgaggaccccgccgaggcccccagaaccctgctggagttcgagacccagagcatggtgccccccaccggcttcagcgaggaggagggcaaggccctggaggaggaggagaagtacgaggacgaggaggagaaggaggaggaggaggaggaggaggaggtggaggacgaggccctgtgggcctggcccagcgagctgagcagccccggccccgaggccagcctgcccaccgagcccgccgcccaggaggagagcctgagccaggcccccgccagagccgtgctgcagcccggcgccagccccctgcccgacggcgagagcgaggccagcagaccccccagagtgcacggcccccccaccgagaccctgcccacccccagagagagaaacctggccagccccagccccagcaccctggtggaggccagagaggtgggcgaggccaccggcggccccgagctgagcggcgtgcccagaggcgagagcgaggagaccggcagcagcgagggcgcccccagcctgctgcccgccaccagagcccccgagggcaccagagagctggaggcccccagcgaggacaacagcggcagaaccgcccccgccggcaccagcgtgcaggcccagcccgtgctgcccaccgacagcgccagcagaggcggcgtggccgtggtgcccgccagcggcgactgcgtgcccagcccctgccacaacggcggcacctgcctggaggaggaggagggcgtgagatgcctgtgcctgcccggctacggcggcgacctgtgcgacgtgggcctgagattctgcaaccccggctgggacgccttccagggcgcctgctacaagcacttcagcaccagaagaagctgggaggaggccgagacccagtgcagaatgtacggcgcccacctggccagcatcagcacccccgaggagcaggacttcatcaacaacagatacagagagtaccagtggatcggcctgaacgacagaaccatcgagggcgacttcctgtggagcgacggcgtgcccctgctgtacgagaactggaaccccggccagcccgacagctacttcctgagcggcgagaactgcgtggtgatggtgtggcacgaccagggccagtggagcgacgtgccctgcaactaccacctgagctacacctgcaagatgggcctggtgagctgcggccccccccccgagctgcccctggcccaggtgttcggcagacccagactgagatacgaggtggacaccgtgctgagatacagatgcagagagggcctggcccagagaaacctgcccctgatcagatgccaggagaacggcagatgggaggccccccagatcagctgcgtgcccagaagacccgccagagccctgcaccccgaggaggaccccgagggcagacagggcagactgctgggcagatggaaggccctgctgatcccccccagcagccccatgcccggcccctga

SEQ ID NO: 2917 - RNA, 3321 nt, synthetic construct
  misc_feature 1..3321: note = AAA60049 variant
  source 1..3321: mol_type = other RNA
atgagactgcccggcgccatgcccgccctggccctgaagggcgagctgctgctgctgagcctgctgctgctgctggagccccagatcagccagggcctggtggtgaccccccccggccccgagctggtgctgaacgtgagcagcaccttcgtgctgacctgcagcggcagcgcccccgtggtgtgggagagaatgagccaggagcccccccaggagatggccaaggcccaggacggcaccttcagcagcgtgctgaccctgaccaacctgaccggcctggacaccggcgagtacttctgcacccacaacgacagcagaggcctggagaccgacgagagaaagagactgtacatcttcgtgcccgaccccaccgtgggcttcctgcccaacgacgccgaggagctgttcatcttcctgaccgagatcaccgagatcaccatcccctgcagagtgaccgacccccagctggtggtgaccctgcacgagaagaagggcgacgtggccctgcccgtgccctacgaccaccagagaggcttcagcggcatcttcgaggacagaagctacatctgcaagaccaccatcggcgacagagaggtggacagcgacgcctactacgtgtacagactgcaggtgagcagcatcaacgtgagcgtgaacgccgtgcagaccgtggtgagacagggcgagaacatcaccctgatgtgcatcgtgatcggcaacgaggtggtgaacttcgagtggacctaccccagaaaggagagcggcagactggtggagcccgtgaccgacttcctgctggacatgccctaccacatcagaagcatcctgcacatccccagcgccgagctggaggacagcggcacctacacctgcaacgtgaccgagagcgtgaacgaccaccaggacgagaaggccatcaacatcaccgtggtggagagcggctacgtgagactgctgggcgaggtgggcaccctgcagttcgccgagctgcacagaagcagaaccctgcaggtggtgttcgaggcctaccccccccccaccgtgctgtggttcaaggacaacagaaccctgggcgacagcagcgccggcgagatcgccctgagcaccagaaacgtgagcgagaccagatacgtgagcgagctgaccctggtgagagtgaaggtggccgaggccggccactacaccatgagagccttccacgaggacgccgaggtgcagctgagcttccagctgcagatcaacgtgcccgtgagagtgctggagctgagcgagagccaccccgacagcggcgagcagaccgtgagatgcagaggcagaggcatgccccagcccaacatcatctggagcgcctgcagagacctgaagagatgccccagagagctgccccccaccctgctgggcaacagcagcgaggaggagagccagctggagaccaacgtgacctactgggaggaggagcaggagttcgaggtggtgagcaccctgagactgcagcacgtggacagacccctgagcgtgagatgcaccctgagaaacgccgtgggccaggacacccaggaggtgatcgtggtgccccacagcctgcccttcaaggtggtggtgatcagcgccatcctggccctggtggtgctgaccatcatcagcctgatcatcctgatcatgctgtggcagaagaagcccagatacgagatcagatggaaggtgatcgagagcgtgagcagcgacggccacgagtacatctacgtggaccccatgcagctgccctacgacagcacctgggagctgcccagagaccagctggtgctgggcagaaccctgggcagcggcgccttcggccaggtggtggaggccaccgcccacggcctgagccacagccaggccaccatgaaggtggccgtgaagatgctgaagagcaccgccagaagcagcgagaagcaggccctgatgagcgagctgaagatcatgagccacctgggcccccacctgaacgtggtgaacctgctgggcgcctgcaccaagggcggccccatctacatcatcaccgagtactgcagatacggcgacctggtggactacctgcacagaaacaagcacaccttcctgcagcaccacagcgacaagagaagaccccccagcgccgagctgtacagcaacgccctgcccgtgggcctgcccctgcccagccacgtgagcctgaccggcgagagcgacggcggctacatggacatgagcaaggacgagagcgtggactacgtgcccatgctggacatgaagggcgacgtgaagtacgccgacatcgagagcagcaactacatggccccctacgacaactacgtgcccagcgcccccgagagaacctgcagagccaccctgatcaacgagagccccgtgctgagctacatggacctggtgggcttcagctaccaggtggccaacggcatggagttcctggccagcaagaactgcgtgcacagagacctggccgccagaaacgtgctgatctgcgagggcaagctggtgaagatctgcgacttcggcctggccagagacatcatgagagacagcaactacatcagcaagggcagcaccttcctgcccctgaagtggatggcccccgagagcatcttcaacagcctgtacaccaccctgagcgacgtgtggagcttcggcatcctgctgtgggagatcttcaccctgggcggcaccccctaccccgagctgcccatgaacgagcagttctacaacgccatcaagagaggctacagaatggcccagcccgcccacgccagcgacgagatctacgagatcatgcagaagtgctgggaggagaagttcgagatcagaccccccttcagccagctggtgctgctgctggagagactgctgggcgagggctacaagaagaagtaccagcaggtggacgaggagttcctgagaagcgaccaccccgccatcctgagaagccaggccagactgcccggcttccacggcctgagaagccccctggacaccagcagcgtgctgtacaccgccgtgcagcccaacgagggcgacaacgactacatcatccccctgcccgaccccaagcccgaggtggccgacgagggccccctggagggcagccccagcctggccagcagcaccctgaacgaggtgaacaccagcagcaccatcagctgcgacagccccctggagccccaggacgagcccgagcccgagccccagctggagctgcaggtggagcccgagcccgagctggagcagctgcccgacagcggctgccccgcccccagagccgaggccgaggacagcttcctgtga

SEQ ID NO: 2918 - RNA, 942 nt, synthetic construct
  misc_feature 1..942: note = EAX03935 variant
  source 1..942: mol_type = other RNA
atgctgctgagcaagatcaacagcctggcccacctgagagccgccccctgcaacgacctgcacgccaccaagctggcccccggcaaggagaaggagcccctggagagccagtaccaggtgggccccctgctgggcagcggcggcttcggcagcgtgtacagcggcatcagagtgagcgacaacctgcccgtggccatcaagcacgtggagaaggacagaatcagcgactggggcgagctgcccaacggcaccagagtgcccatggaggtggtgctgctgaagaaggtgagcagcggcttcagcggcgtgatcagactgctggactggttcgagagacccgacagcttcgtgctgatcctggagagacccgagcccgtgcaggacctgttcgacttcatcaccgagagaggcgccctgcaggaggagctggccagaagcttcttctggcaggtgctggaggccgtgagacactgccacaactgcggcgtgctgcacagagacatcaaggacgagaacatcctgatcgacctgaacagaggcgagctgaagctgatcgacttcggcagcggcgccctgctgaaggacaccgtgtacaccgacttcgacggcaccagagtgtacagcccccccgagtggatcagataccacagataccacggcagaagcgccgccgtgtggagcctgggcatcctgctgtacgacatggtgtgcggcgacatccccttcgagcacgacgaggagatcatcagaggccaggtgttcttcagacagagagtgagcagcgagtgccagcacctgatcagatggtgcctggccctgagacccagcgacagacccaccttcgaggagatccagaaccacccctggatgcaggacgtgctgctgccccaggagaccgccgagatccacctgcacagcctgagccccggccccagcaagtga

SEQ ID NO: 2919 - RNA, 303 nt, synthetic construct
  misc_feature 1..303: note = AAB81333 variant
  source 1..303: mol_type = other RNA
atggccgacgaggagaagctgccccccggctgggagaagagaatgagcagacccagcggcagaggctactacttcaaccacatcaccaaccccagccagtgggagagacccagcggcaacagcagcagcggcggcaagatctggcagggcgagcccgccagagtgagaagaagccacctgctggtgaagcccgtgaaggccgccctggacctggccgccggcaaccaccccgaccagggcggcggccccggcgccgaccagagactgcaccccgaggaccagggcagaagagagggcctgtga

SEQ ID NO: 2920 - RNA, 492 nt, synthetic construct
  misc_feature 1..492: note = AAC50492 variant
  source 1..492: mol_type = other RNA
atggccgacgaggagaagctgccccccggctgggagaagagaatgagcagaagcagcggcagagtgtactacttcaaccacatcaccaacgccagccagtgggagagacccagcggcaacagcagcagcggcggcaagaacggccagggcgagcccgccagagtgagatgcagccacctgctggtgaagcacagccagagcagaagacccagcagctggagacaggagaagatcaccagaaccaaggaggaggccctggagctgatcaacggctacatccagaagatcaagagcggcgaggaggacttcgagagcctggccagccagttcagcgactgcagcagcgccaaggccagaggcgacctgggcgccttcagcagaggccagatgcagaagcccttcgaggacgccagcttcgccctgagaaccggcgagatgagcggccccgtgttcaccgacagcggcatccacatcatcctgagaaccgagtga

SEQ ID NO: 2921 - RNA, 138 nt, synthetic construct
  misc_feature 1..138: note = AAH31971 variant
  source 1..138: mol_type = other RNA
atgcagaagcccttcgaggacgccagcttcgccctgagaaccggcgagatgagcggccccgtgttcaccgacagcggcatccacatcatcctgagaaccgagtgctggagacagaccagaggccccaactgcttctga

SEQ ID NO: 2922 - RNA, 639 nt, synthetic construct
  misc_feature 1..639: note = AAG22596 variant
  source 1..639: mol_type = other RNA
atgaaggtgttcaagttcatcggcctgatgatcctgctgaccagcgccttcagcgccggcagcggccagagccccatgaccgtgctgtgcagcatcgactggttcatggtgaccgtgcaccccttcatgctgaacaacgacgtgtgcgtgcacttccacgagctgcacctgggcctgggctgcccccccaaccacgtgcagccccacgcctaccagttcacctacagagtgaccgagtgcggcatcagagccaaggccgtgagccaggacatggtgatctacagcaccgagatccactacagcagcaagggcacccccagcaagttcgtgatccccgtgagctgcgccgccccccagaagagcccctggctgaccaagccctgcagcatgagagtggccagcaagagcagagccaccgcccagaaggacgagaagtgctacgaggtgttcagcctgagccagagcagccagagacccaactgcgactgccccccctgcgtgttcagcgaggaggagcacacccaggtgccctgccaccaggccggcgcccaggaggcccagcccctgcagcccagccacttcctggacatcagcgaggactggagcctgcacaccgacgacatgatcggcagcatgtga

SEQ ID NO: 2923 - RNA, 1986 nt, synthetic construct
  misc_feature 1..1986: note = AAB00386 variant
  source 1..1986: mol_type = other RNA
atggacctggtgctgaagagatgcctgctgcacctggccgtgatcggcgccctgctggccgtgggcgccaccaaggtgcccagaaaccaggactggctgggcgtgagcagacagctgagaaccaaggcctggaacagacagctgtaccccgagtggaccgaggcccagagactggactgctggagaggcggccaggtgagcctgaaggtgagcaacgacggccccaccctgatcggcgccaacgccagcttcagcatcgccctgaacttccccggcagccagaaggtgctgcccgacggccaggtgatctgggtgaacaacaccatcatcaacggcagccaggtgtggggcggccagcccgtgtacccccaggagaccgacgacgcctgcatcttccccgacggcggcccctgccccagcggcagctggagccagaagagaagcttcgtgtacgtgtggaagacctggggccagtactggcaggtgctgggcggccccgtgagcggcctgagcatcggcaccggcagagccatgctgggcacccacaccatggaggtgaccgtgtaccacagaagaggcagcagaagctacgtgcccctggcccacagcagcagcgccttcaccatcaccgaccaggtgcccttcagcgtgagcgtgagccagctgagagccctggacggcggcaacaagcacttcctgagaaaccagcccctgaccttcgccctgcagctgcacgaccccagcggctacctggccgaggccgacctgagctacacctgggacttcggcgacagcagcggcaccctgatcagcagagccctggtggtgacccacacctacctggagcccggccccgtgaccgcccaggtggtgctgcaggccgccatccccctgaccagctgcggcagcagccccgtgcccggcaccaccgacggccacagacccaccgccgaggcccccaacaccaccgccggccaggtgcccaccaccgaggtggtgggcaccacccccggccaggcccccaccgccgagcccagcggcaccaccagcgtgcaggtgcccaccaccgaggtgatcagcaccgcccccgtgcagatgcccaccgccgagagcaccggcatgacccccgagaaggtgcccgtgagcgaggtgatgggcaccaccctggccgagatgagcacccccgaggccaccggcatgacccccgccgaggtgagcatcgtggtgctgagcggcaccaccgccgcccaggtgaccaccaccgagtgggtggagaccaccgccagagagctgcccatccccgagcccgagggccccgacgccagcagcatcatgagcaccgagagcatcaccggcagcctgggccccctgctggacggcaccgccaccctgagactggtgaagagacaggtgcccctggactgcgtgctgtacagatacggcagcttcagcgtgaccctggacatcgtgcagggcatcgagagcgccgagatcctgcaggccgtgcccagcggcgagggcgacgccttcgagctgaccgtgagctgccagggcggcctgcccaaggaggcctgcatggagatcagcagccccggctgccagccccccgcccagagactgtgccagcccgtgctgcccagccccgcctgccagctggtgctgcaccagatcctgaagggcggcagcggcacctactgcctgaacgtgagcctggccgacaccaacagcctggccgtggtgagcacccagctgatcatgcccggccaggaggccggcctgggccaggtgcccctgatcgtgggcatcctgctggtgctgatggccgtggtgctggccagcctgatctacagaagaagactgatgaagcaggacttcagcgtgccccagctgccccacagcagcagccactggctgagactgcccagaatcttctgcagctgccccatcggcgagaacagccccctgctgagcggccagcaggtgtga

SEQ ID NO: 2924 - RNA, 2649 nt, synthetic construct
  misc_feature 1..2649: note = CCDS10255.1 variant
  source 1..2649: mol_type = other RNA
atggagcccgcccccgccagaagccccagaccccagcaggaccccgccagaccccaggagcccaccatgcccccccccgagacccccagcgagggcagacagcccagccccagccccagccccaccgagagagcccccgccagcgaggaggagttccagttcctgagatgccagcagtgccaggccgaggccaagtgccccaagctgctgccctgcctgcacaccctgtgcagcggctgcctggaggccagcggcatgcagtgccccatctgccaggccccctggcccctgggcgccgacacccccgccctggacaacgtgttcttcgagagcctgcagagaagactgagcgtgtacagacagatcgtggacgcccaggccgtgtgcaccagatgcaaggagagcgccgacttctggtgcttcgagtgcgagcagctgctgtgcgccaagtgcttcgaggcccaccagtggttcctgaagcacgaggccagacccctggccgagctgagaaaccagagcgtgagagagttcctggacggcaccagaaagaccaacaacatcttctgcagcaaccccaaccacagaacccccaccctgaccagcatctactgcagaggctgcagcaagcccctgtgctgcagctgcgccctgctggacagcagccacagcgagctgaagtgcgacatcagcgccgagatccagcagagacaggaggagctggacgccatgacccaggccctgcaggagcaggacagcgccttcggcgccgtgcacgcccagatgcacgccgccgtgggccagctgggcagagccagagccgagaccgaggagctgatcagagagagagtgagacaggtggtggcccacgtgagagcccaggagagagagctgctggaggccgtggacgccagataccagagagactacgaggagatggccagcagactgggcagactggacgccgtgctgcagagaatcagaaccggcagcgccctggtgcagagaatgaagtgctacgccagcgaccaggaggtgctggacatgcacggcttcctgagacaggccctgtgcagactgagacaggaggagccccagagcctgcaggccgccgtgagaaccgacggcttcgacgagttcaaggtgagactgcaggacctgagcagctgcatcacccagggcaaggacgccgccgtgagcaagaaggccagccccgaggccgccagcacccccagagaccccatcgacgtggacctgcccgaggaggccgagagagtgaaggcccaggtgcaggccctgggcctggccgaggcccagcccatggccgtggtgcagagcgtgcccggcgcccaccccgtgcccgtgtacgccttcagcatcaagggccccagctacggcgaggacgtgagcaacaccaccaccgcccagaagagaaagtgcagccagacccagtgccccagaaaggtgatcaagatggagagcgaggagggcaaggaggccagactggccagaagcagccccgagcagcccagacccagcaccagcaaggccgtgagccccccccacctggacggcccccccagccccagaagccccgtgatcggcagcgaggtgttcctgcccaacagcaaccacgtggccagcggcgccggcgaggccgaggagagagtggtggtgatcagcagcagcgaggacagcgacgccgagaacagcagcagcagagagctggacgacagcagcagcgagagcagcgacctgcagctggagggccccagcaccctgagagtgctggacgagaacctggccgacccccaggccgaggacagacccctggtgttcttcgacctgaagatcgacaacgagacccagaagatcagccagctggccgccgtgaacagagagagcaagttcagagtggtgatccagcccgaggccttcttcagcatctacagcaaggccgtgagcctggaggtgggcctgcagcacttcctgagcttcctgagcagcatgagaagacccatcctggcctgctacaagctgtggggccccggcctgcccaacttcttcagagccctggaggacatcaacagactgtgggagttccaggaggccatcagcggcttcctggccgccctgcccctgatcagagagagagtgcccggcgccagcagcttcaagctgaagaacctggcccagacctacctggccagaaacatgagcgagagaagcgccatggccgccgtgctggccatgagagacctgtgcagactgctggaggtgagccccggcccccagctggcccagcacgtgtaccccttcagcagcctgcagtgcttcgccagcctgcagcccctggtgcaggccgccgtgctgcccagagccgaggccagactgctggccctgcacaacgtgagcttcatggagctgctgagcgcccacagaagagacagacagggcggcctgaagaagtacagcagatacctgagcctgcagaccaccaccctgccccccgcccagcccgccttcaacctgcaggccctgggcacctacttcgagggcctgctggagggccccgccctggccagagccgagggcgtgagcacccccctggccggcagaggcctggccgagagagccagccagcagagctga

SEQ ID NO: 2925 - RNA, 3228 nt, synthetic construct
  misc_feature 1..3228: note = CCDS46409.1 variant
  source 1..3228: mol_type = other RNA
atggtggtggaggtggacagcatgcccgccgccagcagcgtgaagaagcccttcggcctgagaagcaagatgggcaagtggtgctgcagatgcttcccctgctgcagagagagcggcaagagcaacgtgggcaccagcggcgaccacgacgacagcgccatgaagaccctgagaagcaagatgggcaagtggtgcagacactgcttcccctgctgcagaggcagcggcaagagcaacgtgggcgccagcggcgaccacgacgacagcgccatgaagaccctgagaaacaagatgggcaagtggtgctgccactgcttcccctgctgcagaggcagcagcaagagcaaggtgggcgcctggggcgactacgacgacagcgccttcatggagcccagataccacgtgagaggcgaggacctggacaagctgcacagagccgcctggtggggcaaggtgcccagaaaggacctgatcgtgatgctgagagacaccgacgtgaacaagcaggacaagcagaagagaaccgccctgcacctggccagcgccaacggcaacagcgaggtggtgaagctgctgctggacagaagatgccagctgaacgtgctggacaacaagaagagaaccgccctgatcaaggccgtgcagtgccaggaggacgagtgcgccctgatgctgctggagcacggcaccgaccccaacatccccgacgagtacggcaacaccaccctgcactacgccatctacaacgaggacaagctgatggccaaggccctgctgctgtacggcgccgacatcgagagcaagaacaagcacggcctgacccccctgctgctgggcgtgcacgagcagaagcagcaggtggtgaagttcctgatcaagaagaaggccaacctgaacgccctggacagatacggcagaaccgccctgatcctggccgtgtgctgcggcagcgccagcatcgtgagcctgctgctggagcagaacatcgacgtgagcagccaggacctgagcggccagaccgccagagagtacgccgtgagcagccaccaccacgtgatctgccagctgctgagcgactacaaggagaagcagatgctgaagatcagcagcgagaacagcaaccccgagcaggacctgaagctgaccagcgaggaggagagccagagattcaagggcagcgagaacagccagcccgagaagatgagccaggagcccgagatcaacaaggacggcgacagagaggtggaggaggagatgaagaagcacgagagcaacaacgtgggcctgctggagaacctgaccaacggcgtgaccgccggcaacggcgacaacggcctgatcccccagagaaagagcagaacccccgagaaccagcagttccccgacaacgagagcgaggagtaccacagaatctgcgagctgctgagcgactacaaggagaagcagatgcccaagtacagcagcgagaacagcaaccccgagcaggacctgaagctgaccagcgaggaggagagccagagactgaagggcagcgagaacggccagcccgagaagagaagccaggagcccgagatcaacaaggacggcgacagagagctggagaacttcatggccatcgaggagatgaagaagcacagaagcacccacgtgggcttccccgagaacctgaccaacggcgccaccgccggcaacggcgacgacggcctgatcccccccagaaagagcagaacccccgagagccagcagttccccgacaccgagaacgaggagtaccacagcgacgagcagaacgacacccagaagcagttctgcgaggagcagaacaccggcatcctgcacgacgagatcctgatccacgaggagaagcagatcgaggtggtggagaagatgaacagcgagctgagcctgagctgcaagaaggagaaggacatcctgcacgagaacagcaccctgagagaggagatcgccatgctgagactggagctggacaccatgaagcaccagagccagctgagagagaagaagtacctggaggacatcgagagcgtgaagaagagaaacgacaacctgctgaaggccctgcagctgaacgagctgaccatggacgacgacaccgccgtgctggtgatcgacaacggcagcggcatgtgcaaggccggcttcgccggcgacgacgcccccagagccgtgttccccagcatcgtgggcagacccagacagcagggcatgatgggcggcatgcaccagaaggagagctacgtgggcaaggaggcccagagcaagagaggcatcctgaccctgaagtaccccatggagcacggcatcatcaccaactgggacgacatggagaagatctggcaccacaccttctacaacgagctgagagtggcccccgaggagcaccccgtgctgctgaccgaggccaccctgaaccccaaggccaacagagagaagatgacccagatcatgttcgagaccttcaacacccccgccatgtacgtggccatccaggccgtgctgagcctgtacaccagcggcagaaccaccggcatcgtgatggacagcggcgacggcgtgacccacaccgtgcccatctacgagggcaacgccctgccccacgccaccctgagactggacctggccggcagagagctgcccgactacctgatgaagatcctgaccgagcacggctacagattcaccaccatggccgagagagagatcgtgagagacatcaaggagaagctgtgctacgtggccctggacttcgagcaggagatggccaccgtggccagcagcagcagcctggagaagagctacgagctgcccgacggccaggtgatcaccatcggcaacgagagattcagatgccccgaggccctgttccagccctgcttcctgggcatggagagctgcggcatccacgagaccaccttcaacagcatcatgaagagcgacgtggacatcagaaaggacctgtacaccaacaccgtgctgagcggcggcaccaccatgtaccccggcatggcccacagaatgcagaaggagatcgccgccctggcccccagcatgatgaagatcagaatcatcgccccccccaagagaaagtacagcgtgtgggtgggcggcagcatcctggccagcctgagcaccttccagcagatgtggatcagcaagcaggagtacgacgagagcggccccagcatcgtgcacagaaagtgcctgtga

SEQ ID NO: 2926 - RNA, 1755 nt, synthetic construct
  misc_feature 1..1755: note = CCDS13562.1 variant
  source 1..1755: mol_type = other RNA
atggtggccgaggtgtgcagcatgcccaccgccagcaccgtgaagaagcccttcgacctgagaagcaagatgggcaagtggtgccaccacagattcccctgctgcagaggcagcggcaagagcaacatgggcaccagcggcgaccacgacgacagcttcatgaagatgctgagaagcaagatgggcaagtgctgcagacactgcttcccctgctgcagaggcagcggcaccagcaacgtgggcaccagcggcgaccacgagaacagcttcatgaagatgctgagaagcaagatgggcaagtggtgctgccactgcttcccctgctgcagaggcagcggcaagagcaacgtgggcgcctggggcgactacgaccacagcgccttcatggagcccagataccacatcagaagagaggacctggacaagctgcacagagccgcctggtggggcaaggtgcccagaaaggacctgatcgtgatgctgagagacaccgacatgaacaagagagacaaggagaagagaaccgccctgcacctggccagcgccaacggcaacagcgaggtggtgcagctgctgctggacagaagatgccagctgaacgtgctggacaacaagaagagaaccgccctgatcaaggccatccagtgccaggaggacgagtgcgtgctgatgctgctggagcacggcgccgacagaaacatccccgacgagtacggcaacaccgccctgcactacgccatctacaacgaggacaagctgatggccaaggccctgctgctgtacggcgccgacatcgagagcaagaacaagtgcggcctgacccccctgctgctgggcgtgcacgagcagaagcagcaggtggtgaagttcctgatcaagaagaaggccaacctgaacgtgctggacagatacggcagaaccgccctgatcctggccgtgtgctgcggcagcgccagcatcgtgaacctgctgctggagcagaacgtggacgtgagcagccaggacctgagcggccagaccgccagagagtacgccgtgagcagccaccaccacgtgatctgcgagctgctgagcgactacaaggagaagcagatgctgaagatcagcagcgagaacagcaaccccgagcaggacctgaagctgaccagcgaggaggagagccagagactgaaggtgagcgagaacagccagcccgagaagatgagccaggagcccgagatcaacaaggactgcgacagagaggtggaggaggagatcaagaagcacggcagcaaccccgtgggcctgcccgagaacctgaccaacggcgccagcgccggcaacggcgacgacggcctgatcccccagagaagaagcagaaagcccgagaaccagcagttccccgacaccgagaacgaggagtaccacagcgacgagcagaacgacaccagaaagcagctgagcgaggagcagaacaccggcatcagccaggacgagatcctgaccaacaagcagaagcagatcgaggtggccgagcagaagatgaacagcgagctgagcctgagccacaagaaggaggaggacctgctgagagagaacagcgtgctgcaggaggagatcgccatgctgagactggagctggacgagaccaagcaccagaaccagctgagagagaacaagatcctggaggagatcgagagcgtgaaggagaagaccgacaagctgctgagagccatgcagctgaacgaggaggccctgaccaagaccaacatctga

SEQ ID NO: 2927 - RNA, 1530 nt, synthetic construct
  misc_feature 1..1530: note = EAW59519 variant
  source 1..1530: mol_type = other RNA
atggagagaagaagactgtggggcagcatccagagcagatacatcagcatgagcgtgtggaccagccccagaagactggtggagctggccggccagagcctgctgaaggacgaggccctggccatcgccgccctggagctgctgcccagagagctgttcccccccctgttcatggccgccttcgacggcagacacagccagaccctgaaggccatggtgcaggcctggcccttcacctgcctgcccctgggcgtgctgatgaagggccagcacctgcacctggagaccttcaaggccgtgctggacggcctggacgtgctgctggcccaggaggtgagacccagaagatggaagctgcaggtgctggacctgagaaagaacagccaccaggacttctggaccgtgtggagcggcaacagagccagcctgtacagcttccccgagcccgaggccgcccagcccatgaccaagaagagaaaggtggacggcctgagcaccgaggccgagcagcccttcatccccgtggaggtgctggtggacctgttcctgaaggagggcgcctgcgacgagctgttcagctacctgatcgagaaggtgaagagaaagaagaacgtgctgagactgtgctgcaagaagctgaagatcttcgccatgcccatgcaggacatcaagatgatcctgaagatggtgcagctggacagcatcgaggacctggaggtgacctgcacctggaagctgcccaccctggccaagttcagcccctacctgggccagatgatcaacctgagaagactgctgctgagccacatccacgccagcagctacatcagccccgagaaggaggagcagtacatcgcccagttcaccagccagttcctgagcctgcagtgcctgcaggccctgtacgtggacagcctgttcttcctgagaggcagactggaccagctgctgagacacgtgatgaaccccctggagaccctgagcatcaccaactgcagactgagcgagggcgacgtgatgcacctgagccagagccccagcgtgagccagctgagcgtgctgagcctgagcggcgtgatgctgaccgacgtgagccccgagcccctgcaggccctgctggagagagccagcgccaccctgcaggacctggtgttcgacgagtgcggcatcaccgacgaccagctgctggccctgctgcccagcctgagccactgcagccagctgaccaccctgagcttctacggcaacagcatcagcatcagcgccctgcagagcctgctgcagcacctgatcggcctgagcaacctgacccacgtgctgtaccccgtgcccctggagagctacgaggacatccacggcaccctgcacctggagagactggcctacctgcacgccagactgagagagctgctgtgcgagctgggcagacccagcatggtgtggctgagcgccaacccctgcccccactgcggcgacagaaccttctacgaccccgagcccatcctgtgcccctgcttcatgcccaactga

SEQ ID NO: 2928 - RNA, 1530 nt, synthetic construct; identical to SEQ ID NO: 2927
  misc_feature 1..1530: note = AAC51160 variant
  source 1..1530: mol_type = other RNA

SEQ ID NO: 2929 - RNA, 645 nt, synthetic construct
  misc_feature 1..645: note = CCDS8069.1 variant
  source 1..645: mol_type = other RNA
atgggcctggccggcgtgtgcgccctgagaagaagcgccggctacatcctggtgggcggcgccggcggccagagcgccgccgccgccgccagaagatacagcgagggcgagtgggccagcggcggcgtgagaagcttcagcagagccgccgccgccatggcccccatcaaggtgggcgacgccatccccgccgtggaggtgttcgagggcgagcccggcaacaaggtgaacctggccgagctgttcaagggcaagaagggcgtgctgttcggcgtgcccggcgccttcacccccggctgcagcaagacccacctgcccggcttcgtggagcaggccgaggccctgaaggccaagggcgtgcaggtggtggcctgcctgagcgtgaacgacgccttcgtgaccggcgagtggggcagagcccacaaggccgagggcaaggtgagactgctggccgaccccaccggcgccttcggcaaggagaccgacctgctgctggacgacagcctggtgagcatcttcggcaacagaagactgaagagattcagcatggtggtgcaggacggcatcgtgaaggccctgaacgtggagcccgacggcaccggcctgacctgcagcctggcccccaacatcatcagccagctgtga

SEQ ID NO: 2930 - RNA, 309 nt, synthetic construct
  misc_feature 1..309: note = AAA63250 variant
  source 1..309: mol_type = other RNA
atggtgagatacagagtgagaagcctgagcgagagaagccacgaggtgtacagacagcagctgcacggccaggagcagggccaccacggccaggaggagcagggcctgagccccgagcacgtggaggtgtacgagagaacccacggccagagccactacagaagaagacactgcagcagaagaagactgcacagaatccacagaagacagcacagaagctgcagaagaagaaagagaagaagctgcagacacagaagaagacacagaagaggctgcagaaccagaaagagaacctgcagaagacactga

SEQ ID NO: 2931 - RNA, 1662 nt, synthetic construct
  misc_feature 1..1662: note = AAH50416 variant
  source 1..1662: mol_type = other RNA
atggtgcagagactgtgggtgagcagactgctgagacacagaaaggcccagctgctgctggtgaacctgctgaccttcggcctggaggtgtgcctggccgccggcatcacctacgtgccccccctgctgctggaggtgggcgtggaggagaagttcatgaccatggtgctgggcatcggccccgtgctgggcctggtgtgcgtgcccctgctgggcagcgccagcgaccactggagaggcagatacggcagaagaagacccttcatctgggccctgagcctgggcatcctgctgagcctgttcctgatccccagagccggctggctggccggcctgctgtgccccgaccccagacccctggagctggccctgctgatcctgggcgtgggcctgctggacttctgcggccaggtgtgcttcacccccctggaggccctgctgagcgacctgttcagagaccccgaccactgcagacaggcctacagcgtgtacgccttcatgatcagcctgggcggctgcctgggctacctgctgcccgccatcgactgggacaccagcgccctggccccctacctgggcacccaggaggagtgcctgttcggcctgctgaccctgatcttcctgacctgcgtggccgccaccctgctggtggccgaggaggccgccctgggccccaccgagcccgccgagggcctgagcgcccccagcctgagcccccactgctgcccctgcagagccagactggccttcagaaacctgggcgccctgctgcccagactgcaccagctgtgctgcagaatgcccagaaccctgagaagactgttcgtggccgagctgtgcagctggatggccctgatgaccttcaccctgttctacaccgacttcgtgggcgagggcctgtaccagggcgtgcccagagccgagcccggcaccgaggccagaagacactacgacgagggcgtgagaatgggcagcctgggcctgttcctgcagtgcgccatcagcctggtgttcagcctggtgatggacagactggtgcagagattcggcaccagagccgtgtacctggccagcgtggccgccttccccgtggccgccggcgccacctgcctgagccacagcgtggccgtggtgaccgccagcgccgccctgaccggcttcaccttcagcgccctgcagatcctgccctacaccctggccagcctgtaccacagagagaagcaggtgttcctgcccaagtacagaggcgacaccggcggcgccagcagcgaggacagcctgatgaccagcttcctgcccggccccaagcccggcgcccccttccccaacggccacgtgggcgccggcggcagcggcctgctgccccccccccccgccctgtgcggcgccagcgcctgcgacgtgagcgtgagagtggtggtgggcgagcccaccgaggccagagtggtgcccggcagaggcatctgcctggacctggccatcctggacagcgccttcctgctgagccaggtggcccccagcctgttcatgggcagcatcgtgcagctgagccagagcgtgaccgcctacatggtgagcgccgccggcctgggcctggtggccatctacttcgccacccaggtggtgttcgacaagagcgacctggccaagtacagcgcctga

SEQ ID NO: 2932 - RNA, 648 nt, synthetic construct
  misc_feature 1..648: note = CBI83574 variant
  source 1..648: mol_type = other RNA
atggccagcctgcagatgagaggcaaccccggcagccacttctgcggcggcaccctgatccaccccagcttcgtgctgaccgccgcccactgcctgagagacatcccccagagactggtgaacgtggtgctgggcgcccacaacgtgagaacccaggagcccacccagcagcacttcagcgtggcccaggtgttcctgaacaactacgacgccgagaacaagctgaacgacatcctgctgatccagctgagcagccccgccaacctgagcgccagcgtggccaccgtgcagctgccccagcaggaccagcccgtgccccacggcacccagtgcctggccatgggctggggcagagtgggcgcccacgacccccccgcccaggtgctgcaggagctgaacgtgaccgtggtgaccttcttctgcagaccccacaacatctgcaccttcgtgcccagaagaaaggccggcatctgcttcggcgacagcggcggccccctgatctgcgacggcatcatccagggcatcgacagcttcgtgatctggggctgcgccaccagactgttccccgacttcttcaccagagtggccctgtacgtggactggatcagaagcaccctgagaagagtggaggccaagggcagaccctga

SEQ ID NO: 2933 - RNA, 771 nt, synthetic construct
  misc_feature 1..771: note = AAH96183 variant
  source 1..771: mol_type = other RNA
atggcccacagaccccccagccccgccctggccagcgtgctgctggccctgctgctgagcggcgccgccagagccgccgagatcgtgggcggccacgaggcccagccccacagcagaccctacatggccagcctgcagatgagaggcaaccccggcagccacttctgcggcggcaccctgatccaccccagcttcgtgctgaccgccgcccactgcctgagagacatcccccagagactggtgaacgtggtgctgggcgcccacaacgtgagaacccaggagcccacccagcagcacttcagcgtggcccaggtgttcctgaacaactacgacgccgagaacaagctgaacgacgtgctgctgatccagctgagcagccccgccaacctgagcgccagcgtggccaccgtgcagctgccccagcaggaccagcccgtgccccacggcacccagtgcctggccatgggctggggcagagtgggcgcccacgacccccccgcccaggtgctgcaggagctgaacgtgaccgtggtgaccttcttctgcagaccccacaacatctgcaccttcgtgcccagaagaaaggccggcatctgcttcggcgacagcggcggccccctgatctgcgacggcatcatccagggcatcgacagcttcgtgatctggggctgcgccaccagactgttccccgacttcttcaccagagtggccctgtacgtggactggatcagaagcaccctgagaagagtggaggccaagggcagaccctga

SEQ ID NO: 2934 - RNA, 2760 nt, synthetic construct
  misc_feature 1..2760: note = CCDS45721.1 variant
  source 1..2760: mol_type = other RNA
atgtggctggccgccgccgcccccagcctggccagaagactgctgttcctgggccccccccccccccccctgctgctgctggtgttcagcagaagcagcagaagaagactgcacagcctgggcctggccgccatgcccgagaagagacccttcgagagactgcccgccgacgtgagccccatcaactacagcctgtgcctgaagcccgacctgctggacttcaccttcgagggcaagctggaggccgccgcccaggtgagacaggccaccaaccagatcgtgatgaactgcgccgacatcgacatcatcaccgccagctacgcccccgagggcgacgaggagatccacgccaccggcttcaactaccagaacgaggacgagaaggtgaccctgagcttccccagcaccctgcagaccggcaccggcaccctgaagatcgacttcgtgggcgagctgaacgacaagatgaagggcttctacagaagcaagtacaccacccccagcggcgaggtgagatacgccgccgtgacccagttcgaggccaccgacgccagaagagccttcccctgctgggacgagcccgccatcaaggccaccttcgacatcagcctggtggtgcccaaggacagagtggccctgagcaacatgaacgtgatcgacagaaagccctaccccgacgacgagaacctggtggaggtgaagttcgccagaacccccgtgatgagcacctacctggtggccttcgtggtgggcgagtacgacttcgtggagaccagaagcaaggacggcgtgtgcgtgagagtgtacacccccgtgggcaaggccgagcagggcaagttcgccctggaggtggccgccaagaccctgcccttctacaaggactacttcaacgtgccctaccccctgcccaagatcgacctgatcgccatcgccgacttcgccgccggcgccatggagaactggggcctggtgacctacagagagaccgccctgctgatcgaccccaagaacagctgcagcagcagcagacagtgggtggccctggtggtgggccacgagctggcccaccagtggttcggcaacctggtgaccatggagtggtggacccacctgtggctgaacgagggcttcgccagctggatcgagtacctgtgcgtggaccactgcttccccgagtacgacatctggacccagttcgtgagcgccgactacaccagagcccaggagctggacgccctggacaacagccaccccatcgaggtgagcgtgggccaccccagcgaggtggacgagatcttcgacgccatcagctacagcaagggcgccagcgtgatcagaatgctgcacgactacatcggcgacaaggacttcaagaagggcatgaacatgtacctgaccaagttccagcagaagaacgccgccaccgaggacctgtgggagagcctggagaacgccagcggcaagcccatcgccgccgtgatgaacacctggaccaagcagatgggcttccccctgatctacgtggaggccgagcaggtggaggacgacagactgctgagactgagccagaagaagttctgcgccggcggcagctacgtgggcgaggactgcccccagtggatggtgcccatcaccatcagcaccagcgaggaccccaaccaggccaagctgaagatcctgatggacaagcccgagatgaacgtggtgctgaagaacgtgaagcccgaccagtgggtgaagctgaacctgggcaccgtgggcttctacagaacccagtacagcagcgccatgctggagagcctgctgcccggcatcagagacctgagcctgccccccgtggacagactgggcctgcagaacgacctgttcagcctggccagagccggcatcatcagcaccgtggaggtgctgaaggtgatggaggccttcgtgaacgagcccaactacaccgtgtggagcgacctgagctgcaacctgggcatcctgagcaccctgctgagccacaccgacttctacgaggagatccaggagttcgtgaaggacgtgttcagccccatcggcgagagactgggctgggaccccaagcccggcgagggccacctggacgccctgctgagaggcctggtgctgggcaagctgggcaaggccggccacaaggccaccctggaggaggccagaagaagattcaaggaccacgtggagggcaagcagatcctgagcgccgacctgagaagccccgtgtacctgaccgtgctgaagcacggcgacggcaccaccctggacatcatgctgaagctgcacaagcaggccgacatgcaggaggagaagaacagaatcgagagagtgctgggcgccaccctgctgcccgacctgatccagaaggtgctgaccttcgccctgagcgaggaggtgagaccccaggacaccgtgagcgtgatcggcggcgtggccggcggcagcaagcacggcagaaaggccgcctggaagttcatcaaggacaactgggaggagctgtacaacagataccagggcggcttcctgatcagcagactgatcaagctgagcgtggagggcttcgccgtggacaagatggccggcgaggtgaaggccttcttcgagagccaccccgcccccagcgccgagagaaccatccagcagtgctgcgagaacatcctgctgaacgccgcctggctgaagagagacgccgagagcatccaccagtacctgctgcagagaaaggccagcccccccaccgtgtga

SEQ ID NO: 2935 - RNA, 660 nt, synthetic construct
  misc_feature 1..660: note = AAH65513 variant
  source 1..660: mol_type = other RNA
atgctgagagccggcgcccccaccggcgacctgcccagagccggcgaggtgcacaccggcaccaccatcatggccgtggagttcgacggcggcgtggtgatgggcagcgacagcagagtgagcgccggcgaggccgtggtgaacagagtgttcgacaagctgagccccctgcacgagagaatctactgcgccctgagcggcagcgccgccgacgcccaggccgtggccgacatggccgcctaccagctggagctgcacggcatcgagctggaggagccccccctggtgctggccgccgccaacgtggtgagaaacatcagctacaagtacagagaggacctgagcgcccacctgatggtggccggctgggaccagagagagggcggccaggtgtacggcaccctgggcggcatgctgaccagacagcccttcgccatcggcggcagcggcagcaccttcatctacggctacgtggacgccgcctacaagcccggcatgagccccgaggagtgcagaagattcaccaccgacgccatcgccctggccatgagcagagacggcagcagcggcggcgtgatctacctggtgaccatcaccgccgccggcgtggaccacagagtgatcctgggcaacgagctgcccaagttctacgacgagtga

SEQ ID NO: 2936 - RNA, 345 nt, synthetic construct
  misc_feature 1..345: note = EAW82312 variant
  source 1..345: mol_type = other RNA
atggccggcctggccctgcagcccggcaccgccctgctgtgctacagctgcaaggcccaggtgagcaacgaggactgcctgcaggtggagaactgcacccagctgggcgagcagtgctggaccgccagaatcagagccgtgggcctgctgaccgtgatcagcaagggctgcagcctgaactgcgtggacgacagccaggactactacgtgggcaagaagaacatcacctgctgcgacaccgacctgtgcaacgccagcggcgcccacgccctgcagcccgccgccgccatcctggccctgctgcccgccctgggcctgctgctgtggggccccggccagctgtga

SEQ ID NO: 2937 - RNA, 372 nt, synthetic construct
  misc_feature 1..372: note = AAC39607 variant
  source 1..372: mol_type = other RNA
atgaaggccgtgctgctggccctgctgatggccggcctggccctgcagcccggcaccgccctgctgtgctacagctgcaaggcccaggtgagcaacgaggactgcctgcaggtggagaactgcacccagctgggcgagcagtgctggaccgccagaatcagagccgtgggcctgctgaccgtgatcagcaagggctgcagcctgaactgcgtggacgacagccaggactactacgtgggcaagaagaacatcacctgctgcgacaccgacctgtgcaacgccagcggcgcccacgccctgcagcccgccgccgccatcctggccctgctgcccgccctgggcctgctgctgtggggccccggccagctgtga

SEQ ID NO: 2938 - RNA, 963 nt, synthetic construct
  misc_feature 1..963: note = AAG40776 variant
  source 1..963: mol_type = other RNA
atgagcagctgcaacttcacccacgccaccttcgtgctgatcggcatccccggcctggagaaggcccacttctgggtgggcttccccctgctgagcatgtacgtggtggccatgttcggcaactgcatcgtggtgttcatcgtgagaaccgagagaagcctgcacgcccccatgtacctgttcctgtgcatgctggccgccatcgacctggccctgagcaccagcaccatgcccaagatcctggccctgttctggttcgacagcagagagatcagcttcgaggcctgcctgacccagatgttcttcatccacgccctgagcgccatcgagagcaccatcctgctggccatggccttcgacagatacgtggccatctgccaccccctgagacacgccgccgtgctgaacaacaccgtgaccgcccagatcggcatcgtggccgtggtgagaggcagcctgttcttcttccccctgcccctgctgatcaagagactggccttctgccacagcaacgtgctgagccacagctactgcgtgcaccaggacgtgatgaagctggcctacgccgacaccctgcccaacgtggtgtacggcctgaccgccatcctgctggtgatgggcgtggacgtgatgttcatcagcctgagctacttcctgatcatcagaaccgtgctgcagctgcccagcaagagcgagagagccaaggccttcggcacctgcgtgagccacatcggcgtggtgctggccttctacgtgcccctgatcggcctgagcgtggtgcacagattcggcaacagcctgcaccccatcgtgagagtggtgatgggcgacatctacctgctgctgccccccgtgatcaaccccatcatctacggcgccaagaccaagcagatcagaaccagagtgctggccatgttcaagatcagctgcgacaaggacctgcaggccgtgggcggcaagtga

SEQ ID NO: 2939 - RNA, 2253 nt, synthetic construct
  misc_feature 1..2253: note = AAA60209 variant
  source 1..2253: mol_type = other RNA
atgtggaacctgctgcacgagaccgacagcgccgtggccaccgccagaagacccagatggctgtgcgccggcgccctggtgctggccggcggcttcttcctgctgggcttcctgttcggctggttcatcaagagcagcaacgaggccaccaacatcacccccaagcacaacatgaaggccttcctggacgagctgaaggccgagaacatcaagaagttcctgtacaacttcacccagatcccccacctggccggcaccgagcagaacttccagctggccaagcagatccagagccagtggaaggagttcggcctggacagcgtggagctggcccactacgacgtgctgctgagctaccccaacaagacccaccccaactacatcagcatcatcaacgaggacggcaacgagatcttcaacaccagcctgttcgagccccccccccccggctacgagaacgtgagcgacatcgtgccccccttcagcgccttcagcccccagggcatgcccgagggcgacctggtgtacgtgaactacgccagaaccgaggacttcttcaagctggagagagacatgaagatcaactgcagcggcaagatcgtgatcgccagatacggcaaggtgttcagaggcaacaaggtgaagaacgcccagctggccggcgccaagggcgtgatcctgtacagcgaccccgccgactacttcgcccccggcgtgaagagctaccccgacggctggaacctgcccggcggcggcgtgcagagaggcaacatcctgaacctgaacggcgccggcgaccccctgacccccggctaccccgccaacgagtacgcctacagaagaggcatcgccgaggccgtgggcctgcccagcatccccgtgcaccccatcggctactacgacgcccagaagctgctggagaagatgggcggcagcgccccccccgacagcagctggagaggcagcctgaaggtgccctacaacgtgggccccggcttcaccggcaacttcagcacccagaaggtgaagatgcacatccacagcaccaacgaggtgaccagaatctacaacgtgatcggcaccctgagaggcgccgtggagcccgacagatacgtgatcctgggcggccacagagacagctgggtgttcggcggcatcgacccccagagcggcgccgccgtggtgcacgagatcgtgagaagcttcggcaccctgaagaaggagggctggagacccagaagaaccatcctgttcgccagctgggacgccgaggagttcggcctgctgggcagcaccgagtgggccgaggagaacagcagactgctgcaggagagaggcgtggcctacatcaacgccgacagcagcatcgagggcaactacaccctgagagtggactgcacccccctgatgtacagcctggtgcacaacctgaccaaggagctgaagagccccgacgagggcttcgagggcaagagcctgtacgagagctggaccaagaagagccccagccccgagttcagcggcatgcccagaatcagcaagctgggcagcggcaacgacttcgaggtgttcttccagagactgggcatcgccagcggcagagccagatacaccaagaactgggagaccaacaagttcagcggctaccccctgtaccacagcgtgtacgagacctacgagctggtggagaagttctacgaccccatgttcaagtaccacctgaccgtggcccaggtgagaggcggcatggtgttcgagctggccaacagcatcgtgctgcccttcgactgcagagactacgccgtggtgctgagaaagtacgccgacaagatctacagcatcagcatgaagcacccccaggagatgaagacctacagcgtgagcttcgacagcctgttcagcgccgtgaagaacttcaccgagatcgccagcaagttcagcgagagactgcaggacttcgacaagagcaaccccatcgtgctgagaatgatgaacgaccagctgatgttcctggagagagccttcatcgaccccctgggcctgcccgacagacccttctacagacacgtgatctacgcccccagcagccacaacaagtacgccggcgagagcttccccggcatctacgacgccctgttcgacatcgagagcaaggtggaccccagcaaggcctggggcgaggtgaagagacagatctacgtggccgccttcaccgtgcaggccgccgccgagaccctgagcgaggtggcctga

SEQ ID NO: 2940 - RNA, 3921 nt, synthetic construct
  misc_feature 1..3921: note = CCDS1397.2 variant
  source 1..3921: mol_type = other RNA
atgaccatgtacctgtggctgaagctgctggccttcggcttcgccttcctggacaccgaggtgttcgtgaccggccagagccccacccccagccccaccggcctgaccaccgccaagatgcccagcgtgcccctgagcagcgaccccctgcccacccacaccaccgccttcagccccgccagcaccttcgagagagagaacgacttcagcgagaccaccaccagcctgagccccgacaacaccagcacccaggtgagccccgacagcctggacaacgccagcgccttcaacaccaccggcgtgagcagcgtgcagaccccccacctgcccacccacgccgacagccagacccccagcgccggcaccgacacccagaccttcagcggcagcgccgccaacgccaagctgaaccccacccccggcagcaacgccatcagcgacgtgcccggcgagagaagcaccgccagcaccttccccaccgaccccgtgagccccctgaccaccaccctgagcctggcccaccacagcagcgccgccctgcccgccagaaccagcaacaccaccatcaccgccaacaccagcgacgcctacctgaacgccagcgagaccaccaccctgagccccagcggcagcgccgtgatcagcaccaccaccatcgccaccacccccagcaagcccacctgcgacgagaagtacgccaacatcaccgtggactacctgtacaacaaggagaccaagctgttcaccgccaagctgaacgtgaacgagaacgtggagtgcggcaacaacacctgcaccaacaacgaggtgcacaacctgaccgagtgcaagaacgccagcgtgagcatcagccacaacagctgcaccgcccccgacaagaccctgatcctggacgtgccccccggcgtggagaagttccagctgcacgactgcacccaggtggagaaggccgacaccaccatctgcctgaagtggaagaacatcgagaccttcacctgcgacacccagaacatcacctacagattccagtgcggcaacatgatcttcgacaacaaggagatcaagctggagaacctggagcccgagcacgagtacaagtgcgacagcgagatcctgtacaacaaccacaagttcaccaacgccagcaagatcatcaagaccgacttcggcagccccggcgagccccagatcatcttctgcagaagcgaggccgcccaccagggcgtgatcacctggaaccccccccagagaagcttccacaacttcaccctgtgctacatcaaggagaccgagaaggactgcctgaacctggacaagaacctgatcaagtacgacctgcagaacctgaagccctacaccaagtacgtgctgagcctgcacgcctacatcatcgccaaggtgcagagaaacggcagcgccgccatgtgccacttcaccaccaagagcgccccccccagccaggtgtggaacatgaccgtgagcatgaccagcgacaacagcatgcacgtgaagtgcagaccccccagagacagaaacggcccccacgagagataccacctggaggtggaggccggcaacaccctggtgagaaacgagagccacaagaactgcgacttcagagtgaaggacctgcagtacagcaccgactacaccttcaaggcctacttccacaacggcgactaccccggcgagcccttcatcctgcaccacagcaccagctacaacagcaaggccctgatcgccttcctggccttcctgatcatcgtgaccagcatcgccctgctggtggtgctgtacaagatctacgacctgcacaagaagagaagctgcaacctggacgagcagcaggagctggtggagagagacgacgagaagcagctgatgaacgtggagcccatccacgccgacatcctgctggagacctacaagagaaagatcgccgacgagggcagactgttcctggccgagttccagagcatccccagagtgttcagcaagttccccatcaaggaggccagaaagcccttcaaccagaacaagaacagatacgtggacatcctgccctacgactacaacagagtggagctgagcgagatcaacggcgacgccggcagcaactacatcaacgccagctacatcgacggcttcaaggagcccagaaagtacatcgccgcccagggccccagagacgagaccgtggacgacttctggagaatgatctgggagcagaaggccaccgtgatcgtgatggtgaccagatgcgaggagggcaacagaaacaagtgcgccgagtactggcccagcatggaggagggcaccagagccttcggcgacgtggtggtgaagatcaaccagcacaagagatgccccgactacatcatccagaagctgaacatcgtgaacaagaaggagaaggccaccggcagagaggtgacccacatccagttcaccagctggcccgaccacggcgtgcccgaggacccccacctgctgctgaagctgagaagaagagtgaacgccttcagcaacttcttcagcggccccatcgtggtgcactgcagcgccggcgtgggcagaaccggcacctacatcggcatcgacgccatgctggagggcctggaggccgagaacaaggtggacgtgtacggctacgtggtgaagctgagaagacagagatgcctgatggtgcaggtggaggcccagtacatcctgatccaccaggccctggtggagtacaaccagttcggcgagaccgaggtgaacctgagcgagctgcacccctacctgcacaacatgaagaagagagacccccccagcgagcccagccccctggaggccgagttccagagactgcccagctacagaagctggagaacccagcacatcggcaaccaggaggagaacaagagcaagaacagaaacagcaacgtgatcccctacgactacaacagagtgcccctgaagcacgagctggagatgagcaaggagagcgagcacgacagcgacgagagcagcgacgacgacagcgacagcgaggagcccagcaagtacatcaacgccagcttcatcatgagctactggaagcccgaggtgatgatcgccgcccagggccccctgaaggagaccatcggcgacttctggcagatgatcttccagagaaaggtgaaggtgatcgtgatgctgaccgagctgaagcacggcgaccaggagatctgcgcccagtactggggcgagggcaagcagacctacggcgacatcgaggtggacctgaaggacaccgacaagagcagcacctacaccctgagagtgttcgagctgagacacagcaagagaaaggacagcagaaccgtgtaccagtaccagtacaccaactggagcgtggagcagctgcccgccgagcccaaggagctgatcagcatgatccaggtggtgaagcagaagctgccccagaagaacagcagcgagggcaacaagcaccacaagagcacccccctgctgatccactgcagagacggcagccagcagaccggcatcttctgcgccctgctgaacctgctggagagcgccgagaccgaggaggtggtggacatcttccaggtggtgaaggccctgagaaaggccagacccggcatggtgagcaccttcgagcagtaccagttcctgtacgacgtgatcgccagcacctaccccgcccagaacggccaggtgaagaagaacaaccaccaggaggacaagatcgagttcgacaacgaggtggacaaggtgaagcaggacgccaactgcgtgaaccccctgggcgcccccgagaagctgcccgaggccaaggagcaggccgagggcagcgagcccaccagcggcaccgagggccccgagcacagcgtgaacggccccgccagccccgccctgaaccagggcagctga

SEQ ID NO: 2941 - RNA, 624 nt, synthetic construct
  misc_feature 1..624: note = AAH02977 variant
  source 1..624: mol_type = other RNA
atggccaagacctacgactacctgttcaagctgctgctgatcggcgacagcggcgtgggcaagacctgcgtgctgttcagattcagcgaggacgccttcaacagcaccttcatcagcaccatcggcatcgacttcaagatcagaaccatcgagctggacggcaagagaatcaagctgcagatctgggacaccgccggccaggagagattcagaaccatcaccaccgcctactacagaggcgccatgggcatcatgctggtgtacgacatcaccaacgagaagagcttcgacaacatcagaaactggatcagaaacatcgaggagcacgccagcgccgacgtggagaagatgatcctgggcaacaagtgcgacgtgaacgacaagagacaggtgagcaaggagagaggcgagaagctggccctggactacggcatcaagttcatggagaccagcgccaaggccaacatcaacgtggagaacgccttcttcaccctggccagagacatcaaggccaagatggacaagaagctggagggcaacagcccccagggcagcaaccagggcgtgaagatcacccccgaccagcagaagagaagcagcttcttcagatgcgtgctgctgtga

SEQ ID NO: 2942 - RNA, 1260 nt, synthetic construct
  misc_feature 1..1260: note = BAA81688 variant
  source 1..1260: mol_type = other RNA
atgaagaactacaaggccatcggcaagatcggcgagggcaccttcagcgaggtgatgaagatgcagagcctgagagacggcaactactacgcctgcaagcagatgaagcagagattcgagagcatcgagcaggtgaacaacctgagagagatccaggccctgagaagactgaacccccaccccaacatcctgatgctgcacgaggtggtgttcgacagaaagagcggcagcctggccctgatctgcgagctgatggacatgaacatctacgagctgatcagaggcagaagataccccctgagcgagaagaagatcatgcactacatgtaccagctgtgcaagagcctggaccacatccacagaaacggcatcttccacagagacgtgaagcccgagaacatcctgatcaagcaggacgtgctgaagctgggcgacttcggcagctgcagaagcgtgtacagcaagcagccctacaccgagtacatcagcaccagatggtacagagcccccgagtgcctgctgaccgacggcttctacacctacaagatggacctgtggagcgccggctgcgtgttctacgagatcgccagcctgcagcccctgttccccggcgtgaacgagctggaccagatcagcaagatccacgacgtgatcggcacccccgcccagaagatcctgaccaagttcaagcagagcagagccatgaacttcgacttccccttcaagaagggcagcggcatccccctgctgaccaccaacctgagcccccagtgcctgagcctgctgcacgccatggtggcctacgaccccgacgagagaatcgccgcccaccaggccctgcagcacccctacttccaggagcagagaaagaccgagaagagagccctgggcagccacagaaaggccggcttccccgagcaccccgtggcccccgagcccctgagcaacagctgccagatcagcaaggagggcagaaagcagaagcagagcctgaagcaggaggaggacagacccaagagaagaggccccgcctacgtgatggagctgcccaagctgaagctgagcggcgtggtgagactgagcagctacagcagccccaccctgcagagcgtgctgggcagcggcaccaacggcagagtgcccgtgctgagacccctgaagtgcatccccgccagcaagaagaccgacccccagaaggacctgaagcccgccccccagcagtgcagactgcccaccatcgtgagaaagggcggcagatga

SEQ ID NO: 2943 - RNA, 1389 nt, synthetic construct
  misc_feature 1..1389: note = AAH08727 variant
  source 1..1389: mol_type = other RNA
atggccagcaacagcagcagctgccccacccccggcggcggccacctgaacggctaccccgtgcccccctacgccttcttcttcccccccatgctgggcggcctgagcccccccggcgccctgaccaccctgcagcaccagctgcccgtgagcggctacagcacccccagccccgccaccatcgagacccagagcagcagcagcgaggagatcgtgcccagcccccccagccccccccccctgcccagaatctacaagccctgcttcgtgtgccaggacaagagcagcggctaccactacggcgtgagcgcctgcgagggctgcaagggcttcttcagaagaagcatccagaagaacatggtgtacacctgccacagagacaagaactgcatcatcaacaaggtgaccagaaacagatgccagtactgcagactgcagaagtgcttcgaggtgggcatgagcaaggagagcgtgagaaacgacagaaacaagaagaagaaggaggtgcccaagcccgagtgcagcgagagctacaccctgacccccgaggtgggcgagctgatcgagaaggtgagaaaggcccaccaggagaccttccccgccctgtgccagctgggcaagtacaccaccaacaacagcagcgagcagagagtgagcctggacatcgacctgtgggacaagttcagcgagctgagcaccaagtgcatcatcaagaccgtggagttcgccaagcagctgcccggcttcaccaccctgaccatcgccgaccagatcaccctgctgaaggccgcctgcctggacatcctgatcctgagaatctgcaccagatacacccccgagcaggacaccatgaccttcagcgacggcctgaccctgaacagaacccagatgcacaacgccggcttcggccccctgaccgacctggtgttcgccttcgccaaccagctgctgcccctggagatggacgacgccgagaccggcctgctgagcgccatctgcctgatctgcggcgacagacaggacctggagcagcccgacagagtggacatgctgcaggagcccctgctggaggccctgaaggtgtacgtgagaaagagaagacccagcagaccccacatgttccccaagatgctgatgaagatcaccgacctgagaagcatcagcgccaagggcgccgagagagtgatcaccctgaagatggagatccccggcagcatgccccccctgatccaggagatgctggagaacagcgagggcctggacaccctgagcggccagcccggcggcggcggcagagacggcggcggcctggcccccccccccggcagctgcagccccagcctgagccccagcagcaacagaagcagccccgccacccacagcccctga

SEQ ID NO: 2944 - RNA, 570 nt, synthetic construct
  misc_feature 1..570: note = AAB02605 variant
  source 1..570: mol_type = other RNA
atgaccgagtacaagctggtggtggtgggcgccggcggcgtgggcaagagcgccctgaccatccagctgatccagaaccacttcgtggacgagtacgaccccaccatcgaggacagctacagaaagcaggtggtgatcgacggcgagacctgcctgctggacatcctggacaccgccggccaggaggagtacagcgccatgagagaccagtacatgagaaccggcgagggcttcctgtgcgtgttcgccatcaacaacaccaagagcttcgaggacatccaccagtacagagagcagatcaagagagtgaaggacagcgacgacgtgcccatggtgctggtgggcaacaagtgcgacctggccgccagaaccgtggagagcagacaggcccaggacctggccagaagctacggcatcccctacatcgagaccagcgccaagaccagacagggcgtggaggacgccttctacaccctggtgagagagatcagacagcacaagctgagaaagctgaacccccccgacgagagcggccccggctgcatgagctgcaagtgcgtgctgagctga

SEQ ID NO: 2945 - RNA, 570 nt, synthetic construct
  misc_feature 1..570: note = AAB59445 variant
  source 1..570: mol_type = other RNA
atgaccgagtacaagctggtggtggtgggcgccggcggcgtgggcaagagcgccctgaccatccagctgatccagaaccacttcgtggacgagtacgaccccaccatcgaggacagctacagaaagcaggtggtgatcgacggcgagacctgcctgctggacatcctggacaccgccggccaggaggagtacagcgccatgagagaccagtacatgagaaccggcgagggcttcctgtgcgtgttcgccatcaacaacaccaagagcttcgaggacatccaccactacagagagcagatcaagagagtgaaggacagcgaggacgtgcccatggtgctggtgggcaacaagtgcgacctgcccagcagaaccgtggacaccaagcaggcccaggacctggccagaagctacggcatccccttcatcgagaccagcgccaagaccagacagagagtggaggacgccttctacaccctggtgagagagatcagacagtacagactgaagaagatcagcaaggaggagaagacccccggctgcgtgaagatcaagaagtgcatcatcatgtga

SEQ ID NO: 2946 - RNA, 570 nt, synthetic construct
  misc_feature 1..570: note = AAA60255 variant
  source 1..570: mol_type = other RNA
atgaccgagtacaagctggtggtggtgggcgccggcggcgtgggcaagagcgccctgaccatccagctgatccagaaccacttcgtggacgagtacgaccccaccatcgaggacagctacagaaagcaggtggtgatcgacggcgagacctgcctgctggacatcctggacaccgccggccaggaggagtacagcgccatgagagaccagtacatgagaaccggcgagggcttcctgtgcgtgttcgccatcaacaacagcaagagcttcgccgacatcaacctgtacagagagcagatcaagagagtgaaggacagcgacgacgtgcccatggtgctggtgggcaacaagtgcgacctgcccaccagaaccgtggacaccaagcaggcccacgagctggccaagagctacggcatccccttcatcgagaccagcgccaagaccagacagggcgtggaggacgccttctacaccctggtgagagagatcagacagtacagaatgaagaagctgaacagcagcgacgacggcacccagggctgcatgggcctgccctgcgtggtgatgtga

SEQ ID NO: 2947 - RNA, 546 nt, synthetic construct
  misc_feature 1..546: note = AAB84001 variant
  source 1..546: mol_type = other RNA
atgtgcaagggcctggccgccctgccccacagctgcctggagagagccaaggagatcaagatcaagctgggcatcctgctgcagaagcccgacagcgtgggcgacctggtgatcccctacaacgagaagcccgagaagcccgccaagacccagaagaccagcctggacgaggccctgcagtggagagacagcctggacaagctgctgcagaacaactacggcctggccagcttcaagagcttcctgaagagcgagttcagcgaggagaacctggagttctggatcgcctgcgaggactacaagaagatcaagagccccgccaagatggccgagaaggccaagcagatctacgaggagttcatccagaccgaggcccccaaggaggtgaacatcgaccacttcaccaaggacatcaccatgaagaacctggtggagcccagcctgagcagcttcgacatggcccagaagagaatccacgccctgatggagaaggacagcctgcccagattcgtgagaagcgagttctaccaggagctgatcaagtga

SEQ ID NO: 2948 - RNA, 2175 nt, synthetic construct
  misc_feature 1..2175: note = CCDS4362.1 variant
  source 1..2175: mol_type = other RNA
atgagcttccccaaggcccccctgaagagattcaacgaccccagcggctgcgcccccagccccggcgcctacgacgtgaagaccctggaggtgctgaagggccccgtgagcttccagaagagccagagattcaagcagcagaaggagagcaagcagaacctgaacgtggacaaggacaccaccctgcccgccagcgccagaaaggtgaagagcagcgagagcaaggagagccagaagaacgacaaggacctgaagatcctggagaaggagatcagagtgctgctgcaggagagaggcgcccaggacagaagaatccaggacctggagaccgagctggagaagatggaggccagactgaacgccgccctgagagagaagaccagcctgagcgccaacaacgccaccctggagaagcagctgatcgagctgaccagaaccaacgagctgctgaagagcaagttcagcgagaacggcaaccagaagaacctgagaatcctgagcctggagctgatgaagctgagaaacaagagagagaccaagatgagaggcatgatggccaagcaggagggcatggagatgaagctgcaggtgacccagagaagcctggaggagagccagggcaagatcgcccagctggagggcaagctggtgagcatcgagaaggagaagatcgacgagaagagcgagaccgagaagctgctggagtacatcgaggagatcagctgcgccagcgaccaggtggagaagtacaagctggacatcgcccagctggaggagaacctgaaggagaagaacgacgagatcctgagcctgaagcagagcctggaggagaacatcgtgatcctgagcaagcaggtggaggacctgaacgtgaagtgccagctgctggagaaggagaaggaggaccacgtgaacagaaacagagagcacaacgagaacctgaacgccgagatgcagaacctgaagcagaagttcatcctggagcagcaggagagagagaagctgcagcagaaggagctgcagatcgacagcctgctgcagcaggagaaggagctgagcagcagcctgcaccagaagctgtgcagcttccaggaggagatggtgaaggagaagaacctgttcgaggaggagctgaagcagaccctggacgagctggacaagctgcagcagaaggaggagcaggccgagagactggtgaagcagctggaggaggaggccaagagcagagccgaggagctgaagctgctggaggagaagctgaagggcaaggaggccgagctggagaagagcagcgccgcccacacccaggccaccctgctgctgcaggagaagtacgacagcatggtgcagagcctggaggacgtgaccgcccagttcgagagctacaaggccctgaccgccagcgagatcgaggacctgaagctggagaacagcagcctgcaggagaaggccgccaaggccggcaagaacgccgaggacgtgcagcaccagatcctggccaccgagagcagcaaccaggagtacgtgagaatgctgctggacctgcagaccaagagcgccctgaaggagaccgagatcaaggagatcaccgtgagcttcctgcagaagatcaccgacctgcagaaccagctgaagcagcaggaggaggacttcagaaagcagctggaggacgaggagggcagaaaggccgagaaggagaacaccaccgccgagctgaccgaggagatcaacaagtggagactgctgtacgaggagctgtacaacaagaccaagcccttccagctgcagctggacgccttcgaggtggagaagcaggccctgctgaacgagcacggcgccgcccaggagcagctgaacaagatcagagacagctacgccaagctgctgggccaccagaacctgaagcagaagatcaagcacgtggtgaagctgaaggacgagaacagccagctgaagagcgaggtgagcaagctgagatgccagctggccaagaagaagcagagcgagaccaagctgcaggaggagctgaacaaggtgctgggcatcaagcacttcgaccccagcaaggccttccaccacgagagcaaggagaacttcgccctgaagacccccctgaaggagggcaacaccaactgctacagagcccccatggagtgccaggagagctggaagtga

SEQ ID NO: 2949 - RNA, 582 nt, synthetic construct
  misc_feature 1..582: note = AAC33179 variant
  source 1..582: mol_type = other RNA
atggccgccatcagaaagaagctggtgatcgtgggcgacggcgcctgcggcaagacctgcctgctgatcgtgttcagcaaggaccagttccccgaggtgtacgtgcccaccgtgttcgagaactacatcgccgacatcgaggtggacggcaagcaggtggagctggccctgtgggacaccgccggccaggaggactacgacagactgagacccctgagctaccccgacaccgacgtgatcctgatgtgcttcagcatcgacagccccgacagcctggagaacatccccgagaagtggacccccgaggtgaagcacttctgccccaacgtgcccatcatcctggtgggcaacaagaaggacctgagacaggacgagcacaccagaagagagctggccaagatgaagcaggagcccgtgagaagcgaggagggcagagacatggccaacagaatcagcgccttcggctacctggagtgcagcgccaagaccaaggagggcgtgagagaggtgttcgagatggccaccagagccggcctgcaggtgagaaagaacaagagaagaagaggctgccccatcctgtga

SEQ ID NO: 2950 - RNA, 888 nt, synthetic construct
  misc_feature 1..888: note = AAA36161 variant
  source 1..888: mol_type = other RNA
atgagcggcgccctggacgtgctgcagatgaaggaggaggacgtgctgaagttcctggccgccggcacccacctgggcggcaccaacctggacttccagatggagcagtacatctacaagagaaagagcgacggcatctacatcatcaacctgaagagaacctgggagaagctgctgctggccgccagagccatcgtggccatcgagaaccccgccgacgtgagcgtgatcagcagcagaaacaccggccagagagccgtgctgaagttcgccgccgccaccggcgccacccccatcgccggcagattcacccccggcaccttcaccaaccagatccaggccgccttcagagagcccagactgctggtggtgaccgaccccagagccgaccaccagcccctgaccgaggccagctacgtgaacctgcccaccatcgccctgtgcaacaccgacagccccctgagatacgtggacatcgccatcccctgcaacaacaagggcgcccacagcgtgggcctgatgtggtggatgctggccagagaggtgctgagaatgagaggcaccatcagcagagagcacccctgggaggtgatgcccgacctgtacttctacagagaccccgaggagatcgagaaggaggagcaggccgccgccgagaaggccgtgaccaaggaggagttccagggcgagtggaccgcccccgcccccgagttcaccgccacccagcccgaggtggccgactggagcgagggcgtgcaggtgcccagcgtgcccatccagcagttccccaccgaggactggagcgcccagcccgccaccgaggactggagcgccgcccccaccgcccaggccaccgagtgggtgggcgccaccaccgactggagctga

SEQ ID NO: 2951 - RNA, 2601 nt, synthetic construct
  misc_feature 1..2601: note = AAH14614 variant
  source 1..2601: mol_type = other RNA
atgaacggcgagcagcagctggacgccgacgccggcagcggcatggaggaggtggagctgagctgggaggactacctggaggagaccggcagcaccgccgtgccctacggcagcttcaagcacgtggacaccagactgcagaacggcttcgcccccggcatgaagctggaggtggccgtgagaaccgaccccgagacctactgggtggccaccgtgatcaccacctgcgagcagctgctgctgctgagatacgacggctacggcgaggacagaagagccgacttctggtgcgacatcagaaaggccgacctgtaccccatcggctggtgcgagcagaacaagaagaccctggaggcccccgagggcatcagagacaaggtgagcgactgggacgagttcctgagacagaccctgatcggcgcctgcagcccccccgtgcccctgctggagggcctgagaaacggcagaaaccccctggacctgatcgcccccggcagcagactggagtgccaggccttccaggacagcctgagcacctggatcgtgaccgtggtggagaacatcggcggcagactgaagctgagatacgagggcctggagagcagcgacaactacgagcactggctgtactacctggaccccttcctgcaccacgtgggctgggccgcccagcagggctacgagctgcagccccccagcgccatcagacacctgaagaacgaggccgagtggcaggagatcctggccaaggtgaaggaggaggaggaggagcccctgcccagctacctgttcaaggacaagcaggtgatcggcatccacaccttcagcgtgaacatgaagctggaggccgtggacccctggagccccttcggcatcagccccgccaccgtggtgaaggtgttcgacgagaagtacttcctggtggagatggacgacctgagacccgagaaccacgccagaagaagcttcgtgtgccacgccgacagccccggcatcttccccgtgcagtggagcctgaagaacggcctgcacatcagccccccccccggctaccccagccaggacttcgactgggccgactacctgaagcagtgcggcgccgaggccgccccccagagatgcttcccccccctgatcagcgagcacgagttcaaggagaacatgaagctggaggccgtgaaccccatcctgcccgaggaggtgtgcgtggccaccatcaccgccgtgagaggcagctacctgtggctgcagctggagggcagcaagaagcccatccccgagtgcatcgtgagcgtggagagcatggacatcttccccctgggctggtgcgagaccaacggccaccccctgagcacccccagaagagccagagtgtacaagcagagaaagatcgccgtggtgcagcccgagaagcaggtgcccagcagcagaaccgtgcacgagggcctgagaaaccaggagctgaacagcaccgagagcgtgatgatcaacggcaagtactgctgccccaagatctacttcaaccacagatgcttcagcggcccctacctgaacaagggcagaatcgccgagctgccccagtgcgtgggccccggcaactgcgtgctggtgctgagagaggtgctgaccctgctgatcaacgccgcctacaagcccagcagagtgctgagagagctgcagctggacaaggacagcgtgtggcacggctgcggcgaggtgctgaaggccaagtacaagggcaagagctacagagccaccgtggagatcgtgaagaccgccgacagagtgaccgagttctgcagacagacctgcatcaagctggagtgctgccccaacctgttcggccccagaatggtgctggacaagtgcagcgagaactgcagcgtgctgaccaagaccaagtacacccactactacggcaagaagaagaacaagagaatcggcagaccccccggcggccacagcaacctggcctgcgccctgaagaaggccagcaagagaagaaagagaagaaagaacgtgttcgtgcacaagaagaagagaagcagcgccagcgtggacaacacccccgccggcagcccccagggcagcggcggcgaggacgaggacgaccccgacgagggcgacgacgacagcctgagcgagggcagcaccagcgagcagcaggacgagctgcaggaggagagcgagatgagcgagaagaagagctgcagcagcagccccacccagagcgagatcagcaccagcctgccccccgacagacagagaagaaagagagagctgagaaccttcagcttcagcgacgacgagaacaagccccccagccccaaggagatcagaatcgaggtggccgagagactgcacctggacagcaaccccctgaagtggagcgtggccgacgtggtgagattcatcagaagcaccgactgcgcccccctggccagaatcttcctggaccaggagatcgacggccaggccctgctgctgctgaccctgcccaccgtgcaggagtgcatggacctgaagctgggccccgccatcaagctgtgccaccacatcgagagaatcaagttcgccttctacgagcagttcgccaactga

SEQ ID NO: 2952 - RNA, 1431 nt, synthetic construct
  misc_feature 1..1431: note = CCDS4550.1 variant
  source 1..1431: mol_type = other RNA
atgagcggcagcagcgccagaagcagccacctgagccagcccgtggtgaagagcgtgctggtgtacagaaacggcgaccccttctacgccggcagaagagtggtgatccacgagaagaaggtgagcagcttcgaggtgttcctgaaggaggtgaccggcggcgtgcaggcccccttcggcgccgtgagaaacatctacacccccagaaccggccacagaatcagaaagctggaccagatccagagcggcggcaactacgtggccggcggccaggaggccttcaagaagctgaactacctggacatcggcgagatcaagaagagacccatggaggtggtgaacaccgaggtgaagcccgtgatccacagcagaatcaacgtgagcgccagattcagaaagcccctgcaggagccctgcaccatcttcctgatcgccaacggcgacctgatcaaccccgccagcagactgctgatccccagaaagaccctgaaccagtgggaccacgtgctgcagatggtgaccgagaagatcaccctgagaagcggcgccgtgcacagactgtacaccctggagggcaagctggtggagagcggcgccgagctggagaacggccagttctacgtggccgtgggcagagacaagttcaagaagctgccctacagcgagctgctgttcgacaagagcaccatgagaagacccttcggccagaaggccagcagcctgccccccatcgtgggcagcagaaagagcaagggcagcggcaacgacagacacagcaagagcaccgtgggcagcagcgacaacagcagcccccagcccctgaagagaaagggcaagaaggaggacgtgaacagcgagaagctgaccaagctgaagcagaacgtgaagctgaagaacagccaggagaccatccccaacagcgacgagggcatcttcaaggccggcgccgagagaagcgagaccagaggcgccgccgaggtgcaggaggacgaggacacccaggtggaggtgcccgtggaccagagacccgccgagatcgtggacgaggaggaggacggcgagaaggccaacaaggacgccgagcagaaggaggacttcagcggcatgaacggcgacctggaggaggagggcggcagagaggccaccgacgcccccgagcaggtggaggagatcctggaccacagcgagcagcaggccagacccgccagagtgaacggcggcaccgacgaggagaacggcgaggagctgcagcaggtgaacaacgagctgcagctggtgctggacaaggagagaaagagccagggcgccggcagcggccaggacgaggccgacgtggacccccagagaccccccagacccgaggtgaagatcaccagccccgaggagaacgagaacaaccagcagaacaaggactacgccgccgtggcctga

SEQ ID NO: 2953 - RNA, 1362 nt, synthetic construct
  misc_feature 1..1362: note = BAA07903 variant
  source 1..1362: mol_type = other RNA
atgagaatccccgtggacgccagcaccagcagaagattcaccccccccagcaccgccctgagccccggcaagatgagcgaggccctgcccctgggcgcccccgacgccggcgccgccctggccggcaagctgagaagcggcgacagaagcatggtggaggtgctggccgaccaccccggcgagctggtgagaaccgacagccccaacttcctgtgcagcgtgctgcccacccactggagatgcaacaagaccctgcccatcgccttcaaggtggtggccctgggcgacgtgcccgacggcaccctggtgaccgtgatggccggcaacgacgagaactacagcgccgagctgagaaacgccaccgccgccatgaagaaccaggtggccagattcaacgacctgagattcgtgggcagaagcggcagaggcaagagcttcaccctgaccatcaccgtgttcaccaaccccccccaggtggccacctaccacagagccatcaagatcaccgtggacggccccagagagcccagaagacacagacagaagctggacgaccagaccaagcccggcagcctgagcttcagcgagagactgagcgagctggagcagctgagaagaaccgccatgagagtgagcccccaccaccccgcccccacccccaaccccagagccagcctgaaccacagcaccgccttcaacccccagccccagagccagatgcaggacaccagacagatccagcccagccccccctggagctacgaccagagctaccagtacctgggcagcatcgccagccccagcgtgcaccccgccacccccatcagccccggcagagccagcggcatgaccaccctgagcgccgagctgagcagcagactgagcaccgcccccgacctgaccgccttcagcgaccccagacagttccccgccctgcccagcatcagcgaccccagaatgcactaccccggcgccttcacctacagccccacccccgtgaccagcggcatcggcatcggcatgagcgccatgggcagcgccaccagataccacacctacctgccccccccctaccccggcagcagccaggcccagggcggccccttccaggccagcagccccagctaccacctgtactacggcgccagcgccggcagctaccagttcagcatggtgggcggcgagagaagcccccccagaatcctgcccccctgcaccaacgccagcaccggcagcgccctgctgaaccccagcctgcccaaccagagcgacgtggtggaggccgagggcagccacagcaacagccccaccaacatggcccccagcgccagactggaggaggccgtgtggagaccctactga

SEQ ID NO: 2954 - RNA, 1080 nt, synthetic construct
  misc_feature 1..1080: note = ACI46041 variant
  source 1..1080: mol_type = other RNA
atgcccctggagctggagctgtgccccggcagatgggtgggcggccagcacccctgcttcatcatcgccgagatcggccagaaccaccagggcgacctggacgtggccaagagaatgatcagaatggccaaggagtgcggcgccgactgcgccaagttccagaagagcgagctggagttcaagttcaacagaaaggccctggagagaccctacaccagcaagcacagctggggcaagacctacggcgagcacaagagacacctggagttcagccacgaccagtacagagagctgcagagatacgccgaggaggtgggcatcttcttcaccgccagcggcatggacgagatggccgtggagttcctgcacgagctgaacgtgcccttcttcaaggtgggcagcggcgacaccaacaacttcccctacctggagaagaccgccaagaagggcagacccatggtgatcagcagcggcatgcagagcatggacaccatgaagcaggtgtaccagatcgtgaagcccctgaaccccaacttctgcttcctgcagtgcaccagcgcctaccccctgcagcccgaggacgtgaacctgagagtgatcagcgagtaccagaagctgttccccgacatccccatcggctacagcggccacgagaccggcatcgccatcagcgtggccgccgtggccctgggcgccaaggtgctggagagacacatcaccctggacaagacctggaagggcagcgaccacagcgccagcctggagcccggcgagctggccgagctggtgagaagcgtgagactggtggagagagccctgggcagccccaccaagcagctgctgccctgcgagatggcctgcaacgagaagctgggcaagagcgtggtggccaaggtgaagatccccgagggcaccatcctgaccatggacatgctgaccgtgaaggtgggcgagcccaaggcctacccccccgaggacatcttcaacctggtgggcaagaaggtgctggtgaccgtggaggaggacgacaccatcatggaggagctggtggacaaccacggcaagaagatcaagagctga

SEQ ID NO: 2955 - RNA, 2715 nt, synthetic construct
  misc_feature 1..2715: note = CCDS14652.1 variant
  source 1..2715: mol_type = other RNA
atgcaggccagccccctgcagaccagccagcccaccccccccgaggagctgcacgccgccgcctacgtgttcaccaacgacggccagcagatgagaagcgacgaggtgaacctggtggccaccggccaccagagcaagaagaagcacagcagaaagagcaagagacacagcagcagcaagagaagaaagagcatgagcagctggctggacaagcaggaggacgccgccgtgacccacagcatctgcgaggagagaatcaacaacggccagcccgtggccgacaacgtgctgagcaccgcccccccctggcccgacgccaccatcgcccacaacatcagagaggagagaatggagaacggccagagcagaaccgacaaggtgctgagcaccgcccccccccagctggtgcacatggccgccgccggcatccccagcatgagcaccagagacctgcacagcaccgtgacccacaacatcagagaggagagaatggagaacggccagccccagcccgacaacgtgctgagcaccggccccaccggcctgatcaacatggccgccacccccatccccgccatgagcgccagagacctgtacgccaccgtgacccacaacgtgtgcgagcagaagatggagaacgtgcagcccgcccccgacaacgtgctgctgaccctgagacccagaagaatcaacatgaccgacaccggcatcagccccatgagcaccagagacccctacgccaccatcacctacaacgtgcccgaggagaagatggagaagggccagccccagcccgacaacatcctgagcaccgccagcaccggcctgatcaacgtggccggcgccggcacccccgccatcagcaccaacggcctgtacagcaccgtgccccacaacgtgtgcgaggagaagatggagaacgaccagccccagcccaacaacgtgctgagcaccgtgcagcccgtgatcatctacctgaccgccaccggcatccccggcatgaacaccagagaccagtacgccaccatcacccacaacgtgtgcgaggagagagtggtgaacaaccagcccctgcccagcaacgccctgagcaccgtgctgcccggcctggcctacctggccaccgccgacatgcccgccatgagcaccagagaccagcacgccaccatcatccacaacctgagagaggagaagaaggacaacagccagcccacccccgacaacgtgctgagcgccgtgacccccgagctgatcaacctggccggcgccggcatcccccccatgagcaccagagaccagtacgccaccgtgaaccaccacgtgcacgaggccagaatggagaacggccagagaaagcaggacaacgtgctgagcaacgtgctgagcggcctgatcaacatggccggcgccagcatccccgccatgagcagcagagacctgtacgccaccatcacccacagcgtgagagaggagaagatggagagcggcaagccccagaccgacaaggtgatcagcaacgacgccccccagctgggccacatggccgccggcggcatccccagcatgagcaccaaggacctgtacgccaccgtgacccagaacgtgcacgaggagagaatggagaacaaccagccccagcccagctacgacctgagcaccgtgctgcccggcctgacctacctgaccgtggccggcatccccgccatgagcaccagagaccagtacgccaccgtgacccacaacgtgcacgaggagaagatcaagaacggccaggccgccagcgacaacgtgttcagcaccgtgccccccgccttcatcaacatggccgccaccggcgtgagcagcatgagcaccagagaccagtacgccgccgtgacccacaacatcagagaggagaagatcaacaacagccagcccgcccccggcaacatcctgagcaccgcccccccctggctgagacacatggccgccgccggcatcagcagcaccatcaccagagacctgtacgtgaccgccacccacagcgtgcacgaggagaagatgaccaacggccagcaggcccccgacaacagcctgagcaccgtgccccccggctgcatcaacctgagcggcgccggcatcagctgcagaagcaccagagacctgtacgccaccgtgatccacgacatccaggaggaggagatggagaacgaccagaccccccccgacggcttcctgagcaacagcgacagccccgagctgatcaacatgaccggccactgcatgccccccaacgccctggacagcttcagccacgacttcaccagcctgagcaaggacgagctgctgtacaagcccgacagcaacgagttcgccgtgggcaccaagaactacagcgtgagcgccggcgacccccccgtgaccgtgatgagcctggtggagaccgtgcccaacaccccccagatcagccccgccatggccaagaagatcaacgacgacatcaagtaccagctgatgaaggaggtgagaagattcggccagaactacgagagaatcttcatcctgctggaggaggtgcagggcagcatgaaggtgaagagacagttcgtggagttcaccatcaaggaggccgccagattcaagaaggtggtgctgatccagcagctggagaaggccctgaaggagatcgacagccactgccacctgagaaaggtgaagcacatgagaaagagatga

SEQ ID NO: 2956 - RNA, 2403 nt, synthetic construct
  misc_feature 1..2403: note = AAH01058 variant
  source 1..2403: mol_type = other RNA
atgggcagcagcaagaagcacagaggcgagaaggaggccgccggcaccaccgccgccgccggcaccggcggcgccaccgagcagccccccagacacagagagcacaagaagcacaagcacagaagcggcggcagcggcggcagcggcggcgagagaagaaagagaagcagagagagaggcggcgagagaggcagcggcagaagaggcgccgaggccgaggccagaagcagcacccacggcagagagagaagccaggccgagcccagcgagagaagagtgaagagagagaagagagacgacggctacgaggccgccgccagcagcaagaccagcagcggcgacgccagcagcctgagcatcgaggagaccaacaagctgagagccaagctgggcctgaagcccctggaggtgaacgccatcaagaaggaggccggcaccaaggaggagcccgtgaccgccgacgtgatcaaccccatggccctgagacagagagaggagctgagagagaagctggccgccgccaaggagaagagactgctgaaccagaagctgggcaagatcaagaccctgggcgaggacgacccctggctggacgacaccgccgcctggatcgagagaagcagacagctgcagaaggagaaggacctggccgagaagagagccaagctgctggaggagatggaccaggagttcggcgtgagcaccctggtggaggaggagttcggccagagaagacaggacctgtacagcgccagagacctgcagggcctgaccgtggagcacgccatcgacagcttcagagagggcgagaccatgatcctgaccctgaaggacaagggcgtgctgcaggaggaggaggacgtgctggtgaacgtgaacctggtggacaaggagagagccgagaagaacgtggagctgagaaagaagaagcccgactacctgccctacgccgaggacgagagcgtggacgacctggcccagcagaagcccagaagcatcctgagcaagtacgacgaggagctggagggcgagagaccccacagcttcagactggagcagggcggcaccgccgacggcctgagagagagagagctggaggagatcagagccaagctgagactgcaggcccagagcctgagcaccgtgggccccagactggccagcgagtacctgacccccgaggagatggtgaccttcaagaagaccaagagaagagtgaagaagatcagaaagaaggagaaggaggtggtggtgagagccgacgacctgctgcccctgggcgaccagacccaggacggcgacttcggcagcagactgagaggcagaggcagaagaagagtgagcgaggtggaggaggagaaggagcccgtgccccagcccctgcccagcgacgacaccagagtggagaacatggacatcagcgacgaggaggagggcggcgcccccccccccggcagcccccaggtgctggaggaggacgaggccgagctggagctgcagaagcagctggagaagggcagaagactgagacagctgcagcagctgcagcagctgagagacagcggcgagaaggtggtggagatcgtgaagaagctggagagcagacagagaggctgggaggaggacgaggaccccgagagaaagggcgccatcgtgttcaacgccaccagcgagttctgcagaaccctgggcgagatccccacctacggcctggccggcaacagagaggagcaggaggagctgatggacttcgagagagacgaggagagaagcgccaacggcggcagcgagagcgacggcgaggagaacatcggctggagcaccgtgaacctggacgaggagaagcagcagcaggacttcagcgccagcagcaccaccatcctggacgaggagcccatcgtgaacagaggcctggccgccgccctgctgctgtgccagaacaagggcctgctggagaccaccgtgcagaaggtggccagagtgaaggcccccaacaagagcctgcccagcgccgtgtactgcatcgaggacaagatggccatcgacgacaagtacagcagaagagaggagtacagaggcttcacccaggacttcaaggagaaggacggctacaagcccgacgtgaagatcgagtacgtggacgagaccggcagaaagctgacccccaaggaggccttcagacagctgagccacagattccacggcaagggcagcggcaagatgaagaccgagagaagaatgaagaagctggacgaggaggccctgctgaagaagatgagcagcagcgacacccccctgggcaccgtggccctgctgcaggagaagcagaaggcccagaagaccccctacatcgtgctgagcggcagcggcaagagcatgaacgccaacaccatcaccaagtga

SEQ ID NO: 2957 - RNA, 2877 nt, synthetic construct
  misc_feature 1..2877: note = AAF00087 variant
  source 1..2877: mol_type = other RNA
atgagaacccacaccagaggcgcccccagcgtgttcttcatctacctgctgtgcttcgtgagcgcctacatcaccgacgagaaccccgaggtgatgatccccttcaccaacgccaactacgacagccaccccatgctgtacttcagcagagccgaggtggccgagctgcagctgagagccgccagcagccacgagcacatcgccgccagactgaccgaggccgtgcacaccatgctgagcagccccctggagtacctgcccccctgggaccccaaggactacagcgccagatggaacgagatcttcggcaacaacctgggcgccctggccatgttctgcgtgctgtaccccgagaacatcgaggccagagacatggccaaggactacatggagagaatggccgcccagcccagctggctggtgaaggacgccccctgggacgaggtgcccctggcccacagcctggtgggcttcgccaccgcctacgacttcctgtacaactacctgagcaagacccagcaggagaagttcctggaggtgatcgccaacgccagcggctacatgtacgagaccagctacagaagaggctggggcttccagtacctgcacaaccaccagcccaccaactgcatggccctgctgaccggcagcctggtgctgatgaaccagggctacctgcaggaggcctacctgtggaccaagcaggtgctgaccatcatggagaagagcctggtgctgctgagagaggtgaccgacggcagcctgtacgagggcgtggcctacggcagctacaccaccagaagcctgttccagtacatgttcctggtgcagagacacttcaacatcaaccacttcggccacccctggctgaagcagcacttcgccttcatgtacagaaccatcctgcccggcttccagagaaccgtggccatcgccgacagcaactacaactggttctacggccccgagagccagctggtgttcctggacaagttcgtgatgagaaacggcagcggcaactggctggccgaccagatcagaagaaacagagtggtggagggccccggcacccccagcaagggccagagatggtgcaccctgcacaccgagttcctgtggtacgacggcagcctgaagagcgtgcccccccccgacttcggcacccccaccctgcactacttcgaggactggggcgtggtgacctacggcagcgccctgcccgccgagatcaacagaagcttcctgagcttcaagagcggcaagctgggcggcagagccatctacgacatcgtgcacagaaacaagtacaaggactggatcaagggctggagaaacttcaacgccggccacgagcaccccgaccagaacagcttcaccttcgcccccaacggcgtgcccttcatcaccgaggccctgtacggccccaagtacaccttcttcaacaacgtgctgatgttcagccccgccgtgagcaagagctgcttcagcccctgggtgggccaggtgaccgaggactgcagcagcaagtggagcaagtacaagcacgacctggccgccagctgccagggcagagtggtggccgccgaggagaagaacggcgtggtgttcatcagaggcgagggcgtgggcgcctacaacccccagctgaacctgaagaacgtgcagagaaacctgatcctgctgcacccccagctgctgctgctggtggaccagatccacctgggcgaggagagccccctggagaccgccgccagcttcttccacaacgtggacgtgcccttcgaggagaccgtggtggacggcgtgcacggcgccttcatcagacagagagacggcctgtacaagatgtactggatggacgacaccggctacagcgagaaggccaccttcgccagcgtgacctaccccagaggctacccctacaacggcaccaactacgtgaacgtgaccatgcacctgagaagccccatcaccagagccgcctacctgttcatcggccccagcatcgacgtgcagagcttcaccgtgcacggcgacagccagcagctggacgtgttcatcgccaccagcaagcacgcctacgccacctacctgtggaccggcgaggccaccggccagagcgccttcgcccaggtgatcgccgacagacacaagatcctgttcgacagaaacagcgccatcaagagcagcatcgtgcccgaggtgaaggactacgccgccatcgtggagcagaacctgcagcacttcaagcccgtgttccagctgctggagaagcagatcctgagcagagtgagaaacaccgccagcttcagaaagaccgccgagagactgctgagattcagcgacaagagacagaccgaggaggccatcgacagaatcttcgccatcagccagcagcagcagcagcagagcaagagcaagaagaacagaagagccggcaagagatacaagttcgtggacgccgtgcccgacatcttcgcccagatcgaggtgaacgagaagaagatcagacagaaggcccagatcctggcccagaaggagctgcccatcgacgaggacgaggagatgaaggacctgctggacttcgccgacgtgacctacgagaagcacaagaacggcggcctgatcaagggcagattcggccaggccagaatggtgaccaccacccacagcagagcccccagcctgagcgccagctacaccagactgttcctgatcctgaacatcgccatcttcttcgtgatgctggccatgcagctgacctacttccagagagcccagagcctgcacggccagagatgcctgtacgccgtgctgctgatcgacagctgcatcctgctgtggctgtacagcagctgcagccagagccagtgctga

SEQ ID NO: 2958 - RNA, 2892 nt, synthetic construct
  misc_feature 1..2892: note = AAH93784 variant
  source 1..2892: mol_type = other RNA
atggccaccgccgccgagaccagcgccagcgagcccgaggccgagagcaaggccggccccaaggccgacggcgaggaggacgaggtgaaggccgccagaaccagaagaaaggtgctgagcagagccgtggccgccgccacctacaagaccatgggccccgcctgggaccagcaggaggagggcgtgagcgagagcgacggcgacgagtacgccatggccagcagcgccgagagcagccccggcgagtacgagtgggagtacgacgaggaggaggagaagaaccagctggagatcgagagactggaggagcagctgagcatcaacgtgtacgactacaactgccacgtggacctgatcagactgctgagactggagggcgagctgaccaaggtgagaatggccagacagaagatgagcgagatcttccccctgaccgaggagctgtggctggagtggctgcacgacgagatcagcatggcccaggacggcctggacagagagcacgtgtacgacctgttcgagaaggccgtgaaggactacatctgccccaacatctggctggagtacggccagtacagcgtgggcggcatcggccagaagggcggcctggagaaggtgagaagcgtgttcgagagagccctgagcagcgtgggcctgcacatgaccaagggcctggccctgtgggaggcctacagagagttcgagagcgccatcgtggaggccgccagactggagaaggtgcacagcctgttcagaagacagctggccatccccctgtacgacatggaggccaccttcgccgagtacgaggagtggagcgaggaccccatccccgagagcgtgatccagaactacaacaaggccctgcagcagctggagaagtacaagccctacgaggaggccctgctgcaggccgaggcccccagactggccgagtaccaggcctacatcgacttcgagatgaagatcggcgaccccgccagaatccagctgatcttcgagagagccctggtggagaactgcctggtgcccgacctgtggatcagatacagccagtacctggacagacagctgaaggtgaaggacctggtgctgagcgtgcacaacagagccatcagaaactgcccctggaccgtggccctgtggagcagatacctgctggccatggagagacacggcgtggaccaccaggtgatcagcgtgaccttcgagaaggccctgaacgccggcttcatccaggccaccgactacgtggagatctggcaggcctacctggactacctgagaagaagagtggacttcaagcaggacagcagcaaggagctggaggagctgagagccgccttcaccagagccctggagtacctgaagcaggaggtggaggagagattcaacgagagcggcgaccccagctgcgtgatcatgcagaactgggccagaatcgaggccagactgtgcaacaacatgcagaaggccagagagctgtgggacagcatcatgaccagaggcaacgccaagtacgccaacatgtggctggagtactacaacctggagagagcccacggcgacacccagcactgcagaaaggccctgcacagagccgtgcagtgcaccagcgactaccccgagcacgtgtgcgaggtgctgctgaccatggagagaaccgagggcagcctggaggactgggacatcgccgtgcagaagaccgagaccagactggccagagtgaacgagcagagaatgaaggccgccgagaaggaggccgccctggtgcagcaggaggaggagaaggccgagcagagaaagagagccagagccgagaagaaggccctgaagaagaagaagaagatcagaggccccgagaagagaggcgccgacgaggacgacgagaaggagtggggcgacgacgaggaggagcagcccagcaagagaagaagagtggagaacagcatccccgccgccggcgagacccagaacgtggaggtggccgccggccccgccggcaagtgcgccgccgtggacgtggagccccccagcaagcagaaggagaaggccgccagcctgaagagagacatgcccaaggtgctgcacgacagcagcaaggacagcatcaccgtgttcgtgagcaacctgccctacagcatgcaggagcccgacaccaagctgagacccctgttcgaggcctgcggcgaggtggtgcagatcagacccatcttcagcaacagaggcgacttcagaggctactgctacgtggagttcaaggaggagaagagcgccctgcaggccctggagatggacagaaagagcgtggagggcagacccatgttcgtgagcccctgcgtggacaagagcaagaaccccgacttcaaggtgttcagatacagcaccagcctggagaagcacaagctgttcatcagcggcctgcccttcagctgcaccaaggaggagctggaggagatctgcaaggcccacggcaccgtgaaggacctgagactggtgaccaacagagccggcaagcccaagggcctggcctacgtggagtacgagaacgagagccaggccagccaggccgtgatgaagatggacggcatgaccatcaaggagaacatcatcaaggtggccatcagcaaccccccccagagaaaggtgcccgagaagcccgagaccagaaaggcccccggcggccccatgctgctgccccagacctacggcgccagaggcaagggcagaacccagctgagcctgctgcccagagccctgcagagacccagcgccgccgccccccaggccgagaacggccccgccgccgcccccgccgtggccgcccccgccgccaccgaggcccccaagatgagcaacgccgacttcgccaagctgttcctgagaaagtga

SEQ ID NO: 2959 - RNA, 2283 nt, synthetic construct
  misc_feature 1..2283: note = AAC51668 variant
  source 1..2283: mol_type = other RNA
atgaagacctgggtgaagatcgtgttcggcgtggccaccagcgccgtgctggccctgctggtgatgtgcatcgtgctgagacccagcagagtgcacaacagcgaggagaacaccatgagagccctgaccctgaaggacatcctgaacggcaccttcagctacaagaccttcttccccaactggatcagcggccaggagtacctgcaccagagcgccgacaacaacatcgtgctgtacaacatcgagaccggccagagctacaccatcctgagcaacagaaccatgaagagcgtgaacgccagcaactacggcctgagccccgacagacagttcgtgtacctggagagcgactacagcaagctgtggagatacagctacaccgccacctactacatctacgacctgagcaacggcgagttcgtgagaggcaacgagctgcccagacccatccagtacctgtgctggagccccgtgggcagcaagctggcctacgtgtaccagaacaacatctacctgaagcagagacccggcgacccccccttccagatcaccttcaacggcagagagaacaagatcttcaacggcatccccgactgggtgtacgaggaggagatgctggccaccaagtacgccctgtggtggagccccaacggcaagttcctggcctacgccgagttcaacgacaccgacatccccgtgatcgcctacagctactacggcgacgagcagtaccccagaaccatcaacatcccctaccccaaggccggcgccaagaaccccgtggtgagaatcttcatcatcgacaccacctaccccgcctacgtgggcccccaggaggtgcccgtgcccgccatgatcgccagcagcgactactacttcagctggctgacctgggtgaccgacgagagagtgtgcctgcagtggctgaagagagtgcagaacgtgagcgtgctgagcatctgcgacttcagagaggactggcagacctgggactgccccaagacccaggagcacatcgaggagagcagaaccggctgggccggcggcttcttcgtgagcacccccgtgttcagctacgacgccatcagctactacaagatcttcagcgacaaggacggctacaagcacatccactacatcaaggacaccgtggagaacgccatccagatcaccagcggcaagtgggaggccatcaacatcttcagagtgacccaggacagcctgttctacagcagcaacgagttcgaggagtaccccggcagaagaaacatctacagaatcagcatcggcagctacccccccagcaagaagtgcgtgacctgccacctgagaaaggagagatgccagtactacaccgccagcttcagcgactacgccaagtactacgccctggtgtgctacggccccggcatccccatcagcaccctgcacgacggcagaaccgaccaggagatcaagatcctggaggagaacaaggagctggagaacgccctgaagaacatccagctgcccaaggaggagatcaagaagctggaggtggacgagatcaccctgtggtacaagatgatcctgcccccccagttcgacagaagcaagaagtaccccctgctgatccaggtgtacggcggcccctgcagccagagcgtgagaagcgtgttcgccgtgaactggatcagctacctggccagcaaggagggcatggtgatcgccctggtggacggcagaggcaccgccttccagggcgacaagctgctgtacgccgtgtacagaaagctgggcgtgtacgaggtggaggaccagatcaccgccgtgagaaagttcatcgagatgggcttcatcgacgagaagagaatcgccatctggggctggagctacggcggctacgtgagcagcctggccctggccagcggcaccggcctgttcaagtgcggcatcgccgtggcccccgtgagcagctgggagtactacgccagcgtgtacaccgagagattcatgggcctgcccaccaaggacgacaacctggagcactacaagaacagcaccgtgatggccagagccgagtacttcagaaacgtggactacctgctgatccacggcaccgccgacgacaacgtgcacttccagaacagcgcccagatcgccaaggccctggtgaacgcccaggtggacttccaggccatgtggtacagcgaccagaaccacggcctgagcggcctgagcaccaaccacctgtacacccacatgacccacttcctgaagcagtgcttcagcctgagcgactga

SEQ ID NO: 2960 - RNA, 1128 nt, synthetic construct
  misc_feature 1..1128: note = CCDS32839.1 variant
  source 1..1128: mol_type = other RNA
atggacgccctgcagctggccaacagcgccttcgccgtggacctgttcaagcagctgtgcgagaaggagcccctgggcaacgtgctgttcagccccatctgcctgagcaccagcctgagcctggcccaggtgggcgccaagggcgacaccgccaacgagatcggccaggtgctgcacttcgagaacgtgaaggacgtgcccttcggcttccagaccgtgaccagcgacgtgaacaagctgagcagcttctacagcctgaagctgatcaagagactgtacgtggacaagagcctgaacctgagcaccgagttcatcagcagcaccaagagaccctacgccaaggagctggagaccgtggacttcaaggacaagctggaggagaccaagggccagatcaacaacagcatcaaggacctgaccgacggccacttcgagaacatcctggccgacaacagcgtgaacgaccagaccaagatcctggtggtgaacgccgcctacttcgtgggcaagtggatgaagaagttcagcgagagcgagaccaaggagtgccccttcagagtgaacaagaccgacaccaagcccgtgcagatgatgaacatggaggccaccttctgcatgggcaacatcgacagcatcaactgcaagatcatcgagctgcccttccagaacaagcacctgagcatgttcatcctgctgcccaaggacgtggaggacgagagcaccggcctggagaagatcgagaagcagctgaacagcgagagcctgagccagtggaccaaccccagcaccatggccaacgccaaggtgaagctgagcatccccaagttcaaggtggagaagatgatcgaccccaaggcctgcctggagaacctgggcctgaagcacatcttcagcgaggacaccagcgacttcagcggcatgagcgagaccaagggcgtggccctgagcaacgtgatccacaaggtgtgcctggagatcaccgaggacggcggcgacagcatcgaggtgcccggcgccagaatcctgcagcacaaggacgagctgaacgccgaccaccccttcatctacatcatcagacacaacaagaccagaaacatcatcttcttcggcaagttctgcagcccctga

SEQ ID NO: 2961 - RNA, 1002 nt, synthetic construct
  misc_feature 1..1002: note = AAH06564 variant
  source 1..1002: mol_type = other RNA
atggcctgcagcagaccccccagccagtgcgagcccaccagcctgccccccggcccccccgccggcagaagacacctgcccctgagcagaagaagaagagagatgagcagcaacaaggagcagagaagcgccgtgttcgtgatcctgttcgccctgatcaccatcctgatcctgtacagcagcaacagcgccaacgaggtgttccactacggcagcctgagaggcagaagcagaagacccgtgaacctgaagaagtggagcatcaccgacggctacgtgcccatcctgggcaacaagaccctgcccagcagatgccaccagtgcgtgatcgtgagcagcagcagccacctgctgggcaccaagctgggccccgagatcgagagagccgagtgcaccatcagaatgaacgacgcccccaccaccggctacagcgccgacgtgggcaacaagaccacctacagagtggtggcccacagcagcgtgttcagagtgctgagaagaccccaggagttcgtgaacagaacccccgagaccgtgttcatcttctggggcccccccagcaagatgcagaagccccagggcagcctggtgagagtgatccagagagccggcctggtgttccccaacatggaggcctacgccgtgagccccggcagaatgagacagttcgacgacctgttcagaggcgagaccggcaaggacagagagaagagccacagctggctgagcaccggctggttcaccatggtgatcgccgtggagctgtgcgaccacgtgcacgtgtacggcatggtgccccccaactactgcagccagagacccagactgcagagaatgccctaccactactacgagcccaagggccccgacgagtgcgtgacctacatccagaacgagcacagcagaaagggcaaccaccacagattcatcaccgagaagagagtgttcagcagctgggcccagctgtacggcatcaccttcagccaccccagctggacctga

SEQ ID NO: 2962 - RNA, 1071 nt, synthetic construct
  misc_feature 1..1071: note = AAC37586 variant
  source 1..1071: mol_type = other RNA
atgagcccctgcggcagagccagaagacagaccagcagaggcgccatggccgtgctggcctggaagttccccagaaccagactgcccatgggcgccagcgccctgtgcgtggtggtgctgtgctggctgtacatcttccccgtgtacagactgcccaacgagaaggagatcgtgcagggcgtgctgcagcagggcaccgcctggagaagaaaccagaccgccgccagagccttcagaaagcagatggaggactgctgcgaccccgcccacctgttcgccatgaccaagatgaacagccccatgggcaagagcatgtggtacgacggcgagttcctgtacagcttcaccatcgacaacagcacctacagcctgttcccccaggccacccccttccagctgcccctgaagaagtgcgccgtggtgggcaacggcggcatcctgaagaagagcggctgcggcagacagatcgacgaggccaacttcgtgatgagatgcaacctgccccccctgagcagcgagtacaccaaggacgtgggcagcaagagccagctggtgaccgccaaccccagcatcatcagacagagattccagaacctgctgtggagcagaaagaccttcgtggacaacatgaagatctacaaccacagctacatctacatgcccgccttcagcatgaagaccggcaccgagcccagcctgagagtgtactacaccctgagcgacgtgggcgccaaccagaccgtgctgttcgccaaccccaacttcctgagaagcatcggcaagttctggaagagcagaggcatccacgccaagagactgagcaccggcctgttcctggtgagcgccgccctgggcctgtgcgaggaggtggccatctacggcttctggcccttcagcgtgaacatgcacgagcagcccatcagccaccactactacgacaacgtgctgcccttcagcggcttccacgccatgcccgaggagttcctgcagctgtggtacctgcacaagatcggcgccctgagaatgcagctggacccctgcgaggacaccagcctgcagcccaccagctga

SEQ ID NO: 2963 - RNA, 1257 nt, synthetic construct
  misc_feature 1..1257: note = BAG50894 variant
  source 1..1257: mol_type = other RNA
atgagaaccaaggccgccggctgcgccgagagaagacccctgcagcccagaaccgaggccgccgccgcccccgccggcagagccatgcccagcgagtacacctacgtgaagctgagaagcgactgcagcagacccagcctgcagtggtacaccagagcccagagcaagatgagaagacccagcctgctgctgaaggacatcctgaagtgcaccctgctggtgttcggcgtgtggatcctgtacatcctgaagctgaactacaccaccgaggagtgcgacatgaagaagatgcactacgtggaccccgaccacgtgaagagagcccagaagtacgcccagcaggtgctgcagaaggagtgcagacccaagttcgccaagaccagcatggccctgctgttcgagcacagatacagcgtggacctgctgcccttcgtgcagaaggcccccaaggacagcgaggccgagagcaagtacgacccccccttcggcttcagaaagttcagcagcaaggtgcagaccctgctggagctgctgcccgagcacgacctgcccgagcacctgaaggccaagacctgcagaagatgcgtggtgatcggcagcggcggcatcctgcacggcctggagctgggccacaccctgaaccagttcgacgtggtgatcagactgaacagcgcccccgtggagggctacagcgagcacgtgggcaacaagaccaccatcagaatgacctaccccgagggcgcccccctgagcgacctggagtactacagcaacgacctgttcgtggccgtgctgttcaagagcgtggacttcaactggctgcaggccatggtgaagaaggagaccctgcccttctgggtgagactgttcttctggaagcaggtggccgagaagatccccctgcagcccaagcacttcagaatcctgaaccccgtgatcatcaaggagaccgccttcgacatcctgcagtacagcgagccccagagcagattctggggcagagacaagaacgtgcccaccatcggcgtgatcgccgtggtgctggccacccacctgtgcgacgaggtgagcctggccggcttcggctacgacctgaaccagcccagaacccccctgcactacttcgacagccagtgcatggccgccatgaacttccagaccatgcacaacgtgaccaccgagaccaagttcctgctgaagctggtgaaggagggcgtggtgaaggacctgagcggcggcatcgacagagagttctga

SEQ ID NO: 2964 - RNA, 1059 nt, synthetic construct
  misc_feature 1..1059: note = EAW56837 variant
  source 1..1059: mol_type = other RNA
atggacttcctgagaaacctgttcagccagaccctgagcctgggcagccagaaggagagactgctggacgagctgaccctggagggcgtggccagatacatgcagagcgagagatgcagaagagtgatctgcctggtgggcgccggcatcagcaccagcgccggcatccccgacttcagaagccccagcaccggcctgtacgacaacctggagaagtaccacctgccctaccccgaggccatcttcgagatcagctacttcaagaagcaccccgagcccttcttcgccctggccaaggagctgtaccccggccagttcaagcccaccatctgccactacttcatgagactgctgaaggacaagggcctgctgctgagatgctacacccagaacatcgacaccctggagagaatcgccggcctggagcaggaggacctggtggaggcccacggcaccttctacaccagccactgcgtgagcgccagctgcagacacgagtaccccctgagctggatgaaggagaagatcttcagcgaggtgacccccaagtgcgaggactgccagagcctggtgaagcccgacatcgtgttcttcggcgagagcctgcccgccagattcttcagctgcatgcagagcgacttcctgaaggtggacctgctgctggtgatgggcaccagcctgcaggtgcagcccttcgccagcctgatcagcaaggcccccctgagcacccccagactgctgatcaacaaggagaaggccggccagagcgaccccttcctgggcatgatcatgggcctgggcggcggcatggacttcgacagcaagaaggcctacagagacgtggcctggctgggcgagtgcgaccagggctgcctggccctggccgagctgctgggctggaagaaggagctggaggacctggtgagaagagagcacgccagcatcgacgcccagagcggcgccggcgtgcccaaccccagcaccagcgccagccccaagaagagccccccccccgccaaggacgaggccagaaccaccgagagagagaagccccagtga

SEQ ID NO: 2965 - RNA, 1170 nt, synthetic construct
  misc_feature 1..1170: note = AAD40850 variant
  source 1..1170: mol_type = other RNA
atggccgagcccgaccccagccaccccctggagacccaggccggcaaggtgcaggaggcccaggacagcgacagcgacagcgagggcggcgccgccggcggcgaggccgacatggacttcctgagaaacctgttcagccagaccctgagcctgggcagccagaaggagagactgctggacgagctgaccctggagggcgtggccagatacatgcagagcgagagatgcagaagagtgatctgcctggtgggcgccggcatcagcaccagcgccggcatccccgacttcagaagccccagcaccggcctgtacgacaacctggagaagtaccacctgccctaccccgaggccatcttcgagatcagctacttcaagaagcaccccgagcccttcttcgccctggccaaggagctgtaccccggccagttcaagcccaccatctgccactacttcatgagactgctgaaggacaagggcctgctgctgagatgctacacccagaacatcgacaccctggagagaatcgccggcctggagcaggaggacctggtggaggcccacggcaccttctacaccagccactgcgtgagcgccagctgcagacacgagtaccccctgagctggatgaaggagaagatcttcagcgaggtgacccccaagtgcgaggactgccagagcctggtgaagcccgacatcgtgttcttcggcgagagcctgcccgccagattcttcagctgcatgcagagcgacttcctgaaggtggacctgctgctggtgatgggcaccagcctgcaggtgcagcccttcgccagcctgatcagcaaggcccccctgagcacccccagactgctgatcaacaaggagaaggccggccagagcgaccccttcctgggcatgatcatgggcctgggcggcggcatggacttcgacagcaagaaggcctacagagacgtggcctggctgggcgagtgcgaccagggctgcctggccctggccgagctgctgggctggaagaaggagctggaggacctggtgagaagagagcacgccagcatcgacgcccagagcggcgccggcgtgcccaaccccagcaccagcgccagccccaagaagagccccccccccgccaaggacgaggccagaaccaccgagagagagaagccccagtga

SEQ ID NO: 2966 - RNA, 1401 nt, synthetic construct
  misc_feature 1..1401: note = AAH02824 variant
  source 1..1401: mol_type = other RNA
atggccgaggagcaggacctgagcgaggtggagctgagccccgtgggcagcgaggagcccagatgcctgagccccggcagcgcccccagcctgggccccgacggcggcggcggcggcagcggcctgagagccagccccggccccggcgagctgggcaaggtgaagaaggagcagcaggacggcgaggccgacgacgacaagttccccgtgtgcatcagagaggccgtgagccaggtgctgagcggctacgactggaccctggtgcccatgcccgtgagagtgaacggcgccagcaagagcaagccccacgtgaagagacccatgaacgccttcatggtgtgggcccaggccgccagaagaaagctggccgaccagtacccccacctgcacaacgccgagctgagcaagaccctgggcaagctgtggagactgctgaacgagagcgacaagagacccttcatcgaggaggccgagagactgagaatgcagcacaagaaggaccaccccgactacaagtaccagcccagaagaagaaagaacggcaaggccgcccagggcgaggccgagtgccccggcggcgaggccgagcagggcggcaccgccgccatccaggcccactacaagagcgcccacctggaccacagacaccccggcgagggcagccccatgagcgacggcaaccccgagcaccccagcggccagagccacggcccccccaccccccccaccacccccaagaccgagctgcagagcggcaaggccgaccccaagagagacggcagaagcatgggcgagggcggcaagccccacatcgacttcggcaacgtggacatcggcgagatcagccacgaggtgatgagcaacatggagaccttcgacgtggccgagctggaccagtacctgccccccaacggccaccccggccacgtgagcagctacagcgccgccggctacggcctgggcagcgccctggccgtggccagcggccacagcgcctggatcagcaagccccccggcgtggccctgcccaccgtgagcccccccggcgtggacgccaaggcccaggtgaagaccgagaccgccggcccccagggccccccccactacaccgaccagcccagcaccagccagatcgcctacaccagcctgagcctgccccactacggcagcgccttccccagcatcagcagaccccagttcgactacagcgaccaccagcccagcggcccctactacggccacagcggccaggccagcggcctgtacagcgccttcagctacatgggccccagccagagacccctgtacaccgccatcagcgaccccagccccagcggcccccagagccacagccccacccactgggagcagcccgtgtacaccaccctgagcagaccctga

SEQ ID NO: 2967 - RNA, 456 nt, synthetic construct
  misc_feature 1..456: note = AAH32457 variant
  source 1..456: mol_type = other RNA
atgagcatccccttcagcaacacccactacagaatcccccagggcttcggcaacctgctggagggcctgaccagagagatcctgagagagcagcccgacaacatccccgccttcgccgccgcctacttcgagagcctgctggagaagagagagaagaccaacttcgaccccgccgagtggggcagcaaggtggaggacagattctacaacaaccacgccttcgaggagcaggagccccccgagaagagcgaccccaagcaggaggagagccagatcagcggcaaggaggaggagaccagcgtgaccatcctggacagcagcgaggaggacaaggagaaggaggaggtggccgccgtgaagatccaggccgccttcagaggccacatcgccagagaggaggccaagaagatgaagaccaacagcctgcagaacgaggagaaggaggagaacaagtga

SEQ ID NO: 2968 - RNA, 294 nt, synthetic construct
  misc_feature 1..294: note = AAF28420 variant
  source 1..294: mol_type = other RNA
atggacaagcagagcagcgccggcggcgtgaagagaagcgtgccctgcgacagcaacgaggccaacgagatgatgcccgagacccccaccggcgacagcgacccccagcccgcccccaagaagatgaagaccagcgagagcagcaccatcctggtggtgagatacagaagaaacttcaagagaaccagccccgaggagctgctgaacgaccacgccagagagaacagaatcaaccccctgcagatggaggaggaggagttcatggagatcatggtggagatccccgccaagtga

SEQ ID NO: 2969 - RNA, 426 nt, synthetic construct
  misc_feature 1..426: note = AAH62750 variant
  source 1..426: mol_type = other RNA
atggagcagcccaccagcagcaccaacggcgagaagaccaagagcccctgcgagagcaacaacaagaagaacgacgagatgcaggaggtgcccaacagagtgctggcccccgagcagagcctgaagaagaccaagaccagcgagtaccccatcatcttcgtgtactacctgagaaagggcaagaagatcaacagcaaccagctggagaacgagcagagccaggagaacagcatcaaccccatccagaaggaggaggacgagggcgtggacctgagcgagggcagcagcaacgaggacgaggacctgggcccctgcgagggccccagcaaggaggacaaggacctggacagcagcgagggcagcagccaggaggacgaggacctgggcctgagcgagggcagcagccaggacagcggcgaggactga

SEQ ID NO: 2970 - RNA, 567 nt, synthetic construct
  misc_feature 1..567: note = AAH01003 variant
  source 1..567: mol_type = other RNA
atgaacggcgacgacaccttcgccaagagacccagagacgacgccaaggccagcgagaagagaagcaaggccttcgacgacatcgccacctacttcagcaagaaggagtggaagaagatgaagtacagcgagaagatcagctacgtgtacatgaagagaaactacaaggccatgaccaagctgggcttcaaggtgaccctgccccccttcatgtgcaacaagcaggccaccgacttccagggcaacgacttcgacaacgaccacaacagaagaatccaggtggagcacccccagatgaccttcggcagactgcacagaatcatccccaagatcatgcccaagaagcccgccgaggacgagaacgacagcaagggcgtgagcgaggccagcggcccccagaacgacggcaagcagctgcacccccccggcaaggccaacatcagcgagaagatcaacaagagaagcggccccaagagaggcaagcacgcctggacccacagactgagagagagaaagcagctggtgatctacgaggagatcagcgaccccgaggaggacgacgagtga

SEQ ID NO: 2971 - RNA, 567 nt, synthetic construct
  misc_feature 1..567: note = AAH16957 variant
  source 1..567: mol_type = other RNA
atgaacggcgacgacgccttcgccagaagacccaccgtgggcgcccagatccccgagaagatccagaaggccttcgacgacatcgccaagtacttcagcaaggaggagtgggagaagatgaaggccagcgagaagatcttctacgtgtacatgaagagaaagtacgaggccatgaccaagctgggcttcaaggccaccctgccccccttcatgtgcaacaagagagccgaggacttccagggcaacgacctggacaacgaccccaacagaggcaaccaggtggagagaccccagatgaccttcggcagactgcagggcatcagccccaagatcatgcccaagaagcccgccgaggagggcaacgacagcgaggaggtgcccgaggccagcggcccccagaacgacggcaaggagctgtgcccccccggcaagcccaccaccagcgagaagatccacgagagaagcggccccaagagaggcgagcacgcctggacccacagactgagagagagaaagcagctggtgatctacgaggagatcagcgaccccgaggaggacgacgagtga

SEQ ID NO: 2972 - RNA, 567 nt, synthetic construct
  misc_feature 1..567: note = AAC05819 variant
  source 1..567: mol_type = other RNA
atgaacggcgacgacaccttcgccagaagacccaccgtgggcgcccagatccccgagaagatccagaaggccttcgacgacatcgccaagtacttcagcaaggaggagtgggagaagatgaaggtgagcgagaagatcgtgtacgtgtacatgaagagaaagtacgaggccatgaccaagctgggcttcaaggccatcctgcccagcttcatgagaaacaagagagtgaccgacttccagggcaacgacttcgacaacgaccccaacagaggcaaccaggtgcagagaccccagatgaccttcggcagactgcagggcatcttccccaagatcatgcccaagaagcccgccgaggagggcaacgtgagcaaggaggtgcccgaggccagcggcccccagaacgacggcaagcagctgtgcccccccggcaagcccaccaccagcgagaagatcaacatgatcagcggccccaagagaggcgagcacgcctggacccacagactgagagagagaaagcagctggtgatctacgaggagatcagcgaccccgaggaggacgacgagtga

SEQ ID NO: 2973 - RNA, 567 nt, synthetic construct
  misc_feature 1..567: note = AAC05820 variant
  source 1..567: mol_type = other RNA
atgaacggcgacgacgccttcgccagaagacccagagacgacgcccagatcagcgagaagctgagaaaggccttcgacgacatcgccaagtacttcagcaagaaggagtgggagaagatgaagagcagcgagaagatcgtgtacgtgtacatgaagctgaactacgaggtgatgaccaagctgggcttcaaggtgaccctgccccccttcatgagaagcaagagagccgccgacttccacggcaacgacttcggcaacgacagaaaccacagaaaccaggtggagagaccccagatgaccttcggcagcctgcagagaatcttccccaagatcatgcccaagaagcccgccgaggaggagaacggcctgaaggaggtgcccgaggccagcggcccccagaacgacggcaagcagctgtgcccccccggcaaccccagcaccctggagaagatcaacaagaccagcggccccaagagaggcaagcacgcctggacccacagactgagagagagaaagcagctggtggtgtacgaggagatcagcgaccccgaggaggacgacgagtga

SEQ ID NO: 2974 - RNA, 888 nt, synthetic construct
  misc_feature 1..888: note = CCDS32420.1 variant
  source 1..888: mol_type = other RNA
atggagctgatccaggacaccagcagaccccccctggagtacgtgaagggcgtgcccctgatcaagtacttcgccgaggccctgggccccctgcagagcttccaggccagacccgacgacctgctgatcagcacctaccccaagagcggcaccacctgggtgagccagatcctggacatgatctaccagggcggcgacctggagaagtgccacagagcccccatcttcatgagagtgcccttcctggagttcaaggcccccggcatccccagcggcatggagaccctgaaggacacccccgcccccagactgctgaagacccacctgcccctggccctgctgccccagaccctgctggaccagaaggtgaaggtggtgtacgtggccagaaacgccaaggacgtggccgtgagctactaccacttctaccacatggccaaggtgcaccccgagcccggcacctgggacagcttcctggagaagttcatggtgggcgaggtgagctacggcagctggtaccagcacgtgcaggagtggtgggagctgagcagaacccaccccgtgctgtacctgttctacgaggacatgaaggagaaccccaagagagagatccagaagatcctggagttcgtgggcagaagcctgcccgaggagaccgtggacttcgtggtgcagcacaccagcttcaaggagatgaagaagaaccccatgaccaactacaccaccgtgccccaggagttcatggaccacagcatcagccccttcatgagaaagggcatggccggcgactggaagaccaccttcaccgtggcccagaacgagagattcgacgccgactacgccgagaagatggccggctgcagcctgagcttcagaagcgagctgtga

SEQ ID NO: 2975 - RNA, 3807 nt, synthetic construct
  misc_feature 1..3807: note = CCDS43990.1 variant
  source 1..3807: mol_type = other RNA
atgatcgccgcccccgagatccccaccgacttcaacctgctgcaggagagcgagacccacttcagcagcgacaccgacttcgaggacatcgagggcaagaaccagaagcagggcaagggcaagacctgcaagaagggcaagaagggccccgccgagaagggcaagggcggcaacggcggcggcaagccccccagcggccccaacagaatgaacggccaccaccagcagaacggcgtggagaacatgatgctgttcgaggtggtgaagatgggcaagagcgccatgcagagcgtggtggacgactggatcgagagctacaagcacgacagagacatcgccctgctggacctgatcaacttcttcatccagtgcagcggctgcaagggcgtggtgaccgccgagatgttcagacacatgcagaacagcgagatcatcagaaagatgaccgaggagttcgacgaggacagcggcgactaccccctgaccatggccggcccccagtggaagaagttcaagagcagcttctgcgagttcatcggcgtgctggtgagacagtgccagtacagcatcatctacgacgagtacatgatggacaccgtgatcagcctgctgaccggcctgagcgacagccaggtgagagccttcagacacaccagcaccctggccgccatgaagctgatgaccgccctggtgaacgtggccctgaacctgagcatcaacatggacaacacccagagacagtacgaggccgagagaaacaagatgatcggcaagagagccaacgagagactggagctgctgctgcagaagagaaaggagctgcaggagaaccaggacgagatcgagaacatgatgaacgccatcttcaagggcgtgttcgtgcacagatacagagacgccatcgccgagatcagagccatctgcatcgaggagatcggcatctggatgaagatgtacagcgacgccttcctgaacgacagctacctgaagtacgtgggctggaccatgcacgacaagcagggcgaggtgagactgaagtgcctgaccgccctgcagggcctgtactacaacaaggagctgaacagcaagctggagctgttcaccagcagattcaaggacagaatcgtgagcatgaccctggacaaggagtacgacgtggccgtgcaggccatcaagctgctgaccctggtgctgcagagcagcgaggaggtgctgaccgccgaggactgcgagaacgtgtaccacctggtgtacagcgcccacagacccgtggccgtggccgccggcgagttcctgtacaagaagctgttcagcagaagagaccccgaggaggacggcatgatgaagagaagaggcagacagggccccaacgccaacctggtgaagaccctggtgttcttcttcctggagagcgagctgcacgagcacgccgcctacctggtggacagcatgtgggactgcgccaccgagctgctgaaggactgggagtgcatgaacagcctgctgctggaggagcccctgagcggcgaggaggccctgaccgacagacaggagagcgccctgatcgagatcatgctgtgcaccatcagacaggccgccgagtgccacccccccgtgggcagaggcaccggcaagagagtgctgaccgccaaggagaagaagacccagctggacgacagaaccaagatcaccgagctgttcgccgtggccctgccccagctgctggccaagtacagcgtggacgccgagaaggtgaccaacctgctgcagctgccccagtacttcgacctggagatctacaccaccggcagactggagaagcacctggacgccctgctgagacagatcagaaacatcgtggagaagcacaccgacaccgacgtgctggaggcctgcagcaagacctaccacgccctgtgcaacgaggagttcaccatcttcaacagagtggacatcagcagaagccagctgatcgacgagctggccgacaagttcaacagactgctggaggacttcctgcaggagggcgaggagcccgacgaggacgacgcctaccaggtgctgagcaccctgaagagaatcaccgccttccacaacgcccacgacctgagcaagtgggacctgttcgcctgcaactacaagctgctgaagaccggcatcgagaacggcgacatgcccgagcagatcgtgatccacgccctgcagtgcacccactacgtgatcctgtggcagctggccaagatcaccgagagcagcagcaccaaggaggacctgctgagactgaagaagcagatgagagtgttctgccagatctgccagcactacctgaccaacgtgaacaccaccgtgaaggagcaggccttcaccatcctgtgcgacatcctgatgatcttcagccaccagatcatgagcggcggcagagacatgctggagcccctggtgtacacccccgacagcagcctgcagagcgagctgctgagcttcatcctggaccacgtgttcatcgagcaggacgacgacaacaacagcgccgacggccagcaggaggacgaggccagcaagatcgaggccctgcacaagagaagaaacctgctggccgccttctgcaagctgatcgtgtacaccgtggtggagatgaacaccgccgccgacatcttcaagcagtacatgaagtactacaacgactacggcgacatcatcaaggagaccatgagcaagaccagacagatcgacaagatccagtgcgccaagaccctgatcctgagcctgcagcagctgttcaacgagatgatccaggagaacggctacaacttcgacagaagcagcagcaccttcagcggcatcaaggagctggccagaagattcgccctgaccttcggcctggaccagctgaagaccagagaggccatcgccatgctgcacaaggacggcatcgagttcgccttcaaggagcccaacccccagggcgagagccacccccccctgaacctggccttcctggacatcctgagcgagttcagcagcaagctgctgagacaggacaagagaaccgtgtacgtgtacctggagaagttcatgaccttccagatgagcctgagaagagaggacgtgtggctgcccctgatgagctacagaaacagcctgctggccggcggcgacgacgacaccatgagcgtgatcagcggcatcagcagcagaggcagcaccgtgagaagcaagaagagcaagcccagcaccggcaagagaaaggtggtggagggcatgcagctgagcctgaccgaggagagcagcagcagcgacagcatgtggctgagcagagagcagaccctgcacacccccgtgatgatgcagaccccccagctgaccagcaccatcatgagagagcccaagagactgagacccgaggacagcttcatgagcgtgtaccccatgcagaccgagcaccaccagacccccctggactacaacacccaggtgacctggatgctggcccagagacagcaggaggaggccagacagcagcaggagagagccgccatgagctacgtgaagctgagaaccaacctgcagcacgccatcagaagaggcaccagcctgatggaggacgacgaggagcccatcgtggaggacgtgatgatgagcagcgagggcagaatcgaggacctgaacgagggcatggacttcgacaccatggacatcgacctgccccccagcaagaacagaagagagagaaccgagctgaagcccgacttcttcgaccccgccagcatcatggacgagagcgtgctgggcgtgagcatgttctga

SEQ ID NO: 2976 - RNA, 1473 nt, synthetic construct
  misc_feature 1..1473: note = CCDS5615.1 variant
  source 1..1473: mol_type = other RNA
atggagagcatcagcatgatgggcagccccaagagcctgagcgagaccttcctgcccaacggcatcaacggcatcaaggacgccagaaaggtgaccgtgggcgtgatcggcagcggcgacttcgccaagagcctgaccatcagactgatcagatgcggctaccacgtggtgatcggcagcagaaaccccaagttcgccagcgagttcttcccccacgtggtggacgtgacccaccacgaggacgccctgaccaagaccaacatcatcttcgtggccatccacagagagcactacaccagcctgtgggacctgagacacctgctggtgggcaagatcctgatcgacgtgagcaacaacatgagaatcaaccagtaccccgagagcaacgccgagtacctggccagcctgttccccgacagcctgatcgtgaagggcttcaacgtggtgagcgcctgggccctgcagctgggccccaaggacgccagcagacaggtgtacatctgcagcaacaacatccaggccagacagcaggtgatcgagctggccagacagctgaacttcatccccatcgacctgggcagcctgagcagcgccagagagatcgagaacctgcccctgagactgttcaccctgtggagaggccccgtggtggtggccatcagcctggccaccttcttcttcctgtacagcttcgtgagagacgtgatccacccctacgccagaaaccagcagagcgacttctacaagatccccatcgagatcgtgaacaagaccctgcccatcgtggccatcaccctgctgagcctggtgtacctggccggcctgctggccgccgcctaccagctgtactacggcaccaagtacagaagattccccccctggctggagacctggctgcagtgcagaaagcagctgggcctgctgagcttcttcttcgccatggtgcacgtggcctacagcctgtgcctgcccatgagaagaagcgagagatacctgttcctgaacatggcctaccagcaggtgcacgccaacatcgagaacagctggaacgaggaggaggtgtggagaatcgagatgtacatcagcttcggcatcatgagcctgggcctgctgagcctgctggccgtgaccagcatccccagcgtgagcaacgccctgaactggagagagttcagcttcatccagagcaccctgggctacgtggccctgctgatcagcaccttccacgtgctgatctacggctggaagagagccttcgaggaggagtactacagattctacaccccccccaacttcgtgctggccctggtgctgcccagcatcgtgatcctgggcaagatcatcctgttcctgccctgcatcagcagaaagctgaagagaatcaagaagggctgggagaagagccagttcctggaggagggcatgggcggcaccatcccccacgtgagccccgagagagtgaccgtgatgtga

SEQ ID NO: 2977 - RNA, 777 nt, synthetic construct
  misc_feature 1..777: note = EAW93749 variant
  source 1..777: mol_type = other RNA
atggagagcagaaaggacatcaccaaccaggaggagatctggaagatgaagcccagaagaaacctggaggacaacgactacctgcacaaggacaccggcgagaccagcatgctgaagagacccgtgctgctgcacctgcagcagaccgcccacgccgacgagttcgactgccccagcgagctgcagcacgcccaggagctgttcccccagtggcacctgcccatcaagatcgccgccgtgatggccagcctgaccttcctgtacaccctgctgagagaggtgatccaccccctggccaccagccaccagcagtacttctacaagatccccatcctggtgatcaacaaggtgctgcccatggtgagcatcaccctgctggccctggtgtacctgcccggcgtgatcgccgccatcgtgcaggtgcacaacggcaccaagtacaagaagttcccccactggctggacaagtggatgctgaccagaaagcagttcggcctgctgagcctgttcttcgccgtgctgcacgccatctacaccctgagctacgccatgagaagaagctacagatacaagctgctgaactgggcctaccagcaggtgcagcagaacaaggaggacgcctggatcgagcacgacgtgtggagaatggagatctacgtgagcctgggcatcgtgggcctggccatcctggccctgctggccgtgaccagcatccccagcgtgagcgacagcctgacctggagagagttccactacatccaggtgaacaacatctga

SEQ ID NO: 2978 - RNA, 1020 nt, synthetic construct
  misc_feature 1..1020: note = AAD15620 variant
  source 1..1020: mol_type = other RNA
atggagagcagaaaggacatcaccaaccaggaggagctgtggaagatgaagcccagaagaaacctggaggaggacgactacctgcacaaggacaccggcgagaccagcatgctgaagagacccgtgctgctgcacctgcaccagaccgcccacgccgacgagttcgactgccccagcgagctgcagcacacccaggagctgttcccccagtggcacctgcccatcaagatcgccgccatcatcgccagcctgaccttcctgtacaccctgctgagagaggtgatccaccccctggccaccagccaccagcagtacttctacaagatccccatcctggtgatcaacaaggtgctgcccatggtgagcatcaccctgctggccctggtgtacctgcccggcgtgatcgccgccatcgtgcagctgcacaacggcaccaagtacaagaagttcccccactggctggacaagtggatgctgaccagaaagcagttcggcctgctgagcttcttcttcgccgtgctgcacgccatctacagcctgagctaccccatgagaagaagctacagatacaagctgctgaactgggcctaccagcaggtgcagcagaacaaggaggacgcctggatcgagcacgacgtgtggagaatggagatctacgtgagcctgggcatcgtgggcctggccatcctggccctgctggccgtgaccagcatccccagcgtgagcgacagcctgacctggagagagttccactacatccagagcaagctgggcatcgtgagcctgctgctgggcaccatccacgccctgatcttcgcctggaacaagtggatcgacatcaagcagttcgtgtggtacaccccccccaccttcatgatcgccgtgttcctgcccatcgtggtgctgatcttcaagagcatcctgttcctgccctgcctgagaaagaagatcctgaagatcagacacggctgggaggacgtgaccaagatcaacaagaccgagatctgcagccagctgtga

SEQ ID NO: 2979 - RNA, 498 nt, synthetic construct
  misc_feature 1..498: note = CCDS32752.1 variant
  source 1..498: mol_type = other RNA
atgggcgcccccaccctgccccccgcctggcagcccttcctgaaggaccacagaatcagcaccttcaagaactggcccttcctggagggctgcgcctgcacccccgagagaatggccgaggccggcttcatccactgccccaccgagaacgagcccgacctggcccagtgcttcttctgcttcaaggagctggagggctgggagcccgacgacgaccccatcggccccggcaccgtggcctacgcctgcaacaccagcaccctgggcggcagaggcggcagaatcaccagagaggagcacaagaagcacagcagcggctgcgccttcctgagcgtgaagaagcagttcgaggagctgaccctgggcgagttcctgaagctggacagagagagagccaagaacaagatcgccaaggagaccaacaacaagaagaaggagttcgaggagaccgccgagaaggtgagaagagccatcgagcagctggccgccatggactga

SEQ ID NO: 2980 - RNA, 429 nt, synthetic construct
  misc_feature 1..429: note = AAC51660 variant
  source 1..429: mol_type = other RNA
atgggcgcccccaccctgccccccgcctggcagcccttcctgaaggaccacagaatcagcaccttcaagaactggcccttcctggagggctgcgcctgcacccccgagagaatggccgaggccggcttcatccactgccccaccgagaacgagcccgacctggcccagtgcttcttctgcttcaaggagctggagggctgggagcccgacgacgaccccatcgaggagcacaagaagcacagcagcggctgcgccttcctgagcgtgaagaagcagttcgaggagctgaccctgggcgagttcctgaagctggacagagagagagccaagaacaagatcgccaaggagaccaacaacaagaagaaggagttcgaggagaccgccaagaaggtgagaagagccatcgagcagctggccgccatggactga

SEQ ID NO: 2981 - RNA, 2931 nt, synthetic construct
  misc_feature 1..2931: note = EAW56623 variant
  source 1..2931: mol_type = other RNA
atggagaagcagaagcccttcgccctgttcgtgccccccagaagcagcagcagccaggtgagcgccgtgaagccccagaccctgggcggcgacagcaccttcttcaagagcttcaacaagtgcaccgaggacgacttcgagttccccttcgccaagaccaacctgagcaagaacggcgagaacatcgacagcgaccccgccctgcagaaggtgaacttcctgcccgtgctggagcaggtgggcaacagcgactgccactaccaggagggcctgaaggacagcgacctggagaacagcgagggcctgagcagagtgtacagcaagctgtacaaggaggccgagaagatcaagaagtggaaggtgagcaccgaggccgagctgagacagaaggagagcaagctgcaggagaacagaaagatcatcgaggcccagagaaaggccatccaggagctgcagttcggcaacgagaaggtgagcctgaagctggaggagggcatccaggagaacaaggacctgatcaaggagaacaacgccaccagacacctgtgcaacctgctgaaggagacctgcgccagaagcgccgagaagaccaagaagtacgagtacgagagagaggagaccagacaggtgtacatggacctgaacaacaacatcgagaagatgatcaccgccttcgaggagctgagagtgcaggccgagaacagcagactggagatgcacttcaagctgaaggaggactacgagaagatccagcacctggagcaggagtacaagaaggagatcaacgacaaggagaagcaggtgagcctgctgctgatccagatcaccgagaaggagaacaagatgaaggacctgaccttcctgctggaggagagcagagacaaggtgaaccagctggaggagaagaccaagctgcagagcgagaacctgaagcagagcatcgagaagcagcaccacctgaccaaggagctggaggacatcaaggtgagcctgcagagaagcgtgagcacccagaaggccctggaggaggacctgcagatcgccaccaagaccatctgccagctgaccgaggagaaggagacccagatggaggagagcaacaaggccagagccgcccacagcttcgtggtgaccgagttcgagaccaccgtgtgcagcctggaggagctgctgagaaccgagcagcagagactggagaagaacgaggaccagctgaagatcctgaccatggagctgcagaagaagagcagcgagctggaggagatgaccaagctgaccaacaacaaggaggtggagctggaggagctgaagaaggtgctgggcgagaaggagaccctgctgtacgagaacaagcagttcgagaagatcgccgaggagctgaagggcaccgagcaggagctgatcggcctgctgcaggccagagagaaggaggtgcacgacctggagatccagctgaccgccatcaccaccagcgagcagtactacagcaaggaggtgaaggacctgaagaccgagctggagaacgagaagctgaagaacaccgagctgaccagccactgcaacaagctgagcctggagaacaaggagctgacccaggagaccagcgacatgaccctggagctgaagaaccagcaggaggacatcaacaacaacaagaagcaggaggagagaatgctgaagcagatcgagaacctgcaggagaccgagacccagctgagaaacgagctggagtacgtgagagaggagctgaagcagaagagagacgaggtgaagtgcaagctggacaagagcgaggagaactgcaacaacctgagaaagcaggtggagaacaagaacaagtacatcgaggagctgcagcaggagaacaaggccctgaagaagaagggcaccgccgagagcaagcagctgaacgtgtacgagatcaaggtgaacaagctggagctggagctggagagcgccaagcagaagttcggcgagatcaccgacacctaccagaaggagatcgaggacaagaagatcagcgaggagaacctgctggaggaggtggagaaggccaaggtgatcgccgacgaggccgtgaagctgcagaaggagatcgacaagagatgccagcacaagatcgccgagatggtggccctgatggagaagcacaagcaccagtacgacaagatcatcgaggagagagacagcgagctgggcctgtacaagagcaaggagcaggagcagagcagcctgagagccagcctggagatcgagctgagcaacctgaaggccgagctgctgagcgtgaagaagcagctggagatcgagagagaggagaaggagaagctgaagagagaggccaaggagaacaccgccaccctgaaggagaagaaggacaagaagacccagaccttcctgctggagacccccgagatctactggaagctggacagcaaggccgtgcccagccagaccgtgagcagaaacttcaccagcgtggaccacggcatcagcaaggacaagagagactacctgtggaccagcgccaagaacaccctgagcacccccctgcccaaggcctacaccgtgaagacccccaccaagcccaagctgcagcagagagagaacctgaacatccccatcgaggagagcaagaagaagagaaagatggccttcgagttcgacatcaacagcgacagcagcgagaccaccgacctgctgagcatggtgagcgaggaggagaccctgaagaccctgtacagaaacaacaacccccccgccagccacctgtgcgtgaagacccccaagaaggcccccagcagcctgaccacccccggcagcaccctgaagttcggcgccatcagaaagatgagagaggacagatgggccgtgatcgccaagatggacagaaagaagaagctgaaggaggccgagaagctgttcgtgtga

SEQ ID NO: 2982 - RNA, 2931 nt, synthetic construct
  misc_feature 1..2931: note = AAI44020 variant
  source 1..2931: mol_type = other RNA
atggagaagcagaagcccttcgccctgttcgtgccccccagaagcagcagcagccaggtgagcgccgtgaagccccagaccctgggcggcgacagcaccttcttcaagagcttcaacaagtgcaccgaggacgacttcgagttccccttcgccaagaccaacctgagcaagaacggcgagaacatcgacagcgaccccgccctgcagaaggtgaacttcctgcccgtgttcgagcaggtgggcaacagcgactgccactaccaggagggcctgaaggacagcgacctggagaacagcgagggcctgagcagagtgtacagcaagctgtacaaggaggccgagaagatcaagaagtggaaggtgagcaccgaggccgagctgagacagaaggagagcaagctgcaggagaacagaaagatcatcgaggcccagagaaaggccatccaggagctgcagttcggcaacgagaaggtgagcctgaagctggaggagggcatccaggagaacaaggacctgatcaaggagaacaacgccaccagacacctgtgcaacctgctgaaggagacctgcgccagaagcgccgagaagaccaagaagtacgagtacgagagagaggagaccagacaggtgtacatggacctgaacagcaacatcgagaagatgatcaccgccttcgaggagctgagagtgcaggccgagaacagcagactggagatgcacttcaagctgaaggaggactacgagaagatccagcacctggagcaggagtacaagaaggagatcaacgacaaggagaagcaggtgagcctgctgctgatccagatcaccgagaaggagaacaagatgaaggacctgaccttcctgctggaggagagcagagacaaggtgaaccagctggaggagaagaccaagctgcagagcgagaacctgaagcagagcatcgagaagcagcaccacctgaccaaggagctggaggacatcaaggtgagcctgcagagaagcgtgagcacccagaaggccctggaggaggacctgcagatcgccaccaagaccatctgccagctgaccgaggagaaggagacccagatggaggagagcaacaaggccagagccgcccacagcttcgtggtgaccgagttcgagaccaccgtgtgcagcctggaggagctgctgagaaccgagcagcagagactggagaagaacgaggaccagctgaagatcctgaccatggagctgcagaagaagagcagcgagctggaggagatgaccaagctgaccaacaacaaggaggtggagctggaggagctgaagaaggtgctgggcgagaaggagaccctgctgtacgagaacaagcagttcgagaagatcgccgaggagctgaagggcaccgagcaggagctgatcggcctgctgcaggccagagagaaggaggtgcacgacctggagatccagctgaccgccatcaccaccagcgagcagtactacagcaaggaggtgaaggacctgaagaccgagctggagaacgagaagctgaagaacaccgagctgaccagccactgcaacaagctgagcctggagaacaaggagctgacccaggagaccagcgacatgaccctggagctgaagaaccagcaggaggacatcaacaacaacaagaagcaggaggagagaatgctgaagcagatcgagaacctgcaggagaccgagacccagctgagaaacgagctggagtacgtgagagaggagctgaagcagaagagagacgaggtgaagtgcaagctggacaagagcgaggagaactgcaacaacctgagaaagcaggtggagaacaagaacaagtacatcgaggagctgcagcaggagaacaaggccctgaagaagaagggcaccgccgagagcaagcagctgaacgtgtacgagatcaaggtgaacaagctggagctggagctggagagcgccaagcagaagttcggcgagatcaccgacacctaccagaaggagatcgaggacaagaagatcagcgaggagaacctgctggaggaggtggagaaggccaaggtgatcgccgacgaggccgtgaagctgcagaaggagatcgacaagagatgccagcacaagatcgccgagatggtggccctgatggagaagcacaagcaccagtacgacaagatcatcgaggagagagacagcgagctgggcctgtacaagagcaaggagcaggagcagagcagcctgagagccagcctggagatcgagctgagcaacctgaaggccgagctgctgagcgtgaagaagcagctggagatcgagagagaggagaaggagaagctgaagagagaggccaaggagaacaccgccaccctgaaggagaagaaggacaagaagacccagaccttcctgctggagacccccgagatctactggaagctggacagcaaggccgtgcccagccagaccgtgagcagaaacttcaccagcgtggaccacggcatcagcaaggacaagagagactacctgtggaccagcgccaagaacaccctgagcacccccctgcccaaggcctacaccgtgaagacccccaccaagcccaagctgcagcagagagagaacctgaacatccccatcgaggagagcaagaagaagagaaagatggccttcgagttcgacatcaacagcgacagcagcgagaccaccgacctgctgagcatggtgagcgaggaggagaccctgaagaccctgtacagaaacaacaacccccccgccagccacctgtgcgtgaagacccccaagaaggcccccagcagcctgaccacccccggcagcaccctgaagttcggcgccatcagaaagatgagagaggacagatgggccgtgatcgccaagatggacagaaagaagaagctgaaggaggccgagaagctgttcgtgtga

SEQ ID NO: 2983 - RNA, 2931 nt, synthetic construct; identical to SEQ ID NO: 2981
  misc_feature 1..2931: note = AAI26267 variant
  source 1..2931: mol_type = other RNA

SEQ ID NO: 2984 - RNA, 330 nt, synthetic construct
  misc_feature 1..330: note = AAI05300 variant
  source 1..330: mol_type = other RNA
atggagaagcagaagcccttcgccctgttcgtgccccccagaagcagcagcagccaggtgagcgccgtgaagccccagaccctgggcggcgacagcaccttcttcaagagcttcaacaagtgcaccgaggacgacttcgagttccccttcgccaagaccaacctgagcaagaacggcgagaacatcgacagcgaccccgccctgcagaacgtgaacttcctgcccgtgctggagcaggtgggcaacagcgactgccactaccaggagggcctgaaggacagcgacctggagaacagcgagggcctgagcagagtgtacagcaagctgtga

SEQ ID NO: 2985 - RNA, 1467 nt, synthetic construct
  misc_feature 1..1467: note = BAF56181 variant
  source 1..1467: mol_type = other RNA
atgagcgtggccttcgccgcccccagacagagaggcaagggcgagatcacccccgccgccatccagaagatgctggacgacaacaaccacctgatccagtgcatcatggacagccagaacaagggcaagaccagcgagtgcagccagtaccagcagatgctgcacaccaacctggtgtacctggccaccatcgccgacagcaaccagaacatgcagagcctgctgcccgccccccccacccagaacatgcccatgggccccggcggcatgaaccagagcggccccccccccccccccagaagccacaacatgcccagcgacggcatggtgggcggcggcccccccgccccccacatgcagaaccagatgaacggccagatgcccggccccaaccacatgcccatgcagggccccggccccaaccagctgaacatgaccaacagcagcatgaacatgcccagcagcagccacggcagcatgggcggctacaaccacagcgtgcccagcagccagagcatgcccgtgcagaaccagatgaccatgagccagggccagcccatgggcaactacggccccagacccaacatgagcatgcagcccaaccagggccccatgatgcaccagcagccccccagccagcagtacaacatgccccagggcggcggccagcactaccagggccagcagccccccatgggcatgatgggccaggtgaaccagggcaaccacatgatgggccagagacagatccccccctacagacccccccagcagggccccccccagcagtacagcggccaggaggactactacggcgaccagtacagccacggcggccagggcccccccgagggcatgaaccagcagtactaccccgacggccacaacgactacggctaccagcagcccagctaccccgagcagggctacgacagaccctacgaggacagcagccagcactactacgagggcggcaacagccagtacggccagcagcaggacgcctaccagggcccccccccccagcagggctaccccccccagcagcagcagtaccccggccagcagggctaccccggccagcagcagggctacggccccagccagggcggccccggcccccagtaccccaactacccccagggccagggccagcagtacggcggctacagacccacccagcccggccccccccagcccccccagcagagaccctacggctacgaccagatcatgcccaagaagcccgccgaggacgagaacgacagcaagggcgtgagcgaggccagcggcccccagaacgacggcaagcagctgcacccccccggcaaggccaacatcagcgagaagatcaacaagagaagcggccccaagagaggcaagcacgcctggacccacagactgagagagagaaagcagctggtgatctacgaggagatcagcgaccccgaggaggacgacgagtga

SEQ ID NO: 2986 - RNA, 1374 nt, synthetic construct
  misc_feature 1..1374: note = BAF56182 variant
  source 1..1374: mol_type = other RNA
atgagcgtggccttcgccgcccccagacagagaggcaagggcgagatcacccccgccgccatccagaagatgctggacgacaacaaccacctgatccagtgcatcatggacagccagaacaagggcaagaccagcgagtgcagccagtaccagcagatgctgcacaccaacctggtgtacctggccaccatcgccgacagcaaccagaacatgcagagcctgctgcccgccccccccacccagaacatgcccatgggccccggcggcatgaaccagagcggccccccccccccccccagaagccacaacatgcccagcgacggcatggtgggcggcggcccccccgccccccacatgcagaaccagatgaacggccagatgcccggccccaaccacatgcccatgcagggccccggccccaaccagctgaacatgaccaacagcagcatgaacatgcccagcagcagccacggcagcatgggcggctacaaccacagcgtgcccagcagccagagcatgcccgtgcagaaccagatgaccatgagccagggccagcccatgggcaactacggccccagacccaacatgagcatgcagcccaaccagggccccatgatgcaccagcagccccccagccagcagtacaacatgccccagggcggcggccagcactaccagggccagcagccccccatgggcatgatgggccaggtgaaccagggcaaccacatgatgggccagagacagatccccccctacagacccccccagcagggccccccccagcagtacagcggccaggaggactactacggcgaccagtacagccacggcggccagggcccccccgagggcatgaaccagcagtactaccccgacggcaacagccagtacggccagcagcaggacgcctaccagggcccccccccccagcagggctaccccccccagcagcagcagtaccccggccagcagggctaccccggccagcagcagggctacggccccagccagggcggccccggcccccagtaccccaactacccccagggccagggccagcagtacggcggctacagacccacccagcccggccccccccagcccccccagcagagaccctacggctacgaccagatcatgcccaagaagcccgccgaggacgagaacgacagcaagggcgtgagcgaggccagcggcccccagaacgacggcaagcagctgcacccccccggcaaggccaacatcagcgagaagatcaacaagagaagcggccccaagagaggcaagcacgcctggacccacagactgagagagagaaagcagctggtgatctacgaggagatcagcgaccccgaggaggacgacgagtga

SEQ ID NO: 2987 - RNA, 1467 nt, synthetic construct
  misc_feature 1..1467: note = BAF56183 variant
  source 1..1467: mol_type = other RNA
atgagcgtggccttcgccgcccccagacagagaggcaagggcgagatcacccccgccgccatccagaagatgctggacgacaacaaccacctgatccagtgcatcatggacagccagaacaagggcaagaccagcgagtgcagccagtaccagcagatgctgcacaccaacctggtgtacctggccaccatcgccgacagcaaccagaacatgcagagcctgctgcccgccccccccacccagaacatgcccatgggccccggcggcatgaaccagagcggccccccccccccccccagaagccacaacatgcccagcgacggcatggtgggcggcggcccccccgccccccacatgcagaaccagatgaacggccagatgcccggccccaaccacatgcccatgcagggccccggccccaaccagctgaacatgaccaacagcagcatgaacatgcccagcagcagccacggcagcatgggcggctacaaccacagcgtgcccagcagccagagcatgcccgtgcagaaccagatgaccatgagccagggccagcccatgggcaactacggccccagacccaacatgagcatgcagcccaaccagggccccatgatgcaccagcagccccccagccagcagtacaacatgccccagggcggcggccagcactaccagggccagcagccccccatgggcatgatgggccaggtgaaccagggcaaccacatgatgggccagagacagatccccccctacagacccccccagcagggccccccccagcagtacagcggccaggaggactactacggcgaccagtacagccacggcggccagggcccccccgagggcatgaaccagcagtactaccccgacggccacaacgactacggctaccagcagcccagctaccccgagcagggctacgacagaccctacgaggacagcagccagcactactacgagggcggcaacagccagtacggccagcagcaggacgcctaccagggcccccccccccagcagggctaccccccccagcagcagcagtaccccggccagcagggctaccccggccagcagcagggctacggccccagccagggcggccccggcccccagtaccccaactacccccagggccagggccagcagtacggcggctacagacccacccagcccggccccccccagcccccccagcagagaccctacggctacgaccagatcatgcccaagaagcccgccgaggagggcaacgacagcgaggaggtgcccgaggccagcggcccccagaacgacggcaaggagctgtgcccccccggcaagcccaccaccagcgagaagatccacgagagaagcggccccaagagaggcgagcacgcctggacccacagactgagagagagaaagcagctggtgatctacgaggagatcagcgaccccgaggaggacgacgagtga

SEQ ID NO: 2988 - RNA, 1374 nt, synthetic construct
  misc_feature 1..1374: note = BAF56184 variant
  source 1..1374: mol_type = other RNA
atgagcgtggccttcgccgcccccagacagagaggcaagggcgagatcacccccgccgccatccagaagatgctggacgacaacaaccacctgatccagtgcatcatggacagccagaacaagggcaagaccagcgagtgcagccagtaccagcagatgctgcacaccaacctggtgtacctggccaccatcgccgacagcaaccagaacatgcagagcctgctgcccgccccccccacccagaacatgcccatgggccccggcggcatgaaccagagcggccccccccccccccccagaagccacaacatgcccagcgacggcatggtgggcggcggcccccccgccccccacatgcagaaccagatgaacggccagatgcccggccccaaccacatgcccatgcagggccccggccccaaccagctgaacatgaccaacagcagcatgaacatgcccagcagcagccacggcagcatgggcggctacaaccacagcgtgcccagcagccagagcatgcccgtgcagaaccagatgaccatgagccagggccagcccatgggcaactacggccccagacccaacatgagcatgcagcccaaccagggccccatgatgcaccagcagccccccagccagcagtacaacatgccccagggcggcggccagcactaccagggccagcagccccccatgggcatgatgggccaggtgaaccagggcaaccacatgatgggccagagacagatccccccctacagacccccccagcagggccccccccagcagtacagcggccaggaggactactacggcgaccagtacagccacggcggccagggcccccccgagggcatgaaccagcagtactaccccgacggcaacagccagtacggccagcagcaggacgcctaccagggcccccccccccagcagggctaccccccccagcagcagcagtaccccggccagcagggctaccccggccagcagcagggctacggccccagccagggcggccccggcccccagtaccccaactacccccagggccagggccagcagtacggcggctacagacccacccagcccggccccccccagcccccccagcagagaccctacggctacgaccagatcatgcccaagaagcccgccgaggagggcaacgacagcgaggaggtgcccgaggccagcggcccccagaacgacggcaaggagctgtgcccccccggcaagcccaccaccagcgagaagatccacgagagaagcggccccaagagaggcgagcacgcctggacccacagactgagagagagaaagcagctggtgatctacgaggagatcagcgaccccgaggaggacgacgagtga

SEQ ID NO: 2989 - RNA, 336 nt, synthetic construct
  misc_feature 1..336: note = AAI05590 variant
  source 1..336: mol_type = other RNA
atgaagaccaacgacacctacatgaagttcagctggctgaccgtgcccgagaagagcctggacaaggagcacagatgcatcgtgagacacgagaacaacaagaacggcgtggaccaggagatcatcttcccccccatcaagaccgacgtgatcaccatggaccccaaggacaactgcagcaaggacgccaacgacaccctgctgctgcagctgaccaacaccagcgcctactacatgtacctgctgctgctgctgaagagcgtggtgtacttcgccatcatcacctgctgcctgctgagaagaaccgccttctgctgcaacggcgagaagagctga

SEQ ID NO: 2990 - RNA, 177 nt, synthetic construct
  misc_feature 1..177: note = AAG29337 variant
  source 1..177: mol_type = other RNA
atgcagatgttcccccccagccccctgttcttcttcctgcagctgctgaagcagagcagcagaagactggagcacaccttcgtgttcctgagaaacttcagcctgatgctgctgagatacatcggcaagaagagaagagccaccagattctgggaccccagaagaggcaccccctga

SEQ ID NO: 2991 - RNA, 1131 nt, synthetic construct
  misc_feature 1..1131: note = AAF26776 variant
  source 1..1131: mol_type = other RNA
atggccaacagcgccaacaccaacaccgtgcccaagctgtacagaagcgtgatcgaggacgtgatcaacgacgtgagagacatcttcctggacgacggcgtggacgagcaggtgctgatggagctgaagaccctgtgggagaacaagctgatgcagagcagagccgtggacggcttccacagcgaggagcagcagctgctgctgcaggtgcagcagcagcaccagccccagcagcagcagcaccaccaccaccaccaccaccagcaggcccagccccagcagaccgtgccccagcaggcccagacccagcaggtgctgatccccgccagccagcaggccaccgccccccaggtgatcgtgcccgacagcaagctgatccagcacatgaacgccagcaacatgagcgccgccgccaccgccgccaccctggccctgcccgccggcgtgacccccgtgcagcagatcctgaccaacagcggccagctgctgcaggtggtgagagccgccaacggcgcccagtacatcttccagccccagcagagcgtggtgctgcagcagcaggtgatcccccagatgcagcccggcggcgtgcaggcccccgtgatccagcaggtgctggcccccctgcccggcggcatcagcccccagaccggcgtgatcatccagccccagcagatcctgttcaccggcaacaagacccaggtgatccccaccaccgtggccgcccccacccccgcccaggcccagatcaccgccaccggccagcagcagccccaggcccagcccgcccagacccaggcccccctggtgctgcaggtggacggcaccggcgacaccagcagcgaggaggacgaggacgaggaggaggactacgacgacgacgaggaggaggacaaggagaaggacggcgccgaggacggccaggtggaggaggagcccctgaacagcgaggacgacgtgagcgacgaggagggccaggagctgttcgacaccgagaacgtggtggtgtgccagtacgacaagatccacagaagcaagaacaagtggaagttccacctgaaggacggcatcatgaacctgaacggcagagactacatcttcagcaaggccatcggcgacgccgagtggtga

SEQ ID NO: 2992 - RNA, 1173 nt, synthetic construct
  misc_feature 1..1173: note = AAH00125 variant
  source 1..1173: mol_type = other RNA
atgccccccagcggcctgagactgctgctgctgctgctgcccctgctgtggctgctggtgctgacccccggcagacccgccgccggcctgagcacctgcaagaccatcgacatggagctggtgaagagaaagagaatcgaggccatcagaggccagatcctgagcaagctgagactggccagcccccccagccagggcgaggtgccccccggccccctgcccgaggccgtgctggccctgtacaacagcaccagagacagagtggccggcgagagcgccgagcccgagcccgagcccgaggccgactactacgccaaggaggtgaccagagtgctgatggtggagacccacaacgagatctacgacaagttcaagcagagcacccacagcatctacatgttcttcaacaccagcgagctgagagaggccgtgcccgagcccgtgctgctgagcagagccgagctgagactgctgagactgaagctgaaggtggagcagcacgtggagctgtaccagaagtacagcaacaacagctggagatacctgagcaacagactgctggcccccagcgacagccccgagtggctgagcttcgacgtgaccggcgtggtgagacagtggctgagcagaggcggcgagatcgagggcttcagactgagcgcccactgcagctgcgacagcagagacaacaccctgcaggtggacatcaacggcttcaccaccggcagaagaggcgacctggccaccatccacggcatgaacagacccttcctgctgctgatggccacccccctggagagagcccagcacctgcagagcagcagacacagaagagccctggacaccaactactgcttcagcagcaccgagaagaactgctgcgtgagacagctgtacatcgacttcagaaaggacctgggctggaagtggatccacgagcccaagggctaccacgccaacttctgcctgggcccctgcccctacatctggagcctggacacccagtacagcaaggtgctggccctgtacaaccagcacaaccccggcgccagcgccgccccctgctgcgtgccccaggccctggagcccctgcccatcgtgtactacgtgggcagaaagcccaaggtggagcagctgagcaacatgatcgtgagaagctgcaagtgcagctga

SEQ ID NO: 2993 - RNA, 1704 nt, synthetic construct
  misc_feature 1..1704: note = AAT70724 variant
  source 1..1704: mol_type = other RNA
atgggcagaggcctgctgagaggcctgtggcccctgcacatcgtgctgtggaccagaatcgccagcaccatccccccccacgtgcagaagagcgtgaacaacgacatgatcgtgaccgacaacaacggcgccgtgaagttcccccagctgtgcaagttctgcgacgtgagattcagcacctgcgacaaccagaagagctgcatgagcaactgcagcatcaccagcatctgcgagaagccccaggaggtgtgcgtggccgtgtggagaaagaacgacgagaacatcaccctggagaccgtgtgccacgaccccaagctgccctaccacgacttcatcctggaggacgccgccagccccaagtgcatcatgaaggagaagaagaagcccggcgagaccttcttcatgtgcagctgcagcagcgacgagtgcaacgacaacatcatcttcagcgaggagtacaacaccagcaaccccgacctgctgctggtgatcttccaggtgaccggcatcagcctgctgccccccctgggcgtggccatcagcgtgatcatcatcttctactgctacagagtgaacagacagcagaagctgagcagcacctgggagaccggcaagaccagaaagctgatggagttcagcgagcactgcgccatcatcctggaggacgacagaagcgacatcagcagcacctgcgccaacaacatcaaccacaacaccgagctgctgcccatcgagctggacaccctggtgggcaagggcagattcgccgaggtgtacaaggccaagctgaagcagaacaccagcgagcagttcgagaccgtggccgtgaagatcttcccctacgaggagtacgccagctggaagaccgagaaggacatcttcagcgacatcaacctgaagcacgagaacatcctgcagttcctgaccgccgaggagagaaagaccgagctgggcaagcagtactggctgatcaccgccttccacgccaagggcaacctgcaggagtacctgaccagacacgtgatcagctgggaggacctgagaaagctgggcagcagcctggccagaggcatcgcccacctgcacagcgaccacaccccctgcggcagacccaagatgcccatcgtgcacagagacctgaagagcagcaacatcctggtgaagaacgacctgacctgctgcctgtgcgacttcggcctgagcctgagactggaccccaccctgagcgtggacgacctggccaacagcggccaggtgggcaccgccagatacatggcccccgaggtgctggagagcagaatgaacctggagaacgtggagagcttcaagcagaccgacgtgtacagcatggccctggtgctgtgggagatgaccagcagatgcaacgccgtgggcgaggtgaaggactacgagccccccttcggcagcaaggtgagagagcacccctgcgtggagagcatgaaggacaacgtgctgagagacagaggcagacccgagatccccagcttctggctgaaccaccagggcatccagatggtgtgcgagaccctgaccgagtgctgggaccacgaccccgaggccagactgaccgcccagtgcgtggccgagagattcagcgagctggagcacctggacagactgagcggcagaagctgcagcgaggagaagatccccgaggacggcagcctgaacaccaccaagtga

SEQ ID NO: 2994 - RNA, 2055 nt, synthetic construct
  misc_feature 1..2055: note = BAG35778 variant
  source 1..2055: mol_type = other RNA
atgatggacgccagcaaggagctgcaggtgctgcacatcgacttcctgaaccaggacaacgccgtgagccaccacacctgggagttccagaccagcagccccgtgttcagaagaggccaggtgttccacctgagactggtgctgaaccagcccccccagagctaccaccagctgaagctggagttcagcaccggccccaaccccagcatcgccaagcacaccctggtggtgctggaccccagaacccccagcgaccactacaactggcaggccaccctgcagaacgagagcggcaaggaggtgaccgtggccgtgaccagcagccccaacgccatcctgggcaagtaccagctgaacgtgaagaccggcaaccacatcctgaagagcgaggagaacatcctgtacctgctgttcaacccctggtgcaaggaggacatggtgttcatgcccgacgaggacgagagaaaggagtacatcctgaacgacaccggctgccactacgtgggcgccgccagaagcatcaagtgcaagccctggaacttcggccagttcgagaagaacgtgctggactgctgcatcagcctgctgaccgagagcagcctgaagcccaccgacagaagagaccccgtgctggtgtgcagagccatgtgcgccatgatgagcttcgagaagggccagggcgtgctgatcggcaactggaccggcgactacgagggcggcaccgccccctacaagtggaccggcagcgcccccatcctgcagcagtactacaacaccaagcaggccgtgtgcttcggccagtgctgggtgttcgccggcatcctgaccaccgtgctgagagccctgggcatccccgccagaagcgtgaccggcttcgacagcgcccacgacaccgagagaaacctgaccgtggacacctacgtgaacgagaacggcgagaagatcaccagcatgacccacgacagcgtgtggaacttccacgtgtggaccgacgcctggatgaagagacccgacctgcccaagggctacgacggctggcaggccgtggacgccaccccccaggagagaagccagggcgtgttctgctgcggccccagccccctgaccgccatcagaaagggcgacatcttcatcgtgtacgacaccagattcgtgttcagcgaggtgaacggcgacagactgatctggctggtgaagatggtgaacggccaggaggagctgcacgtgatcagcatggagaccaccagcatcggcaagaacatcagcaccaaggccgtgggccaggacagaagaagagacatcacctacgagtacaagtaccccgagggcagcagcgaggagagacaggtgatggaccacgccttcctgctgctgagcagcgagagagagcacagaagacccgtgaaggagaacttcctgcacatgagcgtgcagagcgacgacgtgctgctgggcaacagcgtgaacttcaccgtgatcctgaagagaaagaccgccgccctgcagaacgtgaacatcctgggcagcttcgagctgcagctgtacaccggcaagaagatggccaagctgtgcgacctgaacaagaccagccagatccagggccaggtgagcgaggtgaccctgaccctggacagcaagacctacatcaacagcctggccatcctggacgacgagcccgtgatcagaggcttcatcatcgccgagatcgtggagagcaaggagatcatggccagcgaggtgttcaccagcttccagtaccccgagttcagcatcgagctgcccaacaccggcagaatcggccagctgctggtgtgcaactgcatcttcaagaacaccctggccatccccctgaccgacgtgaagttcagcctggagagcctgggcatcagcagcctgcagaccagcgaccacggcaccgtgcagcccggcgagaccatccagagccagatcaagtgcacccccatcaagaccggccccaagaagttcatcgtgaagctgagcagcaagcaggtgaaggagatcaacgcccagaagatcgtgctgatcaccaagtga

SEQ ID NO: 2995 - RNA, 3375 nt, synthetic construct
  misc_feature 1..3375: note = CCDS6519.1 variant
  source 1..3375: mol_type = other RNA
atggacagcctggccagcctggtgctgtgcggcgtgagcctgctgctgagcggcaccgtggagggcgccatggacctgatcctgatcaacagcctgcccctggtgagcgacgccgagaccagcctgacctgcatcgccagcggctggagaccccacgagcccatcaccatcggcagagacttcgaggccctgatgaaccagcaccaggaccccctggaggtgacccaggacgtgaccagagagtgggccaagaaggtggtgtggaagagagagaaggccagcaagatcaacggcgcctacttctgcgagggcagagtgagaggcgaggccatcagaatcagaaccatgaagatgagacagcaggccagcttcctgcccgccaccctgaccatgaccgtggacaagggcgacaacgtgaacatcagcttcaagaaggtgctgatcaaggaggaggacgccgtgatctacaagaacggcagcttcatccacagcgtgcccagacacgaggtgcccgacatcctggaggtgcacctgccccacgcccagccccaggacgccggcgtgtacagcgccagatacatcggcggcaacctgttcaccagcgccttcaccagactgatcgtgagaagatgcgaggcccagaagtggggccccgagtgcaaccacctgtgcaccgcctgcatgaacaacggcgtgtgccacgaggacaccggcgagtgcatctgcccccccggcttcatgggcagaacctgcgagaaggcctgcgagctgcacaccttcggcagaacctgcaaggagagatgcagcggccaggagggctgcaagagctacgtgttctgcctgcccgacccctacggctgcagctgcgccaccggctggaagggcctgcagtgcaacgaggcctgccaccccggcttctacggccccgactgcaagctgagatgcagctgcaacaacggcgagatgtgcgacagattccagggctgcctgtgcagccccggctggcagggcctgcagtgcgagagagagggcatccagagaatgacccccaagatcgtggacctgcccgaccacatcgaggtgaacagcggcaagttcaaccccatctgcaaggccagcggctggcccctgcccaccaacgaggagatgaccctggtgaagcccgacggcaccgtgctgcaccccaaggacttcaaccacaccgaccacttcagcgtggccatcttcaccatccacagaatcctgccccccgacagcggcgtgtgggtgtgcagcgtgaacaccgtggccggcatggtggagaagcccttcaacatcagcgtgaaggtgctgcccaagcccctgaacgcccccaacgtgatcgacaccggccacaacttcgccgtgatcaacatcagcagcgagccctacttcggcgacggccccatcaagagcaagaagctgctgtacaagcccgtgaaccactacgaggcctggcagcacatccaggtgaccaacgagatcgtgaccctgaactacctggagcccagaaccgagtacgagctgtgcgtgcagctggtgagaagaggcgagggcggcgagggccaccccggccccgtgagaagattcaccaccgccagcatcggcctgcccccccccagaggcctgaacctgctgcccaagagccagaccaccctgaacctgacctggcagcccatcttccccagcagcgaggacgacttctacgtggaggtggagagaagaagcgtgcagaagagcgaccagcagaacatcaaggtgcccggcaacctgaccagcgtgctgctgaacaacctgcaccccagagagcagtacgtggtgagagccagagtgaacaccaaggcccagggcgagtggagcgaggacctgaccgcctggaccctgagcgacatcctgcccccccagcccgagaacatcaagatcagcaacatcacccacagcagcgccgtgatcagctggaccatcctggacggctacagcatcagcagcatcaccatcagatacaaggtgcagggcaagaacgaggaccagcacgtggacgtgaagatcaagaacgccaccatcacccagtaccagctgaagggcctggagcccgagaccgcctaccaggtggacatcttcgccgagaacaacatcggcagcagcaaccccgccttcagccacgagctggtgaccctgcccgagagccaggcccccgccgacctgggcggcggcaagatgctgctgatcgccatcctgggcagcgccggcatgacctgcctgaccgtgctgctggccttcctgatcatcctgcagctgaagagagccaacgtgcagagaagaatggcccaggccttccagaacgtgagagaggagcccgccgtgcagttcaacagcggcaccctggccctgaacagaaaggtgaagaacaaccccgaccccaccatctaccccgtgctggactggaacgacatcaagttccaggacgtgatcggcgagggcaacttcggccaggtgctgaaggccagaatcaagaaggacggcctgagaatggacgccgccatcaagagaatgaaggagtacgccagcaaggacgaccacagagacttcgccggcgagctggaggtgctgtgcaagctgggccaccaccccaacatcatcaacctgctgggcgcctgcgagcacagaggctacctgtacctggccatcgagtacgccccccacggcaacctgctggacttcctgagaaagagcagagtgctggagaccgaccccgccttcgccatcgccaacagcaccgccagcaccctgagcagccagcagctgctgcacttcgccgccgacgtggccagaggcatggactacctgagccagaagcagttcatccacagagacctggccgccagaaacatcctggtgggcgagaactacgtggccaagatcgccgacttcggcctgagcagaggccaggaggtgtacgtgaagaagaccatgggcagactgcccgtgagatggatggccatcgagagcctgaactacagcgtgtacaccaccaacagcgacgtgtggagctacggcgtgctgctgtgggagatcgtgagcctgggcggcaccccctactgcggcatgacctgcgccgagctgtacgagaagctgccccagggctacagactggagaagcccctgaactgcgacgacgaggtgtacgacctgatgagacagtgctggagagagaagccctacgagagacccagcttcgcccagatcctggtgagcctgaacagaatgctggaggagagaaagacctacgtgaacaccaccctgtacgagaagttcacctacgccggcatcgactgcagcgccgaggaggccgcctga

SEQ ID NO: 2996 - RNA, 1791 nt, synthetic construct
  misc_feature 1..1791: note = BAF84950 variant
  source 1..1791: mol_type = other RNA
atggccgacgccgaggccagagccgagttccccgaggaggccagacccgacagaggcaccctgcaggtgctgcaggacatggccagcagactgagaatccacagcatcagagccacctgcagcaccagcagcggccaccccaccagctgcagcagcagcagcgagatcatgagcgtgctgttcttctacatcatgagatacaagcagagcgaccccgagaaccccgacaacgacagattcgtgctggccaagagactgagcttcgtggacgtggccaccggctggctgggccagggcctgggcgtggcctgcggcatggcctacaccggcaagtacttcgacagagccagctacagagtgttctgcctgatgagcgacggcgagagcagcgagggcagcgtgtgggaggccatggccttcgccagctactacagcctggacaacctggtggccatcttcgacgtgaacagactgggccacagcggcgccctgcccgccgagcactgcatcaacatctaccagagaagatgcgaggccttcggctggaacacctacgtggtggacggcagagacgtggaggccctgtgccaggtgttctggcaggccagccaggtgaagcacaagcccaccgccgtggtggccaagaccttcaagggcagaggcacccccagcatcgaggacgccgagagctggcacgccaagcccatgcccagagagagagccgacgccatcatcaagctgatcgagagccagatccagaccagcagaaacctggacccccagccccccatcgaggacagccccgaggtgaacatcaccgacgtgagaatgaccagcccccccgactacagagtgggcgacaagatcgccaccagaaaggcctgcggcctggccctggccaagctgggctacgccaacaacagagtggtggtgctggacggcgacaccagatacagcaccttcagcgagatcttcaacaaggagtaccccgagagattcatcgagtgcttcatggccgagcagaacatggtgagcgtggccctgggctgcgccagcagaggcagaaccatcgccttcgccagcaccttcgccgccttcctgaccagagccttcgaccacatcagaatcggcggcctggccgagagcaacatcaacatcatcggcagccactgcggcgtgagcgtgggcgacgacggcgccagccagatggccctggaggacatcgccatgttcagaaccatccccaagtgcaccatcttctaccccaccgacgccgtgagcaccgagcacgccgtggccctggccgccaacgccaagggcatgtgcttcatcagaaccaccagacccgagaccatggtgatctacaccccccaggagagattcgagatcggccaggccaaggtgctgagacactgcgtgagcgacaaggtgaccgtgatcggcgccggcatcaccgtgtacgaggccctggccgccgccgacgagctgagcaagcaggacatcttcatcagagtgatcgacctgttcaccatcaagcccctggacgtggccaccatcgtgagcagcgccaaggccaccgagggcagaatcatcaccgtggaggaccactacccccagggcggcatcggcgaggccgtgtgcgccgccgtgagcatggaccccgacatccaggtgcacagcctggccgtgagcggcgtgccccagagcggcaagagcgaggagctgctggacatgtacggcatcagcgccagacacatcatcgtggccgtgaagtgcatgctgctgaactga

SEQ ID NO: 2997 - RNA, 861 nt, synthetic construct
  misc_feature 1..861: note = EAW88722 variant
  source 1..861: mol_type = other RNA
atggccgaggacggcgaggaggccgagttccacttcgccgccctgtacatcagcggccagtggcccagactgagagccgacaccgacctgcagagactgggcagcagcgccatggcccccagcagaaagttcttcgtgggcggcaactggaagatgaacggcagaaagcagagcctgggcgagctgatcggcaccctgaacgccgccaaggtgcccgccgacaccgaggtggtgtgcgccccccccaccgcctacatcgacttcgccagacagaagctggaccccaagatcgccgtggccgcccagaactgctacaaggtgaccaacggcgccttcaccggcgagatcagccccggcatgatcaaggactgcggcgccacctgggtggtgctgggccacagcgagagaagacacgtgttcggcgagagcgacgagctgatcggccagaaggtggcccacgccctggccgagggcctgggcgtgatcgcctgcatcggcgagaagctggacgagagagaggccggcatcaccgagaaggtggtgttcgagcagaccaaggtgatcgccgacaacgtgaaggactggagcaaggtggtgctggcctacgagcccgtgtgggccatcggcaccggcaagaccgccaccccccagcaggcccaggaggtgcacgagaagctgagaggctggctgaagagcaacgtgagcgacgccgtggcccagagcaccagaatcatctacggcggcagcgtgaccggcgccacctgcaaggagctggccagccagcccgacgtggacggcttcctggtgggcggcgccagcctgaagcccgagttcgtggacatcatcaacgccaagcagtga

SEQ ID NO: 2998 - RNA, 357 nt, synthetic construct
  misc_feature 1..357: note = CAA72108 variant
  source 1..357: mol_type = other RNA
atgcccctggtggtggccgtgatcttcttcagcctgtgggtgttcgccctgggccagctggagcagcccgagatcagcatcagcagacccgccaacaagagcgcccacatcagctggaaggccagcatccagggcttcagcagcaagatcatccactggtactggcagaagcccaacaagggcctggagtacctgctgcacgtgttcctgaccatcagcgcccaggactgcagcggcggcaagaccaagaagctggaggtgagcaagaacgcccacaccagcaccagcaccctgaagatcaagttcctggagaaggaggacgaggtggtgtaccactgcgcctgctggatcagacac

SEQ ID NO: 2999 - RNA, 414 nt, synthetic construct
  misc_feature 1..414: note = EAL23985 variant
  source 1..414: mol_type = other RNA
atgctgagcctgctgcacaccagcaccctggccgtgctgggcgccctgtgcgtgtacggcgccggccacctggagcagccccagatcagcagcaccaagaccctgagcaagaccgccagactggagtgcgtggtgagcggcatcaccatcagcgccaccagcgtgtactggtacagagagagacccggcgaggtgatccagttcctggtgagcatcagctacgacggcaccgtgagaaaggagagcggcatccccagcggcaagttcgaggtggacagaatccccgagaccagcaccagcaccctgaccatccacaacgtggagaagcaggacatcgccacctactactgcgccctgtgggaggtgcacagcagcagacagttcgagcccagccacagcatcaacgtgtactga

SEQ ID NO: 3000 - RNA, 366 nt, synthetic construct
  misc_feature 1..366: note = CAA30181 variant
  source 1..366: mol_type = other RNA
atgctgagcctgctgcacaccagcaccctggccgtgctgggcgccctgtgcgtgtacggcgccggccacctggagcagccccagatcagcagcaccaagaccctgagcaagaccgccagactggagtgcgtggtgagcggcatcaccatcagcgccaccagcgtgtactggtacagagagagacccggcgaggtgatccagttcctggtgagcatcagctacgacggcaccgtgagaaaggagagcggcatccccagcggcaagttcgaggtggacagaatccccgagaccagcaccagcaccctgaccatccacaacgtggagaagcaggacatcgccacctactactgcgccctgtgggaggtg

SEQ ID NO: 3001 - RNA, 366 nt, synthetic construct
  misc_feature 1..366: note = CAA33345 variant
  source 1..366: mol_type = other RNA
atgctgagcctgctgcacaccagcaccctggccgtgctgggcgccctgtgcgtgtacggcgccggccacctggagcagccccagatcagcagcaccaagaccctgagcaagaccgccagactggagtgcgtggtgagcggcatcaagatcagcgccaccagcgtgtactggtacagagagagacccggcgaggtgatccagttcctggtgagcatcagctacgacggcaccgtgagaaaggagagcggcatccccagcggcaagttcgaggtggacagaatccccgagaccagcaccagcaccctgaccatccacaacgtggagaagcaggacatcgccacctactactgcgccctgtgggaggtg

SEQ ID NO: 3002 - RNA, 2382 nt, synthetic construct
  misc_feature 1..2382: note = AAA93251 variant
  source 1..2382: mol_type = other RNA
atgatggccgccctgtaccccagcaccgacctgagcggcgccagcagcagcagcctgcccagcagccccagcagcagcagccccaacgaggtgatggccctgaaggacgtgagagaggtgaaggaggagaacaccctgaacgagaagctgttcctgctggcctgcgacaagggcgactactacatggtgaagaagatcctggaggagaacagcagcggcgacctgaacatcaactgcgtggacgtgctgggcagaaacgccgtgaccatcaccatcgagaacgagaacctggacatcctgcagctgctgctggactacggctgccagagcgccgacgccctgctggtggccatcgacagcgaggtggtgggcgccgtggacatcctgctgaaccacagacccaagagaagcagcagacccaccatcgtgaagctgatggagagaatccagaaccccgagtacagcaccaccatggacgtggcccccgtgatcctggccgcccacagaaacaactacgagatcctgaccatgctgctgaagcaggacgtgagcctgcccaagccccacgccgtgggctgcgagtgcaccctgtgcagcgccaagaacaagaaggacagcctgagacacagcagattcagactggacatctacagatgcctggccagccccgccctgatcatgctgaccgaggaggaccccatcctgagagccttcgagctgagcgccgacctgaaggagctgagcctggtggaggtggagttcagaaacgactacgaggagctggccagacagtgcaagatgttcgccaaggacctgctggcccaggccagaaacagcagagagctggaggtgatcctgaaccacaccagcagcgacgagcccctggacaagagaggcctgctggaggagagaatgaacctgagcagactgaagctggccatcaagtacaaccagaaggagttcgtgagccagagcaactgccagcagttcctgaacaccgtgtggttcggccagatgagcggctacagaagaaagcccacctgcaagaagatcatgaccgtgctgaccgtgggcatcttctggcccgtgctgagcctgtgctacctgatcgcccccaagagccagttcggcagaatcatccacacccccttcatgaagttcatcatccacggcgccagctacttcaccttcctgctgctgctgaacctgtacagcctggtgtacaacgaggacaagaagaacaccatgggccccgccctggagagaatcgactacctgctgatcctgtggatcatcggcatgatctggagcgacatcaagagactgtggtacgagggcctggaggacttcctggaggagagcagaaaccagctgagcttcgtgatgaacagcctgtacctggccaccttcgccctgaaggtggtggcccacaacaagttccacgacttcgccgacagaaaggactgggacgccttccaccccaccctggtggccgagggcctgttcgccttcgccaacgtgctgagctacctgagactgttcttcatgtacaccaccagcagcatcctgggccccctgcagatcagcatgggccagatgctgcaggacttcggcaagttcctgggcatgttcctgctggtgctgttcagcttcaccatcggcctgacccagctgtacgacaagggctacaccagcaaggagcagaaggactgcgtgggcatcttctgcgagcagcagagcaacgacaccttccacagcttcatcggcacctgcttcgccctgttctggtacatcttcagcctggcccacgtggccatcttcgtgaccagattcagctacggcgaggagctgcagagcttcgtgggcgccgtgatcgtgggcacctacaacgtggtggtggtgatcgtgctgaccaagctgctggtggccatgctgcacaagagcttccagctgatcgccaaccacgaggacaaggagtggaagttcgccagagccaagctgtggctgagctacttcgacgacaagtgcaccctgcccccccccttcaacatcatccccagccccaagaccatctgctacatgatcagcagcctgagcaagtggatctgcagccacaccagcaagggcaaggtgaagagacagaacagcctgaaggagtggagaaacctgaagcagaagagagacgagaactaccagaaggtgatgtgctgcctggtgcacagatacctgaccagcatgagacagaagatgcagagcaccgaccaggccaccgtggagaacctgaacgagctgagacaggacctgagcaagttcagaaacgagatcagagacctgctgggcttcagaaccagcaagtacgccatgttctaccccagaaactga

SEQ ID NO: 3003 - RNA, 3315 nt, synthetic construct
  misc_feature 1..3315: note = AAZ73614 variant
  source 1..3315: mol_type = other RNA
atgagcttcagagccgccagactgagcatgagaaacagaagaaacgacaccctggacagcaccagaaccctgtacagcagcgccagcagaagcaccgacctgagctacagcgagagcgacctggtgaacttcatccaggccaacttcaagaagagagagtgcgtgttcttcaccaaggacagcaaggccaccgagaacgtgtgcaagtgcggctacgcccagagccagcacatggagggcacccagatcaaccagagcgagaagtggaactacaagaagcacaccaaggagttccccaccgacgccttcggcgacatccagttcgagaccctgggcaagaagggcaagtacatcagactgagctgcgacaccgacgccgagatcctgtacgagctgctgacccagcactggcacctgaagacccccaacctggtgatcagcgtgaccggcggcgccaagaacttcgccctgaagcccagaatgagaaagatcttcagcagactgatctacatcgcccagagcaagggcgcctggatcctgaccggcggcacccactacggcctgatgaagtacatcggcgaggtggtgagagacaacaccatcagcagaagcagcgaggagaacatcgtggccatcggcatcgccgcctggggcatggtgagcaacagagacaccctgatcagaaactgcgacgccgagggctacttcctggcccagtacctgatggacgacttcaccagagaccccctgtacatcctggacaacaaccacacccacctgctgctggtggacaacggctgccacggccaccccaccgtggaggccaagctgagaaaccagctggagaagtacatcagcgagagaaccatccaggacagcaactacggcggcaagatccccatcgtgtgcttcgcccagggcggcggcaaggagaccctgaaggccatcaacaccagcatcaagaacaagatcccctgcgtggtggtggagggcagcggccagatcgccgacgtgatcgccagcctggtggaggtggaggacgccctgaccagcagcgccgtgaaggagaagctggtgagattcctgcccagaaccgtgagcagactgcccgaggaggagaccgagagctggatcaagtggctgaaggagatcctggagtgcagccacctgctgaccgtgatcaagatggaggaggccggcgacgagatcgtgagcaacgccatcagctacgccctgtacaaggccttcagcaccagcgagcaggacaaggacaactggaacggccagctgaagctgctgctggagtggaaccagctggacctggccaacgacgagatcttcaccaacgacagaagatgggagagcgccgacctgcaggaggtgatgttcaccgccctgatcaaggacagacccaagttcgtgagactgttcctggagaacggcctgaacctgagaaagttcctgacccacgacgtgctgaccgagctgttcagcaaccacttcagcaccctggtgtacagaaacctgcagatcgccaagaacagctacaacgacgccctgctgaccttcgtgtggaagctggtggccaacttcagaagaggcttcagaaaggaggacagaaacggcagagacgagatggacatcgagctgcacgacgtgagccccatcaccagacaccccctgcaggccctgttcatctgggccatcctgcagaacaagaaggagctgagcaaggtgatctgggagcagaccagaggctgcaccctggccgccctgggcgccagcaagctgctgaagaccctggccaaggtgaagaacgacatcaacgccgccggcgagagcgaggagctggccaacgagtacgagaccagagccgtggagctgttcaccgagtgctacagcagcgacgaggacctggccgagcagctgctggtgtacagctgcgaggcctggggcggcagcaactgcctggagctggccgtggaggccaccgaccagcacttcatcgcccagcccggcgtgcagaacttcctgagcaagcagtggtacggcgagatcagcagagacaccaagaactggaagatcatcctgtgcctgttcatcatccccctggtgggctgcggcttcgtgagcttcagaaagaagcccgtggacaagcacaagaagctgctgtggtactacgtggccttcttcaccagccccttcgtggtgttcagctggaacgtggtgttctacatcgccttcctgctgctgttcgcctacgtgctgctgatggacttccacagcgtgccccacccccccgagctggtgctgtacagcctggtgttcgtgctgttctgcgacgaggtgagacagtggtacgtgaacggcgtgaactacttcaccgacctgtggaacgtgatggacaccctgggcctgttctacttcatcgccggcatcgtgttcagactgcacagcagcaacaagagcagcctgtacagcggcagagtgatcttctgcctggactacatcatcttcaccctgagactgatccacatcttcaccgtgagcagaaacctgggccccaagatcatcatgctgcagagaatgctgatcgacgtgttcttcttcctgttcctgttcgccgtgtggatggtggccttcggcgtggccagacagggcatcctgagacagaacgagcagagatggagatggatcttcagaagcgtgatctacgagccctacctggccatgttcggccaggtgcccagcgacgtggacggcaccacctacgacttcgcccactgcaccttcaccggcaacgagagcaagcccctgtgcgtggagctggacgagcacaacctgcccagattccccgagtggatcaccatccccctggtgtgcatctacatgctgagcaccaacatcctgctggtgaacctgctggtggccatgttcggctacaccgtgggcaccgtgcaggagaacaacgaccaggtgtggaagttccagagatacttcctggtgcaggagtactgcagcagactgaacatccccttccccttcatcgtgttcgcctacttctacatggtggtgaagaagtgcttcaagtgctgctgcaaggagaagaacatggagagcagcgtgtgctgcttcaagaacgaggacaacgagaccctggcctgggagggcgtgatgaaggagaactacctggtgaagatcaacaccaaggccaacgacaccagcgaggagatgagacacagattcagacagctggacaccaagctgaacgacctgaagggcctgctgaaggagatcgccaacaagatcaagtga

SEQ ID NO: 3004 - RNA, 2097 nt, synthetic construct
  misc_feature 1..2097: note = AAK13079 variant
  source 1..2097: mol_type = other RNA
atgatgagaagcagaagcaagagccccagaagacccagccccaccgccagaggcgccaactgcgacgtggagctgctgaagaccaccaccagagacagagaggagctgaagtgcatgctggagaagtacgagagacacctggccgagatccagggcaacgtgaaggtgctgaagagcgagagagacaagatcttcctgctgtacgagcaggcccaggaggagatcaccagactgagaagagagatgatgaagagctgcaagagccccaagagcaccaccgcccacgccatcctgagaagagtggagaccgagagagacgtggccttcaccgacctgagaagaatgaccaccgagagagacagcctgagagagagactgaagatcgcccaggagaccgccttcaacgagaaggcccacctggagcagagaatcgaggagctggagtgcaccgtgcacaacctggacgacgagagaatggagcagatgagcaacatgaccctgatgaaggagaccatcagcaccgtggagaaggagatgaagagcctggccagaaaggccatggacaccgagagcgagctgggcagacagaaggccgagaacaacagcctgagactgctgtacgagaacaccgagaaggacctgagcgacacccagagacacctggccaagaagaagtacgagctgcagctgacccaggagaagatcatgtgcctggacgagaagatcgacaacttcaccagacagaacatcgcccagagagaggagatcagcatcctgggcggcaccctgaacgacctggccaaggagaaggagtgcctgcaggcctgcctggacaagaagagcgagaacatcgccagcctgggcgagagcctggccatgaaggagaagaccatcagcggcatgaagaacatcatcgccgagatggagcaggccagcagacagtgcaccgaggccctgatcgtgtgcgagcaggacgtgagcagaatgagaagacagctggacgagaccaacgacgagctggcccagatcgccagagagagagacatcctggcccacgacaacgacaacctgcaggagcagttcgccaaggccaagcaggagaaccaggccctgagcaagaagctgaacgacacccacaacgagctgaacgacatcaagcagaaggtgcaggacaccaacctggaggtgaacaagctgaagaacatcctgaagagcgaggagagcgagaacagacagatgatggagcagctgagaaaggccaacgaggacgccgagaactgggagaacaaggccagacagagcgaggccgacaacaacaccctgaagctggagctgatcaccgccgaggccgagggcaacagactgaaggagaaggtggacagcctgaacagagaggtggagcagcacctgaacgccgagagaagctacaagagccagatcagcaccctgcacaagagcgtggtgaagatggaggaggagctgcagaaggtgcagttcgagaaggtgagcgccctggccgacctgagcagcaccagagagctgtgcatcaagctggacagcagcaaggagctgctgaacagacagctggtggccaaggaccaggagatcgagatgagagagaacgagctggacagcgcccacagcgagatcgagctgctgagaagccagatggccaacgagagaatcagcatgcagaacctggaggccctgctggtggccaacagagacaaggagtaccagagccagatcgccctgcaggagaaggagagcgagatccagctgctgaaggagcacctgtgcctggccgagaacaagatggccatccagagcagagacgtggcccagttcagaaacgtggtgacccagctggaggccgacctggacatcaccaagagacagctgggcaccgagagattcgagagagagagagccgtgcaggagctgagaagacagaactacagcagcaacgcctaccacatgagcagcaccatgaagcccaacaccaagtgccacagccccgagagagcccaccacagaagccccgacagaggcctggacagaagcctggaggagaacctgtgctacagagacttctga

SEQ ID NO: 3005 - RNA, 927 nt, synthetic construct
  misc_feature 1..927: note = CCDS48205.1 variant
  source 1..927: mol_type = other RNA
atgagacccgagggcagcctgacctacagagtgcccgagagactgagacagggcttctgcggcgtgggcagagccgcccaggccctggtgtgcgccagcgccaaggagggcaccgccttcagaatggaggccgtgcaggagggcgccgccggcgtggagagcgagcaggccgccctgggcgaggaggccgtgctgctgctggacgacatcatggccgaggtggaggtggtggccgaggaggagggcctggtggagagaagagaggaggcccagagagcccagcaggccgtgcccggccccggccccatgacccccgagagcgcccccgaggagctgctggccgtgcaggtggagctggagcccgtgaacgcccaggccagaaaggccttcagcagacagagagagaagatggagagaagaagaaagccccacctggacagaagaggcgccgtgatccagagcgtgcccggcttctgggccaacgtgatcgccaaccacccccagatgagcgccctgatcaccgacgaggacgaggacatgctgagctacatggtgagcctggaggtgggcgaggagaagcaccccgtgcacctgtgcaagatcatgctgttcttcagaagcaacccctacttccagaacaaggtgatcaccaaggagtacctggtgaacatcaccgagtacagagccagccacagcacccccatcgagtggtaccccgactacgaggtggaggcctacagaagaagacaccacaacagcagcctgaacttcttcaactggttcagcgaccacaacttcgccggcagcaacaagatcgccgagatcctgtgcaaggacctgtggagaaaccccctgcagtactacaagagaatgaagccccccgaggagggcaccgagaccagcggcgacagccagctgctgagctga

SEQ ID NO: 3006 - RNA, 369 nt, synthetic construct
  misc_feature 1..369: note = M13231.1 variant
  source 1..369: mol_type = other RNA
atgagatgggccctgctggtgctgctggccttcctgagccccgccagccagaagagcagcaacctggagggcagaaccaagagcgtgaccagacagaccggcagcagcgccgagatcacctgcgacctgaccgtgaccaacaccttctacatccactggtacctgcaccaggagggcaaggccccccagagactgctgtactacgacgtgagcaccgccagagacgtgctggagagcggcctgagccccggcaagtactacacccacacccccagaagatggagctggatcctgagactgcagaacctgatcgagaacgacagcggcgtgtactactgcgccacctgggacagacagaagctgctgtga

SEQ ID NO: 3007 - RNA, 804 nt, synthetic construct
  misc_feature 1..804: note = CCDS12619.1 variant
  source 1..804: mol_type = other RNA
atgggcgccagacagatccagaccagcagcagccagaccagccccgaggaggccatgggcacccccagaatccagcacctgctgatcctgctggtgctgggcgccagcctgctgaccagcggcctggagctgtactgccagaagggcctgagcatgaccgtggaggccgaccccgccaacatgttcaactggaccaccgaggaggtggagacctgcgacaagggcgccctgtgccaggagaccatcctgatcatcaaggccggcaccgagaccgccatcctggccaccaagggctgcatccccgagggcgaggaggccatcaccatcgtgcagcacagcagcccccccggcctgatcgtgaccagctacagcaactactgcgaggacagcttctgcaacgacaaggacagcctgagccagttctgggagttcagcgagaccaccgccagcaccgtgagcaccaccctgcactgccccacctgcgtggccctgggcacctgcttcagcgcccccagcctgccctgccccaacggcaccaccagatgctaccagggcaagctggagatcaccggcggcggcatcgagagcagcgtggaggtgaagggctgcaccgccatgatcggctgcagactgatgagcggcatcctggccgtgggccccatgttcgtgagagaggcctgcccccaccagctgctgacccagcccagaaagaccgagaacggcgccacctgcctgcccatccccgtgtggggcctgcagctgctgctgcccctgctgctgcccagcttcatccacttcagctga

SEQ ID NO: 3008 - RNA, 1590 nt, synthetic construct
  misc_feature 1..1590: note = AHZ44440 variant
  source 1..1590: mol_type = other RNA
atgctgctggccgtgctgtactgcctgctgtggagcttccagaccagcgccggccacttccccagagcctgcgtgagcagcaagaacctgatggagaaggagtgctgccccccctggagcggcgacagaagcccctgcggccagctgagcggcagaggcagctgccagaacatcctgctgagcaacgcccccctgggcccccagttccccttcaccggcgtggacgacagagagagctggcccagcgtgttctacaacagaacctgccagtgcagcggcaacttcatgggcttcaactgcggcaactgcaagttcggcttctggggccccaactgcaccgagagaagactgctggtgagaagaaacatcttcgacctgagcgcccccgagaaggacaagttcttcgcctacctgaccctggccaagcacaccatcagcagcgactacgtgatccccatcggcacctacggccagatgaagaacggcagcacccccatgttcaacgacatcaacatctacgacctgttcgtgtggatgcactactacgtgagcatggacgccctgctgggcggcagcgagatctggagagacatcgacttcgcccacgaggcccccgccttcctgccctggcacagactgttcctgctgagatgggagcaggagatccagaagctgaccggcgacgagaacttcaccatcccctactgggactggagagacgccgagaagtgcgacatctgcaccgacgagtacatgggcggccagcaccccaccaaccccaacctgctgagccccgccagcttcttcagcagctggcagatcgtgtgcagcagactggaggagtacaacagccaccagagcctgtgcaacggcacccccgagggccccctgagaagaaaccccggcaaccacgacaagagcagaacccccagactgcccagcagcgccgacgtggagttctgcctgagcctgacccagtacgagagcggcagcatggacaaggccgccaacttcagcttcagaaacaccctggagggcttcgccagccccctgaccggcatcgccgacgccagccagagcagcatgcacaacgccctgcacatctacatgaacggcaccatgagccaggtgcagggcagcgccaacgaccccatcttcctgctgcaccacgccttcgtggacagcatcttcgagcagtggctgagaagacacagacccctgcaggaggtgtaccccgaggccaacgcccccatcagacacaacagagagagctacatggtgcccttcatccccctgtacagaaacggcgacttcttcatcagcagcaaggacctgggctacgactacagctacctgcaggacagcgaccccgacagcttccaggactacatcaagagctacctggagcaggccagcagaatctggagctggctgctgggcgccgccatggtgggcgccgtgctgaccgccctgctggccggcctggtgagcctgctgtgcagacacaagagaaagcagctgcccgaggagaagcagcccctgctgatggagaaggaggactaccacagcctgtaccagagccacctgtga

SEQ ID NO: 3009 - RNA, 1590 nt, synthetic construct
  misc_feature 1..1590: note = AGV39051 variant
  source 1..1590: mol_type = other RNA
atgctgctggccgtgctgtactgcctgctgtggagcttccagaccagcgccggccacttccccagagcctgcgtgagcagcaagaacctgatggagaaggagtgctgccccccctggagcggcgacagaagcccctgcggccagctgagcggcagaggcagctgccagaacatcctgctgagcaacgcccccctgggcccccagttccccttcaccggcgtggacgacagagagagctggcccagcgtgttctacaacagaacctgccagtgcagcggcaacttcatgggcttcaactgcggcaactgcaagttcggcttctggggccccaactgcaccgagagaagactgctggtgagaagaaacatcttcgacctgagcgcccccgagaaggacaagttcttcgcctacctgaccctggccaagcacaccatcagcagcgactacgtgatccccatcggcacctacggccagatgaagaacggcagcacccccatgttcaacgacatcaacatctacgacctgttcgtgtggatgcactactacgtgagcatggacgccctgctgggcggcagcgagatctggagagacatcgacttcgcccacgaggcccccgccttcctgccctggcacagactgttcctgctgagatgggagcaggagatccagaagctgaccggcgacgagaacttcaccatcccctactgggactggagagacgccgagaagtgcgacatctgcaccgacgagtacatgggcggccagcaccccaccaaccccaacctgctgagccccgccagcttcttcagcagctggcagatcgtgtgcagcagactggaggagtacaacagccaccagagcctgtgcaacggcacccccgagggccccctgagaagaaaccccggcaaccacgacaagagcagaacccccagactgcccagcagcgccgacgtggagttctgcctgagcctgacccagtacgagagcggcagcatggacaaggccgccaacttcagcttcagaaacaccctggagggcttcgccagccccctgaccggcatcgccgacgccagccagagcagcatgcacaacgccctgcacatctacatgaacggcaccatgagccaggtgcagggcagcgccaacgaccccatcttcctgctgcaccacgccttcgtggacagcatcttcgagcagtggctgagaagacacagacccctgcaggaggtgtaccccgaggccaacgcccccatcggccacaacagagagagctacatggtgcccttcatccccctgtacagaaacggcgacttcttcatcagcagcaaggacctgggctacgactacagctacctgcaggacagcgaccccgacagcttccaggactacatcaagagctacctggagcaggccagcagaatctggagctggctgctgggcgccgccatggtgggcgccgtgctgaccgccctgctggccggcctggtgagcctgctgtgcagacacaagagaaagcagctgcccgaggagaagcagcccctgctgatggagaaggaggactaccacagcctgtaccagagccacctgtga

SEQ ID NO: 3010 - RNA, 1590 nt, synthetic construct
  misc_feature 1..1590: note = AGV39049 variant
  source 1..1590: mol_type = other RNA
atgctgctggccgtgctgtactgcctgctgtggagcttccagaccagcgccggccacttccccagagcctgcgtgagcagcaagaacctgatggagaaggagtgctgccccccctggagcggcgacagaagcccctgcggccagctgagcggcagaggcagctgccagaacatcctgctgagcaacgcccccctgggcccccagttccccttcaccggcgtggacgacagagagagctggcccagcgtgttctacaacagaacctgccagtgcagcggcaacttcatgggcttcaactgcggcaactgcaagttcggcttctggggccccaactgcaccgagagaagactgctggtgagaagaaacatcttcgacctgagcgcccccgagaaggacaagttcttcgcctacctgaccctggccaagcacaccatcagcagcgactacgtgatccccatcggcacctacggccagatgaagaacggcagcacccccatgttcaacgacatcaacatctacgacctgttcgtgtggatgcactactacgtgagcatggacgccctgctgggcggcagcgagatctggagagacatcgacttcgcccacgaggcccccgccttcctgccctggcacagactgttcctgctgagatgggagcaggagatccagaagctgaccggcgacgagaacttcaccatcccctactgggactggagagacgccgagaagtgcgacatctgcaccgacgagtacatgggcggccagcaccccaccaaccccaacctgctgagccccgccagcttcttcagcagctggcagatcgtgtgcagcagactggaggagtacaacagccaccagagcctgtgcaacggcacccccgagggccccctgagaagaaaccccggcaaccacgacaagagcagaacccccagactgcccagcagcgccgacgtggagttctgcctgagcctgacccagtacgagagcggcagcatggacaaggccgccaacttcagcttcagaaacaccctggagggcttcgccagccccctgaccggcatcgccgacgccagccagagcagcatgcacaacgccctgcacatctacatgaacggcaccatgagccaggtgcagggcagcgccaacgaccccatcttcctgctgcaccacgccttcgtggacagcatcttcgagcagtggctgcagagacacagacccctgcaggaggtgtaccccgaggccaacgcccccatcggccacaacagagagagctacatggtgcccttcatccccctgtacagaaacggcgacttcttcatcagcagcaaggacctgggctacgactacagctacctgcaggacagcgaccccgacagcttccaggactacatcaagagctacctggagcaggccagcagaatctggagctggctgctgggcgccgccatggtgggcgccgtgctgaccgccctgctggccggcctggtgagcctgctgtgcagacacaagagaaagcagctgcccgaggagaagcagcccctgctgatggagaaggaggactaccacagcctgtaccagagccacctgtga

SEQ ID NO: 3011 - RNA, 1590 nt, synthetic construct
  misc_feature 1..1590: note = AGV39050 variant
  source 1..1590: mol_type = other RNA
atgctgctggccgtgctgtactgcctgctgtggagcttccagaccagcgccggccacttccccagagcctgcgtgagcagcaagaacctgatggagaaggagtgctgccccccctggagcggcgacagaagcccctgcggccagctgagcggcagaggcagctgccagaacatcctgctgagcaacgcccccctgggcccccagttccccttcaccggcgtggacgacagagagagctggcccagcgtgttctacaacagaacctgccagtgcagcggcaacttcatgggcttcaactgcggcaactgcaagttcggcttctggggccccaactgcaccgagagaagactgctggtgagaagaaacatcttcgacctgagcgcccccgagaaggacaagttcttcgcctacctgaccctggccaagcacaccatcagcagcgactacgtgatccccatcggcacctacggccagatgaagaacggcagcacccccatgttcaacgacatcaacatctacgacctgttcgtgtggatgcactactacgtgagcatggacgccctgctgggcggctacgagatctggagagacatcgacttcgcccacgaggcccccgccttcctgccctggcacagactgttcctgctgagatgggagcaggagatccagaagctgaccggcgacgagaacttcaccatcccctactgggactggagagacgccgagaagtgcgacatctgcaccgacgagtacatgggcggccagcaccccaccaaccccaacctgctgagccccgccagcttcttcagcagctggcagatcgtgtgcagcagactggaggagtacaacagccaccagagcctgtgcaacggcacccccgagggccccctgagaagaaaccccggcaaccacgacaagagcagaacccccagactgcccagcagcgccgacgtggagttctgcctgagcctgacccagtacgagagcggcagcatggacaaggccgccaacttcagcttcagaaacaccctggagggcttcgccagccccctgaccggcatcgccgacgccagccagagcagcatgcacaacgccctgcacatctacatgaacggcaccatgagccaggtgcagggcagcgccaacgaccccatcttcctgctgcaccacgccttcgtggacagcatcttcgagcagtggctgagaagacacagacccctgcaggaggtgtaccccgaggccaacgcccccatcggccacaacagagagagctacatggtgcccttcatccccctgtacagaaacggcgacttcttcatcagcagcaaggacctgggctacgactacagctacctgcaggacagcgaccccgacagcttccaggactacatcaagagctacctggagcaggccagcagaatctggagctggctgctgggcgccgccatggtgggcgccgtgctgaccgccctgctggccggcctggtgagcctgctgtgcagacacaagagaaagcagctgcccgaggagaagcagcccctgctgatggagaaggaggactaccacagcctgtaccagagccacctgtga

SEQ ID NO: 3012 - RNA, 714 nt, synthetic construct
  misc_feature 1..714: note = CAA04137 variant
  source 1..714: mol_type = other RNA
atgagccccctgtggtggggcttcctgctgagctgcctgggctgcaagatcctgcccggcgcccagggccagttccccagagtgtgcatgaccgtggacagcctggtgaacaaggagtgctgccccagactgggcgccgagagcgccaacgtgtgcggcagccagcagggcagaggccagtgcaccgaggtgagagccgacaccagaccctggagcggcccctacatcctgagaaaccaggacgacagagagctgtggcccagaaagttcttccacagaacctgcaagtgcaccggcaacttcgccggctacaactgcggcgactgcaagttcggctggaccggccccaactgcgagagaaagaagccccccgtgatcagacagaacatccacagcctgagcccccaggagagagagcagttcctgggcgccctggacctggccaagaagagagtgcaccccgactacgtgatcaccacccagcactgggtgggcctgctgggccccaacggcacccagccccagttcgccaactgcagcgtgtacgacttcttcgtgtggctgcactactacagcgtgagagacaccctgctgggcggcttcttcccctggctgaaggtgtactactacagattcgtgatcggcctgagagtgtggcagtgggaggtgatcagctgcaagctgatcaagagagccaccaccagacagccctga

SEQ ID NO: 3013 - RNA, 1590 nt, synthetic construct; identical to SEQ ID NO: 3009
  misc_feature 1..1590: note = AAA61242 variant
  source 1..1590: mol_type = other RNA

SEQ ID NO: 3014 - RNA, 1590 nt, synthetic construct
  misc_feature 1..1590: note = AGV39054 variant
  source 1..1590: mol_type = other RNA
atgctgctggccgtgctgtactgcctgctgtggagcttccagaccagcgccggccacttccccagagcctgcgtgagcagcaagaacctgatggagaaggagtgctgccccccctggagcggcgacagaagcccctgcggccagctgagcggcagaggcagctgccagaacatcctgctgagcaacgcccccctgggcccccagttccccttcaccggcgtggacgacagagagagctggcccagcgtgttctacaacagaacctgccagtgcagcggcaacttcatgggcttcaactgcggcaactgcaagttcggcttctggggccccaactgcaccgagagaagactgctggtgagaagaaacatcttcgacctgagcgcccccgagaaggacaagttcttcgcctacctgaccctggccaagcacaccatcagcagcgactacgtgatccccatcggcacctacggccagatgaagaacggcagcacccccatgttcaacgacatcaacatctacgacctgttcgtgtggatgcactactacgtgagcatggacgccctgctgggcggcagcgagatctggagagacatcgacttcgcccacgaggcccccgccttcctgccctggcacagactgttcctgctgagatgggagcaggagatccagaagctgaccggcgacgagaacttcaccatcccctactgggactggagagacgccgagaagtgcgacatctgcaccgacgagtacgtgggcggccagcaccccaccaaccccaacctgctgagccccgccagcttcttcagcagctggcagatcgtgtgcagcagactggaggagtacaacagccaccagagcctgtgcaacggcacccccgagggccccctgagaagaaaccccggcaaccacgacaagagcagaacccccagactgcccagcagcgccgacgtggagttctgcctgagcctgacccagtacgagagcggcagcatggacaaggccgccaacttcagcttcagaaacaccctggagggcttcgccagccccctgaccggcatcgccgacgccagccagagcagcatgcacaacgccctgcacatctacatgaacggcaccatgagccaggtgcagggcagcgccaacgaccccatcttcctgctgcaccacgccttcgtggacagcatcttcgagcagtggctgagaagacacagacccctgcaggaggtgtaccccgaggccaacgcccccatcggccacaacagagagagctacatggtgcccttcatccccctgtacagaaacggcgacttcttcatcagcagcaaggacctgggctacgactacagctacctgcaggacagcgaccccgacagcttccaggactacatcaagagctacctggagcaggccagcagaatctggagctggctgctgggcgccgccatggtgggcgccgtgctgaccgccctgctggccggcctggtgagcctgctgtgcagacacaagagaaagcagctgcccgaggagaagcagcccctgctgatggagaaggaggactaccacagcctgtaccagagccacctgtga

SEQ ID NO: 3015 - RNA, 1590 nt, synthetic construct
  misc_feature 1..1590: note = AGV39162 variant
  source 1..1590: mol_type = other RNA
atgctgctggccgtgctgtactgcctgctgtggagcttccagaccagcgccggccacttccccagagcctgcgtgagcagcaagaacctgatggagaaggagtgctgccccccctggagcggcgacagaagcccctgcggccagctgagcggcagaggcagctgccagaacatcctgctgagcaacgcccccctgggcccccagttccccttcaccggcgtggacgacagagagagctggcccagcgtgttctacaacagaacctgccagtgcagcggcaacttcatgggcttcaactgcggcaactgcaagttcggcttctggggccccaactgcaccgagagaagactgctggtgagaagaaacatcttcgacctgagcgcccccgagaaggacaagttcttcgcctacctgaccctggccaagcacaccatcagcagcgactacgtgatccccatcggcacctacggccagatgaagaacggcagcacccccatgttcaacgacatcaacatctacgacctgttcgtgtggatgcactactacgtgagcatggacgccctgctgggcggcagcgagatctggagagacatcgacttcgcccacgaggcccccgccttcctgccctggcacagactgttcctgctgagatgggagcaggagatccagaagctgaccggcgacgagaacttcaccatcccctactgggactggagagacgccgagaagtgcgacatctgcaccgacgagtacatgggcggccagcaccccaccaaccccaacctgctgagccccgccagcttcttcagcagctggcagatcgtgtgcagcagactggaggagtacaacagccaccagagcctgtgcaacggcacccccgagggccccctgagaagaaaccccggcaaccacgacaagagcagaacccccagactgcccagcagcgccgacgtggagttctgcctgagcctgacccagtacgagagcggcagcatggacaaggccgccaacttcagcttcagaaacaccctggagggcttcgccagccccctgaccggcatcgccgacgccagccagagcagcatgcacaacgccctgcacatctacatgaacggcaccatgagccaggtgcagggcagcgccaacgaccccatcttcctgctgcaccacgccttcgtggacagcatcttcgagcagtggctgagaagacacagactgctgcaggaggtgtaccccgaggccaacgcccccatcggccacaacagagagagctacatggtgcccttcatccccctgtacagaaacggcgacttcttcatcagcagcaaggacctgggctacgactacagctacctgcaggacagcgaccccgacagcttccaggactacatcaagagctacctggagcaggccagcagaatctggagctggctgctgggcgccgccatggtgggcgccgtgctgaccgccctgctggccggcctggtgagcctgctgtgcagacacaagagaaagcagctgcccgaggagaagcagcccctgctgatggagaaggaggactaccacagcctgtaccagagccacctgtga

SEQ ID NO: 3016 - RNA, 1590 nt, synthetic construct
  misc_feature 1..1590: note = AGV39086 variant
  source 1..1590: mol_type = other RNA
atgctgctggccgtgctgtactgcctgctgtggagcttccagaccagcgccggccacttccccagagcctgcgtgagcagcaagaacctgatggagaaggagtgctgccccccctggagcggcgacagaagcccctgcggccagctgagcggcagaggcagctgccagaacatcctgctgagcaacgcccccctgggcccccagttccccttcaccggcgtggacgacagagagagctggcccagcgtgttctacaacagaacctgccagtgcagcggcaacttcatgggcttcaactgcggcaactgcaagttcggcttctggggccccaactgcaccgagagaagactgctggtgagaagaaacatcttcgacctgagcgcccccgagaaggacaagttcttcgcctacctgaccctggccaagcacaccatcagcagcgactacgtgatccccatcggcacctacggccagatgaagaacggcagcacccccatgttcaacgacatcaacatctacgacctgttcgtgtggatgcactactacgtgagcatggacgccctgctgggcggcagcgagatctggagagacatcgacttcgcccacgaggcccccgccttcctgccctggcacagactgttcctgctgagatgggagcaggagatccagaagctgaccggcgacgagaacttcaccatcccctactgggactggagagacgccgagaagtgcgacatctgcaccgacgagtacatgggcggccagcaccccaccaaccccaacctgctgagccccgccagcttcttcagcagctggcagatcgtgtgcagcagactggaggagtacaacagccaccagagcctgtgcaacggcacccccgagggccccctgagaagaaaccccggcaaccacgacaagagcagaacccccagactgcccagcagcgccgacgtggagttctgcctgagcctgacccagtacgagagcggcagcatggacaaggccgccaacttcagcttcagaaacaccctggagggcttcgccagccccctgaccggcatcgccgacgccagccagagcagcatgcacaacgccctgcacatctacatgaacggcaccatgagccaggtgcagggcagcgccaacgaccccatcttcctgctgcaccacgccttcgtggacagcatgttcgagcagtggctgagaagacacagacccctgcaggaggtgtaccccgaggccaacgcccccatcggccacaacagagagagctacatggtgcccttcatccccctgtacagaaacggcgacttcttcatcagcagcaaggacctgggctacgactacagctacctgcaggacagcgaccccgacagcttccaggactacatcaagagctacctggagcaggccagcagaatctggagctggctgctgggcgccgccatggtgggcgccgtgctgaccgccctgctggccggcctggtgagcctgctgtgcagacacaagagaaagcagctgcccgaggagaagcagcccctgctgatggagaaggaggactaccacagcctgtaccagagccacctgtga

SEQ ID NO: 3017 - RNA, 1614 nt, synthetic construct
  misc_feature 1..1614: note = AAC15468 variant
  source 1..1614: mol_type = other RNA
atgagcgcccccaagctgctgagcctgggctgcatcttcttccccctgctgctgttccagcaggccagagcccagttccccagacagtgcgccaccgtggaggccctgagaagcggcatgtgctgccccgacctgagccccgtgagcggccccggcaccgacagatgcggcagcagcagcggcagaggcagatgcgaggccgtgaccgccgacagcagaccccacagcccccagtacccccacgacggcagagacgacagagaggtgtggcccctgagattcttcaacagaacctgccactgcaacggcaacttcagcggccacaactgcggcacctgcagacccggctggagaggcgccgcctgcgaccagagagtgctgatcgtgagaagaaacctgctggacctgagcaaggaggagaagaaccacttcgtgagagccctggacatggccaagagaaccacccaccccctgttcgtgatcgccaccagaagaagcgaggagatcctgggccccgacggcaacaccccccagttcgagaacatcagcatctacaactacttcgtgtggacccactactacagcgtgaagaagaccttcctgggcgtgggccaggagagcttcggcgaggtggacttcagccacgagggccccgccttcctgacctggcacagataccacctgctgagactggagaaggacatgcaggagatgctgcaggagcccagcttcagcctgccctactggaacttcgccaccggcaagaacgtgtgcgacatctgcaccgacgacctgatgggcagcagaagcaacttcgacagcaccctgatcagccccaacagcgtgttcagccagtggagagtggtgtgcgacagcctggaggactacgacaccctgggcaccctgtgcaacagcaccgaggacggccccatcagaagaaaccccgccggcaacgtggccagacccatggtgcagagactgcccgagccccaggacgtggcccagtgcctggaggtgggcctgttcgacaccccccccttctacagcaacagcaccaacagcttcagaaacaccgtggagggctacagcgaccccaccggcaagtacgaccccgccgtgagaagcctgcacaacctggcccacctgttcctgaacggcaccggcggccagacccacctgagccccaacgaccccatcttcgtgctgctgcacaccttcaccgacgccgtgttcgacgagtggctgagaagatacaacgccgacatcagcaccttccccctggagaacgcccccatcggccacaacagacagtacaacatggtgcccttctggccccccgtgaccaacaccgagatgttcgtgaccgcccccgacaacctgggctacacctacgagatccagtggcccagcagagagttcagcgtgcccgagatcatcgccatcgccgtggtgggcgccctgctgctggtggccctgatcttcggcaccgccagctacctgatcagagccagaagaagcatggacgaggccaaccagcccctgctgaccgaccagtaccagtgctacgccgaggagtacgagaagctgcagaaccccaaccagagcgtggtgtga

SEQ ID NO: 3018 - RNA, 1560 nt, synthetic construct
  misc_feature 1..1560: note = AAA20870 variant
  source 1..1560: mol_type = other RNA
atgagccccctgtggtggggcttcctgctgagctgcctgggctgcaagatcctgcccggcgcccagggccagttccccagagtgtgcatgaccgtggacagcctggtgaacaaggagtgctgccccagactgggcgccgagagcgccaacgtgtgcggcagccagcagggcagaggccagtgcaccgaggtgagagccgacaccagaccctggagcggcccctacatcctgagaaaccaggacgacagagagctgtggcccagaaagttcttccacagaacctgcaagtgcaccggcaacttcgccggctacaactgcggcgactgcaagttcggctggaccggccccaactgcgagagaaagaagccccccgtgatcagacagaacatccacagcctgagcccccaggagagagagcagttcctgggcgccctggacctggccaagaagagagtgcaccccgactacgtgatcaccacccagcactggctgggcctgctgggccccaacggcacccagccccagttcgccaactgcagcgtgtacgacttcttcgtgtggctgcactactacagcgtgagagacaccctgctgggccccggcagaccctacagagccatcgacttcagccaccagggccccgccttcgtgacctggcacagataccacctgctgtgcctggagagagacctgcagagactgatcggcaacgagagcttcgccctgccctactggaacttcgccaccggcagaaacgagtgcgacgtgtgcaccgaccagctgttcggcgccgccagacccgacgaccccaccctgatcagcagaaacagcagattcagcagctgggagaccgtgtgcgacagcctggacgactacaaccacctggtgaccctgtgcaacggcacctacgagggcctgctgagaagaaaccagatgggcagaaacagcatgaagctgcccaccctgaaggacatcagagactgcctgagcctgcagaagttcgacaacccccccttcttccagaacagcaccttcagcttcagaaacgccctggagggcttcgacaaggccgacggcaccctggacagccaggtgatgagcctgcacaacctggtgcacagcttcctgaacggcaccaacgccctgccccacagcgccgccaacgaccccatcttcgtggtgctgcacagcttcaccgacgccatcttcgacgagtggatgaagagattcaacccccccgccgacgcctggccccaggagctggcccccatcggccacaacagaatgtacaacatggtgcccttcttcccccccgtgaccaacgaggagctgttcctgaccagcgaccagctgggctacagctacgccatcgacctgcccgtgagcgtggaggagacccccggctggcccaccaccctgctggtggtgatgggcaccctggtggccctggtgggcctgttcgtgctgctggccttcctgcagtacagaagactgagaaagggctacacccccctgatggagacccacctgagcagcaagagatacaccgaggaggcctga

SEQ ID NO: 3019 - RNA, 456 nt, synthetic construct
  misc_feature 1..456: note = CCDS7679.1 variant
  source 1..456: mol_type = other RNA
atgagaagactgctgctggtgaccagcctggtggtggtgctgctgtgggaggccggcgccgtgcccgcccccaaggtgcccatcaagatgcaggtgaagcactggcccagcgagcaggaccccgagaaggcctggggcgccagagtggtggagccccccgagaaggacgaccagctggtggtgctgttccccgtgcagaagcccaagctgctgaccaccgaggagaagcccagaggccagggcagaggccccatcctgcccggcaccaaggcctggatggagaccgaggacaccctgggccacgtgctgagccccgagcccgaccacgacagcctgtaccaccccccccccgaggaggaccagggcgaggagagacccagactgtgggtgatgcccaaccaccaggtgctgctgggccccgaggaggaccaggaccacatctaccacccccagtga

SEQ ID NO: 3020 - RNA, 525 nt, synthetic construct
  misc_feature 1..525: note = ACF47598 variant
  source 1..525: mol_type = other RNA
atggtgagctactgggacaccggcgtgctgctgtgcgccctgctgagctgcctgctgctgaccggcagcagcagcggcagcaagctgaaggaccccgagctgagcctgaagggcacccagcacatcatgcaggccggccagaccctgcacctgcagtgcagaggcgaggccgcccacaagtggagcctgcccgagatggtgagcaaggagagcgagagactgagcatcaccaagagcgcctgcggcagaaacggcaagcagttctgcagcaccctgaccctgaacaccgcccaggccaaccacaccggcttctacagctgcaagtacctggccgtgcccaccagcaagaagaaggagaccgagagcgccatctacatcttcatcagcgacaccggcagacccttcgtggagatgtacagcgagatccccgagatcatccacatgaccgagggcagagagctggtgatcccctgcagagtgaccagccccaacatcaccgtgaccctgaagaagaagaaggcctga

SEQ ID NO: 3021 - RNA, 750 nt, synthetic construct
  misc_feature 1..750: note = BAR92607 variant
  source 1..750: mol_type = other RNA
atgggcagcgacgtgagagacctgaacgccctgctgcccgccgtgcccagcctgggcggcggcggcggctgcgccctgcccgtgagcggcgccgcccagtgggcccccgtgctggacttcgccccccccggcgccagcgcctacggcagcctgggcggccccgcccccccccccgccccccccccccccccccccccccccccccacagcttcatcaagcaggagcccagctggggcggcgccgagccccacgaggagcagtgcctgagcgccttcaccgtgcacttcagcggccagttcaccggcaccgccggcgcctgcagatacggccccttcggcccccccccccccagccaggccagcagcggccaggccagaatgttccccaacgccccctacctgcccagctgcctggagagccagcccgccatcagaaaccagggctacagcaccgtgaccttcgacggcacccccagctacggccacacccccagccaccacgccgcccagttccccaaccacagcttcaagcacgaggaccccatgggccagcagggcagcctgggcgagcagcagtacagcgtgcccccccccgtgtacggctgccacacccccaccgacagctgcaccggcagccaggccctgctgctgagaaccccctacagcagcgacaacctgtaccagatgaccagccagctggagtgcatgacctggaaccagatgaacctgggcgccaccctgaagggctga

SEQ ID NO: 3022 - RNA, 1350 nt, synthetic construct
  misc_feature 1..1350: note = AAA61299 variant
  source 1..1350: mol_type = other RNA
atgggcagcgacgtgagagacctgaacgccctgctgcccgccgtgcccagcctgggcggcggcggcggctgcgccctgcccgtgagcggcgccgcccagtgggcccccgtgctggacttcgccccccccggcgccagcgcctacggcagcctgggcggccccgcccccccccccgccccccccccccccccccccccccccccccacagcttcatcaagcaggagcccagctggggcggcgccgagccccacgaggagcagtgcctgagcgccttcaccgtgcacttcagcggccagttcaccggcaccgccggcgcctgcagatacggccccttcggcccccccccccccagccaggccagcagcggccaggccagaatgttccccaacgccccctacctgcccagctgcctggagagccagcccgccatcagaaaccagggctacagcaccgtgaccttcgacggcacccccagctacggccacacccccagccaccacgccgcccagttccccaaccacagcttcaagcacgaggaccccatgggccagcagggcagcctgggcgagcagcagtacagcgtgcccccccccgtgtacggctgccacacccccaccgacagctgcaccggcagccaggccctgctgctgagaaccccctacagcagcgacaacctgtaccagatgaccagccagctggagtgcatgacctggaaccagatgaacctgggcgccaccctgaagggcgtggccgccggcagcagcagcagcgtgaagtggaccgagggccagagcaaccacagcaccggctacgagagcgacaaccacaccacccccatcctgtgcggcgcccagtacagaatccacacccacggcgtgttcagaggcatccaggacgtgagaagagtgcccggcgtggcccccaccctggtgagaagcgccagcgagaccagcgagaagagacccttcatgtgcgcctaccccggctgcaacaagagatacttcaagctgagccacctgcagatgcacagcagaaagcacaccggcgagaagccctaccagtgcgacttcaaggactgcgagagaagattcagcagaagcgaccagctgaagagacaccagagaagacacaccggcgtgaagcccttccagtgcaagacctgccagagaaagttcagcagaagcgaccacctgaagacccacaccagaacccacaccggcaagaccagcgagaagcccttcagctgcagatggcccagctgccagaagaagttcgccagaagcgacgagctggtgagacaccacaacatgcaccagagaaacatgaccaagctgcagctggccctgtga

SEQ ID NO: 3023 - RNA, 279 nt, synthetic construct
  misc_feature 1..279: note = AAA63269 variant
  source 1..279: mol_type = other RNA
atgcagagaagaggccagcccctggagaaccacgtggccctgatccactggcagagcgccggcatccccgccagcaaggtgcacaactactgcaacatgaagaagagcagactgggcagaagcagagccgtgagaatcagccagcccctgctgagccccagaagatgccccctgcacctgaccgagagaggcgccggcctgctgcagccccagccccagggccccgtgagaacccccggcccccccagcggcagccaccccgccgccgccgacaactga

SEQ ID NO: 3024 - RNA, 246 nt, synthetic construct
  misc_feature 1..246: note = AAP35763 variant
  source 1..246: mol_type = other RNA
atggagagccccaagaagaagaaccagcagctgaaggtgggcatcctgcacctgggcagcagacagaagaagatcagaatccagctgagaagccagtgcgccacctggaaggtgatctgcaagagctgcatcagccagacccccggcatcaacctggacctgggcagcggcgtgaaggtgaagatcatccccaaggaggagcactgcaagatgcccgaggccggcgaggagcagccccaggtgtga

SEQ ID NO: 3025 - RNA, 1098 nt, synthetic construct
  misc_feature 1..1098: note = AAA59652 variant
  source 1..1098: mol_type = other RNA
atggccgtgatggctcccagaaccctgctcctgcttctgagcggcgccctcgcgctgacacagacgtgggctgggtcccactctatgcggtacttctttaccagcgtctcccgccctggaagaggcgagccgcggttcatcgccgttgggtatgtggacgatacacaatttgtgcgcttcgactctgatgccgctagccagaagatggaacccagagccccttggattgagcaggaaggacccgagtactgggaccaggaaacccggaacatgaaagctcattcccaaacagatcgcgccaatcttggcaccctgagagggtattacaaccagtctgaggacggaagccacacaatccagattatgtatggctgcgatgtcggccctgacgggcggtttctccgcggatacagacaggatgcgtatgacggcaaggattacatcgccctgaatgaggacctgcggtcctggaccgctgccgatatggctgcccaaattacgaaacgcaagtgggaagcggtgcatgccgctgagcagagacgggtttacctcgaagggcgctgtgtggacggactgagacggtatcttgagaacggcaaagagaccctgcagagaacagatccccctaagacccacatgacacatcacccgatcagcgaccacgaagccaccctccgctgctgggctctggggttctaccccgccgagatcacgcttacatggcagcgggacggagaagatcaaacccaggacacagagctggtcgaaaccagacctgccggcgatggcacctttcagaagtgggctgcggtggttgtgccctctggggaggagcaacgctatacatgtcatgtccagcacgaaggactccctaaacccctgacgctgcggtgggagctctccagccagccgaccattcctatcgtgggcattatcgccgggctggtgcttctgggagctgtcattacaggcgccgttgtggccgctgtgatgtggagacgcaagtcttccgaccggaaagggggaagctacacccaggccgcgtcttccgatagcgctcaaggctccgacgtctctctcacagcctgcaaggtgtga

SEQ ID NO: 3026 - RNA, 1098 nt, synthetic construct
  misc_feature 1..1098: note = AAA59606 variant
  source 1..1098: mol_type = other RNA
atggccgtgatggctcccagaaccctggtcctcctgcttagcggcgccctggcgctcacacagacgtgggctgggtcccactctatgcggtacttctttaccagcgtttcccgccctggaagaggcgagccgcggttcatcgccgtggggtatgtggacgatacacaatttgtccgcttcgactctgatgccgctagccagagaatggaaccccgggccccttggattgagcaggaaggacccgagtactgggacggcgaaacccgcaaggtgaaagctcattcccagacacacagagttgatctggggacccttcggggatattacaaccaatctgaggccggcagccatacagtgcagcgcatgtatggctgcgacgtcgggtccgattggagatttctgcggggataccaccagtatgcgtacgacggcaaggattacatcgccctcaaagaggacctgcgcagctggaccgctgccgatatggctgcccagacgaccaagcataaatgggaagcggcccacgtggctgagcaactgagagcctatctcgaagggacatgtgttgagtggctgcggcgctaccttgagaatggaaaggaaaccctgcagagaacagacgctcctaagacccacatgacgcatcacgccgtgtctgatcatgaggccacactccggtgctgggctctgtccttctatcccgcggaaattacccttacatggcagagagacggcgaggaccagacccaagataccgaactggtcgagacacgccctgccggggacggaacgtttcagaaatgggctgccgtggtggtcccgagcggccaggagcaacggtacacctgtcacgttcagcacgaaggcctccccaagcctctgacactgagatgggagccctcttcccagcctaccatccccattgtggggatcatcgccggactcgtgctgttcggcgctgtcattacaggggccgtggttgcggctgtgatgtggcgccggaaaagctctgatagaaagggaggctcctatagccaggccgcctcctctgacagcgctcaagggtccgatgtcagccttaccgcctgcaaagtgtga

SEQ ID NO: 3027 - RNA, 1263 nt, synthetic construct
  misc_feature 1..1263: note = AAH37161 variant
  source 1..1263: mol_type = other RNA
atgcccggcgggtgcagcagaggacctgccgctggcgacgggcggctgcgcctcgccagactggcgcttgtgctgctcggatgggtctcctctagctccccgacctctagcgcttcctctttcagctccagcgccccctttctggcctctgctgtttccgcccagcctccccttcctgatcaatgtcccgctctgtgcgagtgtagcgaagccgcgcggacagtgaagtgcgtgaaccgcaatctcacggaggtccctaccgacctgccggcctacgtgagaaacctgttcctcacaggcaatcagctggctgttcttcccgccggggcttttgcccggcgccctcccctggcggaactcgccgctctgaacctttctggatccagactggatgaggtgcgggccggcgctttcgaacacctccctagcctgcgccagctggacctctctcataatcccctggccgatctttccccgtttgccttcagcggctccaacgcttctgtcagcgcgcctagccccctggtggagctcatcctgaatcacattgttcctcccgaggacgaaagacagaaccggtcctttgaggggatggtggtcgccgcccttctggctggacgcgccctccaaggcctgagacggctggaactcgcttctaatcatttcctgtatcttccccgcgatgtgctggcccagctcccttccctgagacaccttgacctgagcaacaattctctcgtgagcctgacctacgtctcctttcggaacctgacacatctcgagtctctgcaccttgaggataatgcgctgaaagttctccacaacgggaccctggctgaactgcagggacttccgcatatcagagtgttcctcgacaataacccctgggtgtgtgattgccacatggccgacatggtcacatggctgaaggagaccgaagtggttcagggcaaagatcgcctgacgtgtgcctatcctgagaagatgcggaacagagtgctcctggaacttaatagcgctgacctggactgcgatcccattctccctccctccctgcaaaccagctacgtctttctggggatcgtgcttgccctcattggagctatcttcctgctggttctctatctgaaccgcaaaggcatcaagaagtggatgcataatattcgggacgcctgtagagatcacatggagggctaccactatcgctacgagatcaacgcggacccgcggcttacaaatctgtcttccaacagcgatgtgtga

SEQ ID NO: 3028 - RNA, 1632 nt, synthetic construct
  misc_feature 1..1632: note = AAH33010 variant
  source 1..1632: mol_type = other RNA
atgagaaagcccgccgctggcttcctgcctagcctcctgaaagtgcttctgctcccgctggcccccgcggctgcccaggactccacccaagcctctacacctgggagccccctttcccctacggagtacgaacggtttttcgctctgctcacccccacatggaaggccgagaccacatgccgcctgagagctacccacggatgtcggaaccctacactggtccagctcgatcagtatgaaaatcatggcctggttccggacggggccgtgtgctctaaccttccctacgcgagctggtttgagtccttctgtcagtttacccactatcgctgctctaatcatgtgtactatgccaaaagagtcctgtgtagccaacctgtgtccatcctcagccccaacacgctgaaggaaattgaggcttctgccgaggtttcccctaccacaatgaccagccccatctctccgcacttcacagtgaccgaacggcagacgtttcagccttggcccgagcgcctttccaataacgtcgaagaactgctccagagctctctgtccctgggaggccaagagcaggctcctgaacataaacaggagcagggggtggaacacagacaagagcccacacaggaacacaagcaggaggagggacaaaagcaggaggagcaggaagaggaacaggaggaggaaggcaaacaagaggaaggccaggggaccaaggagggacgggaagccgttagccagctccagacagattccgagcccaaattccattctgagagcctgtccagcaatccttcttcctttgcgccgcgcgtgagagaagtcgagagcacccccatgattatggaaaacatccaagagcttattcggtctgcccaggagatcgacgaaatgaatgagatctacgatgaaaacagctattggcgcaatcagaaccctggctccctgctccagctgccccacaccgaggcccttctggtgctctgctactctattgtggaaaatacatgtatcattacgcctaccgctaaggcttggaaatacatggaggaggaaatcctggggttcggaaagagcgtctgcgactccctgggcagacggcatatgagcacatgtgccctctgcgatttttgttctctgaaacttgagcaatgccactccgaagccagcctgcagcgccagcagtgcgacacctctcacaagacacccttcgtttccccgctcctggctagccaatccctttctattgggaaccaggtgggaagccctgagtccggcagattttatggcctggatctctacgggggactgcatatggacttctggtgtgcgcggctggccaccaagggctgcgaagatgtgagagtctctgggtggctccagacggagttcctgagctttcaagacggagatttccccacaaaaatctgtgacaccgactatattcagtaccctaattattgctcctttaagagccagcagtgtcttatgcgcaaccggaacagaaaagtgtctcgcatgcggtgcctgcaaaatgagacctactccgctctcagccccggcaagtctgaagatgttgtgctgagatggtcccaggagttcagcacactgacccttgggcagtttggatga

SEQ ID NO: 3029 - RNA, 1830 nt, synthetic construct
  misc_feature 1..1830: note = AAB58754 variant
  source 1..1830: mol_type = other RNA
atgaagtgggtggagagcatcttcctgatttttctcctgaacttcaccgaatccagaacacttcaccggaatgagtacggcatcgcctctattctggacagctatcagtgcacggctgaaatctccctcgccgatctggcgaccattttcttcgctcaatttgtccaggaggccacatacaaagaagtttctaagatggtgaaagacgcccttaccgctatcgagaagcccacaggggatgagcagagctccggatgtctggaaaaccagctccctgccttcctggaggaactgtgccatgagaaagagatcctcgaaaagtatggccactctgactgttgcagccaatccgaggaagggcgccataattgttttctggctcacaagaaaccgacccccgccagcattcctcttttccaggtgcccgagcctgtcacatcttgcgaagcgtacgaggaggatagagaaacctttatgaacaagttcatctatgagattgcccggcgccatccctttctgtacgctcctacgatcctcctgtgggccgctagatatgacaaaattatcccgtcctgttgcaaggccgaaaatgcggtggagtgtttccagaccaaagccgctacagttaccaaggaacttcgggagagctctctgctcaaccagcacgcctgcgctgtgatgaagaattttggaacacgcaccttccaagccattacggtcacaaaactgtcccagaagttcaccaaagtgaactttacagagatccagaagctggttctcgatgtggcccacgtccatgaacactgttgcagaggcgacgtgctggattgccttcaggacggggagaaaatcatgagctacatttgttctcaacaggataccctgtccaataagatcaccgaatgctgtaaactcacaacgctggagcggggacagtgcattatccatgctgaaaacgacgagaagcccgagggccttagccctaatctgaaccgcttcctcggcgatagagactttaatcaattctcctctggggaaaagaacatttttctggcgagcttcgtgcacgagtactcccggcgccacccccagctggccgtcagcgttatcctcagagtggctaaaggatatcaggaactgcttgagaagtgttttcagaccgagaatcctctggaatgccaagacaaaggcgaggaggaactccagaagtacatccaggaatctcaggccctggccaaacggtcctgtgggcttttccaaaagctgggagagtattacctccagaacgcttttctggtggcctatacaaagaaagcgccccagctgaccagctctgagctcatggctattacacgcaagatggccgccaccgctgccacgtgctgtcagctgagcgaagataaacttctggcttgcggcgagggggccgcggacatcattatcggacatctctgtattagacacgaaatgacaccggtcaaccctggcgtgggccaatgctgcacctcctcttacgccaatcggagaccctgtttcagctccctggttgtggatgagacctatgtccctcccgcttttagcgacgataagttcatctttcataaagacctgtgccaggcccagggggtggcccttcagacaatgaagcaagaatttctcatcaacctggttaagcagaaaccccagattaccgaggagcaactggaagctgtgatcgcggatttctctggactcctggagaagtgttgccagggccaggaacaggaggtctgttttgccgaagaggggcaaaaacttatttccaagacacgcgctgccctgggagtgtga

SEQ ID NO: 3030 - RNA, 2565 nt, synthetic construct
  misc_feature 1..2565: note = AAI26251 variant
  source 1..2565: mol_type = other RNA
atgatggcctacagcgacaccacaatgatgtccgatgacatcgattggctgagatctcaccggggcgtgtgcaaggtcgacctctataaccccgaggggcagcaagatcaggaccgcaaagttatttgtttcgtggatgtgagcacgctgaatgtcgaagacaaggattacaaagacgctgcctcctctagctccgagggaaaccttaatctgggctctctcgaagagaaggaaatcattgtgatcaaagataccgagaagaaggaccagagcaaaacagaggggtccgtttgcctgtttaagcaggcgcctagcgatccggtgtctgtccttaactggctgctctccgacctgcaaaaatatgctctgggattccagcatgccctcagcccctctacctccacatgtaagcacaaagtgggcgacaccgaaggggagtaccatagagccagctctgaaaattgctattccgtttacgctgatcaggtgaacattgactatctgatgaatcggcctcagaaccttcgcctggagatgacagccgctaagaataccaacaataaccaaagcccctccgcccctcccgcgaagcctccgtctacgcagagagccgtcatcagccccgatggagagtgttccatcgacgatctcagcttttacgtgaatcggctgtcttcccttgtgattcagatggctcacaaagaaatcaaggagaaactggaaggcaagagcaaatgcctccatcactctatttgtcctagccccggcaacaaggagcgcatctcccctagaacccccgcctctaaaattgctagcgaaatggcctacgaggcggtcgagctgacagccgctgaaatgcgggggaccggagaggaatcccgcgagggcgggcagaagtctttcctgtattctgaactctccaataagagcaaatctggagacaagcaaatgtcccagagagagagcaaagagtttgccgattccatctctaagggcctgatggtttacgctaaccaggtggccagcgacatgatggtgtcccttatgaaaacactgaaggtccactctagcgggaagccgattcctgcctccgtggttctcaaacgggtgctgcttcgccataccaaggaaatcgtcagcgatctgatcgactcttgcatgaaaaacctccacaatattacgggagtgctgatgacagattccgacttcgttagcgctgtgaagagaaacctgtttaatcaatggaaacagaacgcgaccgacatcatggaggccatgctcaagcggctggtctctgctcttattggcgaagagaaggaaacaaaatcccagagcctgtcttatgccagcctcaaggccggctcccatgatcccaaatgtcgcaatcagagcctggagttctctaccatgaaggctgagatgaaagaaagagacaaggggaagatgaaatccgatccttgcaagagccttacctccgccgagaaagtgggagaacacatcctgaaggagggcctcacaatttggaaccaaaaacaggggaatagctgtaaggtcgcgacgaaggcttgcagcaacaaagacgagaagggagagaaaatcaatgcctccaccgattctctggccaaggacctgatcgtgagcgctctcaaactgattcagtaccaccttacacagcaaaccaagggcaaagatacatgcgaggaagactgtcccgggtccaccatgggatatatggcccagtctacgcagtacgagaagtgcggcggcgggcagagcgctaaggccctgtccgttaaacaactcgaaagccatcgggcgcccggaccttctacatgtcagaaggagaaccagcacctggattcccagaaaatggacatgagcaatatcgtgctgatgcttattcaaaagctcctgaacgagaatccgtttaaatgcgaagatccctgtgagggcgaaaacaagtgctctgagcctagagcctccaaggctgccagcatgtctaatcgctccgacaaagctgaagaacagtgtcaggagcatcaagaactggattgcaccagcgggatgaagcaggccaacggacagttcatcgacaaactcgtcgagtccgtgatgaagctgtgtcttattatggcgaaatatagcaacgacggcgccgctctggccgaactcgaggaacaggctgcctctgccaataagcccaactttcgggggaccagatgcatccacagcggcgctatgcctcaaaattaccaggattccctgggacatgaggttatcgtgaacaatcagtgttctacaaacagcctgcagaagcaacttcaggcggtcctccagtggattgccgcttcccagttcaatgtgcccatgctgtactttatgggcgacaaagatgggcaactggagaagctccctcaggtgtctgccaaagccgctgaaaagggatatagcgttggcgggctgcttcaggaggtcatgaaattcgccaaggaacgccaaccggacgaggcggtgggaaaagtggctcggaagcagctgctcgattggctgctggccaacctttga

SEQ ID NO: 3031 - RNA, 1251 nt, synthetic construct
  misc_feature 1..1251: note = BAG61782 variant
  source 1..1251: mol_type = other RNA
atggtggactaccacgccgctaaccagagctatcaatacggcccctcctctgccgggaatggagcgggcgggggaggcagcatgggggattatatggctcaggaggacgattgggacagagatctgctcctggaccctgcctgggaaaagcagcagcggaaaaccttcacagcctggtgcaactcccatcttcgcaaggctggaacgcaaatcgagaatattgatgaagactttagagatggcctgaaactcatgctgcttctggaggtcatctctggcgaacggctcccgaagcccgagcgcgggaaaatgagagttcacaagattaacaatgtgaacaaggccctggacttcatcgctagcaaaggagtgaagctggtctccattggcgccgaggaaatcgtggatgggaatgcgaaaatgaccctcggaatgatctggacaattatcctgcggtttgccattcaggacatctctgttgaggaaaccagcgctaaggagggccttctgctctggtgtcagcgcaaaacagccccttacaagaacgtgaatgtccagaacttccatatttcctggaaggatgggctggcttttaatgcccttatccacagacatcggcccgagctgattgaatatgacaaactccgcaaggacgatcctgtgaccaacctgaataacgcgttcgaggttgccgaaaaatacctggacatccccaagatgctcgatgctgaggacatcgtgaatacagccagacctgatgaaaaagctattatgacctatgtcagctctttttaccacgccttctccggagcccaaaaggctgagacggcggccaaccggatctgcaaagtgctggctgtgaaccaggagaatgaacaccttatggaggactacgaaaagctggccagcgatctcctggagtggattcgcagaaccatcccgtggcttgaagaccgggtcccccagaagacaattcaggagatgcaacagaaactggaggattttcgcgactatagacgggttcataagcctcccaaagtgcaggaaaagtgtcaactcgagatcaacttcaataccctgcagacaaaactgagactctctaaccgccctgcctttatgccctcctggcggagcagagcttcttccagcccgacctccacgtgcgccgcgtctagccctgctcgccccatgctgtggggccctggctcccggcccagatggcgccggagcggggcctctccccttagatga

SEQ ID NO: 3032 - RNA, 1689 nt, synthetic construct
  misc_feature 1..1689: note = BAG65349 variant
  source 1..1689: mol_type = other RNA
atggtggactaccacgccgctaaccagagctatcaatacggcccctcctctgccgggaatggagcgggcgggggaggcagcatgggggattatatggctcaggaggacgattgggacagagatctgctcctggaccctgcctgggaaaagcagcagcggaaaaccttcacagcctggtgcaactcccatcttcgcaaggctggaacgcaaatcgagaatattgatgaagactttagagatggcctgaaactcatgctgcttctggaggtcatctctggcgaacggctcccgaagcccgagcgcgggaaaatgagagttcacaagattaacaatgtgaacaaggccctggacttcatcgctagcaaaggagtgaagctggtctccattggcgccgaggaaatcgtggatgggaatgcgaaaatgaccctcggaatgatctggacaattatcctgcggtttgccattcaggacatctctgttgaggaaaccagcgctaaggagggccttctgctctggtgtcagcgcaaaacagccccttacaagaacgtgaatgtccagaacttccatatttcctggaaggatgggctggcttttaatgcccttatccacagacatcggcccgagctgattgaatatgacaaactccgcaaggacgatcctgtgaccaacctgaataacgcgttcgaggttgccgaaaaatacctggacatccccaagatgctcgatgctgaggacatcgtgaatacagccagacctgatgaaaaagctattatgacctatgtcagctctttttaccacgccttctccggagcccaaaaggctgagacggcggccaaccggatctgcaaagtgctggctgtgaaccaggagaatgaacaccttatggaggactacgaaaagctggccagcgatctcctggagtggattcagcgcaccatcccgtggcttgaagacagagtcccccagaaggccattcaagagatgcagcagaaactggaggattttcgggactatcgcagagttcataagcctcccaaagtgcaagaaaagtgtcagctcgagatcaacttcaatacactgcagaccaaactgcggctctctaacagacctgcttttatgccctccgaaggcaagatggtgagcgatatcaataacggctggcagcacctggagcaagccgaaaaggggtacgaggagtggcttctgaatgaaattcgccggctcgagagactggaccatcttgcggaaaaattccgccagaaggcttctatccacgaggcctggacagacggaaaagaggccatgctgaagcaccgggattatgaaaccgctacgctctccgacattaaagccctgatcagaaagcatgaggcttttgaaagcgatctggccgcgcaccaggaccgcgtcgagcagattgccgctatcgcccaagaactcaacgagctggattactatgactcccataatgtgaacacaccggatggccttcaggaggggcctggacagccccactctcctatccctcccctgtgcatttacgctaagcatagcctccagtccagcggcgttgggggatgggccggccggggctgggggagactgtctcccctgtccctttgtggactcgcgcgccggttcccgagacccggctggggagacctggggcctgccctgctcgtgtggtga

SEQ ID NO: 3033 - RNA, 2736 nt, synthetic construct
  misc_feature 1..2736: note = AAH05033 variant
  source 1..2736: mol_type = other RNA
atggtggactaccacgccgctaaccagagctatcaatacggcccctcctctgccgggaatggagcgggcgggggaggcagcatgggggattatatggctcaggaggacgattgggacagagatctgctcctggaccctgcctgggaaaagcagcagcggaaaaccttcacagcctggtgcaactcccatcttcgcaaggctggaacgcaaatcgagaatattgatgaagactttagagatggcctgaaactcatgctgcttctggaggtcatctctggcgaacggctcccgaagcccgagcgcgggaaaatgagagttcacaagattaacaatgtgaacaaggccctggacttcatcgctagcaaaggagtgaagctggtctccattggcgccgaggaaatcgtggatgggaatgcgaaaatgaccctcggaatgatctggacaattatcctgcggtttgccattcaggacatctctgttgaggaaaccagcgctaaggagggccttctgctctggtgtcagcgcaaaacagccccttacaagaacgtgaatgtccagaacttccatatttcctggaaggatgggctggcttttaatgcccttatccacagacatcggcccgagctgattgaatatgacaaactccgcaaggacgatcctgtgaccaacctgaataacgcgttcgaggttgccgaaaaatacctggacatccccaagatgctcgatgctgaggacatcgtgaatacagccagacctgatgaaaaagctattatgacctatgtcagctctttttaccacgccttctccggagcccaaaaggctgagacggcggccaaccggatctgcaaagtgctggctgtgaaccaggagaatgaacaccttatggaggactacgaaaagctggccagcgatctcctggagtggattcgcagaaccatcccgtggcttgaagaccgggtcccccagaagacaattcaggagatgcaacagaaactggaggattttcgcgactatagacgggttcataagcctcccaaagtgcaggaaaagtgtcaactcgagatcaacttcaataccctgcagacaaaactgagactctctaaccgccctgcctttatgccctccgaaggcaagatggtgagcgatatcaataacggctggcagcacctggagcaggctgaaaaggggtacgaggagtggcttctgaatgaaattcggagactcgagcgcctggaccatcttgccgaaaaattccggcaaaaggcgtctatccacgaggcttggaccgacggaaaagaggccatgctgaagcacagagattatgaaacggccacactctccgacattaaagctctgatccgcaagcatgaggcctttgaaagcgatctggctgcccaccaggaccgggtcgagcagattgcggccatcgctcaggaactcaacgagctggattactatgactcccataatgtgaacaccagatgccaaaagatctgtgatcagtgggacgcccttggctctctgacacacagccgccgggaggctctcgagaaaaccgagaagcagctggaagccattgatcagctgcatcttgagtacgcgaaaagagccgctccgttcaataactggatggaatccgccatggaggacctccaagatatgttcatcgttcacaccattgaggaaatcgaggggctgattagcgctcacgaccagtttaagtctacactgcctgatgccgaccgcgaacgggaggccatcctcgctattcataaagaagcgcagagaatcgccgagtccaatcacatcaagctgagcggatctaacccctatacgaccgtgacacctcagattatcaatagcaagtgggagaaagtccaacagcttgtgcccaagcgggaccatgctctgctcgaagaacagtccaaacaacagtctaacgaacatctgcgcagacagttcgccagccaggccaacgttgtgggcccctggattcaaaccaagatggaggagatcgggcggatttccatcgaaatgaatggaacactggaggatcagcttagccacctcaaacagtacgaaagatctatcgtcgactacaagcctaacctggatctgctcgagcagcaacaccagctgattcaggaagctcttatctttgacaataaacacaccaactatacgatggagcatattcgcgtgggctgggagcagctgctcacaaccatcgcccggaccattaatgaagtcgagaaccaaatcctgacaagagatgcgaagggcatctcccaggaacagatgcaagagttccgcgctagctttaatcacttcgacaaggatcatgggggagccctgggcccggaagagtttaaagcctgccttatttctctcgggtacgacgtggagaacgatagacagggagaagctgagttcaatcggatcatgtccctggttgaccccaaccacagcggcctggtgacctttcaggccttcattgattttatgtcccgcgaaacaacggacaccgatacagcggaccaggtcatcgcttctttcaaggtgctcgccggggacaaaaattttattaccgccgaggaactgagacgggagcttcctcccgatcaagctgagtattgtatcgcccgcatggctccttaccagggccccgacgccgttccgggagcgctggattataagagcttctccacagccctctacggcgaatctgacctgtga

SEQ ID NO: 3034 - RNA, 597 nt, synthetic construct
  misc_feature 1..597: note = EAX10817 variant
  source 1..597: mol_type = other RNA
atggccctgcagggcatcagcgtgatggagctctccgggctggctcccggacctttctgcgccatggtccttgcggactttggcgctagagttgtgcgggtggatcgcccggggtctagatacgacgtcagccggctgggacgcggcaagagatccctcgtgctggatcttaaacaaccccgcggggccgccgttctgcggagactctgtaagcggtctgacgtgctgctggaacctttccgcagaggagtcatggagaaactccagctgggccccgaaattcttcagcgggagaaccctcgcctgatctatgctagactcagcggctttgggcagtccggatctttctgccggctggccggccacgatattaattaccttgctctgagcgggggacgcaactccatctttaagttctttagcgtggaaaattctgagattgagtccgttggcagcacctctagaacagaacatgtggggtggtggtccacgttcctctatgacctgcaagatagccggtggggaatccacggctgttggtctaacagaacccccgtcctgcgcgccgcggaccagcggacatggaccaaagtgtga

SEQ ID NO: 3035 - RNA, 597 nt, synthetic construct
  misc_feature 1..597: note = BAF85677 variant
  source 1..597: mol_type = other RNA
atggccctgcagggcatcagcgtggtcgagctctccgggctggctcccggacctttctgcgccatggttcttgcggactttggcgctagagtggtgcgggtcgatcgcccggggtctagatacgacgtgagccggctgggacgcggcaagagatccctcgttctggatcttaaacaaccccgcggggccgccgtgctgcggagactctgtaagcggtctgacgtcctgctggaacctttccgcagaggagtgatggagaaactccagctgggccccgaaattcttcagcgggagaaccctcgcctgatctatgctagactcagcggctttgggcagtccggatctttctgccggctggccggccacgatattaattaccttgctctgagcgggggacgcaactccatctttaagttctttagcgttgaaaattctgagattgagtccgtgggcagcacctctagaacagaacatgtcgggtggtggtccacgttcctctatgacctgcaagatagccggtggggaatccacggctgttggtctaacagaaccccctttctgcgcgccgcggaccagcggacatggaccaaagtgtga

SEQ ID NO: 3036 - RNA, 2763 nt, synthetic construct
  misc_feature 1..2763: note = EAX05380 variant
  source 1..2763: mol_type = other RNA
atggaggtgcagctgggcctcgggagagtctacccccggcctccgagcaagacctatcgcggagccttccaaaacctgtttcagtccgttagagaagtgatccagaatcccggccctcggcaccccgaggctgcctctgcggctcctcccggggccagccttctgctcctgcagcaacagcagcagcaacagcagcagcaacagcagcaacagcagcagcaacagcagcagcaacagcaggaaacatcccctcgccagcaacagcagcagcaaggagaggacggctctccgcaggcccatagacgggggcccacgggataccttgtgctggatgaggaacagcaacctagccagccccagtccgctctcgagtgccaccctgaacgcggctgtgtccccgagccgggcgccgctgtggccgcgtctaaagggctgcctcagcaactgcccgcccctcccgacgaagatgacagcgctgccccctccaccctcagcctgcttggacctacattcccgggcctgtcttcctgcagcgctgatctcaaggacattctgtctgaggcctccaccatgcagcttctgcagcagcaacagcaggaggcggttagcgaagggtcttccagcggcagagcccgggaggcttccggagcccccacatctagcaaagataactatctcgggggaacctccacaatcagcgacaatgctaaggaactgtgtaaagccgtgtctgtctccatgggcctgggcgtggaggccctcgaacatctgagccctggggagcagcttcgcggagattgcatgtacgctcccctgctcggcgttcctcccgcggtgagaccgaccccttgtgctcccctggctgagtgcaaggggtctcttctggacgatagcgccggaaagtccacggaagacaccgccgagtattctccttttaaaggcgggtacacaaagggactcgaaggcgagagcctgggctgttccgggagcgctgccgcgggatcttccggcaccctggaactccccagcacactgtctctttataaatccggggctctggatgaggccgccgcttaccaaagccgggactactataacttccctctcgccctggctggacccccgcctccccctcccccgccccaccctcatgcccgcattaaacttgagaatcccctggactacggctccgcgtgggccgctgccgctgcccagtgcagatatggggatctcgcgtctctgcacggcgccggagctgccggccctgggagcggatccccctctgctgccgccagctccagctggcacaccctgtttacggctgaagagggccagctctacgggccttgtggaggcgggggcggaggcgggggaggcgggggaggcgggggcggaggcgggggaggcgggggaggcggggaagcgggcgccgtcgctccctatggatacacacggccgcctcaaggcctggccgggcaggagtctgacttcaccgcccccgatgtgtggtatcctggaggcatggtgtcccgcgtcccctacccgagccctacatgcgttaaatctgaaatggggccctggatggactcctacagcggaccttatggcgatatgagacttgagaccgctcgggaccatgtgctgcccatcgattactattttccccctcagaagacctgtctcatttgcggcgacgaggcctctgggtgccactacggagcgctgacatgtggcagctgcaaggtgttctttaaaagagctgccgaagggaagcagaaatatctgtgtgcctcccgcaacgattgcacgatcgacaagttccggagaaagaattgtccgagctgccgccttcggaagtgttacgaggctggaatgaccctcggcgccagaaaactgaagaagctggggaacctcaaactgcaagaagagggagaggcgtcttccacaaccagccccacagaagagaccacgcagaaacttacagtctcccatatcgaaggctatgagtgccagcctatttttctgaatgtgctcgaagctatcgagcccggcgttgtgtgtgccgggcacgataacaatcagcctgactctttcgccgctctgctgagctcccttaacgagctcggagaacgccaactggtccacgtggttaagtgggccaaggctctgcccggctttcggaatctccatgtggacgatcagatggccgtcattcagtactcttggatggggctgatggtgttcgcgatgggatggcgcagcttcaccaacgtcaattccagaatgctttactttgcccctgacctggtgttcaacgagtatcggatgcacaaatctagaatgtacagccagtgcgttcgcatgcggcatctctcccaagaatttggctggctgcagatcaccccgcaggagttcctgtgtatgaaggcccttctcctgtttagcattatccccgtggatgggctgaagaaccagaaattctttgacgaactcagaatgaattatattaaggagctggatcggatcatcgcctgcaaacgcaagaaccctacatcttgctccagacggttctaccaacttaccaaactgctcgacagcgtccagcccattgctagagagctgcaccagtttacattcgatctgcttatcaagtctcatatggtgtccgttgactttcctgaaatgatggccgagattatcagcgtgcaagtccccaagattctctctggaaaagtgaagccgatctatttccacacgcagtga

SEQ ID NO: 3037 - RNA, 1239 nt, synthetic construct
  misc_feature 1..1239: note = AAH64630 variant
  source 1..1239: mol_type = other RNA
atggcccccgtggagcacgtcgttgctgacgccggcgcgttcctgagacatgctgccctccaggatatcgggaagaacatttacaccatccgggaagtggtgacagagattcgcgacaaagccacgagacggcgcctggctgtccttccttatgaactgagatttaaggagccgctccccgaatacgtgcggctggttaccgagttcagcaaaaagacaggagattatccttccctttctgccaccgacatccaagtgctggctctcacataccagctggaggccgaatttgtcggcgtgagccacctgaaacaggagccccagaaggttaaggtgtcctctagcattcaacatcctgaaacacccctccacatctccgggttccatctgccttataaaccgaagccccctcaggagaccgagaaaggacactctgcgtgcgaacccgagaatcttgaatttagctccttcatgttttggcgcaaccctctgcccaatatcgatcacgagctccaggaactgcttattgacagaggcgaggatgtcccgagcgaggaagaggaagaggaagagaacgggttcgaggaccggaaggatgactctgatgacgatggaggcggctggatcaccccttccaatattaaacagatccaacaggaactggagcagtgtgacgtgcccgaagacgtgcgcgtcgggtgcctcacgaccgattttgccatgcagaacgttctgctgcaaatgggactccatgtgctggctgtgaatggcatgcttattagagaggcccggagctacatcctgcgctgtcacgggtgcttcaagacaacctctgacatgtccagagtcttttgtagccattgcggaaacaagacactcaaaaaggtgtctgttaccgtgtccgatgacggcacgctgcacatgcacttcagccggaatcctaaagtccttaacccccgcgggctgagatattccctccccacacctaagggaggcaaatacgctattaatccgcatctgaccgaagatcagcggtttccccagctgagactctctcaaaaggcccgccagaaaacaaacgtgttcgcgcctgactacatcgccggcgttagccccttcgtggagaatgatatctccagccggtctgctaccctgcaggtcagagactccacccttggggccggacgccggagactgaaccctaatgctagccgcaagaagtttgtgaaaaagcggtga

SEQ ID NO: 3038 - RNA, 984 nt, synthetic construct
  misc_feature 1..984: note = AAH69102 variant
  source 1..984: mol_type = other RNA
atgcagatgcccgccatgatgagcctgctcctggtgtccgtcggccttatggaggctctgcaagcccagtctcaccctatcaccagacgggacctcttcagccaggaaattcagctggatatggcgcttgcttcctttgacgatcaatacgccgggtgcgccgctgccatgacagctgccctgccggacctcaaccatacggagttccaggcgaatcaggtttatgccgattcttggaccctggctagctcccagtggcaagaacgccaggccagatggcccgagtggtctctgagccctacacggccctcccctccccctctcggatttcgcgacgaacacggcgtggctctgcttgcctacaccgcgaacagcccgctgcataaggagttcaatgccgctgtgagagaggccgggcggtctcgcgctcactatctccatcacttttccttcaaaacactgcactttcttctgaccgaagccctccagctgctgggaagcggccagagaccccctcggtgtcatcaagtcttccgcggggtgcacggactcagatttcggcccgccggccctcgcgctacagttagactgggcgggttcgcgtctgcctcccttaagcatgtggctgcccagcagtttggagaggataccttctttggcatctggacgtgcctgggggcccccattaaaggatacagcttcttcccgggcgaagaggaggtcctcatccctccctttgaaaccttccaagtgattaacgcttctcggctggcccaggggcctgcgcgcatctatcttagagctctgggaaagcactccacatacaattgtgagtatatcaaagacaagaagtgcaaaagcggcccctgtcacctcgataactccgccatgggccagtctcccctgagcgccgtttggtccctgctcctgcttctgtggtttctcgtggtccgggctttccctgacgggccgggactgctttga

SEQ ID NO: 3039 - RNA, 1035 nt, synthetic construct
  misc_feature 1..1035: note = AAH09751 variant
  source 1..1035: mol_type = other RNA
atggcccagaaggagaacagctacccctggccttatggcagacaaaccgctccgtccgggctgtctacactcccccagcgggtgctgcgcaaagaacctgtcacgcccagcgcccttgttctgatgtccagatctaatgtgcagcctaccgcggctcccggacagaaggtgatggagaacagctccggcacacctgacatcctcacccggcacttcacaattgatgactttgaaatcgggcgcccgctgggaaaaggcaagttcgggaatgtctaccttgccagagagaaaaagtctcattttattgtggccctgaaggttctcttcaaaagccaaatcgaaaaggagggagtggagcaccagctgcggcgcgaaattgagatccaggctcatctgcaccatcccaacatcctcagactgtataattacttttatgatcggcgcagaatttaccttatcctggaatatgcccctcggggcgagctctacaaagagctgcagaagtcctgcaccttcgacgaacaacgcacagctaccattatggaggaacttgccgatgcgctgatgtactgtcacggcaaaaaggtcatccacagagacattaagcccgagaacctcctgctggggctcaaaggagaactgaagatcgccgattttggctggagcgtgcatgctccttctcttcggcgcaaaacgatgtgcgggaccctggactatctgcccccggagatgattgagggaagaatgcacaatgaaaaggttgatctctggtgtatcggcgtgctttgctacgagctgctcgtcgggaaccctcccttcgaatccgccagccataatgagacatatcggagaatcgtgaaagtggacctgaagtttcctgcttctgtccccatgggagcccaggatctgatttccaaactcctgcgccacaaccccagcgaacggcttcctctggcgcaggtttctgcccacccgtgggtgagagctaattcccgccgggtgctgccccctagcgccctccagtccgtcgcttga

SEQ ID NO: 3040 - RNA, 360 nt, synthetic construct
  misc_feature 1..360: note = AAD48083 variant
  source 1..360: mol_type = other RNA
atgagcagatccgtggccctggctgtcctcgccctgctttctctgagcggcctcgaggcgatccagcggacccccaagattcaagtttactcccgccaccctgctgaaaacgggaaatctaatttcctgaactgctatgtgagcggatttcatccgtccgacatcgaggtggatcttctgaagaatggcgaaagaattgagaaagtcgaacactctgacctcagcttctccaaggattggagcttttacctgctgtattacacagagttcacgcccaccgagaaagacgaatatgcctgtcgggtgaaccatgttacactctctcagcctaagatcgtgaagtgggatcgcgacatgtga

SEQ ID NO: 3041 - RNA, 1137 nt, synthetic construct
  misc_feature 1..1137: note = AAH28058 variant
  source 1..1137: mol_type = other RNA
atgagaatgctggtgagcggccggcgcgtcaagaaatggcagctcatcattcaactgttcgctacctgctttcttgcctccctgatgttcttttgggagcccatcgacaaccacattgtttctcatatgaaaagctactcctatagatacctcatcaattcttatgatttcgtgaacgacacactgagccttaagcacacgtccgccgggcctcggtaccagtatctgattaatcataaggaaaaatgtcaggcgcaggatgtgctcctgctgctctttgtcaagaccgctccggagaactacgaccgcagatctggaatccggcgcacatggggcaatgaaaactatgtgagaagccaactgaatgccaacatcaagacccttttcgccctggggacacccaatcctctcgagggagaggaactgcagcggaaacttgcttgggaggatcagcgctacaacgacattatccagcaagattttgttgactccttctacaatctgaccctcaagctgctgatgcagtttagctgggccaacacatattgcccccacgctaaattcctcatgaccgccgatgacgatatttttatccatatgcctaatctgattgaataccttcagtctctggagcagatcggcgtgcaagacttctggattgggagagtccaccggggagcgccccctatccgcgataagtccagcaaatattacgtgtcttatgaaatgtaccagtggccggcctatcccgactacacggctggcgccgcttacgttatctccggcgacgtggccgcgaaggtctatgaggccagccagaccctcaactcttccctgtacattgatgacgtgtttatggggctttgtgctaataagatcggaattgtgcctcaagatcacgtcttcttcagcggcgaggggaaaacaccctatcatccttgcatctacgaaaagatgatgacctcccacggacatctggaggacctccaggatctgtggaaaaacgccacagaccccaaggttaaaaccatttctaagggctttttcgggcagatctattgtagactgatgaaaatcattctcctgtgcaagatcagctacgtggatacgtatccgtgtcgggctgcctttatttga

SEQ ID NO: 3042 - RNA, 1602 nt, synthetic construct
  misc_feature 1..1602: note = AAA35516 variant
  source 1..1602: mol_type = other RNA
atgtggctgggcagacgggccctctgcgctctggtgcttctgctcgcctgtgcgagcctggggcttctgtacgcttccacccgcgacgcccccggactcagactgcctctggccccgtgggctccccctcagtctccccggcgccctgagctccccgatctggcccctgaaccgagatatgctcacatccccgtccggattaaggagcaagttgtgggccttctggcctggaacaattgcagctgtgaatcctctgggggaggcctccctctgcccttccagaaacaggtgcgcgcgatcgaccttacaaaggcctttgatcctgctgagctgagagccgctagcgccacgcgggaacaggagttccaagcgtttctctcccgctctcagagccccgccgaccagctgctgattgctccggccaactcccctctccagtaccccctgcaaggggtcgaggtgcagcctcttagaagcatcctggttcccggactctctctgcaggctgcctccggccaggaagtgtatcaagtcaatcttaccgccagcctgggcacatgggatgtggctggggaggttaccggagtgacactcaccggcgaagggcaggcggacctgacactggtctctcccggactcgatcagctgaaccggcaacttcagctggtgacctactccagccgctcttatcagacgaataccgccgacacagtgagattctccaccgagggccatgaggctgcctttacaattcggatccgccaccctccgaaccccagactctaccctcccgggagcctgcctcagggagcccaatataatatctccgctcttgtcaccattgccacgaaaacattcctgcggtacgatagactccgcgcgctgatcacctctattcggagattttaccccacagttaccgtggtgatcgctgacgatagcgacaagccggaacgcgtctccggcccttatgtggagcattacctgatgcccttcggcaaagggtggtttgccggacggaacctcgccgttagccaggtgaccacaaagtatgtcctgtgggtggatgacgacttcgtttttacggctagaacccgccttgaacggctggtggatgtcctcgagagaacacctctggacctggtgggcggggccgtccgcgaaatttctggattcgctaccacataccggcagcttctctccgtggagcccggcgcccctgggctgggaaattgcctgagacagcgccggggctttcaccatgagctcgttggcttccccgggtgtgtggtcaccgatggagtggttaacttctttctggcgagaacggacaaggtgcgggaagtcggcttcgatccgcgccttagcagagtggcccacctggagtttttcctcgacgggctgggatctctgcgggtgggcagctgctccgatgttgtcgtggaccacgcttctaaacttaagctcccttggacaagcagagatgccggggctgaaacctatgcccgctaccggtatcccggctccctggacgagagccaaatggcgaaacatagactgctctttttcaagcaccgcctgcagtgtatgacctctcagtga

SEQ ID NO: 3043 - RNA, 849 nt, synthetic construct
  misc_feature 1..849: note = AAH74729 variant
  source 1..849: mol_type = other RNA
atggccagcctgggccagatcctcttctggtccattatctctattatcattatcctggctggggccatcgcgcttattatcggatttggcattagcgggagacactccatcaccgtgacaacggtcgcttctgccggaaacattggcgaggacgggatcctgagctgcaccttcgaacccgatattaagctctccgacatcgttatccaatggctgaaagagggagtgcttggcctggtgcacgaatttaaggagggcaaagatgaactctctgagcaggacgagatgttccgggggcgcacagccgtctttgctgatcaggtgattgttggaaatgccagcctgagactgaagaacgtgcagctcaccgacgctggcacatacaaatgttatatcattacctccaaggggaagggaaatgccaacctggaatacaaaacaggcgcgttcagcatgcctgaggtcaatgtggattataacgcctcttccgaaacccttcggtgcgaggctccgcgctggtttccccaacctacggttgtgtgggccagccaggtcgaccagggggctaatttctctgaggtgtccaacaccagctttgaactcaattctgagaacgtgacaatgaaggtcgtttccgtgctgtacaatgtgaccatcaacaatacatatagctgtatgattgaaaacgatatcgccaaagcgaccggagacatcaaggtcacggagtccgaaattaaaagacggtctcatctgcagcttctgaatagcaaggcctccctctgcgtgagctctttctttgctatctcctgggccctgctgcccctcagcccttacctgatgcttaagtga

SEQ ID NO: 3044 - RNA, 132 nt, synthetic construct
  misc_feature 1..132: note = AAC50123 variant
  source 1..132: mol_type = other RNA
atggccgctagagccgtgttcctggcgctcagcgctcagctgcttcaagcccggctgatgaaggaggaatcccccgtcgtttcttggcgcctcgagcctgaagacggcaccgccctgtgctttatcttctga

SEQ ID NO: 3045 - RNA, 1158 nt, synthetic construct
  misc_feature 1..1158: note = AAN40694 variant
  source 1..1158: mol_type = other RNA
atggccgctgccctgttcgtgctcctgggctttgcgcttctggggacccacggagctagcggcgccgccgggttcgtccaggctcccctctcccaacagagatgggttggaggctctgtggagctgcattgcgaagccgtggggagccctgtcccggagatccagtggtggtttgaaggacagggccccaacgacacatgttcccaactttgggatggcgctcggctggaccgcgtgcacattcatgccacgtaccaccagcatgcggcctctaccatcagcattgatacactcgttgaggaagacaccgggacatatgagtgcagagcttccaatgatcctgaccggaaccacctgacccgcgcccccagagtgaagtgggtccgggctcaggccgtggttctggtgctcgagcctggaacagtcttcaccacggtggaagatctgggctctaaaatccttctgacctgtagcctcaatgactccgcgacagaggtgaccgggcaccgctggctgaagggaggcgtcgttcttaaagaagatgccctgcccgggcagaagacagagtttaaagtggacagcgatgaccaatggggagagtactcttgcgtgttcctccctgaaccgatgggcaccgctaacattcagctgcatgggccccctagagtcaaggccgtgaagtccagcgagcacatcaatgaaggcgagacggctatgctggtttgtaaatctgaatccgtgccccctgtcacagattgggcctggtataagatcaccgacagcgaggacaaagccctcatgaacggatctgagtcccggtttttcgtgagctcctctcagggccgcagcgaactgcatattgagaatcttaacatggaagctgatcccgggcagtacagatgcaatggaacatccagcaagggctctgaccaagcgatcattaccctgcgggttcgctcccacctcgccgctctgtggccgtttcttgggatcgtggccgaggtcctggtgctcgtcaccattatcttcatttatgagaaaagacggaagcctgaagatgtgctggacgatgacgatgccggaagcgctcccctgaagtctagcggccagcaccagaacgacaaaggcaagaatgttcgccaaagaaactcctcttga

SEQ ID NO: 3046 - RNA, 720 nt, synthetic construct
  misc_feature 1..720: note = ABX60202 variant
  source 1..720: mol_type = other RNA
atggcccacgctggcagaaccgggtacgacaaccgggagatcgtgatgaagtatattcattacaaactgagccagcgcggatatgaatgggatgccggcgacgtcggggcggctccccctggagccgccccggctcccggcatcttctcctctcaacctgggcacacaccccatcctgccgctagcagagatcccgttgcccggacgtcccctctccagaccccggcggcccccggagctgccgctggccctgccctgtctcccgtgcctcccgtggtccaccttacactgcgccaggcgggcgacgattttagcagacggtaccgcagagacttcgccgagatgtcctctcagctccatctgaccccgtttacagctcgggggcgcttcgccaccgtggttgaagaactttttagagatggagtgaattggggccggattgtcgctttctttgagttcgggggagtgatgtgcgttgagagcgtgaaccgcgagatgtcccctctggtcgacaatatcgccctctggatgacagaatatctgaacagacatctgcacacctggattcaagataatggcgggtgggacgcctttgtggagctctacggacccagcatgcggcctctgttcgatttttcttggctttccctgaagacgctcctgagccttgctctggtgggcgcgtgtatcaccctcggcgcctatctgtctcacaaatga

SEQ ID NO: 3047 - RNA, 1290 nt, synthetic construct
  misc_feature 1..1290: note = ABX82700 variant
  source 1..1290: mol_type = other RNA
atggtggaccccgtcggcttcgccgaggcttggaaggcccagtttcctgatagcgaaccgcccagaatggagctgcggtccgttggggacatcgaacaagagctcgaacgctgcaaagcgtctattagacggctggagcaggaggtgaaccaggaacgcttcagaatgatctaccttcagaccctgctcgctaaggagaaaaagagctatgatcggcaacgctggggatttagacgggccgcccaggctcctgacggcgcctccgaaccccgcgcttctgccagcagacctcagcccgcgcctgccgatggggctgacccgccccctgccgaggagcccgaagctcggcctgatggagagggctcccccgggaaagcccgcccgggaacagcgagacggcctggcgccgctgcctctggcgaacgcgacgatagagggccccctgctagcgtggccgccctgcggtccaatttcgagcgcattagaaagggacacggccagcccggggctgacgcggaaaagcccttttacgtcaacgtggagttccatcacgagcggggacttgttaaagtgaatgataaggaagtcagcgacagaatctcttccctgggcagccaagccatgcagatggagcgcaaaaagtctcagcatggggctggatccagcgtgggcgatgcctctcggcctccgtatagaggccgctccagcgaatcctcttgtggggttgacggagactacgaggatgccgaactcaacccccggtttctgaaagacaatctgattgatgctaacggcgggagcagacctccctggcctcccctcgagtatcagccgtaccaatccatctatgtgggaggcatgatggagggggaaggaaagggccctctgcttcgcagccagtctacgtccgagcaggaaaagcggctgacctggcccagacgcagctactctcctcggagcttcgaggactgcggcgggggatacacacccgattgttcctctaatgaaaacctcaccagctccgaggaggactttagctctggccaatccagcagagtctctccttcccccacaacctatcggatgttccgcgataaaagcagatccccgtctcagaatagccagcagtcctttgactctagctcccctcccacaccccaatgccacaagcggcatagacactgtcctgtggtggtcagcgaagccaccatcgttggggtgcgcaaaacgggacagatttggccgaacgatggcgagggggcgttccacggcgacgctgatggaggctga

SEQ ID NO: 3048 - RNA, 1665 nt, synthetic construct
  misc_feature 1..1665: note = ABX82703 variant
  source 1..1665: mol_type = other RNA
atggtggaccccgtcggcttcgccgaggcttggaaggcccagtttcctgatagcgaaccgcccagaatggagctgcggtccgttggggacatcgaacaagagctcgaacgctgcaaagcgtctattagacggctggagcaggaggtgaaccaggaacgcttcagaatgatctaccttcagaccctgctcgctaaggagaaaaagagctatgatcggcaacgctggggatttagacgggccgcccaggctcctgacggcgcctccgaaccccgcgcttctgccagcagacctcagcccgcgcctgccgatggggctgacccgccccctgccgaggagcccgaagctcggcctgatggagagggctcccccgggaaagcccgcccgggaacagcgagacggcctggcgccgctgcctctggcgaacgcgacgatagagggccccctgctagcgtggccgccctgcggtccaatttcgagcgcattagaaagggacacggccagcccggggctgacgcggaaaagcccttttacgtcaacgtggagttccatcacgagcggggacttgttaaagtgaatgataaggaagtcagcgacagaatctcttccctgggcagccaagccatgcagatggagcgcaaaaagtctcagcatggggctggatccagcgtgggcgatgcctctcggcctccgtatagaggccgctccagcgaatcctcttgtggggttgacggagactacgaggatgccgaactcaacccccggtttctgaaagacaatctgattgatgctaacggcgggagcagacctccctggcctcccctcgagtatcagccgtaccaatccatctatgtgggaggcatgatggagggggaaggaaagggccctctgcttcgcagccagtctacgtccgagcaggaaaagcggctgacctggcccagacgcagctactctcctcggagcttcgaggactgcggcgggggatacacacccgattgttcctctaatgaaaacctcaccagctccgaggaggactttagctctggccaatccagcagagtctctccttcccccacaacctatcggatgttccgcgataaaagcagatccccgtctcagaatagccagcagtcctttgactctagctcccctcccacaccccaatgccacaagcggcatagacactgtcctgtggtggtcagcgaagccaccatcgttggggtgcgcaaaacgggacagatttggccgaacgatggcgagggggcgttccacggcgacgctgatggatcttttggcacaccccctgggtacggatgcgccgccgaccgggctgaggaacagagacgccatcaggacggcctgccctatatcgatgactcccctagctctagcccccacctttcctctaaggggagaggaagccgggatgccctggtgtccggcgctctcgagagcaccaaagcctctgaactggacctggagaaggggctcgaaatgcgcaaatgggtcctgtccggcattcttgcgagcgaggaaacctacctgtcccatctcgaggccctgcttctgcctatgaagcccctcaaggctgccgctacaacctctcaaccggtgctgacgagccagcagatcgagacaattttcttcaaagttcctgatctgctctga

SEQ ID NO: 3049 - RNA, 1545 nt, synthetic construct
  misc_feature 1..1545: note = ABX82704 variant
  source 1..1545: mol_type = other RNA
atggtggaccccgtcggcttcgccgaggcttggaaggcccagtttcctgatagcgaaccgcccagaatggagctgcggtccgttggggacatcgaacaagagctcgaacgctgcaaagcgtctattagacggctggagcaggaggtgaaccaggaacgcttcagaatgatctaccttcagaccctgctcgctaaggagaaaaagagctatgatcggcaacgctggggatttagacgggccgcccaggctcctgacggcgcctccgaaccccgcgcttctgccagcagacctcagcccgcgcctgccgatggggctgacccgccccctgccgaggagcccgaagctcggcctgatggagagggctcccccgggaaagcccgcccgggaacagcgagacggcctggcgccgctgcctctggcgaacgcgacgatagagggccccctgctagcgtggccgccctgcggtccaatttcgagcgcattagaaagggacacggccagcccggggctgacgcggaaaagcccttttacgtcaacgtggagttccatcacgagcggggacttgttaaagtgaatgataaggaagtcagcgacagaatctcttccctgggcagccaagccatgcagatggagcgcaaaaagtctcagcatggggctggatccagcgtgggcgatgcctctcggcctccgtatagaggccgctccagcgaatcctcttgtggggttgacggagactacgaggatgccgaactcaacccccggtttctgaaagacaatctgattgatgctaacggcgggagcagacctccctggcctcccctcgagtatcagccgtaccaatccatctatgtgggaggcatgatggagggggaaggaaagggccctctgcttcgcagccagtctacgtccgagcaggaaaagcggctgacctggcccagacgcagctactctcctcggagcttcgaggactgcggcgggggatacacacccgattgttcctctaatgaaaacctcaccagctccgaggaggactttagctctggccaatccagcagagtctctccttcccccacaacctatcggatgttccgcgataaaagcagatccccgtctcagaatagccagcagtcctttgactctagctcccctcccacaccccaatgccacaagcggcatagacactgtcctgtggtggtcagcgaagccaccatcgttggggtgcgcaaaacgggacagatttggccgaacgatggcgagggggcgttccacggcgacgctgatggatcttttggcacaccccctgggtacggatgcgccgccgaccgggctgaggaacagagacgccatcaggacggcctgccctatatcgatgactcccctagctctagcccccacctttcctctaaggggagaggaagccgggatgccctggtgtccggcgctctcgagagcaccaaagcctctgaactggacctggagaaggggctcgaaatgcgcaaatgggtcctgtccggcattcttgcgagcgaggaaatcaccctgtga

SEQ ID NO: 3050 - RNA, 1326 nt, synthetic construct
  misc_feature 1..1326: note = ABX82705 variant
  source 1..1326: mol_type = other RNA
atggtggaccccgtcggcttcgccgaggcttggaaggcccagtttcctgatagcgaaccgcccagaatggagctgcggtccgttggggacatcgaacaagagctcgaacgctgcaaagcgtctattagacggctggagcaggaggtgaaccaggaacgcttcagaatgatctaccttcagaccctgctcgctaaggagaaaaagagctatgatcggcaacgctggggatttagacgggccgcccaggctcctgacggcgcctccgaaccccgcgcttctgccagcagacctcagcccgcgcctgccgatggggctgacccgccccctgccgaggagcccgaagctcggcctgatggagagggctcccccgggaaagcccgcccgggaacagcgagacggcctggcgccgctgcctctggcgaacgcgacgatagagggccccctgctagcgtggccgccctgcggtccaatttcgagcgcattagaaagggacacggccagcccggggctgacgcggaaaagcccttttacgtcaacgtggagttccatcacgagcggggacttgttaaagtgaatgataaggaagtcagcgacagaatctcttccctgggcagccaagccatgcagatggagcgcaaaaagtctcagcatggggctggatccagcgtgggcgatgcctctcggcctccgtatagaggccgctccagcgaatcctcttgtggggttgacggagactacgaggatgccgaactcaacccccggtttctgaaagacaatctgattgatgctaacggcgggagcagacctccctggcctcccctcgagtatcagccgtaccaatccatctatgtgggaggcatgatggagggggaaggaaagggccctctgcttcgcagccagtctacgtccgagcaggaaaagcggctgacctggcccagacgcagctactctcctcggagcttcgaggactgcggcgggggatacacacccgattgttcctctaatgaaaacctcaccagctccgaggaggactttagctctggccaatccagcagagtctctccttcccccacaacctatcggatgttccgcgataaaagcagatccccgtctcagaatagccagcagtcctttgactctagctcccctcccacaccccaatgccacaagcggcatagacactgtcctgtggtggtcagcgaagccaccatcgttggggtgcgcaaaacgggacagatttggccgaacgatggcgagggggcgttccacggcgacgctgatggatctctggaacttcagggcaagccctcccggtggacccagtga

SEQ ID NO: 3051 - RNA, 1575 nt, synthetic construct
  misc_feature 1..1575: note = ABX82706 variant
  source 1..1575: mol_type = other RNA
atggtggaccccgtcggcttcgccgaggcttggaaggcccagtttcctgatagcgaaccgcccagaatggagctgcggtccgttggggacatcgaacaagagctcgaacgctgcaaagcgtctattagacggctggagcaggaggtgaaccaggaacgcttcagaatgatctaccttcagaccctgctcgctaaggagaaaaagagctatgatcggcaacgctggggatttagacgggccgcccaggctcctgacggcgcctccgaaccccgcgcttctgccagcagacctcagcccgcgcctgccgatggggctgacccgccccctgccgaggagcccgaagctcggcctgatggagagggctcccccgggaaagcccgcccgggaacagcgagacggcctggcgccgctgcctctggcgaacgcgacgatagagggccccctgctagcgtggccgccctgcggtccaatttcgagcgcattagaaagggacacggccagcccggggctgacgcggaaaagcccttttacgtcaacgtggagttccatcacgagcggggacttgttaaagtgaatgataaggaagtcagcgacagaatctcttccctgggcagccaagccatgcagatggagcgcaaaaagtctcagcatggggctggatccagcgtgggcgatgcctctcggcctccgtatagaggccgctccagcgaatcctcttgtggggttgacggagactacgaggatgccgaactcaacccccggtttctgaaagacaatctgattgatgctaacggcgggagcagacctccctggcctcccctcgagtatcagccgtaccaatccatctatgtgggaggcatgatggagggggaaggaaagggccctctgcttcgcagccagtctacgtccgagcaggaaaagcggctgacctggcccagacgcagctactctcctcggagcttcgaggactgcggcgggggatacacacccgattgttcctctaatgaaaacctcaccagctccgaggaggactttagctctggccaatccagcagagtctctccttcccccacaacctatcggatgttccgcgataaaagcagatccccgtctcagaatagccagcagtcctttgactctagctcccctcccacaccccaatgccacaagcggcatagacactgtcctgtggtggtcagcgaagccaccatcgttggggtgcgcaaaacgggacagatttggccgaacgatggcgagggggcgttccacggcgacgctgatggatcttttggcacaccccctgggtacggatgcgccgccgaccgggctgaggaacagagacgccatcaggacggcctgccctatatcgatgactcccctagctctagcccccacctttcctctaaggggagaggaagccgggatgccctggtgtccggcgctctcgagagcaccaaagcctctgaactggacctggagaaggggctcgaaatgcgcaaatgggatcctgtcaagatgacccccacattctccctgcattgtatgattctttggccggtggagatcaccctgtga

SEQ ID NO: 3052 - RNA, 1398 nt, synthetic construct
  misc_feature 1..1398: note = ABX82707 variant
  source 1..1398: mol_type = other RNA
atggtggaccccgtcggcttcgccgaggcttggaaggcccagtttcctgatagcgaaccgcccagaatggagctgcggtccgttggggacatcgaacaagagctcgaacgctgcaaagcgtctattagacggctggagcaggaggtgaaccaggaacgcttcagaatgatctaccttcagaccctgctcgctaaggagaaaaagagctatgatcggcaacgctggggatttagacgggccgcccaggctcctgacggcgcctccgaaccccgcgcttctgccagcagacctcagcccgcgcctgccgatggggctgacccgccccctgccgaggagcccgaagctcggcctgatggagagggctcccccgggaaagcccgcccgggaacagcgagacggcctggcgccgctgcctctggcgaacgcgacgatagagggccccctgctagcgtggccgccctgcggtccaatttcgagcgcattagaaagggacacggccagcccggggctgacgcggaaaagcccttttacgtcaacgtggagttccatcacgagcggggacttgttaaagtgaatgataaggaagtcagcgacagaatctcttccctgggcagccaagccatgcagatggagcgcaaaaagtctcagcatggggctggatccagcgtgggcgatgcctctcggcctccgtatagaggccgctccagcgaatcctcttgtggggttgacggagactacgaggatgccgaactcaacccccggtttctgaaagacaatctgattgatgctaacggcgggagcagacctccctggcctcccctcgagtatcagccgtaccaatccatctatgtgggaggcatgatggagggggaaggaaagggccctctgcttcgcagccagtctacgtccgagcaggaaaagcggctgacctggcccagacgcagctactctcctcggagcttcgaggactgcggcgggggatacacacccgattgttcctctaatgaaaacctcaccagctccgaggaggactttagctctggccaatccagcagagtctctccttcccccacaacctatcggatgttccgcgataaaagcagatccccgtctcagaatagccagcagtcctttgactctagctcccctcccacaccccaatgccacaagcggcatagacactgtcctgtggtggtcagcgaagccaccatcgttggggtgcgcaaaacgggacagatttggccgaacgatggcgagggggcgttccacggcgaacatcccggagctgccgaggaggtgtttcagaagctgcttcctgacatccggggcgccgctgatgccgaccagctggtctgcgaaacccccgactgtcctcaacactctgctgatcatcagtga

SEQ ID NO: 3053 - RNA, 1377 nt, synthetic construct
  misc_feature 1..1377: note = ABX82709 variant
  source 1..1377: mol_type = other RNA
atggtggaccccgtcggcttcgccgaggcttggaaggcccagtttcctgatagcgaaccgcccagaatggagctgcggtccgttggggacatcgaacaagagctcgaacgctgcaaagcgtctattagacggctggagcaggaggtgaaccaggaacgcttcagaatgatctaccttcagaccctgctcgctaaggagaaaaagagctatgatcggcaacgctggggatttagacgggccgcccaggctcctgacggcgcctccgaaccccgcgcttctgccagcagacctcagcccgcgcctgccgatggggctgacccgccccctgccgaggagcccgaagctcggcctgatggagagggctcccccgggaaagcccgcccgggaacagcgagacggcctggcgccgctgcctctggcgaacgcgacgatagagggccccctgctagcgtggccgccctgcggtccaatttcgagcgcattagaaagggacacggccagcccggggctgacgcggaaaagcccttttacgtcaacgtggagttccatcacgagcggggacttgttaaagtgaatgataaggaagtcagcgacagaatctcttccctgggcagccaagccatgcagatggagcgcaaaaagtctcagcatggggctggatccagcgtgggcgatgcctctcggcctccgtatagaggccgctccagcgaatcctcttgtggggttgacggagactacgaggatgccgaactcaacccccggtttctgaaagacaatctgattgatgctaacggcgggagcagacctccctggcctcccctcgagtatcagccgtaccaatccatctatgtgggaggcatgatggagggggaaggaaagggccctctgcttcgcagccagtctacgtccgagcaggaaaagcggctgacctggcccagacgcagctactctcctcggagcttcgaggactgcggcgggggatacacacccgattgttcctctaatgaaaacctcaccagctccgaggaggactttagctctggccaatccagcagagtctctccttcccccacaacctatcggatgttccgcgataaaagcagatccccgtctcagaatagccagcagtcctttgactctagctcccctcccacaccccaatgccacaagcggcatagacactgtcctgtggtggtcagcgaagccaccatcgttggggtgcgcaaaacgggacagatttggccgaacgatggcgagggggcgttccacggcgacgctgatggatcttttggcacaccccctgggtactgctgtctgtgccttcccgcctggccttccggatgtaccgccgctaccgcccgggtgacaagaagctga

SEQ ID NO: 3054 - RNA, 1365 nt, synthetic construct
  misc_feature 1..1365: note = ABX82710 variant
  source 1..1365: mol_type = other RNA
atggtggaccccgtcggcttcgccgaggcttggaaggcccagtttcctgatagcgaaccgcccagaatggagctgcggtccgttggggacatcgaacaagagctcgaacgctgcaaagcgtctattagacggctggagcaggaggtgaaccaggaacgcttcagaatgatctaccttcagaccctgctcgctaaggagaaaaagagctatgatcggcaacgctggggatttagacgggccgcccaggctcctgacggcgcctccgaaccccgcgcttctgccagcagacctcagcccgcgcctgccgatggggctgacccgccccctgccgaggagcccgaagctcggcctgatggagagggctcccccgggaaagcccgcccgggaacagcgagacggcctggcgccgctgcctctggcgaacgcgacgatagagggccccctgctagcgtggccgccctgcggtccaatttcgagcgcattagaaagggacacggccagcccggggctgacgcggaaaagcccttttacgtcaacgtggagttccatcacgagcggggacttgttaaagtgaatgataaggaagtcagcgacagaatctcttccctgggcagccaagccatgcagatggagcgcaaaaagtctcagcatggggctggatccagcgtgggcgatgcctctcggcctccgtatagaggccgctccagcgaatcctcttgtggggttgacggagactacgaggatgccgaactcaacccccggtttctgaaagacaatctgattgatgctaacggcgggagcagacctccctggcctcccctcgagtatcagccgtaccaatccatctatgtgggaggcatgatggagggggaaggaaagggccctctgcttcgcagccagtctacgtccgagcaggaaaagcggctgacctggcccagacgcagctactctcctcggagcttcgaggactgcggcgggggatacacacccgattgttcctctaatgaaaacctcaccagctccgaggaggactttagctctggccaatccagcagagtctctccttcccccacaacctatcggatgttccgcgataaaagcagatccccgtctcagaatagccagcagtcctttgactctagctcccctcccacaccccaatgccacaagcggcatagacactgtcctgtggtggtcagcgaagccaccatcgttggggtgcgcaaaacgggacagatttggccgaacgatggcgagggggcgttccacggcgacgctgatggatcttttggcacaccccctgggtacggatgcgccgccggccggccccctcatctgaccgaacttcccgtgcagcaccagtga

SEQ ID NO: 3055 - RNA, 1404 nt, synthetic construct
  misc_feature 1..1404: note = ABX82711 variant
  source 1..1404: mol_type = other RNA
atggtggaccccgtcggcttcgccgaggcttggaaggcccagtttcctgatagcgaaccgcccagaatggagctgcggtccgttggggacatcgaacaagagctcgaacgctgcaaagcgtctattagacggctggagcaggaggtgaaccaggaacgcttcagaatgatctaccttcagaccctgctcgctaaggagaaaaagagctatgatcggcaacgctggggatttagacgggccgcccaggctcctgacggcgcctccgaaccccgcgcttctgccagcagacctcagcccgcgcctgccgatggggctgacccgccccctgccgaggagcccgaagctcggcctgatggagagggctcccccgggaaagcccgcccgggaacagcgagacggcctggcgccgctgcctctggcgaacgcgacgatagagggccccctgctagcgtggccgccctgcggtccaatttcgagcgcattagaaagggacacggccagcccggggctgacgcggaaaagcccttttacgtcaacgtggagttccatcacgagcggggacttgttaaagtgaatgataaggaagtcagcgacagaatctcttccctgggcagccaagccatgcagatggagcgcaaaaagtctcagcatggggctggatccagcgtgggcgatgcctctcggcctccgtatagaggccgctccagcgaatcctcttgtggggttgacggagactacgaggatgccgaactcaacccccggtttctgaaagacaatctgattgatgctaacggcgggagcagacctccctggcctcccctcgagtatcagccgtaccaatccatctatgtgggaggcatgatggagggggaaggaaagggccctctgcttcgcagccagtctacgtccgagcaggaaaagcggctgacctggcccagacgcagctactctcctcggagcttcgaggactgcggcgggggatacacacccgattgttcctctaatgaaaacctcaccagctccgaggaggactttagctctggccaatccagcagagtctctccttcccccacaacctatcggatgttccgcgataaaagcagatccccgtctcagaatagccagcagtcctttgactctagctcccctcccacaccccaatgccacaagcggcatagacactgtcctgtggtggtcagcgaagccaccatcgttggggtgcgcaaaacgggacagatttggccgaacgatggcgagggggcgttccacggcgacgctgtgctgaagaccgaagtcccccatcagggagtgcggagagcccgcctttctctggaggccctcggcgaggatccttcctttctgttccccgctagcgacgggcctagacactcttccacatggtga

SEQ ID NO: 3056 - RNA, 1542 nt, synthetic construct
  misc_feature 1..1542: note = ABX82712 variant
  source 1..1542: mol_type = other RNA
atggtggaccccgtcggcttcgccgaggcttggaaggcccagtttcctgatagcgaaccgcccagaatggagctgcggtccgttggggacatcgaacaagagctcgaacgctgcaaagcgtctattagacggctggagcaggaggtgaaccaggaacgcttcagaatgatctaccttcagaccctgctcgctaaggagaaaaagagctatgatcggcaacgctggggatttagacgggccgcccaggctcctgacggcgcctccgaaccccgcgcttctgccagcagacctcagcccgcgcctgccgatggggctgacccgccccctgccgaggagcccgaagctcggcctgatggagagggctcccccgggaaagcccgcccgggaacagcgagacggcctggcgccgctgcctctggcgaacgcgacgatagagggccccctgctagcgtggccgccctgcggtccaatttcgagcgcattagaaagggacacggccagcccggggctgacgcggaaaagcccttttacgtcaacgtggagttccatcacgagcggggacttgttaaagtgaatgataaggaagtcagcgacagaatctcttccctgggcagccaagccatgcagatggagcgcaaaaagtctcagcatggggctggatccagcgtgggcgatgcctctcggcctccgtatagaggccgctccagcgaatcctcttgtggggttgacggagactacgaggatgccgaactcaacccccggtttctgaaagacaatctgattgatgctaacggcgggagcagacctccctggcctcccctcgagtatcagccgtaccaatccatctatgtgggaggcatgatggagggggaaggaaagggccctctgcttcgcagccagtctacgtccgagcaggaaaagcggctgacctggcccagacgcagctactctcctcggagcttcgaggactgcggcgggggatacacacccgattgttcctctaatgaaaacctcaccagctccgaggaggactttagctctggccaatccagcagagtctctccttcccccacaacctatcggatgttccgcgataaaagcagatccccgtctcagaatagccagcagtcctttgactctagctcccctcccacaccccaatgccacaagcggcatagacactgtcctgtggtggtcagcgaagccaccatcgttggggtgcgcaaaacgggacagatttggccgaacgatggcgagggggcgttccacggcgacgctgatggatcttttggcacaccccctgggtacggatgcgccgccgaccgggctgaggaacagagacgccatcaggacggcctgccctatatcgatgactcccctagctctagcccccacctttcctctaaggggagaggaagccgggatgccctggtgtccggcgctctcgagagcaccaaagcctctgaactggaccctgtcaagatgacccccacattctccctgcattgtatgattctctggccggtggagatcaccctgtga

SEQ ID NO: 3057 - RNA, 1221 nt, synthetic construct
  misc_feature 1..1221: note = ABX82714 variant
  source 1..1221: mol_type = other RNA
atggtggaccccgtcggcttcgccgaggcttggaaggcccagtttcctgatagcgaaccgcccagaatggagctgcggtccgttggggacatcgaacaagagctcgaacgctgcaaagcgtctattagacggctggagcaggaggtgaaccaggaacgcttcagaatgatctaccttcagaccctgctcgctaaggagaaaaagagctatgatcggcaacgctggggatttagacgggccgcccaggctcctgacggcgcctccgaaccccgcgcttctgccagcagacctcagcccgcgcctgccgatggggctgacccgccccctgccgaggagcccgaagctcggcctgatggagagggctcccccgggaaagcccgcccgggaacagcgagacggcctggcgccgctgcctctggcgaacgcgacgatagagggccccctgctagcgtggccgccctgcggtccaatttcgagcgcattagaaagggacacggccagcccggggctgacgcggaaaagcccttttacgtcaacgtggagttccatcacgagcggggacttgttaaagtgaatgataaggaagtcagcgacagaatctcttccctgggcagccaagccatgcagatggagcgcaaaaagtctcagcatggggctggatccagcgtgggcgatgcctctcggcctccgtatagaggccgctccagcgaatcctcttgtggggttgacggagactacgaggatgccgaactcaacccccggtttctgaaagacaatctgattgatgctaacggcgggagcagacctccctggcctcccctcgagtatcagccgtaccaatccatctatgtgggaggcatgatggagggggaaggaaagggccctctgcttcgcagccagtctacgtccgagcaggaaaagcggctgacctggcccagacgcagctactctcctcggagcttcgaggactgcggcgggggatacacacccgattgttcctctaatgaaaacctcaccagctccgaggaggactttagctctggccaatccagcagagtctctccttcccccacaacctatcggatgttccgcgataaaagcagatccccgtctcagaatagccagcagtcctttgactctagctcccctcccacaccccaatgccacaagcggcatagacactgtcctgtggtggtcagcgaagccacctctgggcagtga

SEQ ID NO: 3058 - RNA, 2346 nt, synthetic construct
  misc_feature 1..2346: note = AAH58926 variant
  source 1..2346: mol_type = other RNA
atggccacccaggctgacctgatggagctcgatatggccatggaacccgacagaaaggcggctgtgagccactggcaacagcagtcctacctggattctggcatccatagcggggccacaacgaccgccccttccctttctggaaaaggcaacccggaggaagaggacgtcgatacaagccaggttctgtatgaatgggagcaagggttctcccagtcttttacccaggaacaggtggctgacattgatggacaatacgccatgacacgggctcagcgcgtgagagccgcgatgttccccgagaccctcgacgagggcatgcagatccctagcacacagtttgatgccgctcaccccaccaatgtccaacggctggccgaaccttcccagatgcttaagcatgctgtggttaacctgattaattatcaggacgatgccgagctcgcgacgcgcgccatccccgagctgaccaaactgctcaacgacgaagatcaagtggtcgtgaataaggctgccgttatggtgcaccagctgagcaaaaaggaggcttctagacatgccattatgcggtcccctcagatggtcagcgccatcgtgcgcacaatgcagaacaccaatgacgtggaaacagctagatgcaccgcggggacgcttcacaacctgtctcaccatcgggagggactcctggccatcttcaagtccggcggcattccggctcttgtcaaaatgctggggagccccgttgactctgtgctcttttacgccatcacaaccctgcacaatctgctcctgcatcaagaaggagccaagatggctgtgcgccttgccggcgggctgcagaaaatggtcgcgctcctgaacaagacaaatgtgaaattccttgctattaccaccgattgtctgcagatcctcgcctatggaaaccaggagtccaagctgattatcctggccagcggcgggcctcaagctctcgttaatattatgagaacatacacgtatgagaagctgctttggaccacatcccgggtgctgaaagtcctctctgtgtgcagctccaacaagcccgccatcgttgaagctggaggcatgcaggccctgggccttcacctgaccgaccctagccagcgcctcgtgcagaattgtctgtggacactgagaaacctctctgatgcggccaccaaacaagaggggatggaaggactgcttggcacgctggtccagctcctggggtccgacgatatcaacgtggtcacatgcgctgccggcattctgagcaatcttacctgtaacaattacaagaacaaaatgatggtgtgccaggttggagggatcgaggctctcgtgcggaccgtcctgcgcgccggagacagagaagatattacagagcccgcgatctgtgccctgcggcacctcacctctagacatcaggaggctgaaatggcccaaaatgctgtgcgcctgcactacggccttccggttgtggtcaagctgctccatcctcccagccactggcctctgattaaagccacagtgggcctgatccggaaccttgccctctgccccgctaatcatgcgcccctgagagagcagggggccatccctcgcctggtgcagctcctggttcgggctcaccaagacacgcagagacgcacctccatgggaggcacacagcagcaatttgtcgaaggggtgcggatggaggaaattgtggagggatgtaccggcgcccttcacatcctggccagagatgtccataaccgcattgtgatccgggggctcaatacaattccgctgttcgttcagctgctttattctcccatcgagaacatccagagagtggctgccggcgtcctctgcgaactggcgcaggacaaggaggctgccgaagccattgaggctgagggagccaccgcgcctctgacggaactcctgcacagccgcaatgagggcgtggctacctacgccgccgctgttctttttcggatgtccgaagataagccccaagactataaaaagagactgagcgtggagctcacatcttccctgttccggaccgaacctatggcctggaacgagacagctgacctggggcttgatatcggagcccagggcgagcccctcgggtaccgccaggacgatccgagctatagatcttttcattccggaggctacgggcaggacgcgctgggcatggatcctatgatggaacacgagatgggaggccaccatcccggggccgactatcctgtcgatggactgcccgacctcggccacgctcaagatctgatggacgggcttcctcccggagatagcaatcagctggcctggttcgacaccgatctctga

SEQ ID NO: 3059 - RNA, 1692 nt, synthetic construct
  misc_feature 1..1692: note = AAI21007 variant
  source 1..1692: mol_type = other RNA
atggacgtgggcgagctgctcagctaccagcccaacagagggaccaagcggcctcgcgatgacgaagaggaagaacagaaaatgagacggaagcaaacaggaacgcgcgaaagaggccggtatcgcgaggaggaaatgaccgtcgttgaggaagccgatgacgataaaaagagactgcttcagatcattgaccgggatggggaggaggaagaggaagaggaggagccgctggacgagtcctctgtgaaaaagatgatcctcacattcgaaaagcgcagctacaaaaatcaggagctgagaattaagtttcccgataaccctgaaaaattcatggagtccgaacttgacctgaatgatatcattcaagagatgcacgtggtcgctaccatgcccgacctctatcatctgctggtggagctcaacgccgttcagtctctgcttggactgctcggccacgataatacagacgtgagcatcgcggtcgtggacctgcttcaggaactgaccgatatcgacacactccatgagtccgaagagggggctgaagttctgattgatgccctggtggacggacaggtcgtggccctcctggtgcaaaaccttgagcggctggatgagtctgtcaaggaagaggctgacggcgttcacaataccctcgccatcgtggaaaacatggctgagtttcgccctgagatgtgcacggaaggcgcccagcaggggctgcttcagtggctgctcaaaagactgaaggcgaagatgcccttcgatgccaataaactgtactgtagcgaggtgctcgctattctgcttcaagacaacgatgaaaatcgggagctgctcggagaactggacggcatcgatgtccttctgcagcagctctccgtgtttaagcgccataaccctagcaccgccgaggagcaagaaatgatggagaatctgttcgactctctgtgctcctgtctcatgctgagctctaacagagaacggtttcttaaaggggagggactgcagctcatgaatctgatgctgagagaaaagaaaatttcccgcagctctgctcttaaggttctcgaccacgccatgatcggcccggaggggacagataactgccacaaattcgtggacattctgggactgcggaccatctttcccctcttcatgaagtcccctagaaagatcaaaaaggtcggcacaaccgagaaagaacatgaggaacacgtgtgtagcattctggcgtcccttctgcgcaacctccggggccagcagagaacgcgcctgctgaataagtttacagagaacgattctgaaaaagttgaccggcttatggagctccatttcaagtatctgggggccatgcaagtggctgataagaaaatcgagggagaaaagcacgacatggtcagacgcggcgagattatcgataatgacaccgaagaggagttttacctgcggagactcgatgccgggctgttcgtgcttcagcacatttgctatatcatggctgaaatctgtaacgccaatgtcccccagattcgccagcgggtgcatcaaatcctgaacatgagaggaagctccattaaaatcgttcggcacattatcaaggagtacgccgaaaatatcggcgacgggcgcagccctgagttcagagaaaacgagcagaaacggattctcggactgctggagaatttttga

SEQ ID NO: 3060 - RNA, 1833 nt, synthetic construct
  misc_feature 1..1833: note = CCDS4772.1 variant
  source 1..1833: mol_type = other RNA
atggagaccgcccccaagcctggcaaagacgtgccgcccaagaaagataagctgcagacaaaaagaaagaagcctcggcgctactgggaagaggaaacggtccccaccacagctggggccagccctggaccccctagaaacaaaaagaatcgggagctccgcccgcaaagacccaaaaacgcgtatatcctgaagaaatcccggatttctaagaagcctcaggttcccaaaaagcctcgcgaatggaaaaatcccgagagccagagaggcctttccgggacccaggacccgttccctggacccgctcctgtgcccgtggaggtcgtgcaaaagttttgccggatcgataaatctcgcaagctgccccacagcaaagccaagacaagatcccggctcgaagttgccgaggctgaagaggaggaaacctctattaaggccgctcgcagcgagctgcttctggccgaggaacctggcttcctcgaaggggaggacggagaggatacagcgaaaatctgtcaggccgacattgtggaagctgtcgatatcgcctccgctgccaagcattttgacctgaacctgagacagttcggcccgtaccggctcaattatagccgcaccggcagacacctggcgtttgggggacggagaggccatgtggccgctcttgattgggttacgaaaaagctgatgtgcgagatcaacgtgatggaagccgtccgcgacattcggttcctccactctgaggctctgcttgccgtggcccagaatagatggctgcatatctacgataaccaagggattgaactccactgtatccgccggtgcgacagagtgacccgcctggagtttctgcccttccactttctcctggctacagcgtccgagaccggattccttacatatctggatgtcagcgttggcaaaattgtggccgctctcaatgcccgggccgggagactggacgtgatgtctcagaacccttacaatgctgtcatccatcttggacactccaacggcaccgtgagcctgtggtctcccgccatgaaggaacctctcgcgaagattctgtgtcatcgcggcggggttcgggctgtggccgtcgactccacgggaacatatatggccaccagcggcctggatcaccagctcaaaatctttgacctgagagggacataccagcccctttccacccgcaccctgccgcacggagctggccatctcgccttctctcaacgggggctgcttgtggctggaatgggcgatgttgtgaatatctgggccggccaggggaaggcgagccctccctccctggagcagccttacctcacacacagactgagcggacccgtccatggcctgcaattttgccctttcgaagacgtgctcggggtcggacacacgggcgggattacctctatgctggtgcccggcgccggagagccgaacttcgatggccttgaatccaatccttatcggagccgcaaacagagacaggagtgggaggttaaggctctgctcgaaaaagtgcccgccgagctgatctgtctggacccccgggctcttgccgaagtcgatgtgatttctctcgagcaggggaagaaggagcaaatcgaaagactgggatacgaccctcaggcgaaagccccgtttcagcccaagcctaaacagaagggccgcagctccacagcttctctggttaaacggaagagaaaggtgatggatgaggaacatcgcgacaaagtcagacaaagcctccagcagcagcaccacaaggaggccaaagctaagcccaccggggcccggccttccgccctggatcgcttcgtgagatga

SEQ ID NO: 3061 - RNA, 897 nt, synthetic construct
  misc_feature 1..897: note = AAG37878 variant
  source 1..897: mol_type = other RNA
atgggccccaaggacagcgccaaatgcctgcacagagggcctcagccgtcccattgggctgccggagatggccccacccaagagcggtgtgggcctcgctctctcggaagccccgtgctgggccttgacacatgcagagcgtgggatcacgtcgacgggcagatcctgggacagctccggcctctgacggaagaggaagaggaagagggcgctggcgccaccctttcccgcgggcccgccttccctggaatgggctctgaggaactgagactcgctagcttttacgattggccgctgacagccgaggttccccctgaactgctcgctgccgcggggttctttcataccggacaccaggacaaggtgcggtgtttcttttgctatggcgggctgcaatcctggaaacgcggagatgacccctggacagagcatgccaagtggttcccttcttgtcagtttcttctgagaagcaaaggccgggatttcgtgcactccgtccaggagacccacagccagctcctgggctcttgggacccctgggaggaaccggaagatgctgcccctgtggctccctccgttcctgccagcgggtaccccgagcttcccacacctcgcagagaagtgcaatctgagtccgcgcaggagccgggaggcgtcagccccgccgaagctcagcgggcctggtgggtgctggagcctcccggggctcgcgacgttgaagcccagctcagacggctgcaagaggaaagaacctgcaaggtgtgtctggatcgcgccgtctctattgtgtttgtgccttgcggacatctcgtctgtgctgagtgcgcgcccggcctgcagctttgtccgatctgccgggcccctgttagatcccgcgtgcggacgttcctgagctga

SEQ ID NO: 3062 - RNA, 2280 nt, synthetic construct
  misc_feature 1..2280: note = EAW60925 variant
  source 1..2280: mol_type = other RNA
atggacctgagcgccctcagagtggaggaagtccagaacgttatcaatgctatgcaaaagattctggagtgccccatctgtcttgaactgattaaagagcctgtgtccaccaagtgcgatcacatcttctgtaaattttgcatgctcaagctgcttaaccagaaaaagggcccgtctcagtgtcccctgtgcaagaatgacattacaaaacggagcctccaggaatccacgcgcttctctcaactggtggaggagctgctcaagatcatctgtgcctttcagctggataccgggcttgaatacgcgaacagctataatttcgctaaaaaggagaacaattcccctgaacatctgaaagacgaggtctctattatccagagcatgggatacagaaaccgggccaagcgcctcctgcagtccgagcccgaaaatcctagccttcaagagacatctctgtccgtgcagctcagcaacctgggcaccgttagaacactgcggaccaagcagcgcattcagccccagaaaacatctgtgtatatcgaactcgggtccgatagctctgaggacaccgtcaataaggccacgtactgctccgtgggagatcaagaactgcttcagattacccctcaaggcacaagagacgagatcagcctggattccgctaaaaaggccgcttgtgagttttctgaaaccgacgttacaaacaccgagcaccatcagccgagcaataacgatctcaatacgacagaaaaacgggccgcggagcgccaccccgaaaagtatcagggggaggccgcttccggatgcgagagcgaaacctctgtgtccgaggactgtagcggcctgtctagccagtccgatattcttacaacccaacagagagacaccatgcagcataacctgatcaaactccagcaagaaatggccgagctggaagctgtcctggagcagcacggctctcagcctagcaactcctaccccagcatcatttctgactccagcgccctcgaggatctgcggaatcctgaacagtctacatccgagaaggtgcttacgagccaaaagtcctctgaatatcccatcagccagaacccggaggggctgtccgcggacaaattcgaggtgtctgccgatagctccaccagcaagaataaagaacctggagtcgagagatcttcccccagcaagtgcccttctctcgacgatcgctggtacatgcactcctgcagcggctctctgcagaaccggaattaccccagccaggaagaacttattaaagttgtggacgtggaggagcaacagctggaggaatccgggccccatgatctcacagagaccagctatctgcctcgccaggacctggaaggaacaccgtacctcgagtctggcatctccctgtttagcgatgaccccgaatccgatccttctgaggacagagctcccgagagcgcccgggtcgggaacattccttcctctaccagcgctcttaaggtgccccaactgaaggttgccgaatccgcccagtctccggctgcggcccacacgacagacaccgctggatataatgccatggaggaaagcgtgtccagagagaaacctgaactcaccgccagcacagagcgcgtcaacaagcggatgtctatggtggtttccggcctgacccccgaggagttcatgctggtgtacaaatttgctagaaagcatcacatcacacttacgaatctcatcaccgaagaaacaacccacgtcgtgatgaaaacagatgccgagttcgtctgtgagcgcaccctgaagtattttctgggcattgctgggggaaagtgggtggttagctacttctgggtgacgcagtctatcaaagaacggaagatgctcaacgagcatgactttgaagtcagaggcgatgtggttaatgggcgcaaccaccagggacctaaacgggcgagagagtcccaagaccgcaagattttccggggcctggaaatctgctgttatgggcccttcaccaatatgcctacagatcagcttgagtggatggtgcagctgtgcggagccagcgtcgtgaaagagctctcttcctttaccctgggcacaggcgtgcatcccattgttgtcgtgcagccggacgcctggaccgaagataacgggttccacgctatcggacaaatgtgtgaggcccctgtggtcacgagagaatgggtgctggacagcgttgctctttaccagtgccaggagctcgatacatacctgatcccccagattccccattcccactattga

SEQ ID NO: 3063 - RNA, 2160 nt, synthetic construct
  misc_feature 1..2160: note = EAW60922 variant
  source 1..2160: mol_type = other RNA
atggacctgagcgccctcagagtggaggaagtccagaacgttatcaatgctatgcaaaagattctggagtgccccatctgtcttgaactgattaaagagcctgtgtccaccaagtgcgatcacatcttctgtaaattttgcatgctcaagctgcttaaccagaaaaagggcccgtctcagtgtcccctgtgcaagaatgacattacaaaacggagcctccaggaatccacgcgcttctctcaactggtggaggagctgctcaagatcatctgtgcctttcagctggataccgggcttgaatacgcgaacagctataatttcgctaaaaaggagaacaattcccctgaacatctgaaagacgaggtctctattatccagagcatgggatacagaaaccgggccaagcgcctcctgcagtccgagcccgaaaatcctagccttcaagagacatctctgtccgtgcagctcagcaacctgggcaccgttagaacactgcggaccaagcagcgcattcagccccagaaaacatctgtgtatatcgaactcgccgcttgcgagttttccgaaaccgatgtcacgaataccgagcaccatcaacctagcaacaatgacctgaacacaaccgagaagagagccgctgaacggcacccggagaaataccagggggaagccgcgtctggatgtgagtccgaaacaagcgtgtccgaggattgctctggccttagctcccaaagcgacattctgaccacgcagcagcgcgatacaatgcagcataatctcatcaagctgcaacaggagatggccgaacttgaggctgttctggaacagcacgggtctcagccctccaacagctatccttctattatcagcgactcctctgccctcgaggatctgagaaaccccgaacaaagcacctccgagaaagctgtgctgacaagccagaagtcttccgagtaccctatcagccagaatcccgaaggactctctgccgacaaattcgaggtctccgcggatagctccacctctaagaacaaggaaccgggcgtggagcggagctccccttctaaatgtcccagcctggacgaccgctggtatatgcactcctgcagcggctctcttcagaatagaaactacccttcccaagaggaactgattaaggtggtcgatgttgaggaacagcagctcgaggaaagcgggccccatgacctgaccgagacatcttaccttccccggcaggatctggagggaacgccttatctcgaatccggcatcagcctgttttctgacgatccggagagcgacccctccgaagatcgcgcccctgagagcgctagagtggggaatattccctcttccaccagcgccctgaaagtgcctcaactcaaggtcgctgaatccgcccagtctcccgccgctgcgcacacaaccgacacagccggatacaacgctatggaggagagcgtgtcccgggaaaaaccggagctgaccgcctctacggaaagagttaataagcgcatgagcatggtggtctccggccttacacctgaggagttcatgctggtgtataagtttgcccggaaacatcacatcaccctcaccaacctgattacagaagagaccacacacgttgtgatgaagacggatgctgagttcgtctgcgaaagaaccctgaaatactttcttgggatcgccggaggcaagtgggtggtctcttatttctgggtgacacagagcatcaaagaacgcaagatgctcaatgagcatgactttgaggttcggggcgatgtggtcaacgggagaaatcaccaaggacccaagcgcgcgcgggaatcccaggacagaaaaattttccgcggcctggagatctgttgctacgggcctttcaccaacatgcccacagaccagctggaatggatggtgcagctctgtggagctagcgttgtgaaggagctgtcttcctttacccttggcacgggggtccatcctattgtggtggttcaacccgatgcctggaccgaagacaatggattccacgccatcggccagatgtgcgaggctccggtcgtgacacgggagtgggtgctggatagcgtcgccctctatcagtgtcaggaactggacacctacctgattcctcaaatcccccattctcactactga

SEQ ID NO: 3064 - RNA, 2166 nt, synthetic construct
  misc_feature 1..2166: note = EAW60923 variant
  source 1..2166: mol_type = other RNA
atggacctgagcgccctcagagtggaggaagtccagaacgttatcaatgctatgcaaaagattctggagtgccccatctgtcttgaactgattaaagagcctgtgtccaccaagtgcgatcacatcttctgtaaattttgcatgctcaagctgcttaaccagaaaaagggcccgtctcagtgtcccctgtgcaagaatgacattacaaaacggagcctccaggaatccacgcgcttctctcaactggtggaggagctgctcaagatcatctgtgcctttcagctggataccgggcttgaatacgcgaacagctataatttcgctaaaaaggagaacaattcccctgaacatctgaaagacgaggtctctattatccagagcatgggatacagaaaccgggccaagcgcctcctgcagtccgagcccgaaaatcctagccttcaagagacatctctgtccgtgcagctcagcaacctgggcaccgttagaacactgcggaccaagcagcgcattcagccccagaaaacatctgtgtatatcgaactcgggtccgatagctctgaggacaccgtcaataaggccacgtactgctccgtgggagatcaagaactgcttcagattacccctcaaggcacaagagacgagatcagcctggattccgctaaaaagggggaggccgcttctggatgtgaaagcgagacctccgttagcgaagactgctctggcctctccagccagtctgatattctgacaacccagcagcgggacacgatgcaacacaaccttatcaaactgcagcaggagatggccgaactcgaggcggtgctggagcagcatggcagccaaccgtccaattcttatcccagcatcatttccgatagctctgccctggaagacctccgcaaccctgagcagtccacaagcgaaaaggctgtcctgacctctcagaaatccagcgagtaccccatctcccagaatcctgaagggctttctgccgacaagtttgaggtgagcgctgattcctctacaagcaagaacaaagagcccggagtggaaagatccagcccgtctaagtgtccttccctggacgatcggtggtatatgcacagctgctctggctccctccaaaaccgcaattaccccagccaggaggaactgattaaagtcgttgacgtggaggagcagcagcttgaagagtctgggcctcatgatctgaccgaaaccagctacctccccagacaagacctggagggaacaccctatctggaatccggcatcagcctcttctctgatgaccctgagtccgatccgagcgaggaccgggcccccgaatccgcgcgcgtggggaacattccttctagcacgtccgccctgaaggtcccccagcttaaagtggctgagtctgcccagagccctgctgccgcccacaccacagataccgctggatacaatgcgatggaagagtccgtttctagagaaaagcccgagctgacagccagcaccgagcgggtgaacaagagaatgtccatggtcgtgagcggcctcacgccggaagagtttatgctggtttataaattcgctcgcaagcaccatatcacactgaccaatcttatcaccgaagagacaacccacgtggtcatgaaaacagacgccgaatttgtgtgcgagcggacgctcaagtacttcctgggcattgccgggggaaaatgggtcgtgtcttatttttgggttacccaatccatcaaggagagaaagatgctgaacgaacatgacttcgaggtgcgcggcgatgtcgtgaatgggcggaaccaccagggacctaaaagagctcgcgaaagccaggaccggaagatttttagaggcctcgagatctgttgctacgggcccttcacaaatatgcctaccgatcagctggagtggatggttcaactttgtggagcctctgtggtcaaagaactgtccagcttcacactcggcaccggcgtgcaccccattgtggttgtccagcctgacgcgtggacggaggataacgggtttcatgctatcggacagatgtgcgaagcccccgtggtgacccgcgagtgggtcctggactctgtggccctgtatcagtgtcaagaacttgatacatacctcatcccgcagattcctcactcccattactga

SEQ ID NO: 3065 - RNA, 36 nt, synthetic construct; identical to SEQ ID NO: 2057
  misc_feature 1..36: note = AIC83575 variant
  source 1..36: mol_type = other RNA

SEQ ID NO: 3066 - RNA, 522 nt, synthetic construct
  misc_feature 1..522: note = ABC59810 variant
  source 1..522: mol_type = other RNA
atggacgccgagttcgtgtgcgaaagaaccctgaagtactttctcggcatcgctgggggaaaatgggtcgttagctatttctgggtgacacagtccattaaggagcggaaaatgctgaacgaacacgattttgaggtgcgcggcgacgtcgtgaatgggagaaaccatcaaggacccaagcgggcccgcgaatctcaggatagaaaaatcttccggggccttgagatttgttgctacgggccttttacgaatatgccgaccgaccagctggagtggatggttcagctctgtggagcgagcgtggtcaaggaactgtcctctttcacacttggcaccggcgtgcaccccatcgttgtggtccaacctgatgcttggacagaggacaacgggtttcatgccattggacagatgtgcgaagcccccgtggtgacccgcgagtgggtcctggatagcgttgctctctatcagtgtcaggagctggacacatacctgatccctcaaatcccccactcccattattga

SEQ ID NO: 3067 - RNA, 1065 nt, synthetic construct
  misc_feature 1..1065: note = ABC88652 variant
  source 1..1065: mol_type = other RNA
atgcacagctgctccggctctctgcagaacagaaattaccccagccaagaggaactcatcaaggtggtcgacgttgaggaacagcagctggaggaatccgggcctcatgatcttaccgagacatcttatctgccgcggcaggacctcgagggaacgccctacctggaaagcggcatttcccttttctctgatgaccctgagagcgatccctccgaagaccgcgcccctgagagcgctagagtggggaacatcccctcttccaccagcgccctgaaagtgcctcaactcaaggtcgcggagtctgctcagggaccggccgccgctcacacaaccgatacagccggctataatgctatggaagagtccgtgagccgggaaaaacccgagctgaccgcctctacagaacgcgttaacaagagaatgtccatggtggtcagcgggctgacccctgaggagtttatgctcgtgtacaaattcgcgcggaagcatcacattacgctgaccaatcttatcacagaagagaccacacatgttgtgatgaagaccgacgccgaatttgtctgtgagcgcacgctgaaatatttcctcggaattgctggcggcaagtgggtggtgtcctacttttgggtcacacagtctatcaaagaaagaaagatgctgaacgagcacgatttcgaggttcgcggggacgtggtgaatggacggaaccaccagggccccaaaagagcccgggaaagccaagatcgcaagatctttagagggcttgagatttgctgttatggacctttcaccaatatgcccacagaccagctggaatggatggtccagctctgcggcgcttccgtggttaaggagctgagctcttttaccctggggaccggagtgcatccgatcgtcgtggttcagcctgatgcctggacagaagacaacggcttccacgcgattggccaaatgtgtgagacgcccgtggtcacccgggagtgggtgctcgactccgtcgccctgtaccagtgccaggaacttgatacatacctgatccctcaaattccccatagccactattga

SEQ ID NO: 3068 - RNA, 2043 nt, synthetic construct
  misc_feature 1..2043: note = EAW60939 variant
  source 1..2043: mol_type = other RNA
atggacctgagcgccctcagagtggaggaagtccagaacgttatcaatgctatgcaaaagattctggagtgccccatctgtcttgaactgattaaagagcctgtgtccaccaagtgcgatcacatcttctgtaaattttgcatgctcaagctgcttaaccagaaaaagggcccgtctcagtgtcccctgtgcaagaatgacattacaaaacggagcctccaggaatccacgcgcttctctcaactggtggaggagctgctcaagatcatctgtgcctttcagctggataccgggcttgaatacgcgaacagctataatttcgctaaaaaggagaacaattcccctgaacatctgaaagacgaggtctctattatccagagcatgggatacagaaaccgggccaagcgcctcctgcagtccgagcccgaaaatcctagccttcaagagacatctctgtccgtgcagctcagcaacctgggcaccgttagaacactgcggaccaagcagcgcattcagccccagaaaacatctgtgtatatcgaactcggggaggccgcttccggatgcgaaagcgagacctctgtctccgaggattgtagcggcctgtcctctcaaagcgacattcttacgacccagcaaagagatacaatgcagcacaatctgatcaagctccagcaggaaatggccgagctggaagctgtgcttgagcaacatgggtcccagcctagcaactcttacccgtccattatcagcgactctagcgccctggaagatctccggaatcccgagcagtccacctctgagaaagcggttctgacaagccagaagtccagcgaatatcctatctctcaaaaccccgagggactgtccgccgacaaatttgaagtgagcgctgattcttccaccagcaagaataaagagcctggcgtcgaacgctcctctcccagcaagtgcccgtccctcgacgatagatggtacatgcactcttgtagcggctccctgcagaaccggaactatcctagccaggaggagcttattaaggtggtggacgtcgaggaacagcaactggaagagtctgggccccatgacctcacggagacatcctacctgcctcgccaggatcttgaaggaaccccctacctggagagcggcatctctctcttctccgacgatcccgaaagcgacccttctgaggatagagccccggaaagcgctcgggttgggaatattccctccagcacatctgccctgaaagtgcctcagctgaaggtggcggagtccgcccagagccccgctgccgctcacaccaccgacacagccggatataacgccatggaggaatccgtctctcgcgagaaacctgaactcacggctagcaccgagagagtgaataagcggatgtccatggttgtgtctggcctgacacccgaagagtttatgcttgtctacaaattcgcgagaaagcaccatatcaccctgacaaacctcattaccgaggaaacgacacacgtggttatgaagaccgatgccgagtttgtgtgcgaacgcaccctgaaatatttcctggggatcgctggaggcaagtgggtcgtgagctacttttgggtcacacaatccatcaaagagcggaagatgcttaatgaacatgacttcgaggtgagaggcgatgttgtgaacgggcgcaatcaccagggaccgaaacgggccagagagtctcaggaccgcaagatttttcggggcctcgaaatctgctgttatgggcctttcaccaacatgcccacagatcaactggagtggatggtccagctgtgcggagccagcgtggttaaggaactctccagcttcacgctgggcaccggggtgcaccctattgtcgtggtgcagcccgacgcttggacagaggacaatggatttcatgccatcggccagatgtgtgaggcgcctgttgtcaccagagaatgggtgcttgattctgtggctctgtaccaatgccaggagctcgacacatatctgattccccagatcccgcactcccattactga

SEQ ID NO: 3069 - RNA, 546 nt, synthetic construct
  misc_feature 1..546: note = AAC72302 variant
  source 1..546: mol_type = other RNA
atgctgctcgagcccggcagagggtgctgtgccctggctatccttctggccattgtggacatccagagcggaggctgcattaacatcacctcctctgcgagccaagaagggacacggctcaatctgatttgtacggtctggcacaagaaagaggaagctgagggattcgttgtgtttctttgcaaggatcgctccggcgactgttctcctgaaaccagcctgaaacagctcagactgaagcgggatccggggatcgacggagtgggcgagatctcctctcagctgatgttcacaattagccaggtcacacccctccattccggcacctaccaatgctgtgcccgcagccagaaatctgggatcagactgcagggacactttttctccattctttttaccgagacaggcaactataccgtgacggggctgaagcagcggcaacatctcgagttcagccacaatgaaggaaccctgtcttccggctttcttcaggaaaaggtttgggtgatgctggtcacaagcctcgtggccctgcaggctctgtga

SEQ ID NO: 3070 - RNA, 639 nt, synthetic construct
  misc_feature 1..639: note = BAG58223 variant
  source 1..639: mol_type = other RNA
atgctgctcagcgtgtacttcaaggagcagtttctggacggcgatgggtggacctccagatggatcgaatctaaacacaagagcgacttcggaaaatttgtcctttcctctggcaagttctatggggatgaggaaaaagacaagggactgcaaacaagccaggatgcccggttttacgctctctccgcctctttcgagccctttagcaacaagggccagacgctggttgtgcagttcaccgtgaaacatgaacaaaatattgactgcgggggaggctatgtcaaactttttcctaactccctggatcagacagacatgcacggcgatagcgagtacaatatcatgttcgggccggacatttgtggacccggcaccaagaaggtgcatgttatctttaactataaagggaagaatgtgctcattaacaaggatatccgctgcaaagacgatgagttcacacacctgtacaccctgatcgtcagacctgacaatacatatgaagtgaagattgacaactctcaggttgagtccggaagcctcgaagatgactgggattttctgccccctaaaaagatcaaagaccccgatgcgtctaagcctgaggactgggatgagcgggctaaaattgacgatccgtga

SEQ ID NO: 3071 - RNA, 891 nt, synthetic construct
  misc_feature 1..891: note = BAG65301 variant
  source 1..891: mol_type = other RNA
atgcacggcgacagcgagtacaacatcatgttcgggcccgatatttgcggacctggcaccaagaaagtgcatgtcatctttaattataaggggaaaaacgttctgattaataaggacatcagatgtaaagatgacgagttcacacacctctacacgctgattgtgcggccggataacacctatgaagtgaagatcgacaattcccaggtcgaatctggaagccttgaggatgactgggattttctgccccctaagaaaatcaaggaccccgatgcctccaaacctgaagactgggatgagcgcgctaagattgacgaccccacagattctaaacctgaggactgggataagccggaacatatccccgaccctgatgccaagaaacccgaggactgggatgaagagatggacggcgagtgggaacctcccgtgattcaaaacccggagtacaagggggaatggaaacctagacagatcgataatcccgactataagggaacctggattcaccctgagatcgataaccccgaatacagccccgacccttccatttatgcgtacgacaatttcggcgttctcggcctggatctttggcaagtgaaatctgggacaatctttgacaacttcctgatcaccaatgatgaggcttacgccgaggaatttggaaacgagacatggggcgtcaccaaggccgctgaaaaacagatgaaggacaagcaggatgaggaacagcggctcaaagaggaggaagaggacaagaaacgcaaggaagaggaagaggccgaggataaagaagacgatgaggacaaggatgaagacgaggaggatgaagaggacaaggaagaggacgaagaggaggatgtgccggggcaggctaaagacgaactgtga

SEQ ID NO: 3072 - RNA, 1254 nt, synthetic construct
  misc_feature 1..1254: note = AAA36582 variant
  source 1..1254: mol_type = other RNA
atgctgctcagcgtgcccctgcttctgggcctcctggggcttgccgtcgctgagcctgccgtttacttcaaggaacagtttctggacggagatggctggacctccagatggatcgagtctaaacacaagagcgacttcgggaaatttgtgctctcctctggaaagttctatggcgatgaagagaaagacaaggggctgcaaacaagccaggatgcgcggttttacgctctgtccgcctctttcgaaccgtttagcaacaagggacagacgctcgtggtccagttcaccgtgaaacatgagcaaaatattgactgcggcggcgggtatgttaagctgtttcccaactcccttgatcagacagacatgcacggagatagcgagtacaatatcatgttcggccctgacatttgtgggcccggaaccaaaaaggtgcatgtcatctttaactataaaggcaagaatgtgctgattaacaaggatatccgctgcaaagacgatgagttcacacacctctacaccctgatcgttagacctgacaatacatatgaagtgaagattgacaactctcaggtcgaatccgggagccttgaggatgactgggattttctgccccctaaaaagatcaaagacccggatgcctctaagcccgaggactgggatgaacgggctaaaattgacgatcctaccgactccaagcccgaggattgggacaagcctgaacatatccccgacccggatgccaaaaagcctgaggactgggatgaagagatggacggagagtgggaaccccctgtgattcagaatcccgagtacaaaggcgaatggaagccccgccaaatcgataaccctgactacaaaggcacgtggattcacccggagatcgataatcccgaatatagccctgacccctctatctacgcttatgataacttcggggtgctcggactggacctgtggcaggtcaagtccggcaccattttcgataattttctcatcacaaacgacgaggcctacgcggaggagttcgggaatgaaacctggggagttacaaaggccgctgaaaaacagatgaaggataaacaggacgaggaacaaagactgaaggaggaggaagaggacaaaaagcggaaggaagaggaggaagccgaggataaagaagacgatgaggacaaggatgaagacgaggaggatgaagaggacaaagaagaggatgaagaggaggacgtgcctggccaggctaaggatgaactttga

SEQ ID NO: 3073 - RNA, 1155 nt, synthetic construct
  misc_feature 1..1155: note = BAB71655 variant
  source 1..1155: mol_type = other RNA
atggccagagctctggtgcagctctgggccatctgcatgctgcgggtcgcgcttgctaccgtttacttccaagaggaatttctggacggcgagcactggcgcaacagatggctccagagcacaaatgattcccggttcgggcattttcgcctgtctagcggaaagttctatggccacaaagaaaaggacaaagggcttcagacgacccagaacggaagattttacgccatttccgcccggttcaagcccttttctaataaaggcaagacactggtgatccaatataccgtgaagcatgagcagaaaatggattgtgggggaggctacattaaggtcttccctgctgacatcgatcagaaaaacctcaatggcaagagccagtattacattatgtttgggccggacatctgcggattcgatatcaaaaaggtgcacgttattctgcattttaagaacaaatatcacgaaaataagaaactgatccgctgtaaggtggacggcttcacacacctctacaccctgattcttagacccgatctgtcctacgacgtcaaaatcgatgggcaatctattgagagcggatccatcgagtatgactggaacctcacaagcctgaagaaagaaacctctcctgccgagtccaaggattgggaacagacgaaggacaataaagctcaggactgggagaagcattttcttgatgccagcacctctaaacagtccgactggaacggcgatctggacggggattggcccgcgcctatgctccaaaagcccccttaccaggacggactgaaaccggagggcattcacaaggatgtgtggctgcatcggaagatgaaaaatacagactatctcacccagtacgatctgagcgagttcgagaacatcggcgccatcgggcttgaactgtggcaagttcgctctggaacaattttcgacaattttctcatcaccgatgacgaggaatatgctgacaacttcggcaaggccacgtggggagagacaaaagggcccgagagagaaatggatgctattcaggccaaggaggaaatgaaaaaggcgcgggaggaagaggaggaagaactgctttccggcaagatcaatcgccacgaacactactttaaccagttccatagacggaacgagctgtga

SEQ ID NO: 3074 - RNA, 330 nt, synthetic construct
  misc_feature 1..330: note = CAA10193 variant
  source 1..330: mol_type = other RNA
atgctgatggcccaggaggctctcgccttcctgatggcgcaaggcgctatgcttgccgcccaggaaagacgggtgccccgcgctgccgaggtccctggggctcagggacagcaaggcccgagagggcgggaagaggcgccccgcggagttagaatggccgtgcctctgctccggcgcatggaaggcgcccccgctgggcctggaggcagaaccgccgcttgctttagctgtacatcccggtgcctgtctcgcagaccctggaagcggagctggtccgccggctcttgtcctgggatgccgcaccttagccccgaccagggacgcttctga

SEQ ID NO: 3075 - RNA, 1440 nt, synthetic construct
  misc_feature 1..1440: note = CAA66853 variant
  source 1..1440: mol_type = other RNA
atggacttcagcagaaacctgtacgatatcggcgagcagctcgactccgaagatctggcctctcttaagtttctgagcctcgactatattccccaacggaaacaggagcctatcaaggatgctctgatgcttttccagcgcctgcaggagaaaagaatgctcgaggaatccaatctgtcttttctgaaggagctcctgttccggattaaccgccttgacctgctcatcacctacctgaatacaagaaaagaggaaatggagcgggaacttcaaacgccggggcgcgcccagattagcgcgtatagagtgatgctgtaccagatctccgaggaggtctctcggagcgaactccgctcctttaagttcctgctgcaggaggaaatcagcaagtgcaaactcgatgacgatatgaacctgcttgacatttttatcgagatggaaaagagagttattctgggagagggcaaactcgatatcctgaagcgggtgtgtgctcaaattaataaatctcttctgaagatcattaacgactatgaggagttctccaaggagcgcagcagctccctcgaagggagccccgatgagttttctaatggagaagaactgtgcggcgtgatgaccatctccgacagccctagagagcaggactccgaatctcagacactggataaagtctaccagatgaagtctaaaccccgggggtattgtctcatcattaacaatcacaacttcgccaaggcccgcgagaaagtgcctaagctgcattccatcagagaccggaatggaacccaccttgatgctggcgccctgacaaccacatttgaagaactccatttcgaaattaaaccccacgacgattgcaccgttgagcaaatctacgagattctgaagatctaccagcttatggaccatagcaacatggattgttttatctgctgtattctgtctcacggcgacaaggggatcatttatggaacggatggccaggaagctcctatctacgagctcacctcccaattcacagggctgaaatgcccgagcctggccggaaagcccaaagtgttctttattcaggcgtgtcagggcgacaattatcagaaggggatccctgtcgaaaccgattctgaggagcaaccctacctcgaaatggacctgagctcccctcagacaagatatatccccgacgaggccgatttccttctgggaatggctaccgtgaacaattgcgtttcttaccgcaacccggccgaaggcacgtggtatattcagagcctctgtcagtccctgcgggagagatgccctcgcggcgacgatatcctgacaattcttaccgaagtgaactacgaggtcagcaataaagacgataagaagaacatggggaaacaaatgccccagcctacatttaccctccggaagaaactggtgttcccctctgactga

SEQ ID NO: 3076 - RNA, 1569 nt, synthetic construct
  misc_feature 1..1569: note = CCDS2340.1 variant
  source 1..1569: mol_type = other RNA
atgaaaagccagggccaacactggtactcctctagcgacaaaaactgcaaggtgtccttcagagagaaactgctcatcattgattctaatctgggggtccaggacgttgaaaaccttaagtttctgtgtatcggactcgtgcccaataaaaagctggaaaagagctcctctgccagcgatgtgttcgagcatcttctggctgaggacctcctgtccgaagaggatccgtttttcctggccgagctcctgtatattatccggcagaaaaagctgcttcagcacctcaactgcaccaaagaagaggtcgaacgcctgcttcctacaagacaacgggtgagcctgtttcgcaatctcctgtacgagctgtctgagggcattgactccgaaaacctcaaggatatgatcttcctgcttaaagacagcctgcccaagacggagatgacctctctctcctttctggcgttccttgaaaagcaggggaaaatcgatgaggacaatctgacatgtctcgaagatctgtgcaagaccgttgtgcctaaactgctcagaaacattgagaagtataaacgggagaaggctatccagattgtcacaccccctgtggacaaagaagccgagagctaccagggagaagaggaactggtttctcaaaccgatgtgaagacatttcttgaggccctgccccaggagtcctggcagaataagcatgctggcagcaacgggaatcgcgccaccaacggagctccttccctcgtctctagaggcatgcagggcgccagcgcgaatacgctgaactccgaaaccagcacaaaacgggccgctgtgtatcgcatgaatagaaaccaccgggggctttgtgtgatcgtcaacaatcattctttcacctccctgaaggaccgccaaggaacacacaaagacgccgagattctcagccacgtttttcagtggctgggcttcaccgtgcatatccacaacaatgtgacgaaggtcgaaatggagatggtgctgcagaaacaaaagtgcaacccggctcatgccgatggggactgttttgttttctgcattctcacacacggaagattcggcgcggtgtactctagcgatgaagccctgatccccatccgggagattatgtcccactttaccgcccttcagtgtcctcgcctggctgagaagcccaaactcttctttatccaggcttgccagggggaagagattcaaccttctgtcagcatcgaagccgacgccctgaatcccgagcaggctccgacatccctgcaggatagcattcctgcggaggccgacttccttctcggactggctaccgtgcccggctatgtttcttttagacatgtggaagagggctcctggtacatccagagcctgtgtaaccacctcaagaaactggtccctcggcatgaagatatcctttctattctgaccgccgtgaatgacgatgtctccagacgcgtggacaagcaagggacaaagaagcagatgccccagcccgccttcacgctccggaagaaactggtttttcctgtgccgctggatgctcttagcctctga

SEQ ID NO: 3077 - RNA, 1020 nt, synthetic construct
  misc_feature 1..1020: note = EAW65632 variant
  source 1..1020: mol_type = other RNA
atgtggcagctgtgggccagcctctgctgtctgcttgtgctggctaacgccagatcccggccctctttccaccctctcagcgacgagctggtcaattacgttaacaagcgcaataccacatggcaagcgggccataacttttataatgtggatatgtcctaccttaaaagactgtgcgggacgttcctcggaggcccgaagccccctcagcgggtgatgtttaccgaagacctgaaactgcccgcttctttcgatgcccgcgagcagtggcctcagtgtcccacaatcaaggaaattagagaccaagggagctgcggatcctgttgggcctttggcgctgtcgaggccatctctgatcggatttgcatccacaccaacgctcatgtgagcgttgaagtgtccgccgaggacctcctgacatgttgcgggagcatgtgtggagatggctgcaatggcgggtatcctgcggaggcctggaacttctggacccgcaaaggacttgtctctggcgggctgtacgaatcccacgtgggatgtagaccgtatagcattcccccttgcgagcatcacgttaatggctctcggcccccttgcacaggggaaggagacacccccaagtgttccaagatctgcgagccgggctacagccctacgtataaacaggataagcactacggctacaactcttattccgtgagcaattccgagaaagacatcatggctgaaatttacaagaacgggcccgtcgagggagccttttctgtgtatagcgatttcctcctgtacaaatccggcgtgtatcagcatgtcaccggggaaatgatgggaggccacgctatccgcattcttgggtggggagttgagaatggcacaccttactggctggtggccaacagctggaataccgactggggcgataacgggtttttcaagatcctcagaggacaggaccattgtggcattgaatctgaggtggtcgcggggatcccccggacagaccaatattgggagaagatttga

SEQ ID NO: 3078 - RNA, 1020 nt, synthetic construct; identical to SEQ ID NO: 3077
  misc_feature 1..1020: note = AAC37547 variant
  source 1..1020: mol_type = other RNA

SEQ ID NO: 3079 - RNA, 1002 nt, synthetic construct
  misc_feature 1..1002: note = EAW62731 variant
  source 1..1002: mol_type = other RNA
atgaaccccaccctgatcctcgccgctttctgcctgggcattgccagcgcgacacttacgtttgaccactccctggaggctcagtggaccaagtggaaagccatgcataatagactctacgggatgaacgaagagggatggcggcgcgccgtgtgggaaaagaatatgaaaatgatcgagctgcacaaccaagaatatagagagggcaagcattctttcacaatggctatgaatgcctttggggatatgaccagcgaggaatttcggcaggtcatgaacggatttcagaatcgcaaacctagaaagggcaaggttttccaggagccgcttttctacgaagctccccggtccgtggactggcgcgagaaagggtatgtgacacctgtcaagaaccaaggacagtgtggctcttgctgggccttcagcgcgaccggcgccctggaggggcagatgtttagaaaaacaggacggctcatttccctgtctgaacagaatctggtggattgtagcggcccccaagggaacgagggatgcaatggcgggctcatggactacgctttccagtatgttcaggataacggaggcctggactccgaagagagctacccttatgaagccaccgaggagtcttgtaagtacaatcccaaatactccgtggctaacgatacgggctttgtcgacatccctaagcaggaaaaggcccttatgaaagcggtggccaccgttgggccgattagcgtggctatcgatgccggacacgagtctttcctgttttataaggaaggcatctacttcgagcccgactgctccagcgaagatatggaccatggggtcctcgtggtgggatatggcttcgagtctacagagtccgataataacaaatactggctggtcaagaacagctggggagaagagtgggggatgggcggctatgttaaaatggctaaggaccgcagaaatcactgtgggattgcctccgccgcttcttaccctaccgtgtga

SEQ ID NO: 3080 - RNA, 1002 nt, synthetic construct; identical to SEQ ID NO: 3079
  misc_feature 1..1002: note = AAA66974 variant
  source 1..1002: mol_type = other RNA

SEQ ID NO: 3081 - RNA, 456 nt, synthetic construct
  misc_feature 1..456: note = AAG17239 variant
  source 1..456: mol_type = other RNA
atggactacgccttccagtatgtgcaagataacggcgggctggacagcgaggaatcctacccctatgaggctaccgaagagtcttgcaagtacaatcctaaatatagcgtcgccaacgatacaggatttgttgacatcccgaagcaggaaaaagcgctcatgaaggctgtggccacggtgggccccatttccgtcgccatcgatgctgggcacgagtctttcctgttttacaaagagggaatttatttcgaacctgactgtagctccgaggatatggaccatggcgtgcttgttgtggggtacggatttgaatctaccgagagcgataataacaagtactggctggtcaaaaattcctggggcgaggaatggggcatgggagggtatgtgaagatggccaaggacagacggaaccactgcggcatcgctagcgccgcgtcttaccccacagtttga

SEQ ID NO: 3082 - RNA, 984 nt, synthetic construct
  misc_feature 1..984: note = AAA51932 variant
  source 1..984: mol_type = other RNA
atgctgttcctcctgcttcccctgctcgccgtgctgcctggcgacgggaacgctgatggacttaaggagccgctgagctttcacgtcacctggatcgcctccttctacaatcattcttggaaacagaacctcgttagcggctggctgtccgacctgcaaacacacacgtgggattctaatagctccaccattgtgtttctctgcccctggtctagagggaacttcagcaatgaagagtggaaggaactggagacactttttcggatccgcaccattagatccttcgaaggaatccggcgctatgcgcatgagctgcagtttgagtaccctttcgaaattcaggtgacaggcgggtgtgagctccacagcggaaaagtctctggctcctttctgcagcttgcttatcaaggcagcgacttcgtgtcttttcagaacaattcctggctgccctaccctgttgccgggaacatggccaagcatttctgcaaagtgctcaatcagaaccagcacgaaaatgatatcacccacaacctgctgagcgacacatgtcccagatttatcctcggactgcttgatgctggcaaggcccatctgcaacggcaggtcaagcctgaggcttggctctctcacgggccgtcccccggacctggccatctgcagcttgtgtgccacgttagcgggttctatcccaaacctgtgtgggtcatgtggatgcgcggagagcaggaacaacagggcacccagagaggcgacattctgccctccgccgatgggacgtggtacctccgggcgaccctggaggtggccgctggagaagccgctgacctgtcttgtcgcgtgaagcacagctccctcgagggccaagatatcgtcctgtattgggaacatcacagctctgttgggttcattatccttgccgtgattgtgccgctgctcctgcttatcggactggcgctctggtttagaaaacggtgcttctgttga

SEQ ID NO: 3083 - RNA, 1002 nt, synthetic construct
  misc_feature 1..1002: note = AAA51939 variant
  source 1..1002: mol_type = other RNA
atgctgctcctgcccttccagcttctggccgtgctctttcctggcgggaacagcgagcacgctttccaaggaccgacctcctttcatgtcatccagacatctagcttcaccaattccacgtgggcccagacacagggctctgggtggctggacgatcttcaaattcacggatgggacagcgattccggcaccgcgatctttctgaagccctggtctaaagggaacttcagcgacaaggaagttgctgagctcgaagagatttttagagtgtacatcttcggatttgcccgggaagtgcaggatttcgccggcgactttcagatgaaatatcctttcgagattcagggcatcgctgggtgcgagctgcattccggaggcgccatcgtcagctttctgcgcggggctctcggaggcctggatttcctttctgtgaagaatgcctcctgtgttcccagccctgaagggggatctagagcgcaaaaattctgcgccctgattatccagtaccagggcattatggagacagtgcggatcctcctgtatgaaacctgtccccgctaccttctgggcgtcctcaacgctgggaaggccgacctgcagagacaagtgaagcctgaggcttggctgtccagcggaccgtctcccggccctgggcggctccagctggtttgccacgtgtccggattttatcccaaacctgtctgggtgatgtggatgcgcggcgagcaggaacaacaggggacacagcttggagatattctgcccaatgccaactggacctggtacctcagagcgacgctggacgtggccgatggcgaggctgccggccttagctgtcgggtcaagcattcctctctggaagggcaggacatcattctctattggcgcaatccgaccagcatcggatccatcgttctggctattatcgtgcctagcctgctcctgcttctgtgcctcgccctgtggtacatgagacggcgctcttaccaaaacattccctga

SEQ ID NO: 3084 - RNA, 1002 nt, synthetic construct
  misc_feature 1..1002: note = AAI26466 variant
  source 1..1002: mol_type = other RNA
atgctgttcctccagtttctgcttctggccctcctgcttcccggcggggacaacgctgatgccagccaagagcacgtgtccttccatgtcatccagatcttttctttcgttaatcagagctgggcgagaggacagggctccgggtggctggacgaactccaaacccacggatgggattctgagagcggcacaattatttttctgcataactggtccaaggggaatttctctaacgaggaactgagcgacctcgaactgctttttcggttctacctgtttggactcacgcgcgagatccaggatcacgcttcccaggactatagcaaataccctttcgaggtccaggtgaaggccggctgcgaactgcattctggcaaatccccggaggggtttttccaagtggcctttaatggacttgatctgctcagcttccagaacaccacatgggtgccctctcctggctgtgggtccctggctcagagcgtttgccatctgctcaatcaccagtatgaaggagtgaccgagacagtctacaacctgattagatctacctgtccccggttccttctgggcctcctggacgccgggaagatgtatgtgcaccgccaagttagacctgaggcttggctttccagccggccctccctgggatctggccagctcctgctggtgtgccacgccagcggcttttaccctaaaccggtctgggtgacatggatgcgcaatgaacaggagcaactcgggaccaagcatggagatatcctgcccaacgcggacggcacgtggtatcttcaggtgatcctggaagtcgcctccgaggaacctgctgggctcagctgtagagttcggcactcttccctgggaggccaggatattatcctttactgggggcaccatttcagcatgaattggattgccctggtggtgatcgtccccctcgtgattctgatcgttctggtgctctggtttaagaaacactgctcttaccaggacattctgtga

SEQ ID NO: 3085 - RNA, 1008 nt, synthetic construct
  misc_feature 1..1008: note = AAA59672 variant
  source 1..1008: mol_type = other RNA
atgggctgcctcctgttcctgcttctgtgggccctcctgcaggcttgggggagcgccgaggtgccccaaagactttttcctctgcggtgtctccagatctcctctttcgcgaacagctcctggacccgcacagacggactggcttggctgggcgaactccagacgcactcttggagcaatgattccgacaccgtcagatctctgaagccgtggagccaggggacattttccgatcaacagtgggagacccttcagcatattttccgggtttaccgcagctcttttacaagagacgtgaaagagttcgccaagatgctgcggctctcctatcccctggaacttcaggtgagcgccggatgcgaagtccaccctggcaacgcttctaataactttttccatgtggcctttcaagggaaagatatcctgtccttccagggaaccagctgggagcccacacaggaggctcctctctgggttaatctggccattcaggtgctgaaccaagacaagtggacccgcgaaacggtccagtggctcctgaatggcacctgtccccagtttgtgtctggccttctggagtccgggaaaagcgaactcaagaagcaagttaaacctaaggcgtggctgtccagaggaccgtctcccggccctgggcggcttctgctcgtgtgccacgtcagcggattctaccccaaacctgtgtgggtgaagtggatgcgcggcgagcaggagcagcaggggacacaacccggagatatcctgccgaacgccgacgaaacctggtatctgagagctacactcgatgtcgttgccggcgaggctgccggcctgtcctgtcgggtgaaacatagctctcttgaagggcaggacattgtgctgtactggggaggctcctataccagcatggggctcatcgcgctggccgtccttgcttgcctgctctttctgctgatcgtgggattcacgtctcgcttcaagagacagacaagctaccagggcgttctctga

SEQ ID NO: 3086 - RNA, 1167 nt, synthetic construct
  misc_feature 1..1167: note = EAW52830 variant
  source 1..1167: mol_type = other RNA
atgctgctcctgttccttctgtttgagggcctctgctgtcccggggaaaacaccgccgctcctcaggccctgcaaagctaccaccttgcggctgaggaacagctgtccttcagaatgctccagacatctagctttgccaatcattcctgggcccactctgagggaagcggctggctgggggacctgcagacgcatggatgggataccgtgctcggcacaatccggttcctgaagccgtggtcccacgggaacttttctaaacaagaacttaagaatctgcagagcctcttccagctgtattttcattccttcattcagatcgtccaagctagcgccggacagtttcagcttgagtaccccttcgagattcagatcctggctggctgccgcatgaacgcccctcaaatttttctcaatatggcgtatcagggctctgacttcctgtcctttcaggggatcagctgggaaccctctcctggagccggcatcagagctcaaaacatttgtaaagttctgaatcggtacctcgatatcaaggagattctgcagtcccttctggggcatacctgcccccgcttcctcgccggactgatggaagctggcgagagcgagcttaaaagaaaggtgaagcctgaagcctggctgtcttgtgggccgtcccccggacctggccggctccagctggtgtgccacgtcagcggcttctatcccaaacctgtgtgggttatgtggatgcgcggggagcaggaacaaagaggaacacagcggggcgacgtgctgcccaacgcggatgagacctggtacctccgcgccacactggacgtcgctgccggggaagctgccggactttcctgtagagtgaagcactctagcctgggcgggcacgatctcatcattcattggggaggctattccatctttctgattcttatctgcctgaccgttatcgtgacgctcgtcattctggtggtggtcgacagccggctgaaaaagcagtcttccaataaaaacatcctcagcccgcacaccccttctcccgttttcctgatgggcgccaatacacaggataccaagaacagccgccaccaattttgtcttgctcaggtgtcctggattaagaatagagtgctgaaaaagtggaaaacacggctcaaccagctgtggtga

SEQ ID NO: 3087 - RNA, 894 nt, synthetic construct
  misc_feature 1..894: note = AAA35581 variant
  source 1..894: mol_type = other RNA
atgaccacacccagaaacagcgtgaatggcacgttccctgccgagccgatgaaggggcccatcgctatgcagtccggacctaaacccctgtttcggcgcatgtctagcctcgtcggccctacccaatccttctttatgagagaatctaagacactgggggccgttcagattatgaacggacttttccacatcgcgctgggcgggctcctgatgattcccgctggaatctacgcccctatttgcgtgaccgtgtggtatccgctttggggcggcatcatgtacatcattagcgggtccctgctcgccgctacagagaaaaattctcggaagtgtctggtcaaaggaaagatgatcatgaacagcctgtccctctttgccgctattagcggcatgatcctgtctattatggacatccttaatattaagatctcccatttcctgaaaatggaaagcctcaactttatccgcgcccacaccccctatattaatatctacaactgcgagcctgcgaatccctctgaaaagaactcccctagcacacagtattgttactctattcagtccctgttccttgggatcctgagcgtgatgctcatttttgccttctttcaagagctggttatcgctggaatcgtggagaatgaatggaaaagaacctgctcccggcccaagtctaacattgtcctgctcagcgccgaggagaaaaaggaacagacgatcgagattaaggaagaggtggttggcctgaccgaaacatccagccagccgaaaaatgaggaagatatcgagattatccctatccaggaggaagaggaagaggaaaccgagacaaacttccccgagcctccccaagaccaggaatcttcccccattgagaatgatagctctccttga

SEQ ID NO: 3088 - RNA, 1989 nt, synthetic construct
  misc_feature 1..1989: note = AAC18956 variant
  source 1..1989: mol_type = other RNA
atggagagcaagaccgaaaaatggatggagagaatccacctgaacgtgtccgaacggcccttccctccgcatattcagcttccccctgagatccaagaatctcaggaggtcacactgacgtgccttctgaattttagctgttacggctatcccattcagctccagtggctgcttgagggggttcctatgcgccaagccgctgtgacctccacatctctgaccatcaagagcgtgttcacaagatccgaactcaaattttctccccagtggagccaccatggaaagattgtgacctgccagctgcaggacgccgatggcaaattcctgtccaacgacacagtgcaactcaatgttaagcacacccctaagctggagatcaaagtgacgccgagcgatgcgatcgtccgggaaggggactctgtgaccatgacatgtgaggtttccagcaccaaccccgagtacacaaccgtgtcttggcttaaggatggaacgtccctgaaaaagcagaatacatttaccctcaacctgcgcgaagtcacaaaagaccagagcggcaagtattgctgtcaggtgtctaatgatgtggggcctggaagatccgaggaagtcttccttcaagttcagtacgctcccgagcctagcaccgtgcagattctgcattcccccgccgtggaaggctctcaagtcgagtttctctgcatgagcctggccaacccgctgcctaccaattatacatggtaccacaacggcaaggagatgcaggggcggacggaagagaaagtgcacatccccaagattctcccttggcatgctggaacctattcctgtgttgccgaaaatatcctgggcacagggcagcgcggacccggcgctgagcttgacgtgcagtatccccctaaaaaggtcaccacagtgattcaaaacccgatgcccatcagagaaggggataccgttacgctgagctgcaattacaactcttccaatcctagcgtgacacggtacgagtggaaaccccacggagcctgggaggaaccttctctcggcgtcctgaagattcagaaagtgggctgggacaacaccaccatcgcgtgtgcccgctgcaacagctggtgttcctgggcttctcccgtcgcccttaatgtgcagtacgctccgagagatgttcgggtgcgcaagatcaagcctctgagcgagattcattccgggaacagcgtctctctccagtgcgacttctccagctctcaccccaaagaagtgcaatttttctgggagaagaatggaagactgctgggcaaagaatcccagctcaactttgatagcatctcccctgaggacgccgggtcttatagctgctgggttaataactccattggacagacagcgtctaaggcctggaccctggaggtgctttacgctccccggcgcctgagagtcagcatgtcccctggcgaccaggtgatggaagggaaaagcgccacactccggtgtgagtctgatgctaatcccccggtgtcccactatacgtggttcgactggaacaatcaaagcctgccttaccattctcagaagctcagactggaacccgttaaggtccagcactccggagcctattggtgccagggcaccaacagcgtgggcaaagggcgctctcccctcagcacactgaccgtgtactactcccctgagacaatcggacggagagtcgccgtgggcctggggagctgtctcgctattctgatccttgcgatctgcggactgaagctccaacgccgggatgccgagtcttccgaaatgcagagaccgccccgcacctgtgacgatacggttacctatagcgctctgcataaacggcaggtcggcgactacgagaatgtcattcctgattttcccgaagacgaggggatccactattccgaactgattcaattcggcgtgggagagagacctcaggcccaggagaacgttgattacgtgatccttaagcattga

SEQ ID NO: 3089 - RNA, 2544 nt, synthetic construct
  misc_feature 1..2544: note = AAB06448 variant
  source 1..2544: mol_type = other RNA
atgcatctgctcggcccctggctgcttctgctcgtgctggagtaccttgccttcagcgactcctctaagtgggtctttgaacaccctgagaccctgtatgcttgggaaggggcctgcgtttggatcccgtgtacatacagagcgctcgatggagacctggagagcttcattctgtttcacaaccccgaatataataaaaacacgtccaagttcgatggcacccggctctacgagtctacaaaagacgggaaggtgcctagcgagcagaaacgcgtgcaatttctgggagataagaataagaactgcaccctttccatccatcccgtccacctgaatgactctggccagctcgggctgagaatggaaagcaaaacagagaagtggatggaacggattcatcttaacgtgtccgagcgcccttttccccctcacatccagctgccgcccgagattcaggaaagccaagaggttaccctcacatgtctgctgaatttctcttgctatggataccctatccagctccagtggctgcttgaaggcgtgcccatgagacaggctgccgtcacctccacgagcctgaccatcaaatctgtgttcacacggtccgagctcaagtttagccctcaatggtctcaccatggcaaaattgttacctgtcagctgcaggatgccgacgggaagttcctttccaacgatacagtgcagctgaatgtcaagcacacccccaaactcgaaatcaaggtgacgccgagcgacgctattgtgcgcgagggagattccgtcacaatgacctgcgaggtttctagctccaaccctgaatatacaaccgtgagctggctgaaagacggcacctctctgaagaaacaaaatacatttacgctcaacctgagagaggtgaccaaggatcagtccgggaaatactgttgccaggtcagcaatgacgtgggacccggccggtctgaagaggttttccttcaagtgcagtacgcccctgaacccagcacagtccagatcctgcattcccccgctgtggaggggtctcaggttgagtttctctgtatgagcctggccaaccctcttccgaccaattatacatggtaccacaacggaaaggaaatgcaaggccgcaccgaggaaaaggtgcacattcccaaaatcctgccttggcatgcgggcacgtattcctgcgtcgccgagaacattctcgggacaggacagagaggccccggggctgaactggacgtgcagtaccctcccaagaaagtcaccaccgtgatccagaatccgatgcctatccgggagggagatacagttaccctgagctgtaactataattcttccaaccccagcgtgacacgctacgagtggaagcctcacggcgcctgggaggaaccctctctcggggtcctgaaaattcaaaatgtgggatgggacaacacgaccatcgcttgcgccgcgtgcaattcctggtgtagctgggcctcccctgttgctcttaacgtgcagtatgcccccagagatgtccgggtgcgcaagattaagccgctgtctgaaatccatagcggcaattccgtgtctctccagtgcgacttcagctccagccaccctaaagaggttcagttcttttgggagaagaacggcagactgctggggaaagaatctcaacttaatttcgattccattagccccgaggacgctggatcttactcctgttgggtcaacaatagcatcggccagacagcctctaaggcctggaccctcgaagtgctgtacgctccccggagactgcgcgtgagcatgtcccctggggatcaggtcatggagggaaaaagcgcgacacttacctgcgaatctgacgccaacccgcccgtgtcccattatacgtggtttgattggaataaccagagcctgccttaccactcccaaaagctccggctggagcccgttaaggtgcagcactctggcgcttattggtgtcaggggaccaacagcgtcggcaaaggaagatcccctctctctacactgaccgtgtactatagccccgagacaatcggccgccgggttgccgtggggctgggatcctgccttgccattctcatcctggctatttgtggcctgaagctccaaagacgctggaaacggacccagtctcagcaggggctgcaagaaaatagctccggacagagcttctttgtcagaaacaagaaagtgcgccgggcccctctttctgagggcccccattccctggggtgctacaatccgatgatggaagacggcatcagctatacgacactcagattccctgagatgaacattccccgcaccggagatgcggaatcttccgagatgcagcggcctcccccggactgtgacgatacagttacctacagcgctctgcacaagagacaggtgggcgactacgagaatgtcatccctgattttcccgaagacgaggggatccattattctgaactgattcaattcggagtgggcgagcggcctcaggcccaggaaaacgtggattacgtcatccttaagcactga

SEQ ID NO: 3090 - RNA, 2544 nt, synthetic construct; identical to SEQ ID NO: 3089
  misc_feature 1..2544: note = ABK41939 variant
  source 1..2544: mol_type = other RNA

SEQ ID NO: 3091 - RNA, 1605 nt, synthetic construct
  misc_feature 1..1605: note = CAE47548 variant
  source 1..1605: mol_type = other RNA
atgctgagacggcgcggcagccccgggatgggagtgcacgtcggcgccgctctcggggccctgtggttctgccttaccggagcgctggaggttcaggtgcctgaagacccggtggtcgctctcgtgggcacagatgccacgctgtgttgctccttttctcccgagcctgggttcagccttgcccaactgaacctcatctggcagctgaccgacacaaagcagctggttcattcctttgctgaaggacaggatcaaggctctgcctacgctaatagaaccgccctcttccccgacctgcttgcgcagggcaacgccagcctgcggctccagcgcgtgagagtcgctgatgaggggtcctttacatgtttcgtgtctattcgggactttggaagcgccgctgtttcccttcaggtggccgcgccttatagcaaaccctctatgaccctggaacctaataaggatctgcgcccgggcgacacagtcaccatcacgtgctccagctaccaagggtatcccgaggccgaggtgttctggcaggatggacagggcgtgcctctcaccgggaacgtcacaacctctcagatggctaatgaacaaggactgtttgacgttcactccattctgagagtggtgctcggcgccaacggcacatacagctgtctggtccggaatcccgtgcttcagcaggatgctcattcttccgttaccatcacgcctcaacgcagccccacaggggccgtggaggtccaggtgccggaagaccctgttgtggccctggtcggaaccgatgctacactcagatgctccttctctcccgagcctggctttagcctggcgcagcttaacctgatttggcagctcaccgacaccaaacaactggtgcactccttcacagaggggcgggaccagggaagcgcctatgctaatcgcacggccctgtttcccgatctcctggcccagggcaacgcttctcttagactgcagcgggtccgcgtggccgacgaagggtccttcacctgtttcgttagcatcagagattttggatctgcggctgtgagcctccaagtcgccgccccctactccaagccttctatgacactggagccgaataaagaccttcggcccggcgataccgtgacaattacctgcagctcctatagaggctaccctgaagctgaggttttctggcaggacgggcagggagtgcccctgacgggcaacgtcacaaccagccagatggccaatgaacaagggctctttgatgtgcattctgtgctgcgcgttgtcctgggagctaacggcacctactcctgtctcgtgcggaatcctgtgctgcagcaggacgcccacgggagcgtcacaatcaccggccagcccatgacattcccgcctgaggcgctttgggtgacggttggactgtctgtgtgcctcatcgccctgctggtcgctcttgcctttgtgtgttggagaaagattaagcaatcctgcgaggaagagaacgctggcgccgaagatcaggacggggagggagaaggcagcaaaaccgcgctccagcccctgaagcactccgattctaaagaggacgacgggcaagagatcgcctga

SEQ ID NO: 3092 - RNA, 639 nt, synthetic construct
  misc_feature 1..639: note = BAG57312 variant
  source 1..639: mol_type = other RNA
atgcccctgctcctgcttctgcctctcctgtgggccgaccttacccacagaccgaagatcctgattcccggcacactcgagcctgggcatagcaaaaacctgacgtgctccgtgtcttgggcttgtgaacagggaacaccccctatcttcagctggctgtccgccgcgcccacctctctcggccctcggaccacacacagctccgtcctgattatcaccccgcgcccccaagatcatgggacaaatcttacctgccaggttaagtttgctggagccggcgtgacgaccgagagaacaattcagctgaacgtgacctacgtccctcagaatcccacaaccgggatcttccctggagacggctctggcaaacaagaaacgcgggccggggtggttcacggagctatcggcggggccggagtgacagctctcctggccctttgtctgtgcctcatctttttcattgtcaagacccatcgcagaaaagcggcccggacagctgtgggccgcaacgatacccaccccaccacagggagcgcctccccggttagcgacggagcttcttggcaccctgtgtgtcccgccgatacgtccagccagtgcggccctccctcttgtcccattcagcattttcagaattga

SEQ ID NO: 3093 - RNA, 1095 nt, synthetic construct
  misc_feature 1..1095: note = AAK83654 variant
  source 1..1095: mol_type = other RNA
atgcccctgctcctgcttctgcctctcctgtgggccggcgctcttgccatggacccgaacttctggctccaggtgcaagagagcgtcaccgttcaggaagggctgtgcgtgctggtgccctgtacatttttccaccctatcccctactatgataaaaattcccctgtccatggatactggtttagagagggcgcgattatctctcgggacagccccgtggctacgaacaagctggatcaggaagttcaggaggaaacccaagggcgcttcagactcctgggagacccttcccggaataactgctctcttagcattgtggatgcccgcagacgggacaatggctcctactttttccgcatggagagagggtctacaaagtatagctataaatccccgcagctgagcgtccacgtgaccgatctcacacatcggcccaagatcctgattcctggaacccttgagcccggccactctaaaaacctgacatgttccgttagctgggcctgcgaacagggcacccctcccatcttttcttggctctccgctgccccgacgagcctggggcctcgcaccacacattcttccgtgctgatcattacccccagacctcaggaccacggaacaaatctcacctgtcaagtcaagttcgctggcgccggggtgacgacagagcggaccatccagctgaacgtgacatacgtcccccagaatcccaccaccggaatttttcctggcgatgggagcggaaagcaggaaacacgcgcgggcgttgtgcacggcgccatcgggggagctggcgtgacggcccttctggctctctgcctgtgtcttattttctttatcgtcaaaacccatagacggaaggccgcgcgcacagccgtggggagaaacgacacccacccgacaaccggatccgcttctcccaaacatcaaaagaaaagcaagctgcacggccctacggagacatccagctgctctggggccgctcccaccgttgagatggatgaggaactccactatgcctccctgaatttccatggaatgaaccctagcaaggacacctctacagaatacagcgaggtgcggacccagtga

SEQ ID NO: 3094 - RNA, 1095 nt, synthetic construct; identical to SEQ ID NO: 3093
  misc_feature 1..1095: note = CAD36509 variant
  source 1..1095: mol_type = other RNA

SEQ ID NO: 3095 - RNA, 624 nt, synthetic construct
  misc_feature 1..624: note = AAA52295 variant
  source 1..624: mol_type = other RNA
atgcagagcggcacccactggagagtgctggggctctgcctgctttccgtcggagtttggggccaagacgggaacgaggaaatgggaggcatcacacagacgccctacaaggtgtctattagcgggaccacagtgatcctgacctgtcctcagtatccgggatccgagattctctggcagcataatgataaaaacatcggcggcgacgaagatgacaagaatattgggtctgatgaggaccacctgagccttaaagagttctccgaactggagcaatctggatactatgtctgctacccccggggcagcaagcctgaagatgccaacttttatctctacctgcgcgctagagtgtgtgagaattgcatggaaatggacgttatgtccgtggccacaatcgtcatcgtggatatttgtatcaccgggggactgctcctgcttgtttattactggagcaaaaaccggaaggcgaaggctaaacccgtgacacgcggcgccggggccggaggcagacagcggggccagaataaggagcgccctccccctgtcccgaaccccgactacgagcctattagaaaagggcagcgggatctgtattctggactcaatcaacgcagaatctga

SEQ ID NO: 3096 - RNA, 495 nt, synthetic construct
  misc_feature 1..495: note = AAH25703 variant
  source 1..495: mol_type = other RNA
atgaagtggaaagccctgttcaccgctgccatcctccaggcgcaactgcccattacagaggctcagagctttggccttctggaccctaagctctgctacctgcttgatgggatcctgttcatttatggagtgatcctcacggccctgtttctgagagtcaaattctcccggtctgccgacgctccggcctaccagcagggccaaaaccagctctataatgaactgaaccttgggcgcagagaggaatacgatgttctggacaagcggcgcggaagagatcccgagatgggcgggaaacctcagcggcgcaagaatccccaggaaggactctataacgagctgcaaaaggacaaaatggctgaggcctacagcgaaattggcatgaagggcgagagacggcgcgggaaaggacacgatggcctttatcaggggctgtccaccgcgacaaaggacacctacgatgccctccatatgcaggctctgcctcccagatga

SEQ ID NO: 3097 - RNA, 2229 nt, synthetic construct
  misc_feature 1..2229: note = CCDS7897.1 variant
  source 1..2229: mol_type = other RNA
atggacaagttctggtggcacgccgcttggggcctgtgcctcgtgcccctgagccttgcccagatcgatctgaacattacctgtagatttgcgggggtcttccatgttgagaaaaatggacggtactccatctctcgcacagaagctgccgacctctgcaaggcctttaacagcacgctgcctaccatggctcaaatggagaaagccctttccattggcttcgaaacatgtagatatgggtttatcgagggacacgtggtgattccgcggatccatcccaattctatctgcgctgccaacaataccggcgtctacattctgacaagcaacacctcccagtatgatacatactgtttcaatgcgtctgcccctcccgaagaggactgcaccagcgtgacggatctccctaacgcttttgacgggcccatcaccattacaatcgttaatcgcgatggaaccagatatgtgcagaagggcgagtaccggacaaaccctgaagacatttatccgtccaatcccaccgatgacgatgtcagctctggctccagctctgagcgctccagcacgtctgggggatacatcttctacacattttccaccgtgcaccctattcccgacgaagatagcccttggatcacagactccaccgacagaatccccgccaccacactgatgtctacgagcgctaccgccacagagaccgcgacaaaacggcaggagacctgggattggttctcctggctgtttctcccgagcgaatctaagaaccatctgcacacgacaacccaaatggccggcacctccagcaatacaatttctgctgggtgggagcctaacgaagagaatgaagacgagcgcgatagacaccttagcttctccggatctggcatcgacgatgacgaggattttattagctccaccatcagcacaacgccccgggccttcgaccataccaagcagaaccaggattggacacagtggaacccttctcactccaatcccgaagttctgctccaaaccacaacccgcatgacggacgtggatagaaacgggaccacagcttatgagggaaattggaaccccgaagcccatcctccgctgattcaccacgagcatcacgaagaggaggaaacaccccatagcacctctaccatccaggccacgccttccagcacaaccgaggaaacagctacccagaaagagcagtggttcggcaatcggtggcacgaaggctaccgccaaacccccaaggaggactcccattctacaacggggaccgcggccgctagcgcccacacatcccaccctatgcagggaagaaccacaccctctccggaggacagctcctggaccgactttttcaaccctatcagccatcccatgggccgggggcaccaggccggaagacgcatggatatggattcttcccatagcattacgcttcaacctacagctaatcccaacaccggcctggtcgaagacctcgatcggaccgggcctctgtctatgacaacccagcagtccaatagccagtcttttagcacatcccacgagggactggaagaggacaaagatcaccccacgaccagcacactcacctcttccaacagaaatgacgtgacaggcggccgccgggatccgaaccatagcgaggggtccaccacgctgcttgaaggatatacctctcactaccctcatacaaaggagagcagaaccttcatccccgtgacatccgccaaaaccggctcttttggggtcacagcggttaccgtgggagacagcaattccaacgtgaatcgctctctgagcggcgatcaagacacgttccacccctccgggggcagccatacaacccacggatctgaatccgatggccacagccatgggtctcaggagggaggcgctaacaccacatccgggcctattcggaccccgcagatccccgaatggctcattatcctggccagccttctggccctcgctctgatcctggccgtctgtattgctgtgaactctagacgccggtgcggacagaagaagaaactcgttatcaattccggcaacggggccgtggaggacagaaagcctagcggcctgaatggagaggcgtccaaaagccaagaaatggtccaccttgtgaacaaggagtctagcgaaacgcccgaccagtttatgacagccgatgagacccgcaatctgcagaacgttgacatgaaaattggcgtgtga

SEQ ID NO: 3098 - RNA, 2100 nt, synthetic construct
  misc_feature 1..2100: note = XM_006718388.1 variant
  source 1..2100: mol_type = other RNA
atggacaagttctggtggcacgccgcttggggcctgtgcctcgtgcccctgagccttgcccagatcgatctgaacattacctgtagatttgcgggggtcttccatgttgagaaaaatggacggtactccatctctcgcacagaagctgccgacctctgcaaggcctttaacagcacgctgcctaccatggctcaaatggagaaagccctttccattggcttcgaaacatgtagatatgggtttatcgagggacacgtggtgattccgcggatccatcccaattctatctgcgctgccaacaataccggcgtctacattctgacaagcaacacctcccagtatgatacatactgtttcaatgcgtctgcccctcccgaagaggactgcaccagcgtgacggatctccctaacgcttttgacgggcccatcaccattacaatcgttaatcgcgatggaaccagatatgtgcagaagggcgagtaccggacaaaccctgaagacatttatccgtccaatcccaccgatgacgatgtcagctctggctccagctctgagcgctccagcacgtctgggggatacatcttctacacattttccaccgtgcaccctattcccgacgaagatagcccttggatcacagactccaccgacagaatccccgccaccacactgatgtctacgagcgctaccgccacagagaccgcgacaaaacggcaggagacctgggattggttctcctggctgtttctcccgagcgaatctaagaaccatctgcacacgacaacccaaatggccggcacctccagcaatacaatttctgctgggtgggagcctaacgaagagaatgaagacgagcgcgatagacaccttagcttctccggatctggcatcgacgatgacgaggattttattagctccaccatcagcacaacgccccgggccttcgaccataccaagcagaaccaggattggacacagtggaacccttctcactccaatcccgaagttctgctccaaaccacaacccgcatgacggacgtggatagaaacgggaccacagcttatgagggaaattggaaccccgaagcccatcctccgctgattcaccacgagcatcacgaagaggaggaaacaccccatagcacctctaccacggcctccgctcacacaagccatcctatgcagggccggaccacaccctcccctgaggactctagctggaccgacttctttaatcccatctcccacccgatgggccgcgggcaccaggcgggaagacggatggatatggactctagccattccatcacccttcagcctacagccaaccccaatacgggcctggtcgaagatctcgacagaaccgggcctctgagcatgacaacccaacagtctaactcccagagcttctctacatcccacgagggactggaagaggataaagaccatcccaccacgagcacactcacctctagcaatcgcaacgatgtgaccggcgggcggagagaccctaatcactccgagggaagcacaaccctgcttgaaggctacacatctcactatccccatacgaaggagtcccgcacctttattccggtgacaagcgctaaaaccggctccttcggggtcacagccgttaccgtgggagattctaacagcaatgtgaaccggtccctgtctggcgaccaagatacgtttcaccctagcgggggatcccataccacacacggctctgaaagcgacgggcattcccacggcagccaggagggaggcgccaataccacatctgggcccatcagaacaccccagattcctgagtggctcatcattctggcttcccttctggccctcgcgctgatcctggctgtctgtatcgccgtgaacagccgccggagatgcggacagaagaaaaagctcgttattaactctggcaatggggccgtggaagatcgcaagccgtccggactgaacggcgaggctagcaaatctcaagaaatggtccaccttgtgaataaggagtccagcgaaacccccgaccagttcatgaccgccgacgagacgcggaacctgcagaatgttgatatgaaaatcggggtgtga

SEQ ID NO: 3099 - RNA, 1377 nt, synthetic construct
  misc_feature 1..1377: note = AAA35572 variant
  source 1..1377: mol_type = other RNA
atgaacagaggcgtgcccttccggcatctgctcctggtccttcagctggccctcctgcctgctgccacccaagggaagaaagttgtgcttggaaagaaaggcgacacagtggagctgacgtgcaccgcgagccagaagaaatccatccagtttcactggaaaaattctaaccagattaagatcctcgggaatcaaggcagcttcctgacaaaaggaccgtccaagctgaacgatcgcgctgactctagacggagcctctgggatcaggggaattttcccctgattatcaaaaaccttaagattgaagactccgatacctacatctgtgaggtcgaagaccagaaagaggaagtgcagctgctcgttttcggactgacagccaattctgatacccaccttctgcaaggccagagcctcacactgaccctggagtcccctcccggcagctctccttccgtgcagtgccgcagccccagagggaagaacatccagggaggcaagacgctctctgtctcccaactggagcttcaggacagcgggacctggacatgtaccgtgctgcagaatcaaaagaaggttgaatttaaaattgatatcgtggtcctcgccttccagaaggcttcttccattgtgtataaaaaggagggagaacaggtggagtttagcttccctctggcctttacagtcgagaaacttaccggctccggggaactgtggtggcaggctgagcgggcctctagctccaagagctggatcacgttcgacctcaagaacaaagaagtttctgtgaagcgcgtgacacaagatccgaaactgcagatgggaaagaaactgcccctccatctgacccttcctcaggcgctgccccagtacgccggctccggcaatctcacactggctcttgaggccaagaccgggaagctgcaccaagaagtcaacctcgtggttatgagagctacccagctgcagaaaaatctgacatgcgaggtgtggggacctacgagccccaagctcatgctgtctcttaaactggagaacaaggaagccaaagtcagcaagcgggagaaggcggtgtgggttctcaatccggaagccggcatgtggcagtgtctgctgtccgactctgggcaagtgcttctcgagagcaacattaaagtcctgcctacctggtccacacccgtgcagcctatggctctgatcgtcctcggaggcgtggccgggctgcttctgtttattggactcggcatcttcttttgcgttcgctgtagacatcggcgcagacaggctgaacggatgagccagatcaagcgcctgctgtctgagaaaaagacctgccaatgtccccacagattccagaaaacatgctcccccatttga

SEQ ID NO: 3100 - RNA, 186 nt, synthetic construct
  misc_feature 1..186: note = CAA44323 variant
  source 1..186: mol_type = other RNA
atgaagagattcctgtttctcctgcttaccatcagcctgctcgtgatggtccagattcaaacaggcctgtccgggcagaacgacacgtctcagaccagctccccctctgccagctccaatatctctggaggcattttccttttctttgttgctaacgccatcattcacctgttttgcttcagctga

SEQ ID NO: 3101 - RNA, 186 nt, synthetic construct
  misc_feature 1..186: note = AAP35780 variant
  source 1..186: mol_type = other RNA
atgaagagattcctgtttctcctgcttaccatcagcctgctcgtgatggtccagattcaaacaggcctgtccgggcagaacgacacgtctcagaccagctccccctctgccagctcctctatgagcggaggcatcttccttttctttgttgctaatgccattatccacctgttttgcttctcctga

SEQ ID NO: 3102 - RNA, 186 nt, synthetic construct; identical to SEQ ID NO: 3100
  misc_feature 1..186: note = ACS44650 variant
  source 1..186: mol_type = other RNA

SEQ ID NO: 3103 - RNA, 954 nt, synthetic construct
  misc_feature 1..954: note = EAW93489 variant
  source 1..954: mol_type = other RNA
atgaccgtggccagacccagcgtccctgctgccctgccgctcctgggcgagcttccccggctgctcctgcttgttctgctctgcctgcctgcggtgtggggcgactgtggactgccccctgatgtgcccaacgctcagcctgccctcgaaggccgcacatccttcccggaggacacggtcatcacctacaagtgcgaagagtcttttgtgaaaattcccggggaaaaggatagcgttatctgtctgaaaggatcccaatggtctgacattgaggagttctgcaatcaaaagagctgtcctaaccccggcgaaatcagaaatgggcagattgatgtgcctggaggcatcctttttggcgccacaatctccttctcttgcaacaccgggtataaactgtttggaagcacatccagcttctgtctcatttctggctccagcgtccagtggtctgaccccctgccggagtgccgggaaatctactgtcctgctccccctcaaattgataatgggatcattcagggagagcgcgaccactatggctacagacagtccgtgacctatgcctgcaacaaggggtttacaatgatcggagagcatagcatttactgtaccgttaataacgatgaaggcgagtggtctgggccccctcccgaatgccgggggaagtcccttacgagcaaagtgccgcccaccgtccagaagcctacaaccgtgaatgtgcccacaaccgaggtctcccctacgtctcagaaaacaaccacaaagaccaccacacccaacgctcaggccacgcgcagcaccccggtttccagaacaaccaaacacttccatgaaacaacccctaataagggaagcggcacgacatctgggaccacccggctgctctccggacacacatgctttaccctgacaggcctgctcgggacgctggtgaccatgggacttctgacatga

SEQ ID NO: 3104 - RNA, 882 nt, synthetic construct
  misc_feature 1..882: note = EAW93497 variant
  source 1..882: mol_type = other RNA
atgatcggcgagcacagcatttactgcaccgtgaacaatgacgaaggggagtggtccggaccccctccggaatgtagaggcaagtctctgacaagcaaagttccccctacggtccagaagcccaccacagtgaacgtgcctaccacagaggtctcccccacctctcaaaagacaaccacgaagaccacaacccctaatgcccaggggacagaaaccccgagcgtgctccagaaacatacgacagagaacgtttccgctacccggacaccccctacaccccagaagcctaccaccgtgaatgtccccgccacgatcgtgaccccgacacctcaaaagcccaccacaattaacgttcctgcgaccggagtgtctagcacgccccagcgccacacaatcgtcaatgtgtccgctaccggcaccctgcccacacttcagaaacctaccagagccaacgatagcgccacaaagtctccggctgccgctcagacgtccttcattagcaaaaccctgtctacaaagaccccctccgccgcgcaaaatcctatgatgacaaacgccagcgctacccaggccacgctcaccgctcagaaatttacaaccgccaaggtggcgttcacacagtctccctccgccgctcggaaaagcaccaatgtccattcccctgttacgaacgggctgaaatctacacaacgctttcccagcgcccacatcaccgctacaagatccaccccggtgagccggaccacaaagcatttccacgagacgacccctaataaaggatctggcacaacctccggcacaacccgccttctgagcgggcacacgtgctttacactcaccggactgctgggcaccctcgtgacaatggggctgcttacctga

SEQ ID NO: 3105 - RNA, 804 nt, synthetic construct
  misc_feature 1..804: note = EAW93493 variant
  source 1..804: mol_type = other RNA
atgatcggcgagcacagcatttactgcaccgtgaacaatgacgaaggggagtggtccggaccccctccggaatgtagaggcaagtctctgacaagcaaagttccccctacggtccagaagcccaccacagtgaacgtgcctaccacagaggtctcccccacctctcagaaaacaaccacgaagaccacaacccctaatgcccaagggacagaaaccccgagcgtgctccagaaacatacgacagagaacgtttccgctacccggacaccccctacaccccagaagcctaccaccgtgaatgtccccgccacgatcgtgaccccgacacctcaaaagcccaccacaattaacgttcctgcgaccggagtgtctagcacgccccagcgccacacaatcgtcaatgtgtccgctaccggcaccctgcccacacttcagaaacctaccagagccaacgatagcgccacaaagtctccggctgccgctcagacgtccttcattagcaaaaccctgtctacaaagaccccctccgccgcgcaaaatcctatgatgacaaacgccagcgctacccaggccacgctcaccgctcagaaatttacaaccgccaaggtggcgttcacacagtctccctccgccgctcctacccggagcacgcccgtctcccgcacaaccaagcattttcacgagacaaccccgaataaagggtctggaaccacaagcggcacgaccagactgctttccggccatacatgcttcaccctgacagggctcctgggaaccctggttacgatgggcctcctgacatga

SEQ ID NO: 3106 - RNA, 1146 nt, synthetic construct
  misc_feature 1..1146: note = AAA52168 variant
  source 1..1146: mol_type = other RNA
atgaccgtggccagacccagcgtccctgctgccctgccgctcctgggcgagcttccccggctgctcctgcttgttctgctctgcctgcctgcggtgtggggagactgtgggctgccccctgatgtgcccaacgctcagcctgccctcgaaggccgcacatccttcccggaggacacggtcatcacctacaagtgcgaagagtcttttgtgaaaattcccggggaaaaggatagcgttatctgtctgaaaggatcccaatggtctgacattgaggagttctgcaatagaagctgtgaagtgcctacacggcttaactccgcctctctgaagcagccctatatcacccagaattactttcctgtcggcacagtggttgagtatgaatgccgccccgggtacagacgggagccgagcctctcccctaaactgacctgtcttcagaacctgaagtggagcacagctgtggagttctgcaagaaaaagtcttgtcccaatcctggagaaattcgcaacggccaaatcgatgtccccggcgggatcctctttggagccaccatttccttcagctgcaatacgggctataaactgtttgggtctacctccagcttctgtctgatctctggatccagcgtgcagtggtccgaccccctccctgagtgcagagaaatttactgcccggctccccctcagatcgataacggcattatccagggggagcgggaccactatggataccgccaatctgtgacatacgcctgtaataagggctttaccatgattggcgaacatagcatctattgcacagtcaacaatgatgagggggagtggtccggaccccctcccgaatgtagaggcaaaagcctgacctctaaggttccgcctacggtgcagaagcccacaaccgtgaacgtccctacaaccgaggtgtcccccaccagccagaaaacaacgaccaagacaaccacacctaatgcgcaggccacccggtctacgcccgttagccgcacaaccaaacacttccatgaaaccacaccgaacaaggggtccggaaccacatctggcacgaccagacttctgagcgggcacacatgctttaccctcacaggactgcttggcaccctggtgacgatgggcctcctgacctga

SEQ ID NO: 3107 - RNA, 2577 nt, synthetic construct
  misc_feature 1..2577: note = CCDS73385.1 variant
  source 1..2577: mol_type = other RNA
atgctgcagaccaaggacctcatctggacactgttctttcttggcacggccgtgagcctgcaagtcgatattgttccctcccagggggagatctctgtgggagaaagcaaattctttctctgccaggtggctggcgacgccaaggataaagacatttcctggttctctcctaacggggagaagctgaccccgaatcagcaaagaatcagcgtcgtgtggaacgatgactcctctagcacacttaccatttacaatgcgaacatcgatgacgctggaatctataaatgtgttgtgacaggcgaagatgggtccgagagcgaagccaccgtcaatgtgaagatttttcagaagctgatgttcaaaaacgcccccacacctcaggagtttcgggagggagaagacgctgttatcgtgtgcgatgtcgtgtcttccctgccccctaccattatctggaagcacaaaggccgcgacgtgattctcaagaaagatgtcagattcatcgttctgagcaataactacctccagattcggggcatcaagaagacggacgaggggacctatcgctgtgaaggaagaatcctggcccggggcgagattaattttaaagacatccaagtgattgtgaacgtgccccctacaatccaggctcgccagaatattgtgaacgccaccgcgaatcttgggcagtctgttacactggtgtgcgatgccgagggattcccggaacccaccatgtcctggacgaaggacggcgagcaaatcgaacaggaggaagatgacgagaaatacatctttagcgatgactcttcccagctcacaattaagaaagtcgataagaacgacgaggctgaatatatctgtattgccgagaataaagctggggaacaagatgccaccatccatctgaaggtgttcgcgaagcctaaaattacatacgttgagaaccagaccgccatggaacttgaggagcaggtcaccctgacatgcgaagctagcggagaccccatcccttccatcacgtggagaacctctacacggaacattagctccgaggaaaaggccagctggacccgccccgagaaacaggaaacactcgatggccacatggtcgtgagatctcatgctcgggtctccagcctgaccctgaagtctatccaatatacggacgccggcgagtacatttgtacagccagcaataccatcgggcaggactcccagtctatgtacctcgaggtgcagtatgctccgaaactgcaaggacctgttgcggtgtacacctgggaaggcaaccaggtcaatattacatgcgaggtgtttgcctatcccagcgctaccatctcctggttccgcgatgggcagcttctgcctagctctaactactccaatattaagatctataacacacccagcgcctcttacctcgaagttacgcccgactccgagaatgatttcggaaactataattgtaccgccgtgaacagaatcggccaggagagcctggaatttattcttgtccaagctgacacaccttcctctccgagcatcgatcaggtggagccctactcctctaccgcccaggtgcagttcgacgaacctgaggcgacagggggagttcccattctgaagtacaaagctgaatggcgggccgtcggcgaggaggtgtggcacagcaagtggtatgatgccaaagaggcttccatggagggcatcgtgaccattgtcgggctcaagcctgaaacgacctacgccgtgcgcctggctgccctgaatggaaaaggcctcggggagatcagcgcggcctctgaatttaagacacaacccgttcagggagagccgtccgctcctaagctggagggccagatgggggaagacggcaacagcatcaaagtgaatcttattaagcaagatgacggaggctctcccatcagacattatctggtccggtacagagccctctccagcgagtggaaacctgaaattcgcctgccctctgggagcgatcacgtgatgcttaagtccctggactggaacgctgagtatgaagtttacgtggtcgccgagaatcagcagggaaaaagcaaggcggcccacttcgtgtttcggacctctgctcagcctacagccatccccgctaacggctccccgaccagcgggctctccacgggagccattgttggcatcctgatcgtgattttcgtcctgctcctggtggtggtcgatatcacatgctattttcttaacaagtgtgggctgttcatgtgcattgccgttaatctctgcggcaaagctggacctggcgcgaaggggaaagacatggaggaaggaaaggccgctttttctaaagacgagagcaaggaacccatcgtggaggtgagaaccgaggaagaacgcacacccaaccatgatggcgggaaacacaccgaacctaatgagaccacaccgctgacggaacccgagaagggacctgtcgaggccaagcccgaatgtcaagagaccgaaacaaaacctgcccccgctgaggtgaagaccgttcctaacgacgccacacagaccaaagaaaatgagtccaaggcgtga

SEQ ID NO: 3108 - RNA, 867 nt, synthetic construct
  misc_feature 1..867: note = ABK41933 variant
  source 1..867: mol_type = other RNA
atgggccacaccagacggcaggggacaagcccctccaagtgcccttacctgaacttctttcaactcctggtgcttgccggactgtctcatttctgtagcggcgtcatccacgttacgaaagaggtgaaggaagtggctaccctctcctgcgggcataatgtctctgtggaggaactggcccagacacgcatttattggcagaaagagaagaaaatggttcttaccatgatgagcggagacatgaacatctggccggaatacaagaatagaacaatttttgatatcaccaacaatctgtccattgtgatcctcgcgctgcggccctctgacgagggcacatatgagtgtgtcgtgctgaagtacgaaaaagatgctttcaagcgcgagcacctcgccgaagttaccctgagcgtgaaagccgactttcctacgccctccatcagcgatttcgagattcctacctctaacatcagacggattatctgctccacaagcgggggatttcccgagcctcatctttcttggctggaaaatggcgaggaactcaacgctattaataccacagtctcccaggacccggagaccgaactgtatgccgtgagctctaaacttgatttcaacatgacgacaaatcactcctttatgtgtctgatcaagtacggccacctccgcgtgaaccaaaccttcaattggaacacaaccaagcaggagcattttcccgacaatctgctgcctagctgggctattaccctcatctccgtcaacgggatcttcgttatttgctgtctgacatattgctttgcccccagatgtcgggagcgcagacggaacgaacgccttagacgggagtctgtgcgccctgtgtga

SEQ ID NO: 3109 - RNA, 867 nt, synthetic construct; identical to SEQ ID NO: 3108
  misc_feature 1..867: note = AAA36045 variant
  source 1..867: mol_type = other RNA

SEQ ID NO: 3110 - RNA, 990 nt, synthetic construct
  misc_feature 1..990: note = CCDS3009.1 variant
  source 1..990: mol_type = other RNA
atggacccccagtgcaccatgggcctgagcaacatcctcttcgtgatggcctttctgctttccggggctgcccctctgaagattcaagcgtacttcaatgagacagctgatctcccgtgtcagtttgccaactctcagaatcagagcctgtccgaacttgtcgttttctggcaagaccaggagaacctggtgctcaatgaagtgtatctgggaaaagagaagtttgattctgtccacagcaaatacatgggcagaacgtccttcgactctgatagctggaccctgcggctccataacctgcagatcaaggacaaagggctttatcagtgcattatccaccataagaagcccacaggaatgattcgcatccaccaaatgaactccgaactgagcgtgctcgccaatttttctcagcctgagatcgttcccatttccaatatcaccgagaacgtgtacattaatctgacatgtagctctatccatggctatcctgaacccaaaaagatgtccgtccttctgagaaccaaaaacagcacaattgagtacgatggggtgatgcagaagtctcaggacaatgttaccgaactctatgatgtgtccatcagcctgtccgtctctttccctgacgtgacgagcaacatgaccatcttttgcattctggagacagataaaacccggctcctgtccagcccgttctctatcgagcttgaagacccccaacctccccctgatcacattccctggatcacagctgtgctgccgaccgtcattatctgtgttatggtgttttgcctcattctgtggaagtggaagaaaaagaaacgccctagaaattcctacaagtgtggaacgaacacaatggagcgggaagagagcgaacagaccaaaaagcgcgagaaaatccacatccccgagagatctgacgaagcccagcgggtgttcaagagctccaagacatctagctgcgacaaatccgatacctgtttttga

SEQ ID NO: 3111 - RNA, 708 nt, synthetic construct
  misc_feature 1..708: note = AAA59674 variant
  source 1..708: mol_type = other RNA
atggccctgcccgtgaccgctctcctgcttcctctggccctcctgcttcacgcggctagaccgagccagttccgggtctctcccctggaccgcacatggaacctcggcgagacggttgaactgaagtgccaagtgctgctctccaatcctaccagcgggtgttcctggctgtttcagcccagaggagccgccgcttctcctacattccttctgtacctcagccagaacaaacccaaggccgctgagggcctggatacccagcggttttccgggaaacgccttggagacacattcgtgctgaccctctctgattttagacgggaaaatgagggctattacttctgcagcgccctgtccaacagcatcatgtatttttctcatttcgtccctgtgtttctgccggcgaagcccacaaccacgcctgcgccccgccctcccaccccggctcctacaattgcctcccaacccctcagcctgagacctgaagcctgtcggcccgccgccgggggagccgttcacacccgcggccttgacttcgcttgcgatatctacatttgggctcccctggctggcacatgtggggtgctcctgctttctctggtcatcaccctctattgcaatcatagaaaccggcgcagagtgtgtaaatgccctcggccggttgtgaagtccggagacaagcccagcctgtctgcccgctacgtctga

SEQ ID NO: 3112 - RNA, 2472 nt, synthetic construct
  misc_feature 1..2472: note = EAW57688 variant
  source 1..2472: mol_type = other RNA
atgaccgtgctgcaggagcccgtccaagccgctatctggcaggccctcaaccactacgcgtatagagacgctgttttcctggccgaacggctttacgccgaggtgcatagcgaagaggctctgtttctcctggccacatgctattaccgctccggcaaggcttataaagcctacagacttctgaaggggcactcttgtacgacccctcagtgcaaatatctcctggcgaagtgttgcgtggatctgagcaaactcgccgaaggagagcagattctgtccggcggggtcttcaataagcaaaagtctcatgacgatatcgtgacagagtttggagacagcgcttgtttcaccctttccctgctcggccacgtttactgcaaaacagatcggctggccaaggggtctgaatgttaccagaaaagcctttccctgaacccgtttctctggagccccttcgagtctctgtgcgaaattggagagaagcctgaccccgatcagacctttaaattcacatccctgcagaattttagcaactgtctccctaattcttgcaccacgcaagtgcccaaccattccctgagccaccgccagcctgagaccgtccttacagaaaccccgcaggacacaatcgagctgaatagactcaacctggaatcttccaatagcaagtattcccttaacaccgattctagcgtgtcctacattgacagcgctgttatctctcccgatacggtgcctctgggcacaggcacctccatcctcagcaagcaggtccaaaataaacccaagacagggcggtctctgctgggaggccctgccgcgctcagccccctgaccccgtccttcgggattcttcctctggagaccccctctcctggagacggcagctatctccagaactacacaaatacgcctcccgtgatcgatgtgccctccaccggggccccgagcaaaaagtctgtcgctcgcattggacagacaggcaccaaatccgtttttagccaatctggcaactccagagaagtgacacccatcctggcccagacccagagctccgggcctcagacgtctacaacaccccaagtgcttagccctaccattacctctcccccgaatgctctgcctcggcgctccagcagactcttcacctccgacagctctacaacgaaggagaactccaaaaagctgaagatgaaatttccccctaagatccccaaccggaaaaccaagagcaaaacaaataagggaggcattacccagcctaacatcaatgactctctggagatcacaaagctcgattccagcattatctctgaagggaaaattagcaccatcacgccccagattcaggccttcaacctgcaaaaggccgctgcgggacttatgtccctgctccgcgagatgggcaaagggtatctggccctgtgtagctacaattgcaaggaagctatcaacatcctttctcacctcccgtcccatcactataataccggatgggtcctgtgccagattggcagagcctacttcgagctgagcgaatacatgcaggccgagcggatcttttccgaggtgcgcagaattgaaaactatcgggttgagggcatggaaatctactctacaaccctctggcatctgcagaaagacgtggctcttagcgtcctgtccaaggatctcacagacatggataaaaattctcctgaggcctggtgtgcggctgggaactgcttcagcctgcaaagagaacacgacattgccatcaagtttttccagcgcgccatccaggtggatcccaattatgcttacgcctataccctgcttggacacgagtttgttctcacggaggaactggacaaggctctggcctgtttccggaacgcgattagagtgaatccccgccattacaacgcctggtatggcctcgggatgatctactacaaacaggagaagttttccctggctgaaatgcacttccaaaaagcccttgatattaatcctcagtctagcgtcctgctctgccatatcggagtggtccagcacgctctgaagaagtccgagaaagccctggacacacttaacaaggcgattgtgatcgatccgaaaaaccccctctgtaagtttcatcgggccagcgttctgttcgctaatgagaaatataagtctgccctgcaagaactcgaggaactgaaacagattgtgcctaaggagtcccttgtctactttctgatcggcaaggtgtataaaaagctcgggcagacccacctggctctgatgaacttcagctgggccatggaccttgaccccaaaggcgccaataaccagatcaaggaagctattgataaaagatacctccctgacgatgaggagcccatcacacaagaggaacagattatgggaaccgacgaatctcaggagtccagcatgaccgatgcggacgatacacagctgcacgccgctgaatctgacgagttttga

SEQ ID NO: 3113 - RNA, 2475 nt, synthetic construct
  misc_feature 1..2475: note = AAB34378 variant
  source 1..2475: mol_type = other RNA
atgaccgtgctgcaggagcccgtccaagccgctatctggcaggccctcaaccactacgcgtatagagacgctgttttcctggccgaacggctttacgccgaggtgcatagcgaagaggctctgtttctcctggccacatgctattaccgctccggcaaggcttataaagcctacagacttctgaaggggcactcttgtacgacccctcagtgcaaatatctcctggcgaagtgttgcgtggatctgagcaaactcgccgaaggagagcagattctgtccggcggggtcttcaataagcaaaagtctcatgacgatatcgtgacagagtttggagacagcgcttgtttcaccctttccctgctcggccacgtttactgcaaaacagatcggctggccaaggggtctgaatgttaccagaaaagcctttccctgaacccgtttctctggagccccttcgagtctctgtgcgaaattggagagaagcctgaccccgatcagacctttaaattcacatccctgcagaattttagcaactgtctccctaattcttgcaccacgcaagtgcccaaccattccctgagccaccgccagcctgagaccgtccttacagaaaccccgcaggacacaatcgagctgaatagactcaacctggaatcttccaatagcaagtattcccttaacaccgattctagcgtgtcctacattgacagcgctgttatctctcccgatacggtgcctctgggcacaggcacctccatcctcagcaagcaggtccaaaataaacccaagacagggcggtctctgctgggaggccctgccgcgctcagccccctgaccccgtccttcgggattcttcctctggagaccccctctcctggagacggcagctatctccagaactacacaaatacgcctcccgtgatcgatgtgccctccaccggggccccgagcaaaaagtctgtcgctcgcattggacagacaggcaccaaatccgtttttagccaatctggcaactccagagaagtgacacccatcctggcccagacccagagctccgggcctcagacgtctacaacaccccaagtgcttagccctaccattacctctcccccgaatgctctgcctcggcgctccagcagactcttcacctccgacagctctacaacgaaggagaactccaaaaagctgaagatgaaatttccccctaagatccccaaccggaaaaccaagagcaaaacaaataagggaggcattacccagcctaacatcaatgactctctggagatcacaaagctcgattccagcattatctctgaagggaaaattagcaccatcacgccccagattcaggccttcaacctgcaaaaggccgctgcggagggacttatgtccctgctccgcgaaatgggcaaagggtatctggccctgtgtagctacaattgcaaggaggctatcaacatcctttctcacctcccgtcccatcactataataccggatgggtcctgtgccagattggcagagcctacttcgaactgagcgagtacatgcaggccgagcggatcttttccgaagtgcgcagaattgagaactatcgggttgaaggcatggagatctactctacaaccctctggcatctgcagaaagacgtggctcttagcgtcctgtccaaggatctcacagacatggataaaaattctcctgaagcctggtgtgcggctgggaactgcttcagcctgcaaagagagcacgacattgccatcaagtttttccagcgcgccatccaggtggatcccaattatgcttacgcctataccctgcttggacacgagtttgttctcacggaagaactggacaaggctctggcctgtttccggaacgcgattagagtgaatccccgccattacaacgcctggtatggcctcgggatgatctactacaaacaggaaaagttttccctggctgagatgcacttccaaaaagcccttgatattaatcctcagtctagcgtcctgctctgccatatcggagtggtccagcacgctctgaagaagtccgagaaagccctggacacacttaacaaggcgattgtgatcgatccgaaaaaccccctctgtaagtttcatcgggccagcgttctgttcgctaatgaaaaatataagtctgccctgcaagagctcgaggagctgaaacagattgtgcctaaggaatcccttgtctactttctgatcggcaaggtgtataaaaagctcgggcagacccacctggctctgatgaacttcagctgggccatggaccttgaccccaaaggcgccaataaccagatcaaggaggctattgataaaagatacctccctgacgatgaggaacccatcacacaagaggaacagattatgggaaccgacgagtctcaggaatccagcatgaccgatgcggacgatacacagctgcacgccgctgagtctgacgagttttga

SEQ ID NO: 3114 - RNA, 1788 nt, synthetic construct
  misc_feature 1..1788: note = AAA51947 variant
  source 1..1788: mol_type = other RNA
atgagagtgctgctcgccgctctgggccttctgttcctcggggccctgcgggcgtttccccaggaccgccctttcgaggatacctgccacggaaacccgagccattactatgacaaggctgtcagacggtgttgctaccgctgtcccatgggcctttttcctacacaacagtgcccccagagacctacggattgtcggaaacagtgcgaacccgactattacctggatgaggccgaccgctgtaccgcctgcgttacatgttccagagatgacctcgtggaaaagaccccttgcgcttggaactctagccgggtgtgtgagtgccgcccggggatgttctgctccacatctgccgtcaatagctgtgctagatgctttttccactccgtgtgtcccgccggaatgatcgttaaatttcctggcaccgcgcaaaagaatacagtgtgcgaacccgcctctcctggggtcagccccgcttgtgcctccccggagaactgcaaagagcctagctctggaaccattccccaggctaagcctacgcccgtgtcccccgccaccagctctgcgtccacaatgcctgttcggggcggcacccgcctggcccaggaagctgccagcaagctgacaagagctccggattctccctccagcgtggggcggccttcctctgaccccggactcagccctacccagccctgtccggagggctccggggattgccgcaaacaatgtgaacctgactattacctggatgaggccggaagatgcacggcctgtgtcagctgctctcgggacgaccttgtggagaagacaccctgcgcttggaactccagcagaacctgtgaatgccgccctggcatgatctgtgcgacatctgccaccaatagctgcgctcggtgtgtgccctatcctatttgcgccgccgagaccgtcacaaaaccccaggatatggctgaaaaggacacgaccttcgaggccccgcctctggggacacagcccgattgtaatcccacccctgaaaacggagaggcgccggcttccacatctcccacccagagcctcctggttgactcccaagccagcaaaacgcttcctatccccacatctgcccctgtggctctgtccagcaccggcaagcccgtgctcgatgccggccctgtcctgttttgggtgattctggttctcgtggtcgtggttgggtcttccgctttcctgctttgccatagacgcgcctgtcggaagagaatccgccagaaactgcacctctgctaccccgtgcagaccagccaaccgaagctggagcttgtcgactcccggcctagacgctctagcacacagctgcggtccggagcgtctgtgaccgaacccgtcgccgaggaaagaggcctcatgagccagcctctgatggagacatgtcattccgtgggggctgcctacctggaaagcctccccctgcaggatgcttctccggccggaggcccttccagcccccgcgaccttcctgagccccgggtttctacggagcacaccaataacaaaatcgaaaagatttatatcatgaaagcggatacagtgattgtcgggaccgtgaaggccgagctgcccgaaggaagaggcctcgctggccctgccgagccggaactggaggaggaacttgaggctgaccacacaccccattaccctgaacaagagaccgagccccctctggggtcctgcagcgatgttatgctctctgtggaagaggaaggaaaagaggaccccctgcctacggccgccagcggcaagtga

SEQ ID NO: 3115 - RNA, 912 nt, synthetic construct
  misc_feature 1..912: note = EAW97060 variant
  source 1..912: mol_type = other RNA
atggccaccagcagatacgagcccgtggctgaaatcggcgtcggggcctatggaacagtttacaaggcgcgggaccctcactccggccatttcgtggctctgaaatctgtgcgcgtcccgaacgggggaggcgggggaggcggcctccccattagcacggtgagagaggttgccctgcttcggcgcctggaagcctttgagcaccctaatgtggtcagactcatggatgtgtgcgctacctcccggacagaccgcgaaatcaaggttaccctggtgttcgagcatgtcgatcaggaccttagaacatatctggataaagctccccctcccgggctccctgccgagaccattaaggacctgatgcggcaatttctgcgcggactcgatttcctgcacgccaactgtatcgtgcatagagaccttaaaccggaaaatattctggtgacatctggcgggaccgtcaagctcgcggattttggactggcccggatctacagctatcagatggctcttacgcccgttgtggtgaccctgtggtaccgcgcccctgaggtcctcctgcagtccacatatgctacccccgtggacatgtggtctgttggctgcatcttcgccgaaatgtttagacggaagcctctgttctgtgggaacagcgaggcggatcagctcggaaaaatttttgacctgatcggccttcccccggaggatgactggcctcgcgacgtgtccctgcccagaggcgccttccctccccgggggcccagacctgtccaaagcgtggttccggaaatggaggaatctggagctcagctcctgcttgagatgctgacatttaatccccacaagcgcatttccgccttccgggctctccagcacagctacctgcataaagatgaaggcaaccctgagtga

SEQ ID NO: 3116 - RNA, 912 nt, synthetic construct; identical to SEQ ID NO: 3115
  misc_feature 1..912: note = AAA35673 variant
  source 1..912: mol_type = other RNA

SEQ ID NO: 3117 - RNA, 690 nt, synthetic construct
  misc_feature 1..690: note = AAB50213 variant
  source 1..690: mol_type = other RNA
atggacgtgtgcgccaccagcagaacagatcgggagatcaaggtcacgctggttttcgaacacgtggaccaggatctccgcacctacctggacaaagctccccctccgggccttcccgccgagacaattaaggatctgatgagacaatttctccgggggctggacttccttcatgcgaactgtatcgtgcaccgcgatctgaaacctgaaaatattctcgtcacctccggaggcacagtgaagctggctgactttgggctggccagaatctattcttaccagatggccctcacccccgttgtggtcacactgtggtatcgggctcctgaggtgcttctgcagagcacctacgccacgcccgttgatatgtggtccgtgggatgcattttcgctgaaatgtttcgcagaaaacctctcttctgtggcaactctgaggccgaccagctggggaagatctttgatcttatcggactgccgcccgaggacgattggcctcgggacgtcagcctcccccgcggcgcgttccctcccagaggcccgcggcctgtgcaatccgtggtccccgaaatggaggaatctggggcccagctgctgctcgagatgctgacctttaatcctcataagcgcattagcgctttcagagcccttcagcactcctatctgcataaagacgagggaaaccccgaatga

SEQ ID NO: 3118 - RNA, 336 nt, synthetic construct
  misc_feature 1..336: note = AAH15669 variant
  source 1..336: mol_type = other RNA
atggccaccagcagatacgagcccgtggctgaaatcggcgtcggggcctatggaacagtttacaaggcgcgggaccctcactccggccatttcgtggctctgaaatctgtgcgcgtcccgaacgggggaggcgggggaggcggcctccccattagcacggtgagagaggttgccctgcttcggcgcctggaagcctttgagcaccctaatgtggtcagactcatggatgtgtgcgctacctcccggacagaccgcgaaatcaagagatgtttcgttgagtctctgagctccgtggagacccttaaacccacatcttgggccaagagcctgacctga

SEQ ID NO: 3119 - RNA, 429 nt, synthetic construct
  misc_feature 1..429: note = ACY78326 variant
  source 1..429: mol_type = other RNA
atggagcccgccgctggcagctccatggaaccttctgccgactggctggcgaccgctgccgccagagggcgggtggaggaagtccgcgctctcctggaggccggagcccttccgaacgctcccaatagctacggcagacggcctatccaggttatgatgatggggtccgcgcgcgtggccgaactgctcctgcttcacggagctgagcccaactgcgccgatcctgctacactgacgagacccgtgcatgacgccgcgcgggagggcttcctcgataccctggtcgtgctgcaccgcgccggggctccttgtgccatgccgggagctgtttgcccctggacatggctcagatcttgggccattgccatgagccatggcacctgtgctcggctgcgcggcgcgcctgaagccgtgacaatgcccgcttga

SEQ ID NO: 3120 - RNA, 351 nt, synthetic construct
  misc_feature 1..351: note = EAW58598 variant
  source 1..351: mol_type = other RNA
atggagcccgccgctggcagctccatggaaccttctgccgactggctggcgaccgctgccgccagagggcgggtggaggaagtccgcgctctcctggaggccggagcccttccgaacgctcccaatagctacggcagacggcctatccaggttgggcgcggatccgcggccggcgctggggatggaggcagactgtggcggacaaagttcgccggcgaactcgagtctgggagcgcttccattctgcgcaaaaagggaagacttcccggcgagttttctgaaggggtgtgcaaccaccggcctccccctggagacgccctgggcgcgtgggaggccaaagaagaggagtga

SEQ ID NO: 3121 - RNA, 471 nt, synthetic construct
  misc_feature 1..471: note = AFN61598 variant
  source 1..471: mol_type = other RNA
atggagcccgccgctggcagctccatggaaccttctgccgactggctggcgaccgctgccgccagagggcgggtggaggaagtccgcgctctcctggaggccggagcccttccgaacgctcccaatagctacggcagacggcctatccaggttatgatgatggggtccgcgcgcgtggccgaactgctcctgcttcacggagctgagcccaactgcgccgatcctgctacactgacgagacccgtgcatgacgccgcgcgggagggcttcctcgataccctggtcgtgctgcaccgcgccggggctagactcgacgttcgggatgcctggggacgcctgcctgtggaccttgctgaggaactgggccatagagatgtcgcccggtatctccgcgccgctgcgggcgggacaagaggatctaatcacgcccggattgacgctgccgaaggcccgagcgatatccccgactga

SEQ ID NO: 3122 - RNA, 327 nt, synthetic construct
  misc_feature 1..327: note = CCQ43815 variant
  source 1..327: mol_type = other RNA
atggaggtgatgatgatgggcagcgccagagtcgctgaactgctcctgcttcacggggccgagcccaactgcgcggaccctgctaccctgacacggccggttcatgatgccgcccgcgaaggattcctcgacacgctggtggtgcttcacagagctggcgcccggctggatgtccgcgacgcttgggggagactccccgtggatctggccgaggaactgggacatcgggacgttgcgcgctacctcagagccgctgccggcgggacccggggatccaatcacgctcgcatcgatgccgcggagggcccttctgacattcccgattga

SEQ ID NO: 3123 - RNA, 399 nt, synthetic construct
  misc_feature 1..399: note = AAA82236 variant
  source 1..399: mol_type = other RNA
atggtgagacggttcctggtcaccctccgcatcagacgggcctgcgggccccctcgcgttagagtgtttgtggtccacattccgcggctgacaggcgagtgggctgcccccggagcgcctgctgccgtggcccttgttctgatgctcctgcgcagccagagacttggccaacagcccctgcctcggcgccccgggcatgacgatggacagagaccttccggcggggctgccgctgccccgcggcgcggagcgcagctcagacggccccgccactctcatcctacgagagcccggagatgtcccggcggcctgcctgggcacgctggaggcgccgctcccgggcgcggagccgcgggccgggccagatgcctggggccgagcgctcgcggacctggctga

SEQ ID NO: 3124 - RNA, 2109 nt, synthetic construct
  misc_feature 1..2109: note = CCDS12584.1 variant
  source 1..2109: mol_type = other RNA
atggagagcccctccgcccctccgcacagatggtgcatcccctggcagcggctgctcctgaccgcttctcttctgacattctggaaccctcccacgaccgccaagctcacaattgaaagcaccccttttaatgtggcggagggcaaagaagtcctgcttctggttcataacctcccccaacacctgttcgggtactcctggtataagggagagcgcgtggacggcaatagacagatcattgggtacgtgatcggaacacagcaggctacccctggcccggcctattctgggcgggaaattatctaccccaacgccagcctgctcatccaaaatattatccagaacgatacaggattttataccctgcatgtcattaaatccgaccttgtgaatgaggaggctacgggccagttccgcgtttaccctgaactgcccaagccttctatcagctccaacaatagcaaacccgtggaggataaggacgccgtcgcttttacctgtgaaccggagacacaggatgccacctatctctggtgggtgaacaatcaatctctgcctgtttcccccagacttcagctgagcaacggcaatcggacactcaccctgttcaacgtgacgcgcaatgacacagcgtcttacaagtgcgagacccagaaccctgtctccgccagacggagcgattctgtgattctgaacgtgctctacgggcccgacgctcccacaatctcccctctgaataccagctatcgctccggagaaaaccttaatctgtcttgtcacgccgctagcaacccgcccgcccagtactcctggtttgtcaatggcaccttccaacagagcacacaggagctctttattcctaacatcacggttaataactctgggtcctatacctgccaagcgcataatagcgatacaggactgaacagaaccacagtgaccacgatcacagtgtacgccgaaccccctaaacccttcattacctctaataacagcaatccggtcgaggacgaagatgctgtggcccttacctgtgagcctgagatccagaacacaacctatctgtggtgggttaataaccagtccctccccgtgtctcctcggctgcagctgagcaacgacaatcgcacactcacgctgctttccgtcaccagaaacgatgtgggcccctacgaatgcgggattcaaaatgagctgagcgttgaccactctgaccctgtgatcctcaacgtcctgtatggacccgatgacccgacaatttcccctagctacacctactatcggcccggcgtgaatctttctctgtcctgtcacgctgccagcaatccccctgcccagtactcctggctcatcgatggcaatatccagcagcatacacaagaactgtttatttctaacatcaccgagaagaatagcgggctgtatacgtgccaggctaacaattccgcgtctggacacagccgcaccacagtcaaaaccattacagtgtccgccgaactcccgaagcccagcatctcttccaacaatagcaaacctgttgaggacaaggatgctgtggccttcacctgtgagcccgaagcccagaacacgacatacctgtggtgggtcaatggccagtctcttcctgtgtcccccagactgcaactcagcaacgggaaccggaccctgacactgtttaatgttaccagaaacgacgctcgcgcctatgtgtgcggcattcagaactctgtcagcgcgaaccggtccgatcctgtgacccttgacgtgctctacggacccgatacaccgatcatcagccctcccgactcttcctatctgagcggggctaatctgaacctctcctgtcattctgccagcaatccttctccccagtactcctggagaattaacggaatcccgcagcaacacacgcaggttctgttcattgccaagatcacccctaataacaatggcacatacgcttgcttcgtcagcaaccttgccaccggccgcaataactccattgtgaaatctatcacagtgagcgcttccgggaccagccccggactgtctgccggcgcgacggtcgggattatgatcggagtgctcgttggcgtggccctgatctga

SEQ ID NO: 3125 - RNA, 1035 nt, synthetic construct
  misc_feature 1..1035: note = AAA51739 variant
  source 1..1035: mol_type = other RNA
atggggccccctagcgccccgccctgcagactgcacgtgccttggaaggaggtcctcctgaccgcttcccttctgacattctggaatccccctacgaccgccaaactcacaatcgaatctaccccctttaacgttgcggagggcaaggaagtgctgcttctggctcataacctccctcagaatcggattggatacagctggtataaaggcgagcgcgtggacgggaactccctgatcgtcggatacgtgattggcacacaacaggccaccccggggcccgcctattctggaagagaaacaatctaccctaatgctagcctgctcattcagaacgttacccagaatgatacgggcttctataccctgcaagtgatcaagtccgaccttgtcaacgaggaggccacaggccagtttcacgtgtaccccgaactgcctaaaccctctatcagctccaataacagcaatccggttgaggataaggacgctgtggccttcacctgtgaacctgaggtccagaacacaacctatctctggtgggtgaatgggcagtctctgcccgtgtcccctcggcttcaactgagcaacggaaatatgacgctcacactgctgtctgtcaagcgcaacgatgcgggctcctacgagtgcgaaattcagaaccccgccagcgctaatagatctgaccccgttaccctcaacgtgctgtacgggcctgatggaccgacaatctcccccagcaaagccaattatcggcctggcgagaaccttaatctgtcctgtcatgctgcctctaatccccctgcgcagtacagctggtttattaacgggaccttccagcaatccacccaggaactctttatccccaacattacagtgaataacagcggatcttatatgtgccaggcccacaattccgctacgggcctgaaccgcaccacagtcaccatgatcacagtgagcggctctgccccggttcttagcgctgtggccaccgtcgggattacgatcggagtgctggccagagttgctctcatctga

SEQ ID NO: 3126 - RNA, 1173 nt, synthetic construct
  misc_feature 1..1173: note = AAB04533 variant
  source 1..1173: mol_type = other RNA
atgggcgccaccacaatggaccaaaagagcctgtgggctggggtggtcgttctcctgcttctgcagggaggctccgcctacaaactcgtgtgctatttcacgaactggtctcaggatagacaggagcccgggaagtttacccctgaaaatatcgacccgttcctgtgtagccaccttatttactcctttgcgtctatcgagaacaataaagtgattatcaaggataaaagcgaagtcatgctgtatcagacaattaactccctcaagaccaagaatcccaaactgaagatcctgctctctatcggaggctacctgttcgggagcaaaggatttcatcctatggtggactccagcacatctcggcttgagttcattaactccatcattctgtttctccgcaatcacaacttcgatggcctggacgttagctggatctatcccgatcaaaaggaaaatacccattttacagtgcttattcacgagctggctgaggccttccagaaagactttaccaagtctacgaaggaaagactcctgctgaccgccggcgtctccgctgggcggcagatgatcgataacagctaccaggtggagaaactcgccaaggacctggatttcattaatcttctgtcttttgacttccatggatcctgggaaaaacctctcatcacaggccacaacagccccctgtccaaggggtggcaagatcgcggaccttctagctattacaatgttgagtacgctgtgggctattggatccacaaagggatgccgtccgagaaggtcgtgatgggcattcccacctacggacatagcttcacacttgcctctgcggaaaccacggtgggcgcccctgcttccgggcccggagccgctggccctatcacagagagctctgggtttctggcctattacgaaatttgccagttcctcaaaggagcgaagatcaccagactgcaggaccagcaagtcccctatgccgttaagggcaaccagtgggtggggtacgacgatgtgaaaagcatggagacaaaggtccagtttctgaaaaatctcaacctgggaggcgctatgatttggtccatcgacatggatgacttcaccggcaagtcttgtaaccaagggccgtatcctcttgtgcaggccgttaaacggagcctgggatccctctga

SEQ ID NO: 3127 - RNA, 2832 nt, synthetic construct
  misc_feature 1..2832: note = AAD40367 variant
  source 1..2832: mol_type = other RNA
atgacccagagaagcatcgccggccccatttgcaacctgaagttcgtgacactcctggtcgctctttcctctgagctgccttttctcggggccggagttcaactgcaggacaatggctacaacgggcttctgatcgcgattaatccccaggtgcccgaaaaccagaatctcatcagcaacattaaagagatgatcacggaagctagcttctatctgtttaatgccaccaagcggcgcgtgttctttagaaacatcaaaattctgatccctgccacatggaaggctaataacaattctaaaattaagcaagagagctacgaaaaggccaacgtcatcgtgaccgattggtatggagctcacggcgacgatccctacacactccagtatcgggggtgtggaaaagagggcaagtacattcatttcacccctaattttctgcttaacgacaatctgacagccggctatgggtcccgcggaagagttttcgtgcacgagtgggcgcatctccggtggggcgtctttgatgaatacaacaacgacaaacccttctacatcaatgggcagaaccagattaaggtgacccgctgctctagcgatatcacgggaatctttgtttgtgagaaaggcccttgcccgcaagaaaattgtattatctccaagctgttcaaggaggggtgcacctttatttataacagcacacagaatgccaccgcttctatcatgttcatgcagtcccttagctctgtggtcgagttctgtaacgcctccacacacaatcaggaagctcccaacctgcaaaatcagatgtgcagcctcagatctgcctgggacgtgattaccgattccgcggactttcatcacagcttccctatgaacggaacggagctgccccctcccccgacattttccctggtgcaggccggcgataaagtcgtttgtctcgtgctggacgtgtctagcaagatggctgaagccgatcggcttctgcaactccagcaggctgccgagttctacctgatgcagatcgtcgaaatccacacctttgtgggcattgcctccttcgacagcaaaggggagatccgcgctcaacttcatcagattaattctaacgacgatagaaagctgctcgtttcctatctgcctacaaccgtgagcgcgaaaaccgacatctctatttgcagcggactgaagaaaggctttgaggtcgtggaaaagctcaatgggaaggcctacggatccgttatgatcctggtgacatctggcgatgacaaacttctggggaactgtctccccacggtcctgagctccggaagcaccatccactctattgctcttggctccagcgccgcccctaatctggaggaactctctcggctgacaggcgggctgaagttctttgtgcccgatatctccaacagcaactccatgattgacgctttctctcgcatcagctccggaaccggcgatatttttcagcagcatatccaactcgagtctacaggggaaaatgtcaaaccccaccaccagctgaagaacaccgtgacggttgacaatacagtgggaaacgataccatgttccttgtcacctggcaggccagcggccctccggagattatcctgtttgaccccgatgggagaaaatattacacaaataacttcatcaccaatctcacattccggacggcgtccctgtggattcctggcaccgctaagcccggacattggacatataccctgaacaatacacaccatagccttcaggccctcaaggtgaccgttacgtctcgcgcctccaacagcgctgtgcctcccgccaccgtcgaggcttttgtggaaagagactctctgcacttcccgcatcctgtgatgatctacgccaatgttaaacaaggcttttaccccattctgaacgcgacagtcaccgccacagtggagcctgaaaccggggaccccgtgacgctccggctgcttgatgacggagctggcgccgatgtcatcaagaatgacgggatttattccagatacttctttagcttcgctgccaacggacgctattctctgaaagtgcacgttaatcacagcccttccatcagcacacccgcgcattctatcccgggctcccacgccatgtacgtgcctgggtataccgctaacggcaacattcagatgaatgccccgcggaagtccgtcggaagaaacgaggaggaacgcaaatggggcttttcccgggtgtctagcgggggatccttctctgttctcggcgtgcccgctgggcctcatccggatgtctttcccccttgcaagatcattgacctggaggccgtgaaggttgaagaggaactgacacttagctggaccgcccccggagaggatttcgaccagggccaggctacctcctacgagatcagaatgtctaaaagcctccaaaatattcaggatgactttaacaatgcgatcctggtgaacacatccaagcgcaatcctcagcaagccgggatccgggaaattttcacgtttagcccccagatctctaccaacggccctgagcaccagcccaatggagaaacacacgagtcccatagaatttatgtcgctatccgcgccatggatcggaacagcctgcagtctgccgtgtccaatattgctcaagcccctctcttcatcccgcccaacagcgaccctgtgcccgcgagagattacctgatccttaaaggcgtcctgaccgctatggggctcattggaatcatttgcctgatcattgttgtgacacaccataccctgtctcgcaagaaacgggccgacaagaaggaaaatggcacgaaacttctctga

SEQ ID NO: 3128 - RNA, 708 nt, synthetic construct
  misc_feature 1..708: note = AAF82135 variant
  source 1..708: mol_type = other RNA
atggaggaagagacccacacagacgccaagatcagagctgaaaacggcacggggagctctccccggggacctggctgctccctgcgccatttcgcctgtgagcagaatctcctgagcagaccggatgggtccgcgtcttttcttcaaggagacaccagcgtgctggctggcgtctacgggcccgccgaagttaaagtgtccaaggagattttcaacaaagccacactcgaggtgatcctgcggcctaagattggacttcccggcgtcgctgaaaaatctcgcgagagactgatccggaatacctgcgaagccgtggttctcggcacactgcaccctcgcaccagcattacagtggtcctccaggtggtttccgatgctgggagcctgctggcctgttgccttaacgcggcctgtatggctctggtggacgccggagtccccatgagagctctcttttgcggcgtggcctgtgcgctggattctgacgggacccttgtgctggatcctacgtccaagcaggagaaggaggcccgggctgtcctcaccttcgccctggacagcgttgaacgcaaactgctcatgtcttccacaaagggactgtatagcgataccgagcttcagcaatgcctggctgccgcccaggctgcgtctcagcatgtgtttagattctaccgggaatccctccagcgcagatatagcaaatcctga

SEQ ID NO: 3129 - RNA, 1752 nt, synthetic construct
  misc_feature 1..1752: note = CCDS6312.1 variant
  source 1..1752: mol_type = other RNA
atggaggtggccgctaactgcagcctgagagtcaagcggcccctcctggaccctcgcttcgaaggctacaaactttccctggagccgctcccctgttatcagctggaacttgatgccgcggttgctgaggtgaagctgagagacgatcagtacaccctcgaacacatgcatgcctttgggatgtataattacctgcactgcgactcttggtatcaggatagcgtgtactatatcgacacactgggacggattatgaacctcacggtcatgctggataccgcccttggcaaacctcgcgaggtgttcagactgcccacagacctcaccgcttgtgataatcggctgtgcgcctccatccatttttctagctccacatgggttaccctttctgacgggacaggacgcctgtacgtgattggcaccggggagagaggaaacagcgcttccgaaaagtgggagatcatgttcaatgaagaactcggcgatccttttattatcatccacagcatttctctgctgaacgccgaggaacattccatcgcgacgctcctgcttcggattgagaaagaggagctggacatgaagggcagcgggttctacgtctctctcgaatgggtgaccatctccaagaaaaatcaggataacaagaaatatgagattatcaagcgcgacattctgagaggaaaaagcgttccccactacgccgctatcgagcctgacggcaatgggcttatgatcgtgtcttataagtccctgacatttgtccaggccggacaagatctcgaagagaacatggacgaagatattagcgagaagatcaaagaaccgctgtactattggcagcagaccgaggacgatctgacagtgaccattcggctccccgaggactccacgaaggaagatatccagattcaattcctgcctgaccacatcaatatcgtgcttaaagatcatcagtttctggagggcaagctctactctagcattgaccacgaatccagcacatggatcattaaagagtctaactccctggaaatcagccttattaagaaaaatgaggggctgacctggcccgagctcgtcatcggagataagcagggcgaactgatccgcgactctgctcagtgtgccgcgattgccgagagactgatgcatctcacaagcgaggaactgaaccctaatcccgacaaggagaaaccgccttgcaacgctcaagaacttgaggaatgtgatatcttctttgaggaatcctctagcctgtgccggttcgacggcaacaccctcaagaccacacacgttgtgaatctggggtccaaccagtatctgtttagcgtgattgtcgatcccaaagagatgccttgtttctgccttcgccacgacgtggatgccctcctgtggcagccccattcttccaagcaagacgatatgtgggagcacatcgctacgttcaatgccctgggatacgttcaggccagcaaaagagacaagaagtttttcgcttgtgcgcccaactactcttatgccgctctctgcgaatgcctgcggagagtgtttatttaccgccagcctgccccgatgtccaccgtcctttataatcggaaagagggcagacaggtggggcaagttgccaagcaacaggtggctagcctggaaacaaacgatcccatcctcggattccaggccaccaatgagcgcctgtttgtcctgacaaccaaaaaccttttcctcattaaggtgaatacggaaaactga

SEQ ID NO: 3130 - RNA, 1563 nt, synthetic construct
  misc_feature 1..1563: note = CCDS41288.1 variant
  source 1..1563: mol_type = other RNA
atgagctctcccctggcctccctcagcaagaccagaaaagtgcctctgccgtccgagcccatgaaccctggccggcgcgggatcagaatttacggagacgaagatgaggtcgacatgctttctgatggctgcgggagcgaagagaagatctccgttccctcttgttatggaggcattggggctcctgtgagccgccaggtgcccgcctcccacgacagcgaactgatggcgttcatgacacggaaactctgggatctggagcaacaggtcaaggctcagacggacgagatcctttctaaagatcagaagattgccgccctggaagacctcgtgcaaaccctgagacctcatccggctgaggccacactgcagcggcaggaggaactcgagaccatgtgcgttcagctgcaacgccaggtgagagaaatggagcggtttctttccgattacggactgcagtgggtcggcgaacccatggaccaggaggatagcgaatctaagacagtgtccgagcacggcgagcgcgactggatgaccgctaaaaagttctggaaacctggggatagcctcgctccccctgaagttgactttgacagactgcttgcgtctctgcaagatctctccgagctggtggtcgaaggagacacacaggtgacccccgtgccgggcggggcccggctgcgcacgctcgagcctatccccctgaaactttatagaaatggaatcatgatgttcgatggcccttttcagcccttctacgaccccagcacccaacggtgtctgcgcgatattctcgacgggtttttcccttccgaactgcagagactttatccgaacggagtcccctttaaggtttctgatctgcggaatcaggtgtacctcgaggacggcctggatcctttccccggcgaggggagagtggtcggacgccagctgatgcataaggctctcgaccgggtggaggaacaccctggcagcagaatgacagccgaaaagtttctgaaccgccttcccaaattcgttatccggcaaggggaggtgattgatatcagaggaccgattcgcgacaccctgcagaattgctgtcctctccccgctcggatccaggaaattgtcgtggagacacctaccctggccgcggagagagaacgctcccaggagagccccaacacgcctgctcccccgctttctatgctgcggatcaagtccgaaaatggcgagcaagcctttctcctgatgatgcagcctgacaacacaatcggggatgttagagccctgctcgcccaggcccgcgtgatggacgccagcgctttcgagattttctctacctttccgcccacactgtatcaggatgacacccttaccctgcaagcggccggactcgtccctaaagctgccctgctgcttcgggccagacgggctcccaagagctccctcaaattctctcccggcccttgccccggccctgggcccggacctagccccggcccggggcctggaccctcccctggccccgggccgggccctagcccctgtcctggaccctctccctcccctcagtga

SEQ ID NO: 3131 - RNA, 429 nt, synthetic construct
  misc_feature 1..429: note = AAA88022 variant
  source 1..429: mol_type = other RNA
atggccaccaagatcgacaaagaggcttgcagagccgcgtacaacctggtgcgggatgacggcagcgctgtcatttgggttacattcaagtatgatgggtccacgatcgtgcccggagaacagggcgccgagtaccaacactttattcagcagtgtaccgacgatgtgcgcctcttcgcctttgtcagattcacaaccggggacgctatgtctaaacggagcaagtttgccctgatcacatggattggagaaaatgtgtccggccttcagcgcgctaaaaccgggacagataagaccctggttaaggaggtggtccaaaacttcgccaaagaatttgtgatctctgacagaaaggagctcgaggaagatttcatcaaaagcgagctgaagaaagcgggaggcgccaattatgacgctcagacggaatga

SEQ ID NO: 3132 - RNA, 495 nt, synthetic construct
  misc_feature 1..495: note = CCQ43891 variant
  source 1..495: mol_type = other RNA
atggccaccagagacccctgggtgtggatggctagccctgatttccaggcccggaagggcaaacgcgtccaccaagagacactggcgccgggggaaacgaaggacaaaatggagctcctgggacttagaggccccctggatctcctggggcctggagcccttctggctaccctcggcaagatggcccccggggaacataaagctcagcgggcccctaaggagtcccccgacaagacagctcgctgggcccagagagatcctcagggaccgcgggtttctctggaatacctggagcgcagagcgaccatgggccaccaagccagcctcgaccatcagggcccccgggcttcccagggggcctggggactgggcgagcgcacagtgtggaccgtgcctcaggatagacgggggtctcttgctacagaagcccgcatggagctgcaaggacccggcgtccctcaggcgagcagagcctcccgggaaacccagtggtga

SEQ ID NO: 3133 - RNA, 1623 nt, synthetic construct
  misc_feature 1..1623: note = AAO18361 variant
  source 1..1623: mol_type = other RNA
atgggccccggggagagagccggaggcgggggagacgctggcaaggggaacgccgcgggaggcggcgggggaggccggagcgctaccacagccgggtcccgcgccgtgtctgctctgtgcctcctgcttagcgtcggatccgccgctgcctgtctgctcctgggcgttcaggcggccgcccttcaagggagagtggctgctctggaagaggaacgggagctcctgcgcagagccggacctccgggcgcgctggatgcctgggctgaaccccacctcgagcggctgcttcgcgagaaactggacggcctcgccaagatcagaacggctcgggaagccccttctgagtgcgtgtgtccccctgggccccctggacgcagaggcaaaccggggcggcgcggagatcccggccctcccgggcagagcggaagagacggctaccctggccccctggggcttgatggaaagccgggcctgcctgggcccaaaggagaaaagggcgcccctggggacttcggcccccggggagatcagggccaggacggggctgcgggaccccctggcccgcccgggcctcccggagcccgcggccctcccggggataccggcaaggacggaccgagaggcgctcaagggcctgccggacccaaaggcgagcctgggcaggatggagagatgggccccaaggggcctcccggcccgaaaggagaacctggcgtccccgggaagaaaggagacgatggcacaccctcccagcctgggccgcccggacctaagggcgagcccgggtctatgggccctcggggagaaaatggcgtggacggggcccccggacctaagggcgagcccgggcatagaggaaccgacggcgctgccggcccgcgcggggcgcctggactcaaaggcgaacagggggatacagttgtgattgactatgatggacggatcctggacgctctgaaggggccccctggcccccaaggaccgcctgggccccctggcattcccggcgccaaaggagagctcggcctgcccggggcccctggaatcgatggcgagaaggggccgaaaggacagaagggcgaccccggcgaacctgggcccgctggacttaaaggcgaggccggggaaatgggactgagcggcctccctggggctgatggactgaagggcgagaagggcgaatccgccagcgactctcttcaggagtccctggcgcagctcattgtcgagcccgggcctccgggaccccctgggccccctggccccatgggactgcaaggcatccaggggccgaaaggactggatggcgccaagggcgaaaaaggggctagcggagagagaggcccttctgggctccccggacccgtgggccctcccgggctgatcggacttcctggcaccaagggcgaaaaagggcgcccgggagagcccggcctggacgggtttcctggaccccggggcgaaaagggggatagatccgagcgcggagagaagggcgaacggggcgttcctgggagaaaaggagtgaagggccagaaaggggagcccggaccgcctggcctcgaccaaccctgccctgtcgggcccgacggcctgcctgtgcccggatgttggcacaagtga

SEQ ID NO: 3134 - RNA, 492 nt, synthetic construct
  misc_feature 1..492: note = CAG25548 variant
  source 1..492: mol_type = other RNA
atgctggccagagctctcctgctttgcgccgtgctggcgctcagccacaccgctaacccctgttgctcccatccttgtcagaatcggggcgtctgcatgtctgttgggttcgaccaatacaagtgtgattgcacccgcacgggattttatggcgagaactgtagcaccccggaatttctgacaagaatcaaacttttcctgaagcccacccctaatacagtgcactacattctcacccatttcaaagggttttggaacgtggtcaataacatccccttcctgcggaatgccattatgtcctatgtgctgacatctcgcagccacctcatcgactcccctcccacctacaacgccgattatggatacaagtcttgggaggcttttagcaatctgtcctattacacgagagcccttcctccggttcccgacgattgccctacacccctgggcgtgaaagctctccatgccagcgtcttccaggaccggtcttga

SEQ ID NO: 3135 - RNA, 1632 nt, synthetic construct
  misc_feature 1..1632: note = AAC50809 variant
  source 1..1632: mol_type = other RNA
atgggcaccagcctgtcccccaacgacccttggccgctcaatcccctgtctatccagcaaacaacgcttctgctcctgcttagcgtgctggccaccgtccacgttgggcagagactcctgcggcagcgcagacggcagctgcgctccgctcctcccggacctttcgcctggcccctcattggcaacgcggctgccgtggggcaagccgctcatctgtcttttgccagacttgctcggcgctacggagatgtgttccagatcagactgggcagctgccctattgtcgtgctcaatggggagcgggccatccaccaggcgctggttcagcaaggatccgcctttgctgaccgcccggccttcgcttcttttagagtggtcagcggcggccggtccatggccttcgggcattatagcgaacactggaaggtgcagcgcagagcggcccattctatgatgcggaactttttcacacgccagcccagatcccggcaggttcttgagggacacgtgctgagcgaagctagagagctcgtcgccctgctggtgcgcggctctgctgatggggcctttctcgaccctcggcccctgaccgtggtcgccgttgctaatgtgatgtccgcggtgtgtttcggatgcagatacagccacgatgaccctgaatttcgcgagcttctgtctcataacgaggagttcggccggacagtcggggccggatccctcgtggatgttatgccctggctgcaatattttccgaatcctgtgagaaccgtcttccgcgagttcgaacagcttaaccggaattttagcaacttcattctggacaaatttctcagacactgtgagtccctgcgccccggcgctgcccctcgggatatgatggacgccttcatcctgtctgctgagaagaaagccgcgggcgatagccatgggggaggcgctagactcgacctggaaaatgtgcccgccacaatcaccgatatttttggggcctcccaggacacgcttagcaccgctctgcaatggctcctgcttctgttcacacgctaccccgacgttcagacccgggtgcaggccgagctcgatcaggtcgtgggaagagaccggctgccttgcatgggcgatcaaccgaacctgccctatgtcctcgcttttctgtacgaagccatgcgcttctcttcctttgtgcctgttacaatcccccacgcgaccacggccaatacaagcgtgcttgggtatcacattcctaaggacaccgtcgtgttcgttaaccagtggtctgtgaatcatgatcccctgaaatggccgaaccctgagaactttgaccccgctagattcctcgataaggacggactgatcaataaggatctgacaagccgggtcatgatttttagcgtgggcaaaagacgctgtatcggcgaagaactttctaagatgcaactcttcctgttcattagcatcctggcccaccagtgcgactttcgggctaaccctaatgagcccgccaaaatgaacttctcctacgggctcaccatcaagcctaaatcctttaaggtgaatgttaccctgagagaatctatggagcttctggattccgcggtccagaacctccaggccaaggaaacatgtcagtga

SEQ ID NO: 3136 - RNA, 333 nt, synthetic construct
  misc_feature 1..333: note = NM_001129828 variant
  source 1..333: mol_type = other RNA
atgtggatgggcctgatccagctcgtggagggggtcaagagaaaagaccaaggattcctggaaaaggagttttaccacaaaaccaacattaagatgcggtgcgagttccttgcctgttggcccgcttttacagttctgggcgaagcctggcgcgatcaggtggactggagcagactcctgcgggatgcggggcttgtgaaaatgtcccgcaagcctagagcttctagcccgctgtccaataaccatccccctacgcccaagcggttccctcgccagcccggaagagaaaaaggccctatcaaggaggtcccggggaccaaaggatctccctga

SEQ ID NO: 3137 - RNA, 384 nt, synthetic construct
  misc_feature 1..384: note = NM_001129826 variant
  source 1..384: mol_type = other RNA
atgtggatgggcctgatccagctcgtggagggggtcaagagaaaagaccaaggattcctggaaaaggagttttaccacaaaaccaacattaagatgcggtgcgagttccttgcctgttggcccgcttttacagttctgggcgaagcctggcgcgatcaggtggactggagcagactcctgcgggatgcggggcttgtgaaaatgtcccgcaagcctagagcttctagcccgctgtccaataaccatccccctacgcccaagcggcgcggatctggcagacaccctctcaatcccgggcctgaagccctgagcaaattcccgcggcagcccggacgcgagaagggccctatcaaagaggtccccggcaccaaggggtccccttga

SEQ ID NO: 3138 - RNA, 570 nt, synthetic construct
  misc_feature 1..570: note = AAI40914 variant
  source 1..570: mol_type = other RNA
atgaccgacaagacagagaaagtggccgtcgatcccgaaacggttttcaagagacctcgggagtgcgacagcccgtcctaccagaaacgccaaagaatggctctgctcgcccggaagcagggcgcgggggattctctgatcgctggaagcgccatgtccaaagccaagaaacttatgaccggccacgctattcccccttctcagctggacagccagatcgatgactttacagggttctccaaggatcgcatgatgcaaaagcccggatctaacgcccctgtgggcgggaatgtgaccagctcctttagcggagacgatctcgaatgtagagagacagcttcttcccccaaaagccagcgggaaattaacgccgacatcaagcgcaaactggtcaaggagcttagatgcgtgggccagaagtatgagaaaattttcgaaatgctggagggcgttcaggggcctaccgcggtgcggaagcgctttttcgaatctatcatcaaagaggccgctagatgtatgcggcgcgattttgtcaagcatctcaaaaagaaactgaagagaatgatttga

SEQ ID NO: 3139 - RNA, 795 nt, synthetic construct
  misc_feature 1..795: note = AAH20662 variant
  source 1..795: mol_type = other RNA
atgctgagactcctgcggcttgccctggctttctacggccgcaccgccgaccccgcggagagacaggggcctcaacagcagggactcccgcagggcgatacacaactgacgaccgtgcagggggtcgttaccagcttttgcggagactatggcatgatcgatgaatccatttacttctctagcgacgtggtgacagggaacgtcccccttaaggtgggacagaaagttaatgtggtcgtggaggaagataagcctcactatggcctgcgggctatcaaagttgacgtggtcccccgccatctctacggcgccgggccttccgattctggaacaagagtgctgattggctgtgtgaccagcatcaacgaggacaatatttatatctccaactctatctactttagcattgccatcgtctccgaagatttcgttccctataagggggacctgctcgaggtggagtacagcacagaacctggaatttctaatatcaaagctacctccgtgaagccgattcggtgcatccacacggaggaagtctgtattaccagcgtgcatggccgcaacggggttatcgattacacaatctttttcaccctggactctgtgaaacttcccgatggatatgtccctcaggtggacgacattgttaatgtggtcatggtggagtccatccaattttgcttcatttggagagccatcagcattacacccgtccacaagtcttccagcggctttcaggatgacggcgggctgggacggcctaagcgcgagagacggtcccagtctatctga

SEQ ID NO: 3140 - RNA, 2844 nt, synthetic construct
  misc_feature 1..2844: note = CCDS735.1 variant
  source 1..2844: mol_type = other RNA
atgagcctgccctccagacagaccgccatcattgtgaaccctccgccccctgagtacatcaatacaaagaaaaacggccggctcacgaatcaactgcagtatcttcagaaggtcgttctgaaagacctctggaagcactctttcagctggccctttcagcgccctgtggatgctgtgaaactgcaacttcccgactactataccattatcaagaaccctatggatctgaatacaattaagaaaagactcgaaaacaagtactatgccaaagcgtccgagtgcatcgaagacttcaataccatgttttctaactgttacctgtataataagccgggggatgacatcgtcctgatggctcaggccctcgagaaactgttcatgcagaagctcagccagatgccccaagaagaacaggtggttggagtgaaggagcggattaaaaagggcacacagcagaacatcgccgtctcctctgctaaagaaaagagctcccctagcgccaccgagaaagtgtttaagcaacaggaaattccctctgttttccctaaaacatccatcagccccctgaatgtggtccagggggcttctgtgaactccagctctcaaaccgccgcccaggtgacgaagggagtcaagcgcaaagcggataccacaaccccggctacatccgccgttaaggctagctccgagttttctcctaccttcacggagaaaagcgtggcccttccccctattaaggaaaatatgcccaaaaacgtgctgcccgactcccagcagcaatacaatgtcgtgaagacagttaaggtgaccgagcagcttagacattgcagcgaaatcctgaaagagatgctcgcgaagaaacacttttcttacgcctggcctttctataacccggtcgatgtgaacgctctgggcctgcataattactatgacgttgtgaagaaccccatggatctcgggacaattaaagaaaagatggacaatcaggagtacaaggatgcctataaatttgctgccgacgtccggctgatgttcatgaactgttacaagtataatcctcccgaccacgaggtggtcaccatggcccgcatgcttcaggatgtgtttgaaacccatttctccaaaatccctatcgagcccgttgaaagcatgccgctgtgctacattaagacagacatcacggagaccacaggaagagaaaacaccaatgaggcttctagcgagggcaactcctctgatgacagcgaagatgagcgggtgaaacgcctcgcgaagctgcaagaacagcttaaggccgtccaccagcagctgcaagtgctctcccaggttcctttcagaaaactgaataagaaaaaggagaaaagcaagaaagaaaagaagaaagagaaggtgaacaattctaacgagaatccccggaaaatgtgtgaacagatgcgcctgaaggagaaatccaagagaaaccagcctaagaaacggaagcaacagtttattggcctcaaaagcgaagacgaggataatgctaagcccatgaactacgacgagaaacgccagctgtctcttaacatcaataagctgcctggggataagctcggaagagtcgtgcacattatccaatcccgggaacccagcctgtccaactctaatccggacgagatcgaaattgatttcgagacacttaaagccagcaccctgagagaactcgagaagtatgtgtccgcctgcctgcgcaaacggcctctgaagcctcccgctaaaaagatcatgatgtctaaggaggaactccatagccagaaaaagcaggagctggaaaagagacttctggacgttaacaatcagctcaactcccgcaagcggcaaacgaaaagcgacaagacacagccctctaaagccgtcgagaatgtgtccagactgagcgaatcttccagctctagctcctctagctccgagagcgagtcctctagctccgatctgtctagctccgactctagcgattccgaaagcgagatgtttccgaagttcaccgaagtgaagcccaacgactctccttccaaagagaatgtcaagaaaatgaagaacgaatgtattccccctgagggccgcaccggggtgacacagatcggatactgcgttcaggataccacaagcgcgaatacgacccttgtgcaccaaacaaccccctctcatgtcatgcctcccaaccaccaccagctcgcttttaattatcaggagctggaacatctgcagacagtgaaaaacatttccccgctccaaatcctgcctcccagcggcgactctgagcagctttccaatgggatcaccgttatgcaccctagcggagattccgacacgaccatgctggaaagcgagtgtcaggcccccgtgcaaaaggatattaagatcaaaaacgccgactcttggaaaagcctcggcaaaccggtcaagccttccggcgtgatgaaatctagcgatgagctgttcaaccagtttcggaaggctgccattgaaaaggaggttaaagctagaacacaggaactgatccgcaagcatcttgagcagaataccaaagaactcaaggcctcccaagagaaccagcgggacctggggaatggactgacagtggagtctttcagcaacaaaattcagaataagtgctccggcgaggagcagaaggaacaccaacagtctagcgaggcgcaggataaatccaagctctggctgcttaaagacagagacctggcccgccagaaggaacaagagcggagacggcgcgaggctatggtcgggaccatcgatatgacgctccagagcgacattatgacaatgtttgaaaacaatttcgattga

SEQ ID NO: 3141 - RNA, 543 nt, synthetic construct
  misc_feature 1..543: note = CCDS35455.1 variant
  source 1..543: mol_type = other RNA
atgcaggccgagggcagagggaccggaggcagcacaggggacgctgatggacccggcgggcctggaatcccggacggccccggcgggaacgccggaggccctggggaagcgggagctacgggcgggcggggaccccgcggcgccggcgccgctagagcctccgggcctcggggaggcgctccccgcgggcctcacggaggcgccgcgtctgcccaagatgggagatgcccgtgtggagctcggcgccccgacagcagactgctcgagctgcatattaccatgcctttctcctctcccatggaagccgagcttgtgcggcgcatcctgagcagagatgctgcccctctcccccggccgggcgcggtcctgaaggactttacagtttccggcaatcttctgttcattcgcctcaccgccgctgatcacagacagctgcagctgtctatcagctcctgcctccagcaactgagccttctgatgtggattacacagtgttttctccctgtgttcctggcccaggctccctctgggcagcggcgctga

SEQ ID NO: 3142 - RNA, 633 nt, synthetic construct
  misc_feature 1..633: note = CAA10196 variant
  source 1..633: mol_type = other RNA
atgcaggccgagggccaagggaccggaggcagcacaggggacgctgatggacccggcgggcctggaatcccggacggccccggcgggaacgccggaggccctggggaagcgggagctacgggcgggagaggaccccggggcgccggcgccgctcgcgcctccgggcctagaggaggcgctccccgggggcctcacggaggcgccgcgtctgcccaggatgggcgctgcccgtgtggagctagacggcccgacagccgcctgctccagctgcatattaccatgcctttctcctctcccatggaggccgaacttgtgagacggatcctgagccgcgatgctgcccctctccccagaccgggcgcggtcctgaaggactttacagtttccggcaatcttctgttcatgtctgtgcgggatcaggaccgcgagggggccggaagaatgcgggtggtcggctgggggctcggaagcgcttcccctgaaggccaaaaagcccgcgatctgagaacccccaagcacaaagtgagcgagcagcggcctgggacacccggaccccctccgcccgagggcgctcagggcgacgggtgcagaggagttgcctttaacgtgatgttctctgcccctcatatttga

SEQ ID NO: 3143 - RNA, 1992 nt, synthetic construct
  misc_feature 1..1992: note = CCDS13459.1 variant
  source 1..1992: mol_type = other RNA
atggccgctaccgagatcagcgtgctgtccgaacagttcacaaagattaaagagctcgaactgatgcccgagaagggccttaaagaagaggagaaggacggggtctgcagagaaaaagatcaccggtctcctagcgagctggaagccgagcgcacgtccggagcgtttcaagactctgttctcgaggaagaggtggaactggtgcttgctccgagcgaggaatccgagaagtacatcctgaccctccagacagtccatttcacctctgaggccgtggaactgcaggatatgagcctgctctccattcagcaacaggagggcgttcaggtggtcgtgcagcaacccgggcctggactgctttggctggaagagggccccagacagagcctccagcagtgtgttgccatctctattcaacaggaactgtattcccctcaggagatggaggtgcttcaatttcacgctctggaagagaacgtcatggtggccagcgaagactctaagctcgctgtgtccctggccgagacaaccgggctgatcaaactcgaagaggagcaggaaaagaatcagctgcttgcggagcggacaaaagaacagctgttctttgtcgagaccatgagcggagatgagcgctctgacgaaatcgttctcacggtgtccaacagcaatgtggaggaacaagaggatcagcccaccgccggccaggctgacgccgaaaaggctaaatccacaaagaaccagagaaagaccaaaggcgccaaggggacattccattgcgatgtctgtatgtttacctctagccggatgtccagcttcaatcgccacatgaaaacgcatacatctgagaagcctcacctgtgccacctttgtctgaaaacctttagaacagtgaccctcctgcggaaccatgttaatacccacacaggaacgcgcccgtacaagtgcaacgactgtaatatggcgttcgtgacctccggcgagctggtcagacatcggcgctataaacacacacacgaaaagccctttaagtgcagcatgtgtaaatacgcctctgtggaggctagcaagctcaaaagacatgttcggtcccacaccggggaacgccctttccaatgctgtcagtgctcttatgccagcagagatacatacaagctgaaacggcatatgagaacccactccggagagaagccctatgaatgccatatttgtcacacgcgctttacacagagcggcaccatgaagatccacattcttcagaaacatggggagaacgtgcctaagtaccaatgcccccactgtgctaccatcattgcccggaaatctgacctgagagtccatatgcgcaatctccacgcctactccgctgcggagctgaagtgccggtattgtagcgccgtgttccacgaaagatacgctcttatccagcatcagaaaacacacaagaacgagaagcgcttcaaatgcaagcattgttcttatgcctgcaaacaggaacggcacatgaccgcccatattagaacacacacgggagagaagccgtttacctgtctgtcctgcaataaatgtttccgccaaaagcagctcctgaacgctcactttcggaagtaccatgatgccaatttcatccctacagtctataaatgcagcaagtgcggcaaaggcttttccagatggatcaacctgcaccgccattctgaaaagtgtgggagcggagaggcgaaatccgctgcctctggcaaggggcggagaacccggaaacgcaagcagacaattctcaaggaggccaccaaaggacaaaaggaagctgccaaaggctggaaggaggctgccaacggggacgaagcggccgctgaggaggccagcacgaccaaaggagaacagttccccggcgagatgtttcctgtggcttgcagagaaacaaccgcccgggttaaggaggaagtggacgagggcgtcacatgtgagatgctgcttaataccatggataagtga

SEQ ID NO: 3144 - RNA, 2148 nt, synthetic construct
  misc_feature 1..2148: note = CCDS11368.1 variant
  source 1..2148: mol_type = other RNA
atgagccaggtgatgtcctctcccctgctcgccggcgggcacgctgtcagcctggccccttgcgacgagccgagacggacccttcatcccgcgccttccccctctctgcctccccaatgtagctactatacaacggaaggatggggcgctcaggccctcatggcccctgttccgtgcatggggccccctggacgcctgcagcaggctccccaagtggaggccaaggctacctgtttccttccttcccccggcgaaaaagccctggggacaccggaggatctcgactcttacatcgattttagcctggaatccctgaaccagatgattctcgagctggaccctaccttccagcttctgccccctggaacaggcggcagccaggcggagctcgcccaatctaccatgtccatgagaaagaaagaagagagcgaagctctggatatcaagtatattgaggtgacatctgcccggtcccgctgccacgacgggccccagcattgtagctctccctccgtcacccctccgtttggaagccttagatccggcgggctgctcctgtctcgggatgtgccccgcgagacgagaagctccagcgaatctctgatcttctccggaaatcagggccgggggcaccagcgccctcttccccctagcgagggactgtctcccagaccgcctaacagcccctccatttctatcccttgcatgggcagcaaggcttccagcccccatggccttgggtctcctctggttgccagcccccggctcgaaaaacgcctgggaggccttgcgccgcaaagagggtcccggatctctgtgctgtccgccagccctgtctccgacgtgtcttacatgtttggaagctcccagtctctcctgcacagctccaatagctctcaccagtccagctctcgctccctggagagccccgctaactctagctccagcctccattctctgggctccgttagcctttgtaccagaccctccgatttccaagcccctcggaatccgacactgaccatggggcagcccagaacacctcactctccccctctcgctaaggaacatgccagctcctgtcccccttctattaccaacagcatggtggacatccccattgtcctgatcaatggatgcccggagcctggctcctctccccctcagcgcacgcccggccaccagaacagcgtgcaaccgggggccgcttcccctagcaatccctgccctgcgacacggtctaactcccagacccttagcgatgccccctttacaacctgtcccgagggacctgctagagacatgcagccgaccatgaaattcgtgatggatacatctaagtattggtttaaacccaatattacgcgcgaacaggccatcgagctgctccggaaggaagaacctggcgccttcgtcattagagactccagctcttaccgcgggtcctttggactggctctgaaagttcaagaagtgcccgccagcgcgcagtcccggcctggcgaggacagcaacgatctcatcagacacttcctgatcgagtctagcgctaagggggtgcatcttaagggcgccgacgaggagccctattttggatccctgtctgccttcgtctgccagcacagcattatggctctcgccctgccttgcaaactgaccatcccgcagcgcgaacttggcggggctgatggagcctccgactctacagatagccccgcgtcctgtcaaaagaaatctgccggctgccataccctctacctgagctccgtgagcgttgagacactgaccggggctctcgccgtgcagaaggctatttctacgacattcgaacgggacatcctgcctacccccaccgtcgtgcactttaaagttacagagcagggaattacccttacagatgtgcagagaaaggtcttctttcgccggcattaccctctgacgaccctcagattctgtggcatggaccccgagcaacggaaatggcagaagtattgcaagccgtcctggatctttgggttcgtggccaaaagccagacagaacctcaagagaatgtctgtcacctgtttgcggaatacgatatggtgcagcccgcctctcaggttatcggcctggtgaccgctctcctccaggacgccgagcgcatgtga

SEQ ID NO: 3145 - RNA, 1302 nt, synthetic construct
  misc_feature 1..1302: note = AAH06510 variant
  source 1..1302: mol_type = other RNA
atggccctgagagtgacccggaacagcaagatcaatgctgagaacaaagccaagattaatatggcgggcgctaaacgcgtccccacagcccctgccgctacgtccaagccggggctcagaccccggaccgccctgggagacatcggcaacaaagtttctgaacagcttcaagctaagatgcctatgaagaaagaggccaagcccagcgcgacagggaaagtgattgataagaaactgcctaagcccctcgaaaaggtgcctatgctggtcccggtgcccgtttccgagcctgtgcccgaacctgagcccgagccggaacctgagcccgtcaaagaagagaaactttctcctgagcccatcctggtggacaccgccagcccctcccctatggaaacatctggatgcgctccggccgaggaagatctctgtcaggctttcagcgacgttattctggccgtgaatgatgtcgacgcggaggatggcgccgaccccaacctgtgctccgaatacgtgaaggatatctatgcttacctccgccagctggaggaggaacaggccgtgagacctaagtatcttctggggcgggaggtcaccggaaatatgcgcgctatcctcattgactggctggttcaagtgcagatgaaatttagacttctgcaggaaacaatgtacatgaccgtgagcatcattgatcggttcatgcagaacaattgtgtccccaagaaaatgctccaactggtgggcgttacggccatgtttatcgcctctaagtatgaggaaatgtaccctcccgagattggcgacttcgcttttgtgaccgataacacatataccaagcaccagatccgccagatggagatgaaaattctgagagcgctcaatttcgggctgggacggccgcttcctctgcattttctccgcagagcctccaagatcggcgaagtcgacgtggagcagcacacactggctaaataccttatggaactgaccatgctcgactacgatatggttcattttccccctagccaaatcgccgccggggctttctgcctggccctgaagattctcgacaacggagagtggacgcccacactgcagcactatctttcttacaccgaagagtccctgctccctgtgatgcagcatctggcgaaaaatgtcgtgatggtcaaccaaggccttacaaagcacatgaccgtgaagaataaatatgctaccagcaagcacgccaaaatctctacactgccccagctcaactccgccctggttcaggatctggctaaggccgtggctaaagtctga

SEQ ID NO: 3146 - RNA, 888 nt, synthetic construct
  misc_feature 1..888: note = AAA58392 variant
  source 1..888: mol_type = other RNA
atggagcaccagctgctctgctgtgaagtggagaccatcagacgggcctaccccgacgctaacctgcttaatgatcgcgtcctgagagccatgctcaaggcggaagagacatgcgctcctagcgtttcctatttcaaatgtgtgcaaaaggaagtgctgccgtctatgcggaaaattgtcgccacgtggatgcttgaggtgtgcgaggaacagaagtgtgaggaagaggtttttcccctggccatgaactacctcgaccgcttcctgagcctggagcctgtgaaaaagtccagactccagctgcttggcgctacctgcatgtttgtcgcctctaagatgaaagaaacaatccccctgaccgctgagaagctctgtatttatacagataatagcatccggcctgaggaactgcttcagatggaactgctcctggtgaacaaactgaagtggaatctcgccgcgatgacaccccatgacttcattgagcactttctgtccaaaatgcctgaggccgaagagaacaagcaaatcatccgcaagcatgctcagaccttcgttgccctttgcgctaccgatgtgaaatttatttctaatccgcccagcatggtcgccgcggggtccgtggtggccgctgtccagggactgaacctcagaagccctaataacttcctgtcttactatcggcttacgcgctttctgtccagagttatcaagtgtgaccccgattgcctccgggcctgtcaggaacaaattgaggctctgctggaaagctctctccgccaggcccagcagaatatggaccctaaagccgctgaggaggaagaggaagaggaagaggaggtggatctggcgtgcacccccacagacgtgagagatgtcgacatctga

SEQ ID NO: 3147 - RNA, 651 nt, synthetic construct
  misc_feature 1..651: note = AAA36601 variant
  source 1..651: mol_type = other RNA
atgctgagactcagcgagcggaacatgaaggtgctgcttgccgctgccctgatcgcgggctccgtcttctttctcctgcttcccgggccttctgctgccgacgagaaaaagaaaggaccgaaggttaccgtgaaagtgtacttcgatctgcgcattggcgacgaagatgtcgggagagtgatctttggactcttcggcaagacagttcccaagacggtggacaattttgtcgccctggctaccggggaaaaaggattcggctataagaacagcaaatttcaccgggtgattaaggatttcatgatccagggcggggactttacacgcggagatggcaccgggggaaaatccatttacggcgagagattccctgacgaaaattttaagctgaagcattatgggcccggatgggtttctatggccaacgctggcaaagatacaaatggcagccaattctttatcaccacagtgaagaccgcctggctcgacgggaaacacgtcgtgttcggaaaggtgctggagggcatggaggtcgttcggaaagtggaatccacgaagaccgattctcgcgacaaacctcttaaggatgtgatcattgcggactgcgggaagatcgaggtcgaaaaacccttcgccattgctaaggagtga

SEQ ID NO: 3148 - RNA, 1044 nt, synthetic construct
  misc_feature 1..1044: note = AAD10634 variant
  source 1..1044: mol_type = other RNA
atgcccagaggccaaaagagcaaactgcgggcccgcgagaagagacggaaagctcgcgaagagacccaggggctcaaggtggcccacgcgacagctgccgaaaaagaggaatgcccttcctctagcccggtcctgggagacacgcccacctcctctcctgccgctggcatcccccagaagcctcagggggctccccctacaaccacagccgccgcggccgttagctgtaccgagtccgatgagggagctaagtgccagggcgaagagaacgcctctttcagccaagctacaacctccacggaaagctctgtgaaagacccggtggcctgggaggcggggatgcttatgcattttattctgagaaagtacaaaatgcgggagcccatcatgaaggccgatatgctcaaagtcgtggacgaaaagtataaggatcacttcaccgagattctgaatggagcttcccgcagacttgaactggtttttggcctcgacctgaaagaggataaccctagcggccatacatacaccctggtgtctaagctcaatctgacaaacgacgggaatctttccaacgattgggacttcccccggaatggactgctcatgcctctgcttggcgtcatctttctgaaagggaacagcgccaccgaagaggagatttggaagttcatgaatgtgctcggagcttatgatggcgaggaacacctgatctacggggaaccccgcaaatttatcacgcaggacctggttcaggagaagtatctcaaatacgaacaggtgccgaactctgatcctcccagatatcaattcctgtggggacctcgggcctacgccgagacaaccaagatgaaggtccttgagtttctggctaaaatgaatggcgcgacaccccgcgacttcccctcccattacgaagaggccctcagagacgaagaggaacgggctcaggtgcgcagctccgtgagagcccggagacgcaccaccgccacaacgtttcgggctagatctcgcgcccctttcagccggtccagccacccgatgtga

SEQ ID NO: 3149 - RNA, 2436 nt, synthetic construct
  misc_feature 1..2436: note = BAF91373 variant
  source 1..2436: mol_type = other RNA
atggagagccagggcgtgccccctgggccgtacagagccaccaagctgtggaacgaagtcacaacgtccttccgggctggaatgcccctccgcaaacacagacaacattttaagaaatatggcaattgcttcaccgccggggaggcggttgactggctgtacgatcttctgcggaacaattctaactttggacctgaagtgacacgccagcagaccatccagctcctgagaaagttccttaaaaatcacgtgattgaggacatcaagggccggtgggggagcgaaaacgtcgatgacaataaccaactgtttcgcttccccgctacatcccctctcaagaccctgcccagacggtatcctgagctgcgcaaaaataacattgagaatttttctaaggataaagacagcatcttcaagctcagaaacctgtcccggcgcacaccgaaaagacatggacttcacctgtctcaggaaaatggcgagaagattaagcatgaaatcatcaacgaggatcaggagaatgccattgacaaccgggaactcagccaggaggatgtggaagaggtttggcgctacgtgatcctgatttatcttcaaaccatcctgggcgtcccctccctcgaagaggtgattaaccctaaacaggttatcccccagtacattatgtataatatggccaacacgagcaagagaggggtggtcatcctgcagaataaatctgacgatctgcctcactgggtgctctccgctatgaagtgtctggccaactggccccggagcaatgacatgaacaatccgacctacgtgggatttgagagagatgtcttccgcacaatcgctgactactttcttgacctgcctgaacccctcctgaccttcgagtattacgaactttttgttaacattctggtggtgtgcggctatatcacagtctctgatcggtccagcgggattcacaaaatccaagacgatcctcagtcttccaagttcctccatctgaataacctgaatagcttcaaatccaccgagtgtctcctgctttctctgctccacagagaaaagaacaaggaggagagcgactccacggaacgcctgcagattagcaatcccggatttcaagagcggtgcgccaaaaagatgcagcttgtgaacctgagaaatcgccgggtttctgcgaacgatatcatgggcgggtcctgtcataacctcatcggactgagcaatatgcacgacctgtctagcaactccaaacccagatgctgttctctcgaaggcattgtggatgtccctggcaatagctccaaggaggccagctctgtgttccaccagtcctttccgaacatcgaagggcagaataacaaactgttccttgagagcaagcccaagcaagagtttctgctcaatctgcattctgaagagaacattcagaaacctttctccgctggatttaagcgcacaagcaccctgacagttcaggaccaggaggaactttgcaatggcaaatgtaagtccaaacaactctgccggtctcagagcctgctgctcagatcctctacccgccggaacagctacatcaatacccccgtggccgagattatcatgaagcctaacgtcgggcagggatccacaagcgtgcagacggctatggaatctgagctgggcgaatccagcgccaccatcaataagagactttgtaaatctacaattgagctgtccgaaaacagcctcctgcccgcgtctagcatgctgaccgggacacaatcccttctccagccgcacctggagcgggtcgccatcgatgctctgcagctctgctgcctgcttctgcctccccctaatcgcagaaagctccagctgctgatgcggatgattagcagaatgtctcaaaacgtggacatgcccaaacttcatgatgccatgggaacccgctccctcatgatccacacgttcagccggtgtgttctgtgctgtgctgaggaagtggacctggacgagctcctggccggcagacttgtctcctttctgatggatcatcaccaggaaattctccaggtgccttcttatctgcaaacagccgttgagaagcacctggactaccttaaaaagggccatatcgaaaaccccggggatggactcttcgctccgctgcctacctatagctactgcaagcagatttccgcgcaggagtttgacgagcagaaagtgtctaccagccaagccgctatcgccgaactgctcgagaatatcattaagaaccgctccctgccccttaaagaaaagcggaaaaagctgaaacagttccagaaggagtaccccctcatctatcagaagagatttcctacaaccgaatctgaggccgctctgttcggcgataaaccgacaattaagcaacccatgctgatccttcgcaaacctaagttcagaagcctgcggtga

SEQ ID NO: 3150 - RNA, 297 nt, synthetic construct
  misc_feature 1..297: note = AAA46940 variant
  source 1..297: mol_type = other RNA
atgcacggcgacacccccacactgcatgagtacatgctcgatctgcagcctgaaacgaccgacctttattgctacgagcaactgaacgatagctccgaagaggaagacgagatcgatgggccggccggacaggctgagcccgacagagcccactataatattgtgacattctgttgcaagtgtgattctaccctccggctgtgcgtccagagcacacatgttgacatccgcacccttgaagatctgctcatgggcacactggggattgtgtgtcctatctgctcccagaaaccctga

SEQ ID NO: 3151 - RNA, 318 nt, synthetic construct
  misc_feature 1..318: note = AAA46947 variant
  source 1..318: mol_type = other RNA
atgcacggccccaaggccaccctgcaggacatcgtgctccatctggagcctcaaaacgaaattccggtcgatcttctgtgccacgagcagctcagcgactccgaagaggaaaatgatgagatcgacggggttaaccatcagcatctgcccgctagacgggccgagcctcagcgccacacaatgctttgtatgtgctgtaaatgcgaagcgagaattaagctggtggtggagtctagcgctgatgacctccgggccttccaacagctgtttctgaatacgctctccttcgtctgtccctggtgcgcctctcagcagtga

SEQ ID NO: 3152 - RNA, 297 nt, synthetic construct
  misc_feature 1..297: note = AAA46951 variant
  source 1..297: mol_type = other RNA
atgagaggcgagacccccacactgcaggactacgtgctcgatctgcaacctgaagccacggaccttcactgctatgagcagctgccggatagctccgacgaagaggatgtcatcgactctcccgctgggcaggccgaacctgataccagcaactacaatattgttacattctgttgccagtgtaagtccaccctccggctgtgcgtgcaatctacacaggtggacatccgcattcttcaggagctgctcatgggcagctttggaatcgtctgtcccaactgctccaccagactgtga

SEQ ID NO: 3153 - RNA, 294 nt, synthetic construct
  misc_feature 1..294: note = AAA46959 variant
  source 1..294: mol_type = other RNA
atgagaggccacaagcccaccctgaaagagtacgtgctcgacctgtatcctgaaccgacagatctttactgctatgagcagctgagcgactcctctgatgaagacgaggggctcgatcggcccgacggacaagcccagcctgctacggccgattactatatcgtcacctgttgccatacatgtaacaccacagttcgcctgtgcgtgaatagcaccgcgtccgaccttagaacaattcagcagctgctcatgggcaccgtgaacatcgtctgtcccacgtgcgctcaacagtga

SEQ ID NO: 3154 - RNA, 300 nt, synthetic construct
  misc_feature 1..300: note = AAA46967 variant
  source 1..300: mol_type = other RNA
atgcacggcgagatcaccacactgcaggactacgtgctcgatctggaacccgaggccacggacctttattgctacgaacaactgtgtgatagctccgaggaagaggaggacaccattgatgggcctgctggacaggccaagccggacacatctaactataatatcgtcaccagctgctgtaagtgcgaagcgacactcagactgtgtgttcagtccacccatattgatatccggaaacttgaggacctgctcatgggcacattcgggattgtgtgccccggatgttctcagcgcgcttga

SEQ ID NO: 3155 - RNA, 330 nt, synthetic construct
  misc_feature 1..330: note = AAA47051 variant
  source 1..330: mol_type = other RNA
atgagaggccccaagcctaccctgcaggagatcgtgctcgacctgtgcccgtacaacgaaattcaacccgtcgatcttgtttgtcacgagcagctgggggaaagcgaggacgaaatcgatgagcctgaccatgccgtgaatcaccagcatcagctcctggctcggcgcgatgagccccaaagacacacaattcagtgctcctgttgcaaatgtaacaatacgcttcagctggtggtcgaagcctctcgggacaccctccgccagctgcaacagctgttcatggatagcctcggatttgtgtgcccttggtgtgcgacagctaaccagtga

SEQ ID NO: 3156 - RNA, 321 nt, synthetic construct
  misc_feature 1..321: note = CAA52574 variant
  source 1..321: mol_type = other RNA
atgcacggccccagagagaccctgcaggaaatcgtgctccatctggagcctcagaacgaacttgacccggtcgatctgctctgctacgagcagctgagcgaatccgaggaggaaaatgacgaggccgatggggtttctcacgctcagcttcccgcccggcgcgcggaacctcagagacataagattctgtgtgtgtgctgtaaatgcgacggacggatcgagctcacagtggagagctccgctgaagatctgcgcacgctgcaacaactcttcctgtctacccttagctttgtctgtccctggtgcgccacaaaccagtga

SEQ ID NO: 3157 - RNA, 306 nt, synthetic construct
  misc_feature 1..306: note = M62877.1 variant
  source 1..306: mol_type = other RNA
atgagaggcaacgtgccccagctgaaggacgtcgttctccacctgacccctcaaacagagatcgatcttcagtgctacgaacagttcgacagctccgaggaagaggatgaagtggacaatatgcgggatcagctgccggagcgcagagccgggcaagctacgtgttatcggattgaggccccctgctgtcgctgctctagcgtggtccagctcgcggtggaatcctctggagacaccctgagagttgtgcagcagatgcttatgggcgagctgagcctcgtctgtccttgctgtgctaacaattga

SEQ ID NO: 3158 - RNA, 300 nt, synthetic construct
  misc_feature 1..300: note = CAA52586 variant
  source 1..300: mol_type = other RNA
atgagaggcgacaaggccaccatcaaagattacattctggacctccagcccgagacaacggatctgcactgctatgaacaacttggggacagctccgatgaggaagacaccgatggagtggaccggcctgatggccaggctgagcaggccacatctaactactatatcgtcacctactgtcatagctgcgactccacactgcgcctctgtattcactctaccgcgacagatctgagaacccttcagcaaatgctgctcgggacgctgcaggttgtgtgcccgggatgtgctcggctgtga

SEQ ID NO: 3159 - RNA, 318 nt, synthetic construct
  misc_feature 1..318: note = CAA52597 variant
  source 1..318: mol_type = other RNA
atgcacggcaaggtgcccaccctgcaggacgtcgttctcgagctgacacctcaaacggaaatcgatcttcagtgcaacgagcagctggacagctccgaagatgaggacgaagatgaggtggaccatctccaggagagaccgcaacaggcccggcaggctaaacagcacacctgttacctgattcatgtgccctgctgtgaatgcaagttcgtcgtgcaacttgatatccagtctacaaaagaggacctgcgcgttgtgcagcagctcctgatgggggccctgaccgtcacatgtcctctctgcgcgagctccaattga

SEQ ID NO: 3160 - RNA, 297 nt, synthetic construct
  misc_feature 1..297: note = AAF13691 variant
  source 1..297: mol_type = other RNA
atgagaggcaacaatcccaccctgcgggagtacatcctcgacctgcaccctgaaccgacagatcttttctgctatgagcagctgtgtgacagctccgatgaagacgagattggcctcgatcgccccgacggacaagcccagcctgctacggccaactactatatcgtgacctgctgttacacatgcgataccacagtcagactgtgtattaattctaccacaaccgacgttcggacgcttcagcagctgctcatggggacctgcacaatcgtgtgtcccagctgcgcgcaacagtga

SEQ ID NO: 3161 - RNA, 324 nt, synthetic construct
  misc_feature 1..324: note = ACL12335 variant
  source 1..324: mol_type = other RNA
atgcacggccccaaggccaccctgtgcgacatcgtgctcgatctggagcctcagaactacgaagaggtcgaccttgtttgttatgaacagctgccggatagcgactccgagaatgaaaaagatgagcccgacggggtgaaccatcctctcctgcttgctagacgggccgagccccagcgccacaatattgtgtgcgtctgttgcaagtgtaacaatcagctgcagctcgtggttgaaacatctcaagatggactgagagcgctgcagcaactcttcatggacacgctgagctttgtgtgccctctttgtgctgccaaccagtga

SEQ ID NO: 3162 - RNA, 318 nt, synthetic construct
  misc_feature 1..318: note = AAA79500 variant
  source 1..318: mol_type = other RNA
atgcacggcaaggtgcccaccctgcaggaggtcatcctcgaactggcccctcaaacagagattgaccttcagtgcaacgaacagctggatagctccgaggacgaagatgaggacgagatcgatcatctcctggaaagaccgcagcaagctcggcaggccgagcagcacaaatgttaccttattcatgttccctgctgtaagtgcgaactggtggtgcagctcgacatccaatctacgaaagaggagctgcgcgtcgtgcagcagctgctcatgggggcgctgaccgttacatgtcctctttgcgctagctccaagtga

SEQ ID NO: 3163 - RNA, 1392 nt, synthetic construct
  misc_feature 1..1392: note = AAF80488 variant
  source 1..1392: mol_type = other RNA
atgggcaaggagaaaacccacatcaacattgtggtcatcgggcatgttgacagcggaaagtccacaacgaccggccacctgatttacaaatgcgggggaatcgataagagaacaattgaaaaattcgagaaggaagccgctgagatgggcaaggggtcttttaaatatgcctgggtgctcgacaagctgaaagcggaacgggagcgcggaatcaccatcgatattagcctttggaagttcgagacaaccaaatactatatcacaattatcgacgctcccggccatagagattttattaagaatatgatcaccggcacgtcccaggccgactgtgccgtgctgattgtcgctgccggggtgggagagttcgaagctggcatctctaagaacgggcaaacccgggaacacgccctcctggcgtacacacttggagttaaacagctgatcgtgggcgtcaataagatggatagcaccgagcctgcctattccgagaaacgctacgacgaaattgtgaaggaggtttctgcttatatcaaaaagattgggtacaacccggccacagtgccctttgtccctatcagcggatggcatggcgataatatgctcgaaccctcccctaacatgccctggttcaaaggctggaaggtggagagaaaggaagggaatgctagcggagtgtctctgctggaggccctcgacaccattctgcctccgacgcggcccacagataaacctcttcgcctgcccctccaggacgtctacaagatcggcgggatcggaaccgttcctgtgggcagagtggagacagggattctgcggcccggaatggtcgtgacctttgcgccggttaacatcaccacagaagtgaaatccgtcgagatgcaccacgaagcccttagcgaggctctgcctggcgataatgtgggcttcaacgttaagaatgtgtctgtcaaagacattcgcagagggaacgtgtgcggagactccaagagcgatccccctcaggaagccgctcaatttacgtctcaggtcatcattctcaatcatcccggccagatctccgccgggtatagccccgtgatcgactgtcacaccgcccatattgcttgcaagttcgcggagctgaaagagaagatcgatcggcgctccggcaaaaagctggaagacaaccctaaatctctcaagagcggagatgccgctattgttgagatggtgccggggaagcccatgtgtgtcgaatcctttagccagtaccctcccctgggcagattcgccgtgcgggacatgcgccaaacagttgccgtgggagtcatcaaaaatgtggagaagaaatctggcggggctggaaaggtgaccaaatccgcccagaaggcgcagaaggctggcaaatga

SEQ ID NO: 3164 - RNA, 2919 nt, synthetic construct
  misc_feature 1..2919: note = EAW51573 variant
  source 1..2919: mol_type = other RNA
atggacaccgatctgtacgacgagttcggcaactatatcgggcccgaactcgatagcgacgaggatgacgatgaactgggaagagagacaaaggaccttgatgaaatggacgatgacgatgacgacgatgacgtgggcgatcacgacgatgaccatcctgggatggaggtcgttctgcacgaggataaaaagtactatccgacggccgaagaggtgtacggacccgaagtggagaccattgtccaggaggaagacacacaacctctcaccgagcccatcattaaacctgtgaagaccaaaaagtttaccctgatggaacagacacttcccgttaccgtgtatgagatggatttcctggctgacctcatggataattccgaactgatccggaacgtcacgctgtgcggccatctccaccatgggaagacctgttttgtggactgcctgattgagcagacacaccctgagatccgcaaaagatacgaccaggatctttgttataccgacatcctgttcacagaacaagagcggggagttggcattaagtctaccccggtgacggtcgtgctccccgatacaaaaggcaagagctacctgtttaatatcatggacacccctgggcacgtgaacttctccgatgaagtcacagccggacttcgcatttctgacggcgttgtgctgtttatcgatgcggctgagggggtgatgctcaataccgaaagactgattaaacatgccgtccaggagcggctggccgtgaccgtttgcatcaacaagattgaccgcctcatcctggagcttaagctgccccctacagatgcttactataaactcagacacatcgtggacgaagtcaatggactgattagcatgtactccacggatgagaaccttatcctgtctcccctcctgggcaatgtgtgtttcagctccagccagtattctatttgctttaccctggggtccttcgccaagatctacgctgacacatttggagatattaactatcaggagttcgccaaacggctctggggcgacatctactttaatccgaagacccgcaaattcacaaagaaagcgcctaccagcagctcccaaagatctttcgttgaatttatcctggaacccctttataagattctggcccaggtggtcggcgacgtggatacgtctctccctcggacactggacgagcttgggatccatctgaccaaggaggaactcaaactgaacattcgccccctgctcagactggtctgtaagaaattctttggagagttcaccggctttgtggatatgtgcgttcagcacatcccctcccctaaggtgggggctaaaccgaagattgaacacacatacaccggaggcgtcgacagcgatcttggggaggccatgtccgactgtgatcccgacggacctctgatgtgccatacaacgaagatgtactctaccgatgacggcgtgcagttccacgcttttggccgggttctcagcgggacaatccatgccggacaacccgtgaaagtcctgggcgagaattataccctggaagatgaggaagactcccagatctgtacagtggggcgcctttggattagcgtggcgagataccacatcgaggttaaccgggtccctgccggaaattgggtgctcattgaaggcgtggatcagcccatcgtcaagaccgctacgattaccgagccgagagggaacgaggaagcccaaatcttccgccctctgaaatttaacacaacctctgtgattaagatcgctgttgagcccgtgaatccttccgaactgcccaaaatgctcgacggcctgcggaaggtcaacaagagctatccttctcttacaaccaaagtggaggaaagcggagagcatgttatcctgggcacgggggagctctacctggactgcgtgatgcacgatctgagaaagatgtattccgaaattgacatcaaagtcgccgatcccgtggttacattctgcgagaccgtggtcgaaacatctagccttaagtgttttgccgagaccccgaataaaaagaacaagattaccatgatcgctgaacctctcgagaaaggactggcggaggacattgaaaatgaggtggtgcagatcacatggaaccgcaagaaactgggcgagttctttcagacgaagtacgattgggacctcctggccgctcggtccatctgggccttcgggcccgatgccaccggacccaatattcttgtcgacgatacactgcctagcgaagttgacaaagctctcctgggctctgtgaaggattccatcgtgcaggggttccaatggggcaccagagagggaccgctgtgcgacgaacttattcgcaacgtcaaatttaagatcctcgacgccgtggttgcgcaggagcccctgcaccggggcgggggacagattatccctacagctagacgcgtggtctatagcgccttcctgatggccacaccccggctcatggaaccttactactttgtggaggttcaggctcccgccgattgtgtgtctgctgtctatacggtgctggccagacgccggggccatgttacacaagacgcgcctatccccgggtccccgctttacaccattaaggccttcatccctgctattgatagctttggattcgaaaccgacctgagaacacacacccagggccaggccttttccctctctgtgttccatcactggcagatcgtccccggggatcctctggacaaaagcattgtgatccggcccctggagccgcaacctgctccccaccttgcccgcgagtttatgatcaagacaagacggagaaaaggcctctccgaagatgtgtctattagcaagttctttgacgatcctatgctgctggagctcgcgaaacaggacgtcgttctgaattatcccatgtga

SEQ ID NO: 3165 - RNA, 1971 nt, synthetic construct
  misc_feature 1..1971: note = EAW50963 variant
  source 1..1971: mol_type = other RNA
atgagacccagcggcaccgccggggctgccctgctcgcgctgcttgctgccctgtgccctgcctcccgggctctcgaggaaaagaaagtgtgtcagggaacatctaacaagctgacgcaacttggcaccttcgaggaccactttctgagcctccagcgcatgttcaataactgcgaagtcgttctggggaatctggagatcacatacgtgcagagaaactatgatctctcctttctgaaaaccattcaggaagtggccggatacgtccttatcgctctgaatacagtggagcggattccgctcgagaacctgcaaatcattcgcggcaatatgtattacgaaaactcttatgcccttgcggttctgagcaattacgacgccaacaagaccgggctcaaagagctgcccatgagaaatctgcaggaaatcctccatggagctgtgcggttctccaacaatcctgccctgtgtaacgtcgagtctatccagtggcgcgatattgtgagctccgactttcttagcaatatgtctatggatttccagaaccacctgggctcctgccaaaagtgtgaccccagctgccctaacggctcttgttggggagctggggaggaaaattgccagaagctcacaaaaatcatttgtgcccagcagtgctccggcagatgtcggggaaagagcccctctgattgctgccataaccaatgtgcggccgggtgcaccggccctcgcgagtccgactgtctggtttgcagaaaatttcgggatgaagctacgtgtaaggatacctgcccgccccttatgctgtataatcctacaacctaccagatggacgtgaaccccgaggggaaatacagcttcggagccacatgtgtcaagaagtgccctcgcaattatgtggtgaccgaccacggctcctgtgtcagagcttgcggcgccgattcttacgaaatggaggaggacggggttcggaaatgtaagaaatgcgaaggaccctgccgcaaggtgtgtaacggcatcgggattggagagtttaaagacagcctctccatcaatgccacgaacattaagcatttcaaaaattgcacaagcatctctggcgatctgcacatcctgccggtggcttttagaggggactccttcacccacacacctcccctcgatcctcaggaactggacattcttaagaccgtcaaggagatcaccggatttctgctcattcaagcgtggcccgaaaaccggacagatctgcatgccttcgagaatcttgagatcattagaggccgcacgaaacagcacggccagttcagcctggctgtggtttctctcaacatcaccagcctggggctgcggtccctcaaggaaatctctgacggagatgtgattatcagcggcaataaaaacctgtgttatgccaatacaattaactggaagaaactttttgggacctccggacagaagacaaagatcattagcaacagaggcgaaaattcttgcaaagccaccgggcaagtctgtcatgctctgtgctcccccgaaggctgttggggacctgagccgcgcgactgcgtgagctgtcggaacgtttctagaggccgcgaatgcgtggataagtgtaatctcctggagggggagccccgggagttcgtcgagaactccgaatgcatccagtgccaccctgagtgtctgccccaggccatgaatatcacgtgcacaggaagaggccctgacaactgtattcagtgcgcgcactacatcgatgggccccattgtgtgaaaacctgcccggctggagtcatgggcgagaataacacccttgtgtggaagtatgccgacgccgggcacgtttgtcatctctgccaccctaattgtacatacggctgcaccggacccggcctggaagggtgtcctacaaacggaagctatattgtgtcccattttccccgctctttctacaaaatgagcgtccac

SEQ ID NO: 3166 - RNA, 3411 nt, synthetic construct
  misc_feature 1..3411: note = ADL28125 variant
  source 1..3411: mol_type = other RNA
atgagacccagcggcaccgccggggctgccctgctcgcgctgcttgctgccctgtgccctgcctcccgggctctcgaggaaaagaaagtgtgtcagggaacatctaacaagctgacgcaacttggcaccttcgaggaccactttctgagcctccagcgcatgttcaataactgcgaagtcgttctggggaatctggagatcacatacgtgcagagaaactatgatctctcctttctgaaaaccattcaggaagtggccggatacgtccttatcgctctgaatacagtggagcggattccgctcgagaacctgcaaatcattcgcggcaatatgtattacgaaaactcttatgcccttgcggttctgagcaattacgacgccaacaagaccgggctcaaagagctgcccatgagaaatctgcaggaaatcctccatggagctgtgcggttctccaacaatcctgccctgtgtaacgtcgagtctatccagtggcgcgatattgtgagctccgactttcttagcaatatgtctatggatttccagaaccacctgggctcctgccaaaagtgtgaccccagctgccctaacggctcttgttggggagctggggaggaaaattgccagaagctcacaaaaatcatttgtgcccagcagtgctccggcagatgtcggggaaagagcccctctgattgctgccataaccaatgtgcggccgggtgcaccggccctcgcgagtccgactgtctggtttgcagaaaatttcgggatgaagctacgtgtaaggatacctgcccgccccttatgctgtataatcctacaacctaccagatggacgtgaaccccgaggggaaatacagcttcggagccacatgtgtcaagaagtgccctcgcaattatgtggtgaccgaccacggctcctgtgtcagagcttgcggcgccgattcttacgaaatggaggaggacggggttcggaaatgtaagaaatgcgaaggaccctgccgcaaggtgtgtaacggcatcgggattggagagtttaaagacagcctctccatcaatgccacgaacattaagcatttcaaaaattgcacaagcatctctggcgatctgcacatcctgccggtggcttttagaggggactccttcacccacacacctcccctcgatcctcaggaactggacattcttaagaccgtcaaggagatcaccggatttctgctcattcaagcgtggcccgaaaaccggacagatctgcatgccttcgagaatcttgagatcattagaggccgcacgaaacagcacggccagttcagcctggctgtggtttctctcaacatcaccagcctggggctgcggtccctcaaggaaatctctgacggagatgtgattatcagcggcaataaaaacctgtgttatgccaatacaattaactggaagaaactttttgggacctccggacagaagacaaagatcattagcaacagaggcgaaaattcttgcaaagccaccgggcaagtctgtcatgctctgtgctcccccgaaggctgttggggacctgagccgcgcgactgcgtgagctgtcggaacgtttctagaggccgcgaatgcgtggataagtgtaatctcctggagggggagccccgggagttcgtcgagaactccgaatgcatccagtgccaccctgagtgtctgccccaggccatgaatatcacgtgcacaggaagaggccctgacaactgtattcagtgcgcgcactacatcgatgggccccattgtgtgaaaacctgcccggctggagtcatgggcgagaataacacccttgtgtggaagtatgccgacgccgggcacgtttgtcatctctgccaccctaattgtacatacggctgcaccggacccggcctggaagggtgtcctacaaacggacccaaaattcctagcatcgctacgggcatggtgggggccctgctcctgcttctggtcgtggctctcggaattggcctgtttatgcgccggagacatatcgttcgcaagcggaccctgagacggcttctccaagagcgcgaactggtggagcccctgacaccgtccggggaagcccctaatcaggcgctcctgcggattcttaaggagaccgagttcaaaaagatcaaagtcctgggctctggagcctttggcacagtgtataaggggctctggatccccgaaggagagaaagtgaagattcccgttgctatcaaggaactgagagaggccaccagccctaaagctaacaaggaaattctggacgaggcctacgtcatggcgtccgtggataatccgcacgtgtgcagacttctcggcatctgcctgacgtctaccgtccagctgattacacagctcatgcccttcgggtgtctgcttgactacgtgcgcgagcacaaagataacatcggaagccaatatctgctcaattggtgcgttcagatcgccaagggcatgaactacctggaagaccggagactggtgcatcgcgatcttgctgccagaaacgtcctcgtgaaaacccctcagcacgttaagattacagactttgggctggctaaactgctcggcgccgaggaaaaggagtatcatgccgaaggaggcaaggtgcccatcaaatggatggctctggagtccattcttcaccggatctacacccaccagagcgatgtctggtcttatggggtgacggtttgggagctgatgacattcggatccaagccttacgacggcattcccgcgagcgaaatctcttccatcctcgagaaaggggaacgcctgcctcaacccccgatttgtaccatcgatgtgtatatgattatggtcaagtgctggatgatcgacgccgatagcagacctaaatttcgggagctgattatcgagttctctaagatggctcgcgacccccagagataccttgtgatccagggagatgaacggatgcatctgcctagccccacagactccaatttttaccgcgccctcatggacgaggaagatatggacgatgtggtcgacgccgatgagtatctgattccgcaacagggcttctttagctctccttccaccagcagaacacccctcctgtcctctcttagcgctacctccaacaattctacggttgcctgtatcgaccggaacggcctgcagagctgccctattaaggaagattccttcctccagcgctactctagcgaccccaccggggcgctgacagaggattccatcgacgataccttcctgcccgtgcctggagagtggcttgtgtggaaacaaagctgttcttccacaagctctacccactccgctgccgccagcctgcagtgcccgtctcaggtcctgccccctgcttcccccgaaggcgagacggtggccgacctccagacacaatga

SEQ ID NO: 3167 - RNA, 150 nt, synthetic construct
  misc_feature 1..150: note = CCO13722 variant
  source 1..150: mol_type = other RNA
atgtgcgccacctgtgctatccagacagcccccacgggccctaacaagagctccctgtctgacttcagcctcccgctgaaacttcactttctgtccaccatttctatcagccccttcgcgtccaataaggtgctcacactgtttatttga

SEQ ID NO: 3168 - RNA, 1218 nt, synthetic construct
  misc_feature 1..1218: note = CCDS47587.1 variant
  source 1..1218: mol_type = other RNA
atgagacccagcggcaccgccggggctgccctgctcgcgctgcttgctgccctgtgccctgcctcccgggctctcgaggaaaagaaagtgtgtcagggaacatctaacaagctgacgcaacttggcaccttcgaggaccactttctgagcctccagcgcatgttcaataactgcgaagtcgttctggggaatctggagatcacatacgtgcagagaaactatgatctctcctttctgaaaaccattcaggaagtggccggatacgtccttatcgctctgaatacagtggagcggattccgctcgagaacctgcaaatcattcgcggcaatatgtattacgaaaactcttatgcccttgcggttctgagcaattacgacgccaacaagaccgggctcaaagagctgcccatgagaaatctgcaggaaatcctccatggagctgtgcggttctccaacaatcctgccctgtgtaacgtcgagtctatccagtggcgcgatattgtgagctccgactttcttagcaatatgtctatggatttccagaaccacctgggctcctgccaaaagtgtgaccccagctgccctaacggctcttgttggggagctggggaggaaaattgccagaagctcacaaaaatcatttgtgcccagcagtgctccggcagatgtcggggaaagagcccctctgattgctgccataaccaatgtgcggccgggtgcaccggccctcgcgagtccgactgtctggtttgcagaaaatttcgggatgaagctacgtgtaaggatacctgcccgccccttatgctgtataatcctacaacctaccagatggacgtgaaccccgaggggaaatacagcttcggagccacatgtgtcaagaagtgccctcgcaattatgtggtgaccgaccacggctcctgtgtcagagcttgcggcgccgattcttacgaaatggaggaggacggggttcggaaatgtaagaaatgcgaaggaccctgccgcaaggtgtgtaacggcatcgggattggagagtttaaagacagcctctccatcaatgccacgaacattaagcatttcaaaaattgcacaagcatctctggcgatctgcacatcctgccggtggcttttagaggggactccttcacccacacacctcccctcgatcctcaggaactggacattcttaagaccgtcaaggagatcaccggactgagctga

SEQ ID NO: 3169 - RNA, 3633 nt, synthetic construct
  misc_feature 1..3633: note = AAG35789 variant
  source 1..3633: mol_type = other RNA
atgagacccagcggcaccgccggggctgccctgctcgcgctgcttgctgccctgtgccctgcctcccgggctctcgaggaaaagaaagtgtgtcagggaacatctaacaagctgacgcaacttggcaccttcgaggaccactttctgagcctccagcgcatgttcaataactgcgaagtcgttctggggaatctggagatcacatacgtgcagagaaactatgatctctcctttctgaaaaccattcaggaagtggccggatacgtccttatcgctctgaatacagtggagcggattccgctcgagaacctgcaaatcattcgcggcaatatgtattacgaaaactcttatgcccttgcggttctgagcaattacgacgccaacaagaccgggctcaaagagctgcccatgagaaatctgcaggaaatcctccatggagctgtgcggttctccaacaatcctgccctgtgtaacgtcgagtctatccagtggcgcgatattgtgagctccgactttcttagcaatatgtctatggatttccagaaccacctgggctcctgccaaaagtgtgaccccagctgccctaacggctcttgttggggagctggggaggaaaattgccagaagctcacaaaaatcatttgtgcccagcagtgctccggcagatgtcggggaaagagcccctctgattgctgccataaccaatgtgcggccgggtgcaccggccctcgcgagtccgactgtctggtttgcagaaaatttcgggatgaagctacgtgtaaggatacctgcccgccccttatgctgtataatcctacaacctaccagatggacgtgaaccccgaggggaaatacagcttcggagccacatgtgtcaagaagtgccctcgcaattatgtggtgaccgaccacggctcctgtgtcagagcttgcggcgccgattcttacgaaatggaggaggacggggttcggaaatgtaagaaatgcgaaggaccctgccgcaaggtgtgtaacggcatcgggattggagagtttaaagacagcctctccatcaatgccacgaacattaagcatttcaaaaattgcacaagcatctctggcgatctgcacatcctgccggtggcttttagaggggactccttcacccacacacctcccctcgatcctcaggaactggacattcttaagaccgtcaaggagatcaccggatttctgctcattcaagcgtggcccgaaaaccggacagatctgcatgccttcgagaatcttgagatcattagaggccgcacgaaacagcacggccagttcagcctggctgtggtttctctcaacatcaccagcctggggctgcggtccctcaaggaaatctctgacggagatgtgattatcagcggcaataaaaacctgtgttatgccaatacaattaactggaagaaactttttgggacctccggacagaagacaaagatcattagcaacagaggcgaaaattcttgcaaagccaccgggcaagtctgtcatgctctgtgctcccccgaaggctgttggggacctgagccgcgcgactgcgtgagctgtcggaacgtttctagaggccgcgaatgcgtggataagtgtaatctcctggagggggagccccgggagttcgtcgagaactccgaatgcatccagtgccaccctgagtgtctgccccaggccatgaatatcacgtgcacaggaagaggccctgacaactgtattcagtgcgcgcactacatcgatgggccccattgtgtgaaaacctgcccggctggagtcatgggcgagaataacacccttgtgtggaagtatgccgacgccgggcacgtttgtcatctctgccaccctaattgtacatacggctgcaccggacccggcctggaagggtgtcctacaaacggacccaaaattcctagcatcgctacgggcatggtgggggccctgctcctgcttctggtcgtggctctcggaattggcctgtttatgcgccggagacatatcgttcgcaagcggaccctgagacggcttctccaagagcgcgaactggtggagcccctgacaccgtccggggaagcccctaatcaggcgctcctgcggattcttaaggagaccgagttcaaaaagatcaaagtcctgggctctggagcctttggcacagtgtataaggggctctggatccccgaaggagagaaagtgaagattcccgttgctatcaaggaactgagagaggccaccagccctaaagctaacaaggaaattctggacgaggcctacgtcatggcgtccgtggataatccgcacgtgtgcagacttctcggcatctgcctgacgtctaccgtccagctgattacacagctcatgcccttcgggtgtctgcttgactacgtgcgcgagcacaaagataacatcggaagccaatatctgctcaattggtgcgttcagatcgccaagggcatgaactacctggaagaccggagactggtgcatcgcgatcttgctgccagaaacgtcctcgtgaaaacccctcagcacgttaagattacagactttgggctggctaaactgctcggcgccgaggaaaaggagtatcatgccgaaggaggcaaggtgcccatcaaatggatggctctggagtccattcttcaccggatctacacccaccagagcgatgtctggtcttatggggtgacggtttgggagctgatgacattcggatccaagccttacgacggcattcccgcgagcgaaatctcttccatcctcgagaaaggggaacgcctgcctcaacccccgatttgtaccatcgatgtgtatatgattatggtcaagtgctggatgatcgacgccgatagcagacctaaatttcgggagctgattatcgagttctctaagatggctcgcgacccccagagataccttgtgatccagggagatgaacggatgcatctgcctagccccacagactccaatttttaccgcgccctcatggacgaggaagatatggacgatgtggtcgacgccgatgagtatctgattccgcaacagggcttctttagctctccttccaccagcagaacacccctcctgtcctctcttagcgctacctccaacaattctacggttgcctgtatcgaccggaacggcctgcagagctgccctattaaggaagattccttcctccagcgctactctagcgaccccaccggggcgctgacagaggattccatcgacgataccttcctgcccgtgcctgagtatattaatcaaagcgtgccgaaaagacccgctggatctgtccagaaccctgtgtaccacaatcagccccttaaccctgccccctcccgggaccctcattatcaggatccgcacagcacagccgttggcaatcccgaatacctgaacaccgtgcaacctacgtgtgtcaattctacatttgactcccccgctcattgggcccagaaggggagccaccagatctctctcgacaaccctgattatcagcaagacttctttcccaaagaggcgaagccgaatggaattttcaaaggctccaccgctgaaaacgccgagtacctgagagtggcccctcagagctccgaatttatcggggcttga

SEQ ID NO: 3170 - RNA, 1395 nt, synthetic construct
  misc_feature 1..1395: note = AAI18666 variant
  source 1..1395: mol_type = other RNA
atggccgctgaggacgtgatcatttgcgcccagcaatgtagcggcagatgccgggggaagtccccctctgattgttgccacaaccagtgtgcggctggatgcaccggccctcgcgaaagcgactgtctggtctgcagaaaattccgggatgaggccacatgtaaggacacgtgcccgcccctcatgctgtacaatcctaccacatatcagatggatgttaaccccgaagggaaatactcctttggagccacctgtgtgaagaaatgccctcgcaattatgtggtcacagaccatggctcttgcgtgagagcttgtggggccgatagctacgagatggaagaggacggagttcggaagtgcaagaaatgtgagggcccctgccgcaaggtgtgtaacggcatcgggattggagagttcaaagattccctttctatcaatgctaccaacattaagcactttaaaaattgcacaagcatctccggcgacctgcatatcctccctgtcgccttcagaggggatagctttacccacacgccgcccctggaccctcaggaacttgatattctgaagaccgtgaaggaaatcacaggattcctcctgattcaagcgtggcccgagaaccggaccgacctgcatgcctttgagaatctcgaaatcattcgcggcagaacaaaacagcacgggcagttctctctggctgttgtgtcccttaacatcaccagcctgggactccggtctctgaaggagatttccgacggcgatgtcatcatcagcggcaataaaaacctttgttatgccaatacgattaactggaagaaactgtttgggacatctggacagaagaccaaaatcatttccaatcgcggcgaaaacagctgcaaggctacagggcaagtgtgtcacgccctctgctcccctgagggatgttggggccccgaaccgagagactgcgtgtcttgccggaacgtcagccgcgggagagagtgtgttgataagtgcaatctgctggagggagaacctcgggagttcgtggaaaactccgagtgtatccagtgccatcccgaatgtctccctcaggcgatgaatattacctgcaccggcagaggccccgacaactgtatccagtgcgcccactacatcgatgggccccattgtgtgaaaacatgccctgctggagtcatgggcgagaataacacgctggtgtggaagtatgccgacgctgggcacgtttgtcacctttgccatccgaattgcacctacggatgtacaggccccgggctggagggctgccctaccaacggacccaaaattcctagcatcgccacaggcatggtgggggccctcctgcttctgctcgtcgtggctctgggaattggccccctgcacgggcgctga

SEQ ID NO: 3171 - RNA, 3276 nt, synthetic construct
  misc_feature 1..3276: note = AAH94761 variant
  source 1..3276: mol_type = other RNA
atgagacccagcggcaccgccggggctgccctgctcgcgctgcttgctgccctgtgccctgcctcccgggctctcgaggaaaagaaagtgtgtcagggaacatctaacaagctgacgcaacttggcaccttcgaggaccactttctgagcctccagcgcatgttcaataactgcgaagtcgttctggggaatctggagatcacatacgtgcagagaaactatgatctctcctttctgaaaaccattcaggaagtggccggatacgtccttatcgctctgaatacagtggagcggattccgctcgagaacctgcaaatcattcgcggcaatatgtattacgaaaactcttatgcccttgcggttctgagcaattacgacgccaacaagaccgggctcaaagagctgcccatgagaaatctgcagggacagaagtgtgatccttcctgccccaacggctcttgttggggcgctggggaagagaattgccagaagctcacaaaaatcatctgtgcccaacagtgcagcggacggtgtcgcggcaagtcccctagcgactgctgtcataaccagtgcgctgccgggtgcaccggacccagagagtctgattgtctggtgtgccggaaattccgcgacgaagcgacgtgtaaggatacctgccctccgcttatgctgtataatcccacaacctaccagatggacgtcaaccctgagggcaaatactcctttggggccacatgtgtgaagaagtgccccagaaactatgttgtgaccgatcacggaagctgtgtccgggcttgcggcgccgactcttacgaaatggaggaagatggcgtgcgcaaatgtaagaaatgcgaggggccttgtagaaaggtgtgcaatggaattggcatcggggagttcaaagactccctcagcattaacgctacgaatatcaagcattttaaaaactgcacatctatttccggagatctgcacatccttcccgtcgccttccggggcgacagctttacccatacaccgcctctggacccccaagaactcgatattctgaagaccgttaaggagatcaccgggttcctgctcatccaggcctggcctgaaaatcgcacagacctgcacgcttttgagaaccttgaaattatcagaggacggacgaaacagcacggccaattctccctggcggtggtgtctctcaatattaccagcctgggccttagatccctgaaggagatcagcgatggggacgtcattatctctggaaacaaaaatctctgttatgccaacacaatcaattggaagaaactgtttggcacctccgggcagaagacaaagattatcagcaaccgcggagaaaattcttgcaaagctaccggccaggtgtgtcatgccctgtgcagccccgaggggtgttggggccccgagcctcgggattgcgtttcctgtagaaacgtgtctcgcggacgggaatgcgtcgacaagtgtaatctcctggagggcgaaccgagagagttcgtggagaacagcgaatgcattcagtgtcaccccgagtgccttcctcaagccatgaacatcacgtgcacagggcgcggacccgataattgtattcagtgcgctcattacatcgacggccctcactgtgttaaaacctgccccgccggggtgatgggagaaaacaataccctggtctggaagtatgcggatgctggccacgtgtgtcatctctgccacccgaactgtacatacgggtgcaccggccctggactggagggctgtcccacaaatgggcctaaaatcccctccattgccacgggaatggtcggcgccctgcttctcctgctggtggttgctctcgggatcggactgttcatgcggagacgccatattgtgcggaagagaacccttcgccggctgctccaggagagagaactggtcgagcctctgacacccagcggcgaagccccgaaccaggcccttctccggatcctgaaggagaccgaatttaaaaagattaaagtgctggggtctggcgctttcggaacagtttataagggcctctggatccctgagggggagaaagtgaagattcccgtcgcgatcaaggaactgcgcgaggccacctcccccaaagctaataaggaaatccttgacgaggcctacgtgatggctagcgtggataaccctcacgtttgcagactgctcggaatttgtctgacgtctaccgtccaactgatcacacagcttatgccgtttggctgcctcctggactacgtgcgggaacataaagacaatattgggtcccagtatctgctcaactggtgcgtgcagatcgccaagggaatgaattacctggaggatagacgccttgtccaccgggacctggcggccagaaacgtgctcgttaaaacaccccaacacgtgaagattaccgatttcggcctggctaaactgcttggggccgaggaaaaggagtatcatgctgaaggcggaaaggtccctatcaaatggatggccctcgagagcatcctgcaccgcatttacacccatcagtccgacgtgtggtcttatggcgttacggtgtgggaactgatgacatttgggagcaagccctacgatggaatccctgcctccgagatttctagcatcctcgagaaaggcgaaagactgccccagcctcccatttgtaccatcgacgtctatatgatcatggtgaagtgctggatgattgatgctgactcccggccgaaattccgcgagcttatcattgaatttagcaagatggcgagagatcctcagcggtacctggttatccaaggggacgagcgcatgcacctcccctctcctacagattccaatttctacagagccctgatggacgaggaagatatggacgacgtggtcgatgctgacgagtatctgattccccagcagggatttttcagctctccgtccaccagccggacccctcttctgtctagcctctccgccacaagcaacaattctacggtggcctgtatcgatcgcaacggcctgcaatcctgccccatcaaggaagacagctttctccagagatactcctctgatcctaccggcgctctgacagaggacagcattgatgacaccttccttcccgtgcccggggaatggctggtctggaaacagtcctgttctagcacatcctctacccacagcgccgcggcttccctccagtgccctagccaagttctgccgcccgcctctcctgagggagagacggtggccgatctgcagacacagtga

SEQ ID NO: 3172 - RNA, 216 nt, synthetic construct
  misc_feature 1..216: note = CAA34902 variant
  source 1..216: mol_type = other RNA
atgagacccagcggcaccgccggggctgccctgctcgcgctgcttgctgccctgtgccctgcctcccgggctctcgaggaaaagaaaggaaagggcgtgtctcgcagactgccgcggcgccccagaatcgcccctcggacaccccagcctgctcaaccccgcacgggggcccctgcgagagcccgggctccggcccgccccttcctttttccttga

SEQ ID NO: 3173 - RNA, 720 nt, synthetic construct
  misc_feature 1..720: note = AAH10992 variant
  source 1..720: mol_type = other RNA
atgcccctgggccacatcatgagactcgacctggagaagattgcccttgaatacatcgtgccttgcctgcatgaggtcgggttctgttatctcgataactttctgggagaagttgtgggcgactgcgtgcttgagcgggtcaaacagctgcactgtaccggggctctccgcgatggacaactggccggcccgagagcgggggtgagcaagcggcatctgcgcggagaccagattacatggatcggcggcaatgaagaggggtgcgaggctatttccttcctcctgtctcttatcgatagactggttctctactgtggaagccggctgggcaaatattacgtgaaggaacgctccaaagccatggtcgcctgctatcccgggaacggaacgggctacgtgagacacgttgacaatcctaacggggatggacggtgtattacctgcatctattaccttaataagaactgggacgctaagctgcatggcggcatcctccgcatttttcccgaggggaaatctttcatcgccgatgtggaacctatttttgacagactgctgttcttttggagcgatcggcgcaatccccacgaggtccagccttcctacgctacaagatatgccatgaccgtgtggtacttcgacgcggaggaacgggccgaggctaagaaaaagtttcgcaacctcacaagaaaaaccgaatctgccctgacagaggattga

SEQ ID NO: 3174 - RNA, 1566 nt, synthetic construct
  misc_feature 1..1566: note = BAH13456 variant
  source 1..1566: mol_type = other RNA
atggccaccagcctgcacgagggccccacaaaccagctcgacctgcttatcagagctgtggaagcctccgtccattctagcaatgcgcactgcacggataagaccattgaggctgccgaagccctgctccatatggagtcccctacatgtctgcgggactctcgcagcccggagttcatccacgctgccatgagacccgatgttattaccgaaacagtggtggaggtctccaccgaagagtctgaacctatggacacaagccccatccctacctcccccgatagccatgagcctatgaaaaagaaaaaggtggggcggaaaccgaagacgcaacagtctcccatttccaacggaagccctgagcttggcatcaagaaaaagccccgcgaagggaaaggaaataccacatacctgtgggagtttctcctggacctgctccaggataagaatacctgccctagatatatcaaatggacacagcgggaaaagggcattttcaagctggttgactctaaagctgtgtccaaactttgggggaaacacaagaacaaacccgatatgaactacgagaccatgggacgcgccctgagatattactatcaacggggcatcctcgcgaaggtcgaaggccagcgcctggtgtaccagtttaaagacatgccgaagaatattgttgtgatcgatgacgataagagcgagacgtgtaacgaggaccttgccgggacaaccgacgaaaaatctctggagagagtctccctcagcgctgaatccctgctgaaggccgcttctagcgtgcggtccggaaagaatagctctcctattaactgctcccgcgccgagaagggcgtggcgagagtcgttaatatcacaagccccgggcacgatgcctctagccggtcccctaccaccacagcttctgtgagcgccacggctgctccccgcaccgtgagagtcgccatgcaagtgcccgttgtgatgacatccctcggacagaaaattagcaccgtcgccgtgcagtctgttaacgcgggcgcccctctgatcacatccaccagcccgacgacagctacctctcccaaggtggtcatccagaccattcctacagtgatgcccgcctccaccgaaaatggggacaagatcacaatgcagcctgccaaaattatcacgattcccgctacccaacttgcccagtgtcagctgcaaacaaagagcaacctcaccggatccggctctatcaatatcgtcggcacaccgctggcggtgcgggctcttacccctgttagcattgcccatgggacgcccgtgatgagactgtccatgcctacccagcaggcctctggacagacaccccctcgcgtcatcagcgctgtgattaaaggccccgaggttaagtccgaggccgtggctaaaaagcaagaacacgatgtcaagaccctccagctggtggaggaaaaaccggccgacgggaacaagacagtgacccatgttgtcgtggtgagcgcgccttctgccatcgctctgcccgtcacgatgaaaacagagggactcgtgacctgcgaaaagtga

SEQ ID NO: 3175 - RNA, 810 nt, synthetic construct
  misc_feature 1..810: note = BAC67168 variant
  source 1..810: mol_type = other RNA
atggccgccgccctgttcgtgctcctgggatttgcgcttctggggacccacggagctagcggcgccgccgggacagtcttcacgaccgttgaggacctcggatccaagatcctgcttacatgctctctgaacgatagcgctaccgaagtgacaggccatcggtggctcaaagggggagtggtcctgaaggaggacgccctgcccggccagaaaaccgaatttaaggtggattccgacgatcaatggggcgagtactcttgtgttttcctccctgaaccgatggggacagctaatattcagctgcacggaccccctcgggtgaaagccgtcaagagctccgagcatatcaacgagggcgaaaccgcgatgcttgtgtgcaagtctgagagcgttccccctgtgacggactgggcctggtataaaattaccgattccgaagacaaggctctgatgaatgggagcgagtctcgctttttcgtctccagctctcagggaagatccgagctccacatcgaaaacctgaatatggaggccgatcccggccagtaccggtgtaacgggacaagctctaaaggatccgaccaagctattatcacccttcgcgtgagaagccatctggccgcgctctggccttttctgggcatcgtggccgaagtcctggttctcgtgacaattatcttcatttatgagaagcggcgcaaaccggaagatgtgctggacgatgacgacgctggctccgctccccttaagtctagcgggcagcaccagaatgataagggcaaaaacgtcagacagagaaattccagctga

SEQ ID NO: 3176 - RNA, 945 nt, synthetic construct
  misc_feature 1..945: note = AAA35723 variant
  source 1..945: mol_type = other RNA
atggctccccctcaggtgctggccttcggcctcctgcttgccgcggctaccgccacatttgccgctgcccaagaggaatgcgtctgtgagaactacaagctggctgttaattgcttcgtgaacaataacagacagtgtcagtgcacgagcgtgggggcccagaataccgtcatctgttccaaactcgcggccaagtgcctggtgatgaaagctgaaatgaacggatctaaacttggccggcgcgccaagccggagggggctctgcaaaataacgacggactctatgatcccgactgtgatgaaagcggcctgtttaaggccaagcagtgcaatgggacatccatgtgttggtgcgttaacaccgcgggagtgagacggacagacaaagataccgagattacatgttctgagcgcgtcagaacctactggatcattatcgaactgaagcacaaagcccgggagaagccttatgacagcaaatccctccgcacggctctgcagaaggaaattaccacaagataccagcttgatcccaagttcatcacctctatcctgtatgagaataacgtgattacaatcgacctcgttcaaaatagctcccagaaaacccagaacgatgtggacattgccgatgtcgcttactattttgagaaggacgtgaaaggcgaaagcctgttccattctaagaaaatggatcttacggtgaatggcgagcagctggacctcgaccctgggcaaacactgatctactacgtcgatgaaaaggcccccgagttttccatgcagggactgaaagccggcgttattgctgtgatcgtggtcgtggttattgcggtggtcgccgggatcgtggttctcgtgatcagccggaagaagcgcatggctaaatatgaaaaggccgagattaaagagatgggagaaatgcacagagagctgaacgcctga

SEQ ID NO: 3177 - RNA, 2931 nt, synthetic construct
  misc_feature 1..2931: note = CCDS169.1 variant
  source 1..2931: mol_type = other RNA
atggagctgcaggccgctagagcctgcttcgcgctcctgtggggctgtgctcttgccgccgctgccgctgcccaagggaaggaagtggtcctgctcgactttgcggccgctggaggcgagctggggtggcttacccacccctacggaaaaggctgggatctgatgcagaacatcatgaatgacatgcctatttatatgtacagcgtttgcaacgtgatgtccggggatcaggacaattggctccggacaaactgggtgtatcgcggagaagccgagagaatcttcattgaactgaagtttacggtccgggattgtaattctttcccgggcggcgctagctcctgcaaagagacctttaacctgtactatgccgagtctgacctcgattacgggacaaatttccagaagcgcctgtttaccaaaatcgacacaattgcgcccgatgaaatcaccgtgagctccgacttcgaggccagacatgttaaacttaacgtggaagagagatctgtcggacctctgacacgcaagggcttttatctcgctttccaagatatcggggcctgtgtggctctgcttagcgttagagtgtactacaaaaagtgccccgagctgctccagggactggcccactttcctgaaaccattgccggctccgacgctcccagcctggcgacggtcgccgggacctgtgtggatcatgctgtggtccctccgggaggcgaggaaccccggatgcactgcgccgttgacggcgagtggctcgtgcctatcgggcagtgtctgtgccaggccggatatgaaaaagtggaggacgcttgtcaagcctgctctcccggcttctttaagttcgaggcgtccgaaagcccttgccttgagtgtcccgaacatacactgccgtctcctgagggggctacctcctgcgaatgtgaggagggattctttcgcgctccccaggatcctgccagcatgccctgcacaagacccccttctgccccgcactacctcaccgccgtcggcatgggggctaaagtggaactgcggtggacgccccctcaggactccggaggccgcgaggatattgtttatagcgtgacatgtgaacagtgctggcccgagtccggcgaatgtgggccttgcgaggcctctgtcagatacagcgagcccccgcacggacttacccggacatccgtgaccgttagcgacctggaacctcatatgaattataccttcacagtggaggcgcgcaacggcgtctctgggctcgtgacgtcccggagctttcggaccgcctctgtcagcatcaatcaaacagaaccccctaaggtgagactggagggacgctccaccacatctctgagcgtttcctggagcattccccctccccagcagtctcgggtgtggaagtacgaggtcacctatagaaagaagggcgattccaacagctacaatgtgcgccggacggaagggttctctgttacactcgacgatctggctccggacaccacctaccttgtgcaagtccaggccctgacacaggagggccagggagctggctccaaagtgcacgaatttcaaaccctcagccctgaggggtccggaaacctggccgtgatcggcggggttgcggtcggagtggtgcttctgctcgtcctggccggcgtggggttctttattcatagacgccggaagaatcagagagctcgccagtctcccgaagatgtttatttcagcaaatccgagcagctgaagcccctcaaaacatacgtggaccctcacacgtatgaggatccgaaccaagccgtcctgaagtttaccacagaaatccacccctcttgtgtgacccggcagaaggttatcggcgctggagagttcggcgaagtgtacaaagggatgcttaagacaagctccggcaaaaaggaggtccctgtggccattaaaaccctgaaggccggatatacggaaaagcagagagttgactttctcggggaggctggaatcatgggccagttcagccatcacaacattatccgcctggagggggtgatttctaaatacaagcccatgatgatcatcaccgaatatatggagaatggcgcgctggacaaatttcttcgggaaaaggatggagagttctccgtcctccaactggtgggcatgctgagagggattgccgctggaatgaaatacctcgccaacatgaattacgtgcatcgggacctggccgctcgcaacatccttgtcaatagcaacctggtttgcaaggtgtctgatttcggcctctccagagtgctggaagacgatcctgaggccacatataccacaagcgggggaaagattcccatccggtggaccgcgcctgaggctatttcttacagaaaatttacgagcgcctccgacgtctggagcttcggcatcgtgatgtgggaagttatgacatatggggagcgcccctactgggaactgtctaatcacgaggtgatgaaggccatcaacgatggctttcggcttccgacccctatggactgtccctccgctatttatcagctcatgatgcagtgctggcagcaagagagagcccgcagacctaaattcgcggatatcgtcagcattctggacaagctgatccgggctcccgattccctcaaaacactggccgactttgatccgcgcgtgtctattagacttcctagcacctccggatctgaaggcgttcccttccggaccgtgagcgagtggctggaatccatcaagatgcagcagtacacagagcattttatggccgctgggtatacggccattgaaaaggtcgtgcaaatgaccaatgacgacatcaaacgcatcggagttagactccctggccaccagaagcggattgcttactctctgctggggcttaaagatcaggtgaacacagtcggaatccccatttga

SEQ ID NO: 3178 - RNA, 2952 nt, synthetic construct
  misc_feature 1..2952: note = AAG43576 variant
  source 1..2952: mol_type = other RNA
atggactgccagctgagcatcctcctgcttctgtcctgttctgtgctcgatagcttcggcgagctgattccccaaccttccaacgaagtcaatcttctggactctaagaccatccagggggagctcggatggattagctacccgtcccacggctgggaagagatctctggggttgatgaacattatacacccattagaacgtaccaggtgtgcaacgtgatggaccacagccagaataactggctgcggaccaattgggtccctcgcaactccgcccaaaagatctatgtggagctgaagtttacactcagagattgtaatagcatccccctggttcttggaacctgcaaagagacattcaacctgtactatatggaatctgacgatgaccatggcgtgaagtttcgggagcaccagttcaccaaaattgatacaatcgctgccgacgaatcctttacccagatggatctcggggaccgcattctgaaacttaatacggagatcagagaggtcggacctgtgaacaagaaaggcttctacctggcgtttcaggatgttggcgcttgtgtggccctcgtcagcgtgcgggtgtatttcaagaaatgcccctttaccgtcaagaatctggccatgttccctgacacagttccgatggactctcaatccctggtggaagtgcgcgggagctgtgtcaacaattctaaagaggaagatccccctagaatgtactgctccaccgagggagaatggctcgtgcccattggcaagtgtagctgcaacgctgggtacgaggagcggggatttatgtgtcaggcctgccgccctggcttctataaggctctggacgggaatatgaaatgcgccaagtgtcccccgcattcctctacacaggaagatggaagcatgaactgcagatgtgagaacaattactttcgggcggacaaagatcctccctccatggcctgcacccgccctcccagctctcccagaaacgttatctccaatattaacgaaacgagcgtgatccttgactggtcttggcctctggatacaggcggccggaaggacgtcaccttcaatatcatttgtaaaaagtgcgggtggaacatcaaacagtgtgagccgtgcagccccaatgtgcgcttcctccctagacaatttggactgacaaacaccaccgttacagtgacggatcttctggctcacaccaattatacattcgaaattgacgccgtcaacggcgtgtccgagctctcttctccccctcggcagtttgctgccgtctccatcaccacaaatcaggcggcccccagcccggtgctgaccattaagaaggatagaacgtctcgcaactccatcagcctgtcttggcaagagcctgaacaccccaatgggatcattctcgactacgaggttaaatattacgaaaagcaggagcaggaaacatcctataccatcctgcgggctagaggaaccaacgtgacaattagctcccttaaacctgacaccatctacgtcttccagattcgcgcccggacagctgccggctacgggaccaattctagaaagtttgagttcgagacgagccccgattccttttctatcagcggagaatccagccaagtggttatgatcgccatttctgctgcggtggccatcattctgctcacagtcgtgatctatgtgctgattggccgcttctgtggctacaaatccaagcatggggctgacgagaagcggcttcactttggaaacggccatctgaaactccctgggctgagaacctatgttgatccccacacatacgaagacccgacccaggccgtccacgagttcgccaaggagctggatgctacgaacatcagcattgacaaagtggtgggagccggcgaatttggggaggtctgctctggccgcctcaagctgccttccaaaaaggaaatcagcgtggcgatcaagacccttaaagttggatatacagagaagcagcggagagatttcctgggcgaagctagcattatggggcagtttgaccatcccaatatcattcgcctcgagggagtggtcaccaaaagcaagcccgtgatgatcgttacagagtacatggaaaacggctccctggatagcttcctgcggaaacacgacgcccaattcaccgtgattcagcttgtcgggatgctcagaggaatcgcctctggcatgaagtatctgtccgatatggggtacgtgcatcgggacctggctgcccgcaatatcctcattaacagcaatctggtttgtaaggtgtccgattttggcctttctagagtcctggaggacgaccctgaagctgcctacacgacacggggaggcaaaatcccgattagatggaccagccccgaggcgatcgcctatcgcaagttcacatccgcttctgatgtgtggagctacgggattgtgctctgggaagtcatgtcctatggagagcggccttactgggagatgtctaaccaggacgttatcaaagccgtggatgaaggctatagactgccccctcccatggactgccctgctgccctgtaccagcttatgctcgattgctggcaaaaggaccgcaataacagacccaaatttgagcagatcgtgagcattctggataagctgatccggaatccggggtccctcaaaattatcaccagcgcggccgctcgcccttctaacctgcttctggaccagtccaatgtcgatattaccacattcagaacgaccggagactggctcaacggcgtgtggacagcccactgtaaggaaatctttaccggggttgagtatagctcttgcgatacaatcgctaagatttccaccgacgatatgaaaaaggtgggcgtcacggtggttggaccccagaaaaagatcattagctctatcaaagccctggaaacacaatccaagaatggccctgtgcccgtctga

SEQ ID NO: 3179 - RNA, 2952 nt, synthetic construct
  misc_feature 1..2952: note = AAH63282 variant
  source 1..2952: mol_type = other RNA
atggactgccagctgagcatcctcctgcttctgtcctgttctgtgctcgatagcttcggcgagctgattccccaaccttccaacgaagtcaatcttctggactctaagaccatccagggggagctcggatggattagctacccgtcccacggctgggaagagatctctggggttgatgaacattatacacccattagaacgtaccaggtgtgcaacgtgatggaccacagccagaataactggctgcggaccaattgggtccctcgcaactccgcccaaaagatctatgtggagctgaagtttacactcagagattgtaatagcatccccctggttcttggaacctgcaaagagacattcaacctgtactatatggaatctgacgatgaccatggcgtgaagtttcgggagcaccagttcaccaaaattgatacaatcgctgccgacgaatcctttacccagatggatctcggggaccgcattctgaaacttaatacggagatcagagaggtcggacctgtgaacaagaaaggcttctacctggcgtttcaggatgttggcgcttgtgtggccctcgtcagcgtgcgggtgtatttcaagaaatgcccctttaccgtcaagaatctggccatgttccctgacacagttccgatggactctcaatccctggtggaagtgcgcgggagctgtgtcaacaattctaaagaggaagatccccctagaatgtactgctccaccgagggagaatggctcgtgcccattggcaagtgtagctgcaacgctgggtacgaggagcggggatttatgtgtcaggcctgccgccctggcttctataaggctctggacgggaatatgaaatgcgccaagtgtcccccgcattcctctacacaggaagatggaagcatgaactgcagatgtgagaacaattactttcgggcggacaaagatcctccctccatggcctgcacccgccctcccagctctcccagaaacgttatctccaatattaacgaaacgagcgtgatccttgactggtcttggcctctggatacaggcggccggaaggacgtcaccttcaatatcatttgtaaaaagtgcgggtggaacatcaaacagtgtgagccgtgcagccccaatgtgcgcttcctccctagacaatttggactgacaaacaccaccgttacagtgacggatcttctggctcacaccaattatacattcgaaattgacgccgtcaacggcgtgtccgagctctcttctccccctcggcagtttgctgccgtctccatcaccacaaatcaggcggcccccagcccggtgctgaccattaagaaggatagaacgtctcgcaactccatcagcctgtcttggcaagagcctgaacaccccaatgggatcattctcgactacgaggttaaatattacgaaaagcaggagcaggaaacatcctataccatcctgcgggctagaggaaccaacgtgacaattagctcccttaaacctgacaccatctacgtcttccagattcgcgcccggacagctgccggctacgggacgaatagcagaaagtttgagttcgagaccagccccgattccttttctatcagcggagaatccagccaagtggttatgatcgccatttctgctgcggtggccatcattctgctcacagtcgtgatctatgtgctgattggccgcttctgtggctacaaatccaagcatggggctgacgagaagcggcttcactttggaaacggccatctgaaactccctgggctgagaacctatgttgatccccacacatacgaagacccgacccagacggtccacgagttcgccaaggagctggatgccaccaacatcagcattgacaaagtggtgggagctggcgaatttggggaggtctgctctggccgcctcaagctgccttccaaaaaggaaatcagcgtggccatcaagacacttaaagttggatataccgagaagcagcggagagatttcctgggcgaagcgtctattatggggcagtttgaccatcccaatatcattcgcctcgagggagtggtcacaaaaagcaagcccgtgatgatcgttaccgagtacatggaaaacggctccctggatagcttcctgcggaaacacgacgctcaattcacggtgattcagcttgtcgggatgctcagaggaatcgcctctggcatgaagtatctgtccgatatggggtacgtgcatcgggacctggccgctcgcaatatcctcattaacagcaatctggtttgtaaggtgtccgattttggcctttctagagtcctggaggacgaccctgaagccgcttacacaacccggggaggcaaaatcccgattagatggacaagccccgaggccatcgcgtatcgcaagttcacctccgcctctgatgtgtggagctacgggattgtgctctgggaagtcatgtcctatggagagcggccttactgggagatgtctaaccaggacgttatcaaagctgtggatgaaggctatagactgccccctcccatggactgccctgccgctctgtaccagcttatgctcgattgctggcaaaaggaccgcaataacagacccaaatttgagcagatcgtgagcattctggataagctgatccggaatccggggtccctcaaaattatcaccagcgccgcggcccgcccttctaacctgcttctggaccagtccaatgtcgatattacaacgttcagaaccacaggagactggctcaacggcgtgtggaccgctcactgtaaggaaatctttacaggggttgagtatagctcttgcgataccatcgccaagatttccacggacgatatgaaaaaggtgggcgtcacagtggttggaccccagaaaaagatcattagctctatcaaagctctggaaacccaatccaagaatggccctgtgcccgtctga

SEQ ID NO: 3180 - RNA, 1389 nt, synthetic construct
  misc_feature 1..1389: note = BAG54127 variant
  source 1..1389: mol_type = other RNA
atgcccatgagcaccatcctgcctgtgacatccccgtgcctccccgccacgggcgtcaccgtttgggagctgatgacattcggggctgaaccttacgccggacttagactggcggaggtgcccgacctcctggaaaagggcgagcggcttgctcagcctcaaatttgtaccatcgatgtgtatatggtcatggtgaaatgctggatgattgacgaaaacatccgccccacatttaaggagctggccaatgagttcaccagaatggcccgggatcctccgcgctacctcgttattaaaagagaatctgggcccggaatcgctcctggccccgagcctcacgggctgacaaacaagaaactggaagaggtggagctcgaacccgagctggaccttgatctggacctcgaagccgaggaagataatctggctaccacgacccttggaagcgccctgtccctcccggtcggcacactgaaccggcctcgcggctctcagagcctgctctccccctctagcgggtatatgcctatgaatcagggaaacctgggcgagtcctgtcaggagagcgcggtgtctgggtccagcgaaagatgcccccggcccgtttctcttcatcctatgccgcgcggatgtctggcctccgagagctctgaaggccacgtgaccgggtccgaggctgaactccaagagaaggtcagcatgtgcagatcccggtctcgcagcagatcccctcggccccgcggagacagcgcctaccattctcagagacactccctgcttacacccgtgacccctctgtctcccccgggcctcgaggaagaggatgtgaatggctatgtcatgcctgacacgcatctgaaggggacacccagcagccgggaaggaaccctgtcctctgttggcctcagctccgtgctggggacagaggaagaggatgaggacgaagagtacgaatatatgaacagacgccggagacacagccctccccaccctccccgcccgtcttcccttgaggagctgggatacgaatacatggatgtgggcagcgacctctctgcttccctggggagcacccagtcctgtcctcttcatcccgtccccatcatgcctaccgccggaacaacgccggacgaggattatgaatacatgaatcggcagagagacggcggcgggcccggaggcgattatgcggccatgggggcttgccctgcctctgagcaaggatacgaagagatgcgcgcttttcagggccccgggcaccaggcccctcatgtgcactatgcccggctgaaaaccctcagaagcctggaggctacagactccgcgttcgataaccccgactactggcactctcgcctgtttcctaaggccaatgctcagcggacctga

SEQ ID NO: 3181 - RNA, 2766 nt, synthetic construct
  misc_feature 1..2766: note = BAG57868 variant
  source 1..2766: mol_type = other RNA
atgagagccaacgacgctctccaggtgctgggcctgcttttcagcctggcccgggggtccgaggtcggaaattctcaagcggtttgccccggcaccctcaacgggctgagcgtgacaggagatgctgaaaatcagtaccagacgctttataagctgtacgagcgctgtgaagtggtcatgggcaacctcgagatcgtgctgaccgggcacaatgccgacctgtcctttctccagtggattagagaagttacaggatatgtgctggtcgccatgaacgagttctctacccttcctctgccgaatctccgggtggttcgcggcacacaagtgtacgatggcaaatttgctatcttcgtcatgctgaactataataccaacagctcccatgcccttagacagctgcggctcacacagctgaccgagattctgtctgggggagtgtacatcgaaaagaatgacaaactctgccacatggatacgattgactggcgcgatatcgtgagagaccgggatgctgagatcgtcgttaaggacaacggccgcagctgtcccccttgccatgaagtgtgtaaagggagatgctggggacccggctccgaggattgtcagaccctgacaaagaccatttgcgcccctcaatgtaatgggcactgctttggacccaaccctaatcagtgttgccatgacgagtgcgcgggcggctgtagcgggccgcaggatacagactgcttcgcctgtcggcactttaacgactctggagcttgcgtgccccgctgtcctcagccccttgtctataacaagctgaccttccaactcgaacctaatccccacacgaaataccagtacggcggggtgtgcgttgcctcctgtccgcataactttgtggtcgatcagacaagctgcgtgagagcttgtcctcccgacaagatggaggttgataaaaatggactgaagatgtgcgaaccttgtggcgggctttgccccaaagcctgcgagggaaccggctctggctcccggttccaaacagtggacagctctaacatcgatgggtttgtcaattgtaccaagattctgggaaacctcgacttcctgatcaccggcctgaatggggatccctggcacaagattcctgcgctcgacccggaaaaactgaacgtgtttcgcacagtcagagagatcacgggatatcttaatattcagtcctggccccctcatatgcacaacttcagcgtgttctccaatctgaccacaatcggcgggcggtctctctacaacagaggctttagcctgcttatcatgaagaatctgaacgttacctccctcggattccgcagcctgaaagagatttctgccggccggatctatatttccgctaatagacagctgtgctaccaccatagcctcaactggacaaaggtgctgcgcgggcccaccgaagaacggcttgatatcaaacacaacagacctcgccgggactgtgtcgccgaaggaaaggtgtgcgatcccctgtgttctagcggcgggtgctggggaccgggccctgggcagtgtctctcctgcagaaattattctcgcggcggagtttgtgtgacgcattgcaactttctgaatggcgagccccgggagttcgctcacgaggccgagtgttttagctgccatcctgaatgccaacccatggaggggacagccacctgtaacggatccggcagcgatacctgcgctcagtgtgcgcacttcagagacgggcctcactgcgtctcttcctgtccccatggagtgctgggcgccaaagggccgatttacaagtatcctgacgtgcagaatgaatgccgcccctgtcacgagaactgcacacagggctgtaagggacccgaacttcaagactgcctcggccagaccctggttctgatcgggaaaacacatctcacgatggctctgaccgtcatcgccggacttgtggtgatttttatgatgctgggcgggacattcctctactggcggggaagacggatccagaataagcgcgccatgagacggtacctggagagaggcgagagcattgaacctctggatccgtctgagaaagctaacaaggtccttgcccgcatctttaaagaaaccgagctccggaagctgaaggtgctggggtccggcgttttcggaacagtgcacaaaggcgtctggattcccgagggggaaagcatcaagatccctgtgtgtattaaagttatcgaggacaagtccggaagacagtcttttcaagcggtgaccgatcacatgctcgctattggcagcctggaccatgcccacatcgtccgccttctggggctctgccccggatcctctctgcagctggtgacgcagtatcttcctctcggcagcctgctggatcatgttagacagcaccggggcgccctcgggccccaactgcttctgaattggggagtgcagattgctaaaggcatgtactatctcgaggaacatgggatggtccaccgcaacctggccgctagaaatgtgctgcttaagtcccctagccaggtgcaagtcgccgacttcggagttgcggatctcctgcccccggacgataagcagctgctctactctgaagccaaaacccctatcaagtggatggctctggagtccattcactttggcaaatatacacatcagagcgacgtgtggtcttacgggcagtgcatctggatgccctcccttcctagcctggcccccgtgtctaacctcccgttcgagacccctagctga

SEQ ID NO: 3182 - RNA, 3927 nt, synthetic construct
  misc_feature 1..3927: note = AAB59446 variant
  source 1..3927: mol_type = other RNA
atgaagcccgccaccggcctgtgggtgtgggtcagcctcctggttgctgccgggacagtgcagccttccgactctcaaagcgtgtgcgcgggaacggaaaacaaactttcctctctgagcgatctcgaacagcagtacagagctctgcggaagtattacgagaattgtgaagtcgtgatgggcaaccttgagatcacctccattgaacacaatcgcgacctgtctttcctcagaagcgttcgggaggtgacagggtatgtcctggtggccctgaaccagtttcgctacctcccgctggagaatcttagaatcattcggggaaccaaactgtatgaagatcgctacgccctcgctatcttcctgaactatagaaaggacggcaattttgggcttcaagagctgggactcaaaaacctgacagaaattctgaatggcggcgtttacgtggatcagaacaagttcctctgctacgccgacaccatccattggcaggatatcgtccggaatccctggccttccaacctgacacttgtgagcaccaatgggtcttccggatgtggccgctgccacaagagctgtacggggagatgctggggacccaccgagaaccattgtcagacactgacccggacagtgtgcgctgagcaatgtgacggccgctgctatgggccttacgtctctgattgttgccacagagaatgcgccggaggctgttccggccccaaagacaccgattgctttgcgtgtatgaatttcaacgacagcggggcctgcgttacgcagtgtcctcagacatttgtgtataacccgaccacattccagctcgagcataattttaacgctaagtacacctatggagccttctgcgtgaaaaagtgtccccacaattttgtcgtggattcttccagctgcgttcgggcttgtccttcctctaaaatggaagtggaggaaaacggcattaagatgtgcaagccctgtaccgacatctgccctaaagcctgcgacgggattggaacaggcagcctgatgtccgcgcaaacggtcgatagctctaatatcgacaagttcattaactgtaccaaaatcaatgggaaccttatttttctggtgacaggaatccacggcgatccctacaatgccatcgaggctattgacccggagaagctcaacgttttccgcaccgtgagagaaatcacaggcttcctgaatattcagtcctggcctcccaacatgaccgattttagcgtcttctctaatctggtgacgatcgggggacgggtcctctatagcggcctgtcccttctgattctcaaacagcaagggatcacatctctgcagtttcagagccttaaggagatctccgccggaaacatttacatcaccgacaatagcaacctgtgctactatcataccattaactggacaaccctcttctctacaatcaatcagagaattgtgatccgcgataaccggaaagctgaaaattgtacggccgagggcatggtttgcaaccacctgtgttccagcgacgggtgctggggccctggacccgatcaatgtctgtcttgcagacgcttttcccggggcagaatctgtattgaaagctgcaatctctacgacggggagttccgcgagtttgaaaacggatccatctgtgtggagtgcgatccccagtgcgaaaagatggaggacggcctgcttacctgtcatgggcctggaccggacaattgcacaaagtgttctcacttcaaagatggccccaactgcgtcgaaaagtgtcctgacgggctgcagggcgccaatagctttattttcaaatatgctgatcccgaccgggagtgccacccttgtcatcccaactgcacccagggatgtaatggcccgacatcccacgattgcatctactatccttggaccgggcattctacgctcccccaacacgcgagaacccctctgattgccgctggagtgatcggcgggctgtttattcttgttatcgtgggactcacattcgccgtctacgtgcgcagaaagagcatcaaaaagaagagagccctgcgccggtttctggagaccgaactcgtggagcccctgacaccttccggcaccgctcccaaccaggcccagcttcggattctgaaagaaacggagctcaagcgggttaaagtcctggggagcggcgcgttcggaacagtgtataagggcatctgggtgccggagggggaaaccgtcaaaattcctgtggctatcaagattctgaatgagacaaccggacccaaggccaacgttgagttcatggacgaagcccttatcatggcttctatggatcatccccacctcgtgcgcctgctgggcgtctgtctctcccctaccatccagctggtgacacaacttatgccgcacgggtgcctgctcgaatacgttcatgagcacaaagacaatattggaagccagctgctgcttaactggtgcgtgcagatcgccaagggcatgatgtacctcgaggaaagacggctggtccatagagatctggctgcccgcaacgtgctcgttaaatctcccaatcacgtgaagattacggactttgggctggcgcggcttctggagggcgatgaaaaagagtataacgccgacggaggcaagatgcctatcaagtggatggctctcgaatgtattcactacagaaaattcacccatcagtccgatgtctggagctatggggtgacaatctgggagctgatgacctttggaggcaagccctacgacgggatccctacacgcgagattcccgacctgcttgaaaaaggagagagactccctcaacccccgatctgcaccattgatgtgtatatggtcatggttaagtgttggatgatcgacgccgattctcggcctaaattcaaggaactggctgccgagtttagccgcatggcgagagacccccagcggtacctggtgattcagggcgatgaccgcatgaaactcccttcccccaatgatagcaagttctttcaaaacctgcttgacgaagaggatctggaggacatgatggatgccgaagagtatctcgtgccgcaggctttcaatatccctccccctatctacacgtctagagcccggattgactccaaccgcagcgaaatcggccactcccctccgcccgcttacacacccatgtctgggaatcagtttgtctatagagatggaggcttcgccgccgagcagggggtgagcgttccctaccgggctcctacctccaccattcccgaggcgcctgtggcccaaggagctacagccgaaatctttgacgactcttgctgtaacggcaccctgcgcaagcccgtcgcccctcatgtgcaggaggatagctccacacagagatattctgctgacccgacggttttcgcccccgaacggagccctagaggggagctggatgaagagggatacatgacccccatgcgcgacaaacctaagcaggagtatcttaatcccgtggaagagaacccgtttgtctcccggcgcaaaaatggcgatctgcaagcgctcgacaaccctgaataccacaatgctagcaacggccctcccaaggccgaggatgaatatgtgaatgagcccctgtacctcaacacattcgccaacaccctggggaaagctgagtaccttaagaataacattctgtctatgcccgaaaaggccaaaaaggcgttcgacaatcctgattattggaaccattccctcccgcccagaagcacactgcagcaccctgactacctgcaggagtattctaccaaatacttttataagcagaatggacggatcagacccattgttgctgaaaaccctgagtacctttccgagttcagcctgaaacccggcacggtgctcccgcctcccccttatcgccaccggaataccgtcgtgtga

SEQ ID NO: 3183 - RNA, 1461 nt, synthetic construct
  misc_feature 1..1461: note = CCDS46648.1 variant
  source 1..1461: mol_type = other RNA
atgatccagaccgtgcccgaccctgccgctcacattaaggaggccctgagcgtcgtttccgaagatcaatctctcttcgagtgcgcgtacggcacaccgcatctggctaaaacggaaatgaccgccagctcctctagcgactatgggcagacatccaagatgtctcccagagtgcctcagcaggattggcttagccaaccccctgcccgggtgaccatcaaaatggagtgtaacccctcccaggtcaatggaagccgcaactctcctgacgaatgctccgtggctaagggcgggaaaatggttggaagcccggatacagtgggcatgaattacgggtcttatatggaggagaagcacatgccccctcccaacatgaccacaaatgaaagacgggtcattgtgcctgccgaccccaccctgtggtccacggatcatgttcgccagtggctcgagtgggctgtgaaggaatacggactgccggacgtcaacatccttctgtttcagaatattgatggcaaagagctctgtaagatgaccaaagacgatttccaaagactgacacctagctataacgccgacatcctgctctctcatctgcactaccttcgggagacacccctgcctcacctcacctccgatgacgtggacaaggcgctgcagaatagcccccgccttatgcacgccagaaacaccggcggggctgcctttatcttccccaatacgtccgtgtatcctgaagctacacagcggattaccacacgcccggatctgccctacgagcctcccagacggtctgcctggaccggacatggccaccctacaccccagagcaaagcggcccaaccgtcccctagcaccgtccccaagacggaagaccagcgccctcagctcgatccctaccaaatcctggggcctacctcttccagactggctaaccccggaagcggccagattcagctctggcagtttctgcttgagctgctctctgacagctccaattctagctgcatcacatgggaagggaccaacggagagttcaagatgacagatccggacgaggttgcccggcgctggggcgaaagaaaatccaagcctaatatgaactatgataaactgagccgggctcttagatactattacgacaagaacattatgaccaaagtgcatggcaagcgctatgcctacaaatttgatttccacgggatcgcccaagctctgcagccccatccccctgagtcttccctctataagtacccgagcgacctgccctacatgggatcttatcacgcgcaccctcagaagatgaattttgtggctccccatcctcccgccctgcctgtcacgtccagctccttctttgccgcccccaacccgtactggaactctcctacaggcgggatttatcccaatacccggctccctaccagccacatgccctcccatctgggaacatactattga

SEQ ID NO: 3184 - RNA, 1359 nt, synthetic construct
  misc_feature 1..1359: note = AAA19786 variant
  source 1..1359: mol_type = other RNA
atgagcgagacccccgcccagtgctccatcaagcaagaaagaatttcttacacacctccggagagccccgtgccttcctatgcttctagcacgcccctgcacgtccctgttccccgggccctccgcatggaagaggactccatcagactgcctgcgcatcttcggctgcagccgatttactggtctcgcgatgacgtggctcagtggctcaaatgggccgaaaacgagttcagcctgagacccatcgattccaatacctttgagatgaacggcaaggcccttctgctcctgacaaaagaagacttccggtatcgcagccctcactctggggatgtgctgtacgagctcctgcagcatattcttaagcaaagaaaaccccggatcctgttttcccctttctttcaccccggaaatagcatccatacccagccggaagtcattctccaccagaaccacgaggaggacaattgtgtgcagcgcacacctagaccctctgttgataacgtgcatcacaatcctcccaccatcgaactgcttcatcggtcccgcagccccattacaaccaaccacagaccttctccggaccccgagcaacggcctctgcgcagccccctcgataatatgatcagacggctgtcccctgctgaaagagcccagggcccccgcccgcaccaggagaacaatcatcaggaatcctatcctctgtctgtcagccccatggagaacaatcactgccctgcttccagcgagtctcatcccaagccttccagcccccggcaagaatctacgagagtgattcagctcatgccgagccctatcatgcaccccctgattcttaacccccgccattccgttgacttcaagcagtctcggctgagcgaggatgggctccacagagaaggaaaacctatcaatctgtcccaccgcgaggaccttgcctacatgaaccatatcatggtgagcgtctctccgcccgaagaacacgcgatgcctattggccggatcgccgattgtagactgctctgggactatgtgtaccaactgctgtccgacagccgctacgagaactttattcggtgggaagataaggagtctaaaatcttcagaattgtggaccccaatgggctcgctcgcctgtggggaaaccataagaatcggaccaacatgacatatgagaaaatgtccagagcccttcggcactactataagctgaatatcatccgcaaggagcctggccagagactcctgtttcggttcatgaaaacccccgatgaaattatgagcggcagaacagaccgccttgagcacctggagtcccaggaactcgatgagcagatctaccaagaagacgagtgctga

SEQ ID NO: 3185 - RNA, 1971 nt, synthetic construct
  misc_feature 1..1971: note = AAH04817 variant
  source 1..1971: mol_type = other RNA
atggccagcaccgactactccacatattctcaggctgccgcgcaacagggctacagcgcttatacggcccagcccacccaggggtacgcccaaacaacccaggcttatggacagcagtcctacggcacatatgggcaacctaccgatgtgtcttacacacaggcccagaccacggctacctacggacagacagcctatgcgaccagctacggccaaccgcccacagggtataccacgcctacagctccccaggcctactcccagcctgtccaaggatatggcaccggcgcctacgacacaaccaccgctacagttacgaccacacaggcctcttatgcggcccagagcgcttacgggacccagcccgcctaccctgcttatggacaacagccggccgccacagctcccaccagacctcaggatggcaacaagcccacggagacatcccagcctcaaagctctaccgggggatacaatcagccctccctgggctatgggcagagcaactactcttatccccaggtgcctggatcctaccccatgcaacctgtgaccgcgccgcccagctatcctccgacatcttactccagcacccagcccacatcctacgaccagtctagctattcccagcaaaatacgtacggccagcctagctcttatggccagcaatccagctacgggcagcagtctagctatggacagcaaccccctacctcctatcccccgcagacaggctcttacagccaggccccttcccagtacagccaacagtcttccagctacgggcagcagtcttccttccggcaagatcaccccagctccatgggagtctatggccaggaatctgggggatttagcggccctggcgagaaccgctccatgtctgggcccgacaatagaggacggggccgcgggggattcgatagaggcgggatgagccggggcggacgcggcgggggaagaggcgggatgggatccgctggcgaaagagggggctttaacaaacctggaggccccatggacgaggggccggatctcgacctgggacctcccgtggatcccgacgaagatagcgacaattctgccatctacgttcagggccttaacgactccgtgaccctggatgacctcgccgatttctttaagcaatgcggggtcgtgaaaatgaataagcgcacaggacagcctatgattcatatctatctggacaaagagaccggcaagccgaagggggatgctacggttagctacgaggatccccctaccgccaaagcggctgtggaatggttcgacggcaaggactttcagggatctaaacttaaggtctccctggcccggaaaaagccccctatgaacagcatgcggggcgggctgccccctcgcgagggaagaggcatgcccccgcctctccgcgggggacccggcgggcctggcggacccggcgggccgatgggacggatgggcgggagaggaggcgatcggggcgggttccctcccagaggacctcgcggctctcgggggaatcccagcggaggcgggaacgtgcagcacagagccggagactggcaatgtcccaatcctggctgcggcaaccagaattttgcttggcgcacagaatgtaaccagtgcaaggccccgaaacccgaggggttcctgcctcccccttttccccctccgggaggcgatcgggggagaggaggccccgggggaatgcgcggcggcagagggggactcatggaccggggcgggcctggaggcatgttccgcgggggacggggcggcgacagagggggatttcgcggcgggcggggaatggatagaggcgggttcggaggcggccggcgcgggggacccggcgggcctcccggaccgctgatggagcagatgggcgggagacggggaggcagaggcgggcctggaaagatggacaaaggcgaacatcgccaagagcggagagatcgcccctattga

SEQ ID NO: 3186 - RNA, 1998 nt, synthetic construct
  misc_feature 1..1998: note = AEA07595 variant
  source 1..1998: mol_type = other RNA
atgggccagaccgggaagaaaagcgagaagggacccgtgtgctggagaaaacgggtcaagtccgaatacatgcgcctgagacaactcaaacggttccgcagagccgacgaggttaagtctatgtttagctccaaccggcagaagatcctggaacgcacagagattcttaatcaggaatggaaacagagacggatccaacctgtgcacattctgacgtctgtgagctccctccgcggcaccagagaggtcgaggatgaaacagtgctgcataacatcccgtatatgggggacgaggttcttgatcaggacggaaccttcattgaagaactgatcaagaattacgatggcaaagtgcacggggaccgggagtgtggatttatcaacgatgaaattttcgtcgagctcgtgaatgctctgggccagtataacgacgatgacgatgacgatgacggcgacgatcccgaagaacgcgaagagaagcagaaagacctggaggatcatagagacgataaggaatctcggcctccccgcaagtttcctagcgacaaaatcttcgaggccatttccagcatgtttcccgataaggggacagcggaggagctcaaagaaaagtacaaagagctgaccgagcaacagcttcctggagctctgccgcccgaatgcacacctaatatcgacggccccaacgccaagtctgttcagagagagcagtccctccacagcttccataccctgttttgtcggagatgcttcaaatatgattgttttcttcaccctttccacgccacgcccaatacctacaagcgcaagaacacagaaaccgctctggacaataaaccgtgcgggcctcaatgttatcagcatctcgagggagccaaggaatttgctgccgcgctgacagccgagcggattaaaacgccccctaagagacccggcgggcgccggagaggacgcctgcccaacaattcttcccggcctagcaccccgacaatcaacgtgctcgagtctaaagataccgactccgacagagaagctggcacagagaccggcggggaaaataacgataaggaggaggaagagaagaaagacgaaaccagctcctctagcgaggccaactcccgctgccagacacccattaagatgaaacctaatatcgaaccccctgagaacgtcgagtggagcggagctgaagcctctatgttccgggtgctgatcggcacgtactacgataatttctgtgcgattgccagacttatcgggaccaagacatgccgccaagtgtatgagtttcgggtcaaagaatccagcattatcgctcccgccccggctgaggacgttgatacccctcccagaaagaagaaacggaagcaccgcctgtgggccgcccattgtagaaaaattcagctcaagaaaggacagaaccggttccctggctgcagatgcaaggctcagtgtaatacaaagcaatgcccctgttacctggcggtgcgcgaatgcgaccctgatctttgtctgacctgcggggccgctgaccactgggattctaaaaacgtgagctgtaagaattgctccatccagcggggatctaaaaagcacctcctgctggcccccagcgacgtcgccggctggggcatctttattaaagatccggtgcagaagaacgagttcatctccgagtattgtggggaaattatcagccaggacgaggctgatagacgcggaaaagtttacgacaagtatatgtgctcttttctcttcaatctgaacaatgactttgtggtcgatgccacgagaaagggcaacaaaattcggttcgcgaatcattccgtgaaccctaattgttacgctaaggttatgatggtgaacggggaccaccgcatcggaatctttgccaaaagagccattcaaacaggcgaggagcttttctttgattatcggtacagccaggctgacgccctgaagtacgtcgggatcgaacgcgagatggagattccctga

SEQ ID NO: 3187 - RNA, 1005 nt, synthetic construct
  misc_feature 1..1005: note = EAW80068 variant
  source 1..1005: mol_type = other RNA
atgggccagaccgggaagaaaagcgagaagggacccgtgtgctggagaaaacgggtcaagtccgaatacatgcgcctgagacaactcaaacggttccgcagagccgacgaggttaagtctatgtttagctccaaccggcagaagatcctggaacgcacagagattcttaatcaggaatggaaacagagacggatccaacctgtgcacattctgacgtctgtgagctccctccgcggcaccagagagtgttctgtcacaagcgatctggacttcccgacccaggtgatcccccttaagacactgaacgctgttgcctccgtgcctattatgtatagctggtctcccctccagcagaattttatggtcgaggatgaaaccgtgctgcataacatcccttacatgggggacgaggttctggatcaagacggaacattcatcgaagaactcattaaaaattatgatggcaaggtgcacggggaccgggagtgcggatttatcaacgatgaaattttcgtcgagctggtgaatgcgcttggccagtacaacgacgatgacgatgacgacgatggcgacgatcccgaggagcgcgaagagaaacagaaggacctggaggatcatagagacgataaggaatcccggcctccgcgcaaatttcccagcgacaagatcttcgaggctatttcttccatgtttcctgataaagggaccgccgaggaactcaaggaaaaatataaggagctgacggagcagcaacttcccggagccctgcctcccgaatgtaccccgaatatcgacggccctaacgctaaaagcgtgcagagagagcagtctctccactccttccatacactgttttgccggagatgtttcaagtacgattgctttctgcaccccttccacgccacccctaatacatataagcgcaaaaacaccgaaacggctctcgacaataagccctgtgggccccaatgctaccagcatctgcctcttctgccgcggaactga

SEQ ID NO: 3188 - RNA, 195 nt, synthetic construct
  misc_feature 1..195: note = CCO13726 variant
  source 1..195: mol_type = other RNA
atgcccctggtgaacatcatgatgatgaccatgatgatgatggagacaattctcaagaaagaaaagaaaagcagaaagatctggcggattacggagatgatcaaaaaggccgctcacctgggcaatttccttctgattaagtttctcaaacctttcccgcagtgctttcaaatccgcgcccagcagaagaactga

SEQ ID NO: 3189 - RNA, 2241 nt, synthetic construct
  misc_feature 1..2241: note = AAC51520 variant
  source 1..2241: mol_type = other RNA
atgggccagaccgggaagaaaagcgagaagggacccgtgtgctggagaaaacgggtcaagtccgaatacatgcgcctgagacaactcaaacggttccgcagagccgacgaggttaagtctatgtttagctccaaccggcagaagatcctggaacgcacagagattcttaatcaggaatggaaacagagacggatccaacctgtgcacattctgacgtctgtgagctccctccgcggcaccagagagtgttctgtcacaagcgatctggacttcccgacccaggtgatcccccttaagacactgaacgctgttgcctccgtgcctattatgtatagctggtctcccctccagcagaattttatggtcgaggatgaaaccgtgctgcataacatcccttacatgggggacgaggttctggatcaagacggaacattcatcgaagaactcattaaaaattatgatggcaaggtgcacggggaccgggagtgcggatttatcaacgatgaaattttcgtcgagctggtgaatgcgcttggccagtacaacgacgatgacgatgacgacgatggcgacgatcccgaagaacgcgaagagaaacagaaggacctggaggatcatagagacgataaggaatcccggcctccgcgcaaatttcccagcgacaagatcttcgaggctatttcttccatgtttcctgataaagggaccgccgaagaactcaaggaaaaatataaggagctgacggagcagcaacttcccggagccctgcctcccgaatgtaccccgaatatcgacggccctaacgctaaaagcgtgcagagagagcagtctctccactccttccatacactgttttgccggagatgtttcaagtacgattgctttctgcaccccttccacgccacccctaatacatataagcgcaaaaacaccgaaacggctctcgacaataagccctgtgggccccaatgctaccagcatctggagggagccaaagagttcgcggccgctcttacagccgagcggattaagacccctccgaaaagacccggcgggcgccggagaggacgcctgcctaacaatagctcccggccctctacacctaccatcaacgtcctcgagagcaaggacaccgattccgacagagaagctggcacagagacgggcggggaaaacaatgataaggaggaggaagagaaaaaggacgaaacctctagctccagcgaggccaactctcgctgtcagacacccatcaaaatgaagccgaatattgaacctcccgagaacgttgagtggagcggagcggaagcctccatgtttcgggtgctgatcggcacctactatgataatttctgcgctattgccagacttatcgggacaaaaacctgtcgccaggtgtacgagtttcgggtcaaggaatctagcattatcgctcctgcccccgccgaggacgtggatacgcctcccagaaagaaaaagcggaaacaccgcctgtgggctgcgcattgcagaaagatccaactcaaaaaggacggatccagcaaccacgtttataattaccagccgtgcgatcaccctcggcagccctgtgactcttcctgcccctgtgtgattgcccagaacttctgcgaaaagttttgtcaatgcagctctgagtgtcagaatagattccctggctgccgctgtaaagctcagtgcaacacaaagcagtgtccgtgctatctggccgtccgggagtgcgatcccgacctgtgtctgacctgcggggccgctgatcattgggactccaaaaatgtgagctgtaagaactgctccatccaaagaggatctaaaaagcatctccttctggcccctagcgacgttgcgggctggggcatttttatcaaagatcccgtgcagaagaatgagttcatttccgagtactgtggggaaatcatctctcaggacgaggctgatcgcagaggaaaggtctatgacaaatacatgtgcagctttctcttcaacctgaataacgattttgtggtcgacgccacccggaagggcaacaaaattcgcttcgccaatcactccgtgaaccctaattgttacgctaaggttatgatggtgaacggggatcacagaatcggaatttttgccaaacgggctatccagacaggcgaggagcttttcttcgactatcgctacagccaagccgatgcgctgaagtatgtcgggattgagagagaaatggagatcccctga

SEQ ID NO: 3190 - RNA, 2124 nt, synthetic construct
  misc_feature 1..2124: note = AEN79481 variant
  source 1..2124: mol_type = other RNA
atgggccagaccgggaagaaaagcgagaagggacccgtgtgctggagaaaacgggtcaagtccgaatacatgcgcctgagacaactcaaacggttccgcagagccgacgaggttaagtctatgtttagctccaaccggcagaagatcctggaacgcacagagattcttaatcaggaatggaaacagagacggatccaacctgtgcacattctgacgtctgtgagctccctccgcggcaccagagaggtcgaggatgaaacagtgctgcataacatcccgtatatgggggacgaggttcttgatcaggacggaaccttcattgaagaactgatcaagaattacgatggcaaagtgcacggggaccgggagtgtggatttatcaacgatgaaattttcgtcgagctcgtgaatgctctgggccagtataacgacgatgacgatgacgatgacggcgacgatcccgaagaacgcgaagagaagcagaaagacctggaggatcatagagacgataaggaatctcggcctccccgcaagtttcctagcgacaaaatcttcgaggccatttccagcatgtttcccgataaggggacagcggaggagctcaaagaaaagtacaaagagctgaccgagcaacagcttcctggagctctgccgcccgaatgcacacctaatatcgacggccccaacgccaagtctgttcagagagagcagtccctccacagcttccataccctgttttgtcggagatgcttcaaatatgattgttttcttcaccctttccacgccacgcccaatacctacaagcgcaagaacacagaaaccgctctggacaataaaccgtgcgggcctcaatgttatcagcatctcgagggagccaaggaatttgctgccgcgctgacagccgagcggattaaaacgccccctaagagacccggcgggcgccggagaggacgcctgcccaacaattcttcccggcctagcaccccgacaatcaacgtgctcgagtctaaagataccgactccgacagagaagctggcacagagaccggcggggaaaataacgataaggaggaggaagagaagaaagacgaaaccagctcctctagcgaggccaactcccgctgccagacacccattaagatgaaacctaatatcgaaccccctgagaacgtcgagtggagcggagctgaagcctctatgttccgggtgctgatcggcacgtactacgataatttctgtgcgattgccagacttatcgggaccaagacatgccgccaagtgtatgagtttcgggtcaaagaatccagcattatcgctcccgccccggctgaggacgttgatacccctcccagaaagaagaaacggaagcaccgcctgtgggccgcccattgtagaaaaattcagctcaagaaagacggatctagcaaccacgtgtacaattatcagccttgcgatcacccccggcagccttgcgactcctcttgtccctgcgtgatcgctcaaaacttctgtgaaaagttttgccagtgtagctccgagtgccagaatagattcccgggctgtcgctgcaaggcgcagtgtaacacaaaacaatgcccttgttacctggccgtccgggagtgcgatcccgacctttgcctgacctgtggggctgccgatcattgggacagcaagaatgtgtcttgcaaaaactgttccatccagagaggaagcaagaaacacctcctgctggccccctctgatgttgctggctggggcatttttatcaaggaccctgtgcagaaaaatgagttcatttccgagtattgcggggaaatcattagccaggacgaggccgatcgcagaggaaaggtctacgacaagtatatgtgttcctttctcttcaacctgaataacgattttgtggttgacgcgacgcggaaaggcaataagatccgcttcgctaaccattctgtgaacccgaattgctacgccaaagtcatgatggtgaacggggatcacagaatcggaatttttgccaagcgggctatccaaacaggcgaggaacttttctttgactaccgctatagccaggccgatgctctgaaatacgtcgggattgagagagaaatggagatcccctga

SEQ ID NO: 3191 - RNA, 399 nt, synthetic construct
  misc_feature 1..399: note = AAB87141 variant
  source 1..399: mol_type = other RNA
atggtggaggccttctgcgctacctggaagctgacaaacagccagaattttgacgaatacatgaaagccctcggcgtcgggttcgcgacgagacaagttggaaacgtgaccaagcccacagtgatcatttcccaggagggcgataaagtcgtgatccggaccctgtctacatttaagaataccgaaattagcttccagcttggggaggaatttgacgagacaaccgctgatgaccgcaactgtaaatccgttgtgtctctggatggagacaagctcgtccacatccagaagtgggatggcaaagagacgaatttcgtgagagaaattaaggacgggaaaatggttatgaccctgacatttggagatgtggtcgccgtgcggcattatgagaaggcctga

SEQ ID NO: 3192 - RNA, 765 nt, synthetic construct
  misc_feature 1..765: note = CAA36870 variant
  source 1..765: mol_type = other RNA
atgtggcagctgctcctgcccaccgcccttctgctcctggtgagcgctggcatgagaacagaggaccttcctaaggccgtcgttttcctggaaccgcaatggtaccgggtgctcgagaaagattccgtgacgctgaagtgccagggggcgtattctcccgaagacaacagcacccagtggtttcacaatgagtccctgatctctagccaggcttcctcttacttcattgatgccgccacagtcgacgatagcggagaatatcgctgtcaaaccaacctctccacactgagcgaccctgtgcagcttgaggttcatatcggctggctgctcctgcaggctcccagatgggtgtttaaagaggaagatcctattcaccttcggtgccattcttggaagaataccgccctgcacaaagtcacatacctccagaacgggaagggacgcaagtatttccatcacaattccgacttttacatccccaaagctaccctgaaggatagcggctcttatttctgtagagggctgtttggatccaaaaacgtgagctctgagacggttaatattaccatcacacaaggcctcgccgtgtccaccatcagctccttctttcctccgggctaccaggtctctttctgcctggtgatggtgcttctgtttgcggtcgacacagggctctacttcagcgttaagaccaacattcggtccagcacgcgcgattggaaagaccacaagtttaagtggagaaaagatccccaggacaagtga

SEQ ID NO: 3193 - RNA, 873 nt, synthetic construct
  misc_feature 1..873: note = CCDS1232.1 variant
  source 1..873: mol_type = other RNA
atgggcgggggagccggcgagagactgttcaccagctcctgcctcgtggggctggtcccccttggactgcggatctctctcgttacatgtcctctgcagtgcggcattatgtggcaacttctgctcccgacggctctgctgctcctggtgagcgccgggatgcgcaccgaagaccttcccaaggcggtggtctttctggagcctcagtggtacagagtgctcgaaaaagattccgttacactgaagtgtcagggagcttattctcccgaggacaacagcacccagtggttccacaatgaatcccttatctctagccaagcctccagctactttattgatgccgctacagtggacgattctggcgagtatcggtgccagaccaacctgtccacactcagcgaccctgtccagctggaggtgcatatcggctggctgctcctgcaggctccccgctgggttttcaaagaagaggatcctattcaccttagatgtcattcttggaagaataccgccctgcacaaagtgacgtacctccaaaacgggaagggacggaagtattttcatcacaattccgacttctacatcccgaaagccaccctgaaggatagcggctcttatttttgccgcgggcttttcggatccaaaaacgtcagctccgaaacagtgaatatcaccattacacagggcctggcggtgtctaccatcagctcctttttccctcccgggtaccaggtcagcttttgtctcgttatggtgctgctgttcgccgtggacacgggactctacttttctgtcaagacaaacattagatccagcacccgggattggaaagaccacaagttcaagtggcgcaaagatccccaggacaagtga

SEQ ID NO: 3194 - RNA, 807 nt, synthetic construct
  misc_feature 1..807: note = AAH74858 variant
  source 1..807: mol_type = other RNA
atgagcctgtccttcctcctgcttctgtttttctctcacctcatcctgagcgcctgggcccatggcgaaaagagacttgcccccaaagggcagcctggaccggcggctaccgaccggaacccccgcggctcctctagcagacaatcctctagctccgccatgtcctcttccagcgcctcttccagccctgctgcctctctggggtcccagggaagcggcctcgaacagtcctcttttcagtggagcccctccgggcggcgcacaggaagcctgtactgcagagtgggcattggcttccatctgcaaatctatcctgatgggaaggtcaatggatctcacgaggctaacatgctctccgttctggaaatttttgccgtgagccagggcatcgtggggattcggggagtcttctctaataaatttcttgcgatgagcaagaaaggcaagctgcacgcctccgctaagttcacggacgattgtaaatttcgcgagagattccaggaaaactcttacaatacctatgccagcgctatccatcggacagagaagaccgggcgcgagtggtacgtggccctcaacaaaagaggaaaggcgaaacggggctgcagcccccgcgttaagcctcagcacatcagcacacactttctgccgagattcaagcaatctgaacagcccgagctttcctttaccgtgacagtccctgagaaaaagaaaccccctagccccattaagccgaaaatccctctgtctgctccccggaagaataccaactccgtgaaatatcgcctcaagttcagattcggctga

SEQ ID NO: 3195 - RNA, 117 nt, synthetic construct
  misc_feature 1..117: note = AAB06462 variant
  source 1..117: mol_type = other RNA
atgagcaccagatgcggcgaggccgggcgggctcgcggaacacagccccacagaggctaccgggcccaaaaccagccttataagatgcatctggggccgccccgcctcgaagagtga

SEQ ID NO: 3196 - RNA, 2466 nt, synthetic construct
  misc_feature 1..2466: note = AAA59470 variant
  source 1..2466: mol_type = other RNA
atggtgagctggggcagattcatctgcctggtcgttgtgaccatggccacactctccctggctcggccctcttttagccttgtggaggacacgaccctggaacctgaggaaccgcccacaaagtaccagatttcccaacctgaggtctatgtggccgcgcccggggaatctctcgaggttcgctgtctgcttaaagatgctgccgtgatcagctggaccaaggacggagtccacctgggccctaacaatagaacagtgctcattggggagtacctgcagatcaaaggagccacaccccgggattccggcctgtatgcttgcaccgcctctcgcaccgttgacagcgaaacgtggtacttcatggtgaacgtcaccgatgctatttccagcggggacgatgaggacgatacagacggagccgaagattttgtgtctgaaaattccaacaataagagagcgccttattggaccaacacagagaaaatggaaaagcggctccatgccgtgccggctgccaataccgtcaagttccgctgtcccgctggcggcaaccctatgcccacgatgagatggctgaaaaatgggaaggagtttaaacaggaacaccggatcggaggctacaaggttcgcaaccagcattggagccttatcatggagtctgtggtgccttccgacaaagggaattatacatgcgtcgtggaaaacgagtacggaagcattaatcacacctaccatctggatgttgtggagagatctccccaccggccgatcctccaagccggcctgcctgcgaacgcctccacagtcgttgggggagacgtggagttcgtgtgtaaggtctatagcgacgctcagccccacattcagtggatcaagcatgtggagaaaaatggctccaagtacggccctgatgggcttccctatctgaaagtcctcaaggccgctggagtgaacaccaccgacaaagaaattgaggttctgtacatccgcaacgtgacatttgaagatgccggcgagtatacgtgcctggccggaaattctattggaatcagcttccactccgcttggctcaccgtcctgcccgcgcctggcagagagaaggaaatcacagccagcccggactaccttgagattgctatctattgtattggggtgtttctgatcgcctgcatggttgtgaccgtcattctctgtcggatgaaaaacacaaccaagaagcccgatttctcttcccagcctgccgtgcataaactgacgaagcgcatcccccttagacggcaagtgacagttagcgctgaatctagctcctctatgaatagcaacacccctctggtcagaatcaccacacgcctctccagcaccgccgacacacccatgctggcgggagtgtctgagtacgaactgccggaggatcctaaatgggagtttccccgggacaagctcacgctgggcaaacctcttggcgaagggtgcttcggacaggtggtcatggctgaggccgtgggcattgataaggacaagcccaaagaagccgttaccgtggctgtcaagatgctgaaagatgacgccacagagaaggacctctccgatctggtgagcgagatggaaatgatgaaaatgatcgggaagcacaagaatattatcaaccttctgggagcttgtacccaggacggccctctctacgttattgtggagtatgcctctaaagggaatctgagagaatacctgcgcgcgcggagacccccgggcatggagtattcctacgatatcaaccgcgtccctgaggaacagatgacatttaaggacctcgtgagctgcacctatcaactggcccggggaatggagtaccttgcttcccagaaatgcatccacagagatctggccgctcgcaatgttctcgtgacggaaaacaatgtcatgaagattgccgacttcggcctggcgcgggatatcaacaatattgactattacaaaaagaccacaaacgggagactgcccgtgaagtggatggcccccgaggctcttttcgatcgcgtgtacacccatcagtctgacgtctggagctttggagttctcatgtgggaaatcttcacactgggcgggtccccttatccggggattcccgtggaggaactgtttaaactcctgaaggagggccaccggatggataaacctgccaattgtaccaacgagctttacatgatgatgagagactgctggcatgctgtgccctctcaacggcctacgttcaagcagctggtcgaagatctcgaccgcatcctgacactgaccacaaacgaggaatatcttgacctcagccagcccctggagcagtactcccctagctatcccgataccagatcttcctgtagctctggggacgattccgtgtttagcccggaccctatgccctacgaaccttgcctgccccaatatccgcacattaatggctctgttaaaacctga

SEQ ID NO: 3197 - RNA, 1908 nt, synthetic construct
  misc_feature 1..1908: note = EAW74574 variant
  source 1..1908: mol_type = other RNA
atggctccccctctgctcctgcttctgctcgccagcggcgccgcggcttgcccgctgccctgtgtgtgccagaacctttccgagtctctgagcaccctctgtgcccacagagggctgctgttcgtccctcccaatgttgaccggcgcacagtggaactcagactggccgataactttatccaagctcttggacctcccgacttccggaatatgacgggcctggtggatctcaccctgtcccgcaacgccattacaagaatcggggctcgggcctttggagaccttgagtctctgcgcagcctccatctggatggcaatagactggtcgaactcgggaccggatccctgcggggccctgtgaaccttcagcacctgattctctctggcaatcagctggggcgcatcgcgccgggagccttcgacgattttcttgagagcctggaagacctcgatctgtcctacaacaatctgagacaggttccctgggctggcattggggccatgcctgctctccatacactgaaccttgaccacaatctgatcgatgccctgccccctggagcgttcgcccaactcggccagcttagccggctggacctcacctctaaccgcctggctacactggcccccgatccgctcttttccagagggcgggacgctgaggccagccctgctcccctggtgctttctttctccggaaatcctctgcattgcaactgtgagctcctgtggctgcgcagacttgcccggcccgacgatctcgaaacctgcgcgtctccccctggcctggccggcagatatttttgggctgtcccggagggggagttcagctgtgaaccccctctgatcgcccgccacacgcagcggctctgggtgctggagggacagagagccacccttcgctgccgggctctgggcgaccccgcccctacaatgcactgggttgggcccgatgacagactcgtgggaaattccagccgcgcgcgggcttttccgaacggcaccctggaaattggggtcacaggagccggcgatgccggcgggtacacctgtatcgctacgaaccctgccggagaggctacagccagagtggaactgcgcgtgcttgcgctcccccatggcgggaactcctctgccgagggaggccggcctgggcccagcgacattgctgcctccgctagaaccgccgcggaaggcgagggaacactggagagcgaacctgccgtccaagttaccgaggtgaccgctacatctggcctggtgtcctgggggcccggacgcccggccgatcctgtctggatgttccagatccagtataatagctctgaagacgagacgctcatttaccggatcgtgcccgctagctcccaccattttctgcttaagcacctggttcccggcgccgattatgacctctgcctgctggccctttctcctgctgcggggccgagcgatctcaccgccacaagactgctgggatgtgctcacttctccaccctccccgccagccctctgtgccatgcccttcaggctcacgtgctgggcgggacactcaccgtcgccgtgggcggagttctggtggcggctctgcttgtcttcacggtggccctcctggtccggggccgcggggccggaaatggcagactgcccctcaaactgtctcatgtgcaatcccagacaaacgggggacctagccccacccctaaggctcatcccccgcggtctcctccccctagaccccagcgctcctgcagccttgacctgggcgacgccgggtgttacggctatgcgcggagactcggaggcgcttgggcccgcagatcccactctgttcacgggggactgctgggcgccgggtgccggggagtgggcgggagcgctgaacgccttgaggagtccgtcgtgtga

SEQ ID NO: 3198 - RNA, 3297 nt, synthetic construct
  misc_feature 1..3297: note = EAW96782 variant
  source 1..3297: mol_type = other RNA
atgccccctagacagccgccccggcaagccggcgggggactgagccgcgagttcggcaagctcctgcctgctctttcccactctcccctcgggggactcggcagcgggtccggatctgtggcccctggccagggcagagcgggggctatgggaagccggacccccgaatcccctctgcatgccgtccagcttcgctggggcccgagacggagaccccctctgctccccctgctgctcctgcttctgcctcccccgcctcgcgttgggggatttaacctcgacgccgaggctcccgccgtgctgtctggccctcccgggagcttctttggattctccgtggaattttaccggcccggcacagatggcgtcagcgtgcttgttggggctcctaaagccaatacgtctcagccgggagtgctgcaaggcggggcggtctatctctgcccctggggagcctcccctacccagtgtacacccatcgagttcgacagcaagggctctcgcctgctggaatccagcctctcttccagcgagggggaggaacctgtggagtacaaatccctgcagtggtttggagctaccgttagagcccacggctctagcattcttgcttgcgcgcccctgtattcctggcggacagaaaaggagccgctcagcgatcctgtgggcacctgttacctgtctacagacaacttcacccgcatccttgagtatgccccctgcagatccgattttagctgggccgctgggcagggatactgtcaaggcgggttctctgccgaatttacgaaaaccggacgggtcgtgctgggcgggcctggcagctatttctggcagggacagattctctccgctacacaggagcaaatcgccgaatcttactaccccgagtatctgattaatctggtgcagggccagctccaaacccgccaggccagctccatctacgacgatagctatctggggtactctgtcgctgttggagaattttccggcgacgatacagaggacttcgtggcgggggtgcctaagggaaaccttacctatggctacgtcacgatcctgaatgggagcgatattagatctctctataacttctccggcgagcagatggccagctactttggatacgctgtggccgccacagacgttaatggcgatgggctggacgaccttctggtgggagctcccctcctgatggatcggaccccggacggcagacctcaggaagtcgggcgcgtgtatgtttacctgcaacatcccgccggaatcgagcccacacctaccctcaccctgacaggccacgatgagttcgggcggtttggctcctctcttacgccgctgggagacctcgatcaggacggctataacgatgtggcgattggggctcccttcggaggcgaaacccagcagggggtcgtgtttgtcttccctggaggccccgggggcctgggaagcaagccttcccaagtgctgcagcccctttgggccgcctctcatacacctgactttttcggcagcgctctcagagggggacgcgatctggacggcaatgggtaccccgatctgatcgttggatcctttggcgtggacaaagccgtcgtgtatcggggcagaccgattgttagcgcttctgcctccctcaccatcttccctgcgatgtttaaccccgaggaacgcagctgctctctggaggggaatcctgtggcctgtattaacctttccttctgcctgaatgctagcggaaagcacgtcgccgactctatcggctttacagtggaactccagctggattggcagaaacaaaaagggggagtgcggagagctctgttccttgccagccgccaggcgaccctcacgcagacactgctgatccagaacggcgcccgggaggactgtagagaaatgaagatttacctccgcaatgagtccgagttccgggataagctgagccccatccacattgctcttaacttttctctggacccgcaagcccctgttgattcccatgggctcagacccgctctgcactatcagagcaagtcccggatcgaagacaaagcccagattctgcttgattgcggagaggacaacatctgtgtccctgatctccaactggaagtgttcggcgagcagaatcatgtgtacctgggcgacaagaacgccctcaatctgacctttcacgctcagaacgtcggggaaggaggcgcgtacgaggccgagcttcgcgtgaccgctcctcccgaagccgagtattctgggctggttagacaccccggaaatttcagctccctctcttgcgattactttgccgtgaaccagagccggctgctggtctgcgaccttggcaatccgatgaaagctggggcctccctctggggaggcctgagattcacagtgccccatctgcgcgataccaagaaaacaatccaatttgacttccagattctctctaagaacctgaataacagccagtccgacgttgtgagctttcggctttctgtcgaagcgcaggctcaagtgacgctgaatggcgtttccaaacctgaggccgtgctgttccccgtcagcgattggcaccctagagaccagccccagaaggaagaggatctggggcctgccgtgcatcacgtgtatgagctgatcaaccagggaccgtcttccattagccaaggcgtccttgaactgtcttgtccccaggctctcgaggggcagcaactgctctacgttacccgcgtgacaggactgaattgcaccacaaaccatcctatcaatcccaagggccttgaactggaccctgaggggtccctccaccaccagcagaaaagagaagcccccagccggtccagcgcgtctagcggaccgcagattctgaagtgtcctgaggctgagtgctttcgcctgagatgtgaacttggccccctgcatcaacaggagtcccagtctctccagctgcacttccgggtgtgggccaaaacctttctccaacgcgaacatcagcccttcagcctgcagtgcgaggccgtctataaggctcttaaaatgccttacagaatcctgccccggcagctccctcaaaaggaacgccaggtggccacggctgttcagtggaccaaggccgagggctcctatggggtgccgctgtggatcattatcctggcgattcttttcggactgctcctgctcggcctgcttatctacattctgtacaaactggggtttttcaagagatctctcccctatggaacagccatggagaaagctcagctgaagcctcccgccaccagcgatgcttga

SEQ ID NO: 3199 - RNA, 3597 nt, synthetic construct
  misc_feature 1..3597: note = EAX08808 variant
  source 1..3597: mol_type = other RNA
atggccgagcatccccctctgctcgacaccacacagatcctgagctccgatatttctcttctgagcgctccgatcgtgtccgccgacggcacgcaacaggtcattctcgttcaggtgaaccccggggaagcgttcaccatcagacgggaggatggacagtttcaatgcattacaggccctgctcaggtgcccatgatgtctcctaatgggagcgtgccccctatctacgtcccgcccggatatgcccctcaggttatcgaagacaacggcgtgcgcagagtcgtggttgtgccccaggcccctgagttccaccccgggtcccacaccgtcctgcatcggtctccgcaccctccccttcctggatttattcccgtgcccacaatgatgcctccgccccctcgccatatgtacagccccgtgaccggcgctggcgatatgacaacccaatatatgcctcagtaccagtccagccaggtctatggggacgttgatgcccactctacgcacggaagatccaatttccgggacgaacgcagctctaagacctacgagagactgcaaaagaagctcaaagatcggcagggcacacagaaggacaaaatgtcctctcccccgagctcccctcaaaagtgtcccagccctatcaacgagcataatgggctgattaagggacagatcgctggcgggattaacaccggatccgccaaaatcaagtctggcaaaggcaaagggggaacacaggtggataccgaaattgaggaaaaagacgaggagacgaaggcgtttgaagccctgctcagcaatatcgtgaagcccgtcgcttccgatatccaggcccgcacagtggttctgacctggagccctccctcttcccttattaacggcgagacagacgaaagctctgtgccggagctgtatgggtacgaagtcctcatcagctccaccggaaaagacggcaagtacaaatctgtgtatgttggggaggagaccaatattacactgaacgatcttaagcctgctatggactaccacgccaaagtgcaagcggaatataatagcatcaagggaacgccctccgaggccgaaattttcaccacactgagctgcgagcccgatatccctaacccgcccagaatcgctaatcggaccaaaaactctctcacactgcagtggaaggccccttccgacaatggcagcaagattcagaactttgtcctggaatgggatgagggcaaagggaacggagagttctgtcagtgctacatgggctctcaaaagcagtttaaaatcaccaagctctcccccgctatggggtgtaaattccgcctgagcgccagaaatgactatggaacgtccggcttttctgaagaggtgctttactatacaagcgggtgcgccccttccatgcccgcttctcctgtcctgaccaaggcgggcattacctggctcagcctgcagtggtccaagcccagcggaacaccgtctgatgaaggcatctcctacattcttgagatggaagaggagaccagcgggtacggattcaaacctaagtatgacggcgaagatctggcctacacagtgaaaaacctccggcgctctacgaagtataaatttaaggttatcgcttacaattccgagggaaagagcaacccctctgaagtggtcgagttcaccacatgtcctgacaaacccgggatcccggtgaagcctagcgttaaaggcaagattcattcccacagcttcaaaatcacctgggatccccctaaggacaatgggggcgccacaattaacaagtatgtggtcgagatggccgaaggatctaatggcaacaaatgggagatgatctactccggggctaccagagaacacctgtgcgaccggctgaatcccggatgtttttatagactccgcgtgtactgcattagcgatggcgggcagtccgccgtgtctgagagcctgcttgttcaaacgcccgcggtccctccgggaccctgtctgcctccccggctccagggcagacctaaggctaaagaaatccagctgcgctgggggccccctcttgtggacggcggatccccgatttcttgctacagcgtggagatgtcccccatcgagaaggatgaacctcgggaggtctatcagggctctgaagtggagtgcaccgttagctccctgctccccgggaaaacatacagcttcagactgcgcgccgccaacaagatgggatttggccctttctctgaaaaatgtgacatcaccacagctcccgggccgcctgatcaatgcaagcctccccaggtgacctgtcggtccgccacgtgcgctcaggtcaattgggaggtgcccctgagcaacggaacagacgttaccgagtatagactcgaatggggcggggtggagggctctatgcaaatttgttactgcggacccggcctgtcctatgaaatcaaggggcttagccctgccacaacctactattgtcgcgtccaggcgctgtctgtggttggagccggcccgttttccgaggtggtcgcttgcgtgacaccccctagcgtgcccgggattgtcacctgtctccaggaaatctccgatgacgagattgagaatcctcattacagcccctctacgtgcctggccatcagctgggaaaaaccgtgtgatcacggatccgagatcctggcttactctattgacttcggcgataagcagagccttaccgttggcaaagtgacatcctatatcattaacaatctccaacctgacaccacataccggatccgcattcaggccctgaactctctgggggcgggaccctttagccatatgatcaagctcaaaaccaagcctctgccccctgatcccccgagacttgaatgcgtggccttctcccaccagaacctgaagctcaaatggggcgaggggacgcctaagacactgtctaccgacagcatccagtatcatctgcaaatggaggacaaaaatggacggtttgtctccctttacagaggcccctgccacacctataaggtgcagcggctcaacgaaagcacatcttacaaattctgtattcaggcttgcaatgaggccggggaaggacccctgtcccaggagtatatctttaccacacctaagagcgttccggctgccctgaaggcccccaaaattgaaaaggtgaacgatcacatctgtgagattacgtgggagtgcctccaacctatgaaaggcgaccccgtcatctactctcttcaggtgatgctgggcaaggattccgagttcaaacagatctacaaggggcctgacagctcctttcgctattctagcctgcaactcaattgtgaatacagattccgggtttgcgctattagacagtgtcaggattccctgggacatcaggacctggtgggcccctatagcaccacagtccttttcatctctcaacgcaccgaacctccggcgtccacaaaccgggataccgtggagagcacgagaacccgcagagccctctctgacgaacagtgcgctgccgttattctggtgctgtttgccttctttagcatcctcattgctttcatcattcagtactttgtcatcaagtga

SEQ ID NO: 3200 - RNA, 3429 nt, synthetic construct
  misc_feature 1..3429: note = EAX08809 variant
  source 1..3429: mol_type = other RNA
atgagcggccccgcccaggtgcctatgatgtccccgaacgggtctgtgccccctatctacgttccccctggatatgctccccaagtgattgaggacaatggcgtgagacgggtcgtggttgtgcctcaggccccggagttccaccccgggagccataccgtcctgcaccgctcccctcatccccctctccccggatttatcccggtgcctacaatgatgccccctcctcccagacacatgtactctcccgttacgggcgcgggggatatgaccacacagtatatgccgcagtaccaaagctcccaggtgtatggagacgtcgatgctcattctacccacggccggagcaacttccgcgacgaaagatccagcaagacatacgaacggctgcagaaaaagctcaaagatcgccagggcacccaaaaggacaaaatgtcttcccctcccagctctccccagaagtgcccttcccccattaatgagcacaacgggctgatcaagggacagattgccggcgggatcaatacaggaagcgccaaaatcaagtctggcaaagggaagggaggcacccaggtggatacggaaattgaggagaaagacgaagagaccaaggcttttgaagccctcctgtccaacatcgtgaagccggtcgctagcgatattcaagccagaacagttgtgcttacctggtcccctccctctagcctgatcaatggcgagacagacgagtccagcgtgcctgaactctatgggtacgaggtcctgatttcttccaccggaaaagatggcaagtacaaaagcgtgtatgttggggaagagacgaacatcacactgaatgacctcaagcccgcgatggattaccatgccaaagtgcaggctgaatataactctattaagggaacccctagcgaggccgagatcttcacaaccctgtcctgtgaacccgacatcccgaatcctccccggattgctaaccgcaccaaaaattctcttacactgcagtggaaggcccccagcgacaacggctccaagatccaaaattttgtcctcgagtgggatgaagggaaaggaaacggcgagttctgccagtgttacatgggcagccagaagcagtttaaaattacgaagctgtctcctgcgatggggtgcaaattcagactttccgcccggaacgactatggaaccagcggcttttctgaagaggtgctgtactatacatccgggtgtgctccgagcatgcccgcctcccctgttctcaccaaggctggaatcacatggctgtctctgcaatggagcaagccctccggcaccccttctgatgaggggattagctacatcctcgaaatggaggaagagacgtccggctacggattcaaacccaagtatgacggcgaagatctggcctacacagtgaaaaatcttcgcagaagcaccaagtataaatttaaggtcatcgcctacaactctgaggggaagtccaatcctagcgaggtggtcgagttcaccacatgccccgacaaaccgggcattcctgtgaagccctctgttaaaggaaagatccactcccatagctttaaaattacctgggatcctcccaaggacaacgggggagctacaatcaataagtatgtggtcgaaatggcggaaggctctaacgggaataaatgggagatgatttacagcggcgccacgcgggagcacctgtgtgatcgcctcaacccgggatgcttctatagactgcgggtgtactgtatctccgacggcgggcagagcgctgtttctgaatcccttctggtgcagacccctgccgtgccccctggaccctgccttccccctagactgcagggccgcccgaaggccaaagagatccaactgcggtgggggccccctctcgtcgatggaggcagccccatttcctgttactctgtggaaatgagccctatcgagaaggacgaacccagagaggtttatcaggggtccgaggtcgaatgcacagtgtctagcctgcttcctggcaaaacctactccttccgcctgcgggctgccaataagatgggatttggcccgttctctgagaaatgcgacattacaaccgcgcccgggcctcccgatcagtgtaagcctccccaggtgacgtgcagaagcgctacctgtgcccaagtcaactgggaagtgccgctctccaatggaacagacgttaccgagtatcgcctggaatggggcggggtggagggaagcatgcagatctgctactgtggccctgggctttcttatgagattaagggcctgtcccccgccacaacctactattgccgggtccaggctctcagcgtggttggagccggccccttttctgaagtggtcgcttgtgtgacgcctccctccgttcctgggatcgtgacatgcctgcaggagattagcgatgacgaaatcgagaacccgcactactctccctccacctgtctggccatcagctgggaaaaaccttgcgatcatggatccgagattctcgcgtacagcatcgacttcggcgataagcaatctctgacagtcgggaaagtgaccagctatattatcaataaccttcagcccgacaccacataccgcattagaatccaggccctcaattccctgggagctggccctttttctcacatgatcaagctgaaaacgaagcccctgccgcctgatccccctcggcttgagtgtgtggccttcagccatcaaaacctcaagctgaaatggggcgaagggacccccaagacactgtccaccgactctattcagtatcacctccagatggaggataaaaacggaagatttgtcagcctgtaccgcggcccttgccatacatataaggttcagcggcttaatgaatccacctcttacaaattctgcatccaggcttgtaacgaggccggggagggacccctgagccaagaatatatttttacgacaccgaagtccgtgcctgcggccctcaaggctcccaaaatcgagaaggtgaatgaccacatttgcgaaatcacctgggagtgtctgcagcccatgaaaggcgatcctgtcatctacagccttcaggtgatgctggggaaggactctgagttcaaacaaatttacaagggaccggactccagctttagatattcttccctccagctgaactgcgaataccggttccgcgtttgtgccatcagacagtgccaggatagcctgggccaccaagacctcgtgggcccctattccaccacagtcctgtttatttctcagcggaccgagcctcccgctagcacaaatagagatacggtggaatccacccgcacacggagagcccttagcgacgagcagtgtgccgctgttatcctggtcctcttcgcgttcttttctattctgatcgccttcatcattcaatactttgtcatcaagtga

SEQ ID NO: 3201 - RNA, 1020 nt, synthetic construct
  misc_feature 1..1020: note = EAW49214 variant
  source 1..1020: mol_type = other RNA
atgccccctagcaagccgcatccccctgtggtcggcaaagttacccaccactccatcgagctgtactgggacctcgaaaagaaagccaagagacaggggccccaagagcagtggttccggttttctattgaagaggaagatcctaaaatgcatacatatggaatcatttacacgggctatgctaccaagcacgtggtggaggggctggagccccgcacactttacagattccggctgaaggtcaccagcccttccggagaatgcgagtattctccgctcgtgagcgtttccacaacccgcgaacccatctctagcgagcatctgcacagagccgtgtccgtcaacgacgaggatcttctggtgcggattctccagggcgggcgcgttaaagtggacgtccctaataagtttggattcacagcgctgatggtggctgcccagaaaggctacaccagactggtgaagatcctcgtcagcaacggcacggatgttaatctgaaaaacgggtctggaaaggactcccttatgctggcctgttatgctggccacctcgatgtggtgaagtacctgcggcgccatggggccagctggcaagctagagaccttggaggctgcaccgccctgcactgggcggccgatgggggacattgttctgtcatcgaatggatgattaaagacggctgcgaggtggatgttgtggacacaggctccgggtggacacccctcatgcgggtcagcgctgtgtctggaaatcagcgcgttgcctccctgctgatcgatgctggcgccaacgtgaatgtcaaggacagaaacgggaaaacccctctcatggtggcggtcctgaataaccacgaggaacttgtgcagctgctcctggacaagggagccgatgctagcgttaaaaatgaatttggcaagggggtgcttgagatggcccgggtcttcgaccgccagtccgtggtttctctgctcgaggaacggaaaaagaagcaaagacccaaaaagagctgtgtgtgctga

SEQ ID NO: 3202 - RNA, 3150 nt, synthetic construct
  misc_feature 1..3150: note = BAF84259 variant
  source 1..3150: mol_type = other RNA
atgggcagcagaacccccgagtcccctctgcacgccgtgcagctccggtgggggccgcgcagacggccccctctgcttcccctgctcctgcttctgctccctccccctccgcgcgtcggaggcttcaacctggacgctgaagcccccgcggttctgtctgggcctcccgggagctttttcggcttttccgtggagttctacagacctgggacagatggagtgtctgtcctcgtgggcgctcccaaggccaatacgagccaaccgggcgttctgcagggaggagccgtgtatctttgcccttggggcgcttcccccacccagtgtacacctatcgaatttgactctaaagggagccggctgctcgagtccagcctgtcttccagcgaaggagaggagcccgtcgaatacaagtctcttcagtggttcggcgccaccgtgcgcgctcatgggtccagcattctggcctgcgcgcccctctattcttggagaacagagaaagaacctctgtccgatccggttggaacctgttacctgagcacagacaactttacccggatcctcgagtatgccccctgccgctccgatttctcttgggctgccggccaaggctactgtcaagggggatttagcgctgagttcacgaagaccggcagagtggtccttgggggacctggctcctatttttggcaggggcagattctgagcgccacacaggaacagatcgcggagtcttactaccccgaatatctgattaatctcgtgcagggacagctgcaaacccggcaggcctccagcatctacgacgattcttatcttggctacagcgtggctgtcggcgagttctccggggacgatacagaagactttgttgccggagtgcctaaaggcaacctgacctatgggtacgtgacgatcctcaatggatctgatattcgcagcctgtataacttctccggcgagcagatggctagctacttcgcctacgccgtcgctgcgacagacgtgaatggggatggcctggacgacctcctggttggagccccgcttctgatggatagaaccccggacggccggcctcaagaggtggggcgcgtctatgtgtacctccagcaccccgctggaatcgaatctacacctaccctgacccttacaggccatgatgagtttgggagattcggatccagcctgacgcccctcggcgacctggatcaggacgggtataacgatgttgccattggcgccccttttggaggcgaaacccagcaaggggtggtcttcgtgtttcccggaggccccgggggactgggctctaagccttcccaggtcctccagcccctgtgggctgccagccacacacccgacttctttgggtccgcgcttcggggcggaagagatctggacggcaatgggtaccctgatctcatcgtgggatctttcggcgttgacaaggctgtggtctatcgcgggcggccgattgtgagcgcctccgcctctctgaccatctttcccgctatgttcaaccctgaggaaagaagctgctccctggagggaaatcccgttgcctgtattaaccttagcttttgcctcaatgcttctggcaaacatgtggccgactccatcgggttcacagtcgagctgcagctggattggcaaaagcagaaaggcggagtgcgccgggcgctctttctggccagcagacaggctacccttacgcagacactgctcatccaaaacggcgcccgcgaagactgtcgggagatgaagatttacctgagaaatgaatctgagttccgcgataaactgtcccctatccacattgctcttaacttcagcctcgacccccaggcccctgtggattctcacgggctgcggcccgcgctgcattatcagagcaagtccagaatcgaagacaaggcccagattctcctgggatgcggcgaggataacatctgtgttccggaccttcaactggaggtctttggggaacagaatcacgtgtacctcggagataaaaacgctctgaatctgaccttccatgcccagaacgtgggcgagggcggggcttacgaagccgagcttcgcgtcaccgcccctcccgaggctgaatatagcggactcgtgcggcaccctggcaatttttcttccctgagctgcgactacttcgcggttaaccaatccagactgctcgtgtgcgatctggggaatcccatgaaggccggagcttctctttggggcgggctgcggtttacagtcccgcacctccgcgacaccaaaaagacaatccagttcgattttcagattctgagcaaaaacctgaataactcccagtctgacgtggttagcttcagactttccgtggaggcccaagcccaggtcacgctcaatggagtgtctaagcctgaagctgttctgtttcccgtgagcgactggcatcctcgggatcagccccaggaggaagaggacctgggccccgccgtccaccatgtgtatgagctcatcaaccaaggcccttccagcatttctcagggggtgctggaactttcctgtccgcaggcgctggagggacagcaactcctgtacgtcaccagagttacaggcctgaattgcaccacaaaccaccccatcaatcctaaagggcttgaactggatcccgagggaagcctccatcaccagcagaagcgcgaagctccttctcggtccagcgcctcttccggcccccaaattctgaagtgtcctgaggccgagtgcttcagactccgctgtgaactggggccgcttcaccagcaggagagccagtccctgcaactccattttagagtgtgggctaaaaccttcctgcagcgggaacaccagccctttagcctgcagtgcgaggccgtgtataaggcgcttaaaatgccttaccgcatcctgcccagacaactccctcagaaggaacggcaggtcgctacggccgtgcagtggaccaaagccgagggatcttatggcgttcccctgtggatcattatcctcgctattctgttcggccttctgctcctggggctgcttatctacattctgtacaagctcggattctttaagcgcagcctgccgtatggcacagccatggagaaagctcaactcaagcctcccgccacctccgacgcgtga

SEQ ID NO: 3203 - RNA, 3150 nt, synthetic construct
  misc_feature 1..3150: note = BAG35324 variant
  source 1..3150: mol_type = other RNA
atgggcagcagaacccccgagtcccctctgcacgccgtgcagctccggtgggggccgcgcagacggccccctctgcttcccctgctcctgcttctgctccctccccctccgcgcgtcggaggcttcaacctggacgctgaagcccccgcggttctgtctgggcctcccgggagctttttcggcttttccgtggagttctacagacctgggacagatggagtgtctgtcctcgtgggcgctcccaaggccaatacgagccaaccgggcgttctgcaagggggagccgtgtatctttgcccttggggcgcttcccccacccagtgtacacctatcgaatttgactctaaagggagccggctgctcgagtccagcctgtcttccagcgaaggagaggagcccgtcgaatacaagtctcttcagtggttcggcgccaccgtgcgcgctcatgggtccagcattctggcctgcgcgcccctctattcttggagaacagagaaagaacctctgtccgatccggttggaacctgttacctgagcacagacaactttacccggatcctcgagtatgccccctgccgctccgatttctcttgggctgccggccagggctactgtcaagggggatttagcgctgagttcacgaagaccggcagagtggtccttgggggacctggctcctatttttggcaggggcagattctgagcgccacacaggaacagatcgcggagtcttactaccccgaatatctgattaatctcgtgcagggacagctgcaaacccggcaggcctccagcatctacgacgattcttatcttggctacagcgtggctgtcggcgagttctccggggacgatacagaagactttgttgccggagtgcctaaaggcaacctgacctatgggtacgtgacgatcctcaatggatctgatattcgcagcctgtataacttctccggcgagcagatggctagctacttcgggtacgccgtcgccgctacagacgtgaatggcgatggactggacgacctcctggttggcgcgccccttctgatggatagaaccccggacgggcggcctcaaggagtgggccgcgtctatgtgtacctccagcaccccgccgggatcgagcctacacccaccctgacccttacaggacatgatgaatttggcagattcgggtcttccctgacgcctctcggcgacctggatcaggacggatataacgatgttgctattggcgccccctttgggggagagacccagcaaggcgtggtcttcgtgtttcctgggggaccgggcgggctgggcagcaagctctctcaggtcctgcagcccctttgggccgcttcccacacacccgacttctttggaagcgccctgcggggcgggagagatctcgacggaaatggctaccctgatctgatcgtggggtccttcggagttgacaaggcggtggtctatcgcggccggccgattgtgtctgctagcgcctccctgaccatctttcccgccatgttcaaccctgaagagagatcttgcagccttgaagggaatcccgttgcttgtattaacctctccttttgcctgaatgccagcggcaaacatgtggctgactctatcggattcacagtcgagctgcagctcgattggcaaaagcagaaaggcggggtgcgccgggccctgtttcttgcgtccagacaggccaccctgacgcagacactcctgatccaaaacggagctcgcgaggactgtcgggaaatgaagatttacctgagaaatgagagcgagttccgcgataaactttctcctatccacattgccctcaacttctccctggacccccaggctcctgtggatagccacggcctgcggcccgccctccattatcagtctaagagcagaatcgaagacaaggcgcagattctgcttgattgcggggaagacaacatctgtgttccggatctgcaactcgaggtctttggagagcagaatcacgtgtacctgggcgacaaaaacgccctgaatcttaccttccatgctcagaacgtgggcgaagggggagcctacgaggctgaactccgcgtcaccgcccctcccgaggccgagtattccggcctggtgcggcaccctgggaattttagctctctgtcctgcgattacttcgctgttaaccaaagcagactcctggtgtgcgaccttggaaatcccatgaaggcgggcgcctccctgtggggaggactccggtttacagtcccgcatctgcgcgataccaaaaagacaatccagttcgactttcagattctgtctaaaaaccttaataacagccagtccgacgtggtttctttcagactcagcgtggaagctcaagcccaggtcacgctgaatggcgtgtccaagcctgaggccgttctgtttcccgtgtctgattggcaccctcgggaccagccccagaaagaagaggatctcggccccgctgtccaccatgtgtatgaactgatcaaccaagggcctagctccattagccagggagtgcttgagctgtcttgtccgcaggccctcgagggccagcaactgctgtacgtcaccagagttacagggcttaattgcaccacaaaccaccccatcaatcctaagggactggaactcgaccccgagggctccctgcatcaccagcagaagcgcgaagcgcctagccggtcttccgctagctctgggccccaaattctcaaatgtcctgaggccgaatgcttcagactgcgctgtgagcttggaccgctgcaccagcaggagtcccagagcctccaactgcattttagagtgtgggccaagaccttcctgcagcgggaacaccagcccttttcccttcagtgcgaggctgtgtataaagccctgaagatgccttaccgcatcctccccagacaactgcctcagaaagaacggcaggtcgcgacggctgtgcagtggaccaaggccgagggcagctatggcgttcccctctggatcattatcctggccattcttttcgggctgctcctgctgggacttctgatctacattctctacaagctgggcttctttaaacgctctctcccgtatgggacagctatggaaaaggcccaactgaaacctcccgctaccagcgatgcctga

SEQ ID NO: 3204 - RNA, 1401 nt, synthetic construct
  misc_feature 1..1401: note = BAG54537 variant
  source 1..1401: mol_type = other RNA
atgctgagcctcagacagcggatgatgcacgcccgcttcagaaaccccctgtcccggcaacctgctcgcccgtcttacagacagggctataatgggcggcccaacgtggagggaaaggtccttcctggcagcaatgggaaacccaacggacagcgcatcattaatggccctcaggggaccaagtgggttgtggacctggatagaggactcgtgctgaacgccgaaggccggtaccttcaagactcccatggcaatcccctgcgcatcaaactcgggggagatggcagaacaattgtcgacctggaggggacgcctgtggtttctccggatggactgcccctctttggccaggggcggcacggaacccctctggcgaacgctcaggacaagcccatccttagcctgggcggcaaacctctcgtggggctggaagtcattaagaagacaacccatcccccgacaaccacaatgcagcctaccacgaccacaacaccccttcctaccaccacgacaccccgccccaccacagccaccaccagacggacaacgacccgcagacctacaaccacagtgcggaccacgacaagaaccaccacaaccacaacgccgaaacccaccacacctatccccacatgccctcccggaaccctggagcgccacgatgacgatggcaatctcatcatgtcctctaacgggattccggaatgttatgccgaggaggacgagttcagcggactggaaaccgatacggctgttcctaccgaagaggcctacgtgatctatgacgaggattacgaatttgagacatcccggccccctaccacaaccgaacccagcacgacagctaccacacctagagtcattcccgaggaaggcgccatctcttccttcccggaggaggaatttgacctggcggggcgcaagcggttcgtggccccttatgtgacctacctcaataaagaccccagcgctccctgctctctgaccgatgcccttgaccattttcaagtcgattccctggacgagattatccctaacgatctcaagaaaagcgacctgccgccccagcacgctcctagaaatattacagttgtggccgtggaaggatgtcactctttcgtcatcgtggattgggacaaggcgacgcccggcgatgttgtgaccggctaccttgtctattccgccagctacgaggactttatccgcaacaagtggtccacacaggcttctagcgtgacccatctgcctattgaaaatctcaaacccaacacacggtattacttcaaggttcaggcccaaaaccctcacgggtatggacccatctccccgagcgtgtcttttgtcaccgagtccgataatcctctgctggtggtcagaccccctggcggggagcccatttga

SEQ ID NO: 3205 - RNA, 471 nt, synthetic construct
  misc_feature 1..471: note = BAG58437 variant
  source 1..471: mol_type = other RNA
atggaggaacagagaaacgaggaaatccagagcttcatttactccctgaagcaaatgctcctgaatgtggaggccaactctgctaaagtccaggaagaccttgaggccgagtttcagagcctgttctccctcctggaagaacttaaggaaggcatgctgatgaaaatcaagcaagatcgggcgtctcgcacctatgagctccagaatcagctggctgcctgcacaagagccctggagagctccgaggagctcctggaaacggctaaccagacccttcaagccatggactctgaggattttccccaggctgccaaacagattaaggacggggttacaatggcgcctgccttccggctgagcctcaaggctaaagtgtccgataatatgagccacctgatggtggactttgcccaggaacgccaaatgcttcaggctctgaagttcctcccgggagagagaggcacccattga

SEQ ID NO: 3206 - RNA, 921 nt, synthetic construct
  misc_feature 1..921: note = BAH14721 variant
  source 1..921: mol_type = other RNA
atgatcttcgaggaacacggctttagacggaccacaccccctacgaccgccacaccgattcgccatagaccccggccttatccccctaacgtggggcaggaggctctgagccaaaccacaatctcctgggcccccttccaggacacctctgaatacattatcagctgccaccctgtcggaacagatgaggaaccgctccagtttcgcgttcccggcacctccacgtctgcgaccctgacagggcttaccagaggagctacatacaatattatcgtggaggccctgaaggaccagcaacggcataaagtgcgcgaggaagtcgtgaccgttggcaacagcgtgaatgaggggctcaaccagcctacggatgactcctgtttcgatccctatacagtctctcactacgccgtgggagacgaatgggagagaatgagcgagtccggctttaagctgctttgccagtgtctgggcttcgggagcggacattttcggtgcgattcttcccgctggtgtcacgacaatggcgttaactataaaatcggggaaaagtgggatagacagggagagaatggccaaatgatgagctgcacctgtctcgggaacggaaaaggcgagttcaagtgcgaccctcacgaagctacatgttacgatgacggcaagacctatcatgtgggggaacagtggcagaaagagtacctgggagccatttgctcttgtacctgctttggcgggcagcggggatggcgctgcgataattgtagacggcccggcggggagccgtcccctgaaggaacaacgggccaaagctacaaccagtattctcagcgctaccaccaaagaaccaatacaaacgtcaattgccccatcgagtgtttcatgcctctggacgtgcaggctgaccgggaagattccagagagtga

SEQ ID NO: 3207 - RNA, 1920 nt, synthetic construct
  misc_feature 1..1920: note = BAG61560 variant
  source 1..1920: mol_type = other RNA
atggagaagatcctgttctacctctttctgattggcatcgccgtgaaagctcagatttgccccaagagatgtgtctgccaaatccttagccctaacctggccaccctctgtgcgaaaaaggggctgcttttcgttccgcccaatattgaccggcgcacagtggaactgagactcgctgataactttgtgacgaatatcaaacggaaggacttcgccaacatgacctccctggtcgatctgacactctctcgcaataccatcagctttattacacctcacgccttcgctgacctgagaaaccttcggtccctgcatctcaattctaaccgcctgaccaagatcacaaatgatatgtttagcggactttccaacctgcaccatctcattctgaataacaatcagctgaccctcatctctagcacggccttcgacgatgtgtttgctctggaggaacttgacctgtcctataacaatctcgagaccattccctgggatgccgttgagaaaatggtgagcctgcacacactttctctggaccataacatgatcgataacattcctaagggcaccttctcccacctccacaaaatgacaagactggacgtcaccagcaataagctgcagaaactgccccctgatccgctgtttcagcgggcgcaagtgcttgccacgtctgggatcatctcccccagcacattcgctctgtcttttggaggcaaccctctccattgcaattgtgaactgctttggctgcgcagactctcccgggagtacgacctggaaacctgcgccagccctcccctgctcacagggcgctatttctggtccattcccgaggaagagttcctgtgtgagccgcctcttatcaccagacacacccatgaaatgcgggttctggagggacagcgcgctacactcagatgcaaggcccggggcgaccccgaacctgcgattcactggatctctcccgagggcaagctgattagcaacgccacgagatccctggtgtacgataatgggacccttgacatcctcatcacaaccgtcaaagatacaggagcttttacctgtattgccagcaaccccgctggcgaagccacgcagatcgtggacctgcacattatcaagctgcctcatctcctcaattctacaaaccacattcatgagccggatcccgggtccagcgacatctctaccagcaccaaatccggatctaatacaagctccagcaacgatggcatcacctctcttacagccacgcgcgtggtcgggtgcattcagttcaccacagagcaagactatgttcggtgtcactttatgcagtcccagttcctgggaggcaccatgatcattatcattggcgggatcattgtggctagcgtgctcgtctttatcatcattctgatgatcagatacaaggtgtgcaataacaatggacagcataaagttacaaaggtgtctaacgtctattcccaaaccaatggcgcgcagattcaggggtgcagcgtgacgctgcctcaatccgtttctaaacaggccgtgggacacgaagagaacgctcagtgttgcaaggccaccagcgataacgtcatccagtcctctgaaacatgtagctcccaagacagcgccaccacaacctctgcccttcccccttcctggacgagctctacatccgtgagccagaagcagaaacgcaagaccggcacaaaaccctctaccgagccgcagaatgaagctgtcaccaacgtggagagccaaaatacaaaccggaataactccacggcgctccagctggctagcagacctcccgattctgttaccgaggggcctacatccaagcgcgcccacattaaacccaatgccctgctcaccaacgtggaccagatcgtccaggaaacacaacggctggagcttatctga

SEQ ID NO: 3208 - RNA, 1014 nt, synthetic construct
  misc_feature 1..1014: note = BAG61984 variant
  source 1..1014: mol_type = other RNA
atgatcttcgaggaacacggctttagacggaccacaccccctacgaccgccacaccgattcgccatagaccccggccttatccccctaacgtgggggaggaaatccagattggacacatcccccgcgaggacgtcgattaccatctgtaccctcacggcccggggctcaatcccaacgctagcaccggacaagaagccctgtcccagacaaccatttcttgggcgcctttccaggacacaagcgagtatatcatctcctgccatcccgttggcaccgatgaggaacctcttcagtttagagtgcccgggacgtctaccagcgctacactgaccggactcacacggggcgccacctacaatattatcgtggaggccctgaaggaccaacagcgccacaaagtcagagaagaggtggttacggtgggcaactccgtcaatgaggggcttaaccagccgacagatgactcttgtttcgatccttataccgtgagccactacgctgttggagacgaatgggagcggatgtccgaaagcggctttaagctgctctgccagtgtctggggttcggatctggccattttcgctgcgattccagcagatggtgtcacgacaatggggtgaactataaaattggagagaagtgggatcggcaaggcgaaaatggccagatgatgtcttgcacatgtctggggaacggaaaaggcgagttcaagtgcgacccccatgaggccacctgttacgatgacgggaagacctaccacgtcggagaacagtggcagaaagagtatctcggcgctatctgctcctgtacatgctttgggggacaacgcggctggagatgcgacaattgtcggcgccctggcggggaacccagccccgagggaacgaccggccagtcttacaaccagtattcccaaagataccaccagcggacaaataccaacgtgaattgccctattgaatgtttcatgccgctggatgtgcaggccgacagagaggatagccgcgagtga

SEQ ID NO: 3209 - RNA, 3045 nt, synthetic construct
  misc_feature 1..3045: note = BAG62013 variant
  source 1..3045: mol_type = other RNA
atgagagtgacctgggctccccctccgagcatcgacctgacaaacttcctcgtccggtactcccccgttaagaatgaggaagatgtggccgagctgtctattagcccttccgacaacgccgtggtccttacgaatctgctccccggcaccgaatatgtggtttctgtgagctccgtctacgagcagcacgaatctacacctctgcgcgggagacagaaaaccggacttgatagccccacaggcatcgacttttccgatattaccgggaacagcttcacagtgcattggatcgcgcctcgggctaccattacgggatatcgcatcagacaccatccggagcacttttctggccggccccgcgaggacagagttcctcattcccggaatagcatcaccctgacaaacctcacccccgggacagaatacgtggtctctattgtggccctgaatggacgcgaggaatcccctctgctcatcggccaacagagcaccgtgtctgatgtccccagagacctggaggttgtggccgctacgccgacatcccttctgattagctgggatgcccctgctgtgaccgtccggtattaccgcatcacatatggcgagaccgggggaaactcccccgtgcaggagttcaccgttcctggctctaagagcacagccacgatttccgggctcaaacccggagtggactacaccatcacagtctacgcggtgaccggcagaggggatagccccgcctcttccaagcctattagcatcaattatcggacagaaatcgacaaaccgtctcaaatgcaggttaccgatgtgcaggacaacagcatttccgtcaagtggctgccctctagctcccctgtgacgggataccgcgtcacaaccacccccaagaatggccctggccccacaaaaaccaagacagctgggccggaccagacggaaatgaccatcgagggacttcaacctacagtggaatatgttgtgagcgtctacgcccagaacccctctggcgagtcccagcctctggtgcagaccgctgttacaaccattcccgcccctacggatctcaaatttacccaagtgacacccaccagcctgtctgcgcagtggacaccgcctaatgtccagctgaccgggtatagagtgcgggtgacgcccaaggagaaaacaggacccatgaaggaaatcaacctcgcccctgactccagctccgttgtcgtgtctggcctgatggtggctaccaagtacgaggtcagcgtgtatgcccttaaagatacactgacctccagaccggctcaaggggttgtgaccacactcgaaaatgtctctccccctcgccgggccagagtgacggacgccaccgagacaaccattacaatcagctggcgcaccaagacggaaacaatcaccggattccaggttgatgctgtgcccgcgaacggccagacccctattcagcggacaatcaaacccgacgtcagatcctacaccattacaggcctgcaacctgggacggattacaagatctatctttacaccctgaacgacaatgcccgcagctctcccgtggttattgatgcttccacagccatcgacgccccgagcaacctccggtttctggctaccacacctaattctctgctcgtgtcctggcagccccctagagcccgcatcaccggatatattatcaaatacgagaagcccggcagcccgcctcgggaggtcgtgcccagacctcgccccggggtgacggaagcgaccattacaggactggagcccggcaccgaatatacaatctacgtcattgctcttaaaaacaatcagaagtctgagcctctgatcgggcggaagaaaaccgatgaactcccgcagctggttacacttccccaccctaacctgcacggccccgagattctcgacgtgcctagcaccgtgcaaaagacgcccttcgtcacacatcctggatatgacaccggcaatgggatccagctgccgggaacctccggccagcagcccagcgtggggcaacagatgatctttgaggaacacggattcagacggacaacccctcccacgacagccacccctattcgccatagaccccggccgtaccctcccaacgttggcgaggaaatccagattgggcacatccccagagaggatgtggactaccacctgtatcctcatggccccggactcaatcctaacgcctctacaggccaggaggctctgtcccaaaccacaattagctgggccccgtttcaggatacctccgaatacatcatctcttgccaccccgtcgggacggacgaggaacctcttcagttccgcgtgcccggaaccagcacatccgctaccctgacaggcctcaccagaggggccacgtataatattatcgttgaggcgctgaaagatcaacagcggcataaggtgcgcgaagaggtcgtgacagttggaaactctgtgaatgagggcctgaaccagcctaccgacgatagctgttttgacccctacacagtctcccactatgccgtgggggatgaatgggagagaatgtctgaaagcggcttcaaacttctctgccagtgtctgggattcggctccgggcattttcggtgcgacagctctcgctggtgtcacgataatggagtgaactacaagattggcgagaagtgggacagacaaggggaaaacggacagatgatgtcctgcacctgtctgggcaatgggaaaggcgagttcaagtgcgatccgcacgaggctacctgttatgacgacggaaaaacataccatgtcggcgaacagtggcagaaggagtacctcggggccatctgcagctgtacgtgctttggaggccaacgggggtggcgctgcgataactgtagacggcctggaggcgaaccctctcctgagggcaccacagggcagtcctataatcagtacagccagcgctatcaccaaagaaccaacacaaatgttaactgccccattgaatgtttcatgcctctggacgtgcaggctgatcgggaggactctcgcgagtga

SEQ ID NO: 3210 - RNA, 2685 nt, synthetic construct
  misc_feature 1..2685: note = BAG62178 variant
  source 1..2685: mol_type = other RNA
atgagagtgacctgggctccccctccgagcatcgacctgacaaacttcctcgtccggtactcccccgttaagaatgaggaagatgtggccgagctgtctattagcccttccgacaacgccgtggtccttacgaatctgctccccggcaccgaatatgtggtttctgtgagctccgtctacgagcagcacgaatctacacctctgcgcgggagacagaaaaccggacttgatagccccacaggcatcgacttttccgatattaccgcgaacagcttcacagtgcattggatcgctcctcgggccaccattacggggtatcgcatcagacaccatccggagcacttttctggacggccccgcgaggacagagttcctcattcccggaatagcatcaccctgacaaacctcacccccggcacagaatacgtggtctctattgtggccctgaatgggcgcgaggaatcccctctgctcatcggacaacagagcaccgtgtctgatgtccccagagacctggaggttgtggctgccacgccgacatcccttctgattagctgggatgctcctgccgtgaccgtccggtattaccgcatcacatatggcgagaccggcgggaactcccccgtgcaggagttcaccgttcctggatctaagagcacagcgacgatttccggcctcaaacccggggtggactacaccatcacagtctacgccgtgaccggaagaggcgatagccccgcttcttccaagcctattagcatcaattatcggacagaaatcgacaaaccgtctcaaatgcaggttaccgatgtgcaggacaacagcatttccgtcaagtggctgccctctagctcccctgtgacggggtaccgcgtcacaaccacccccaagaatggacctggccccacaaaaaccaagacagccggcccggaccagacggaaatgaccatcgaggggcttcaccctacagtggaatatgttgtgagcgtctacgctcaaaacccctctggagagtcccagcctctggtgcagaccgccgttacaaccattcccgcgcctacggatctcaaatttacccaggtgacacccaccagcctgtctgcccaatggacaccgcctaatgtccagctgaccggctatagagtgcgggtgacgcccaaggagaaaacagggcccatgaaggaaatcaacctcgctcctgactccagctccgttgtcgtgtctggactgatggtggccaccaagtacgaggtcagcgtgtatgctcttaaagatacactgacctccagaccggcccagggcgttgtgaccacactcgaaaatgtctctccccctcgccgggccagagtgacggacgctaccgagacaaccattacaatcagctggcgcaccaagacggaaacaatcaccgggttccaagttgatgcggtgcccgccaacggacagacccctattcagcggacaatcaaacccgacgtcagatcctacaccattacaggcctgcagcctggcacggattacaagatctatctttacaccctgaacgacaatgctcgcagctctcccgtggttattgatgcctccacagccatcgacgctccgagcaacctccggtttctggccaccacacctaattctctgctcgtgtcctggcaaccccctagagcgcgcatcaccgggtatattatcaaatacgagaagcccggaagcccgcctcgggaggtcgtgcccagacctcgccccggcgtgacggaagctaccattacagggctggagcccggaaccgaatatacaatctacgtcattgcccttaaaaacaatcagaagtctgagcctctgatcggccggaagaaaaccgggcaggaagccctcagccagacaaccatttcctgggctccgttccaagatacgagcgagtatatcatctcttgccaccccgttggcacagacgaggaacctctgcagtttagagtgcccggaacctccaccagcgccacacttaccggcctgacgcgcggggctacatacaacattatcgtggaggccctcaaggaccagcagcggcataaagtcagagaagaggtgattaccgttggaaattccgtgaacgagggcctgaatcaacctacagatgactcttgtttcgatccctacaccgtcagccactatgcggtgggggacgaatgggagcggatgtccgaatctggatttaagctgctctgccagtgtctgggcttcgggagcggccattttagatgcgattcctctcgctggtgtcacgacaacggagttaattacaaaatcggcgagaagtgggatcggcagggggaaaacggacagatgatgagctgcacatgtcttggcaatgggaagggagagttcaaatgcgaccctcacgaggccacctgttatgatgacggcaagacgtaccatgtgggggaacaatggcagaaagagtatctgggcgctatttgctcctgtacctgcttcggaggccagagagggtggcgctgcgataactgtagacggccgggaggcgaacccagccctgaggggacaaccggacaatcttacaatcagtattcccagcgctaccaccagagaacaaacaccaacgtcaattgccccatcgaatgttttatgcctctcgacgtgcaagccgatcgggaggacagccgcgagtga

SEQ ID NO: 3211 - RNA, 1152 nt, synthetic construct
  misc_feature 1..1152: note = BAH12351 variant
  source 1..1152: mol_type = other RNA
atggccagcgctttcagactgtccctcaagcccaaagtgtctgacaacatgacccacctgatggtcgattttagccaggagcggcaaatgcttcagacactgaagttcctccctgttccgaaagcccccgaaatcgaccctgtggagtgcctggtggcggataattccgtcacggtggcttggcgcatgcccgaagaggacaacaagattgatcattttatccttgaacacagaaaaaccaatttcgacggcctgcctcgggttaaggatgagcgctgttgggagattatcgacaacattaaggggacagaatacaccctctctggactgaaatttgatagcaagtatatgaatttcagagtgcgggcctgcaacaaagccgtcgctggcgagtactccgaccccgtgacactggaaaccaaggccctcaattttaacctggataattctagctcccatcttaacctgaaagttgaggacacatgtgtggagtgggatcctaccgggggaaagggccaggaaagcaagatcaaagggaaggagaataaaggatctgtccacgtgacgtccctcaagaaacataccagcggcacaccgtctcccaagcgcacctccgtgggcagcagacctcccgctgtccgggggtctcgcgacagattcacaggagaatcctataccgttctgggcgacacggccatcgagagcgggcagcactactgggaagtgaaagcgcaaaaggattgcaagtcctattctgtgggagtcgcctacaaaacacttggcaagtttgaccagctggggaaaaccaacacaagctggtgtattcacgtgaataactggctccagaataccttcgctgccaagcataacaacaaagttaaggctctggatgtgaccgtccctgagaagatcggagtgttttgcgacttcgatggcggccagctgtccttttatgacgccaatagcaaacaactcctgtactctttcaagacaaaattcacgcagcccgttcttccggggtttatggtgtggtgtggaggcctgtccctcagcaccgggatgcaggtcccttctgcggtgcggacactgcaaaagagcgagaacggaatgaccggctccgcctctagccttaataacgtcgtgacacagtga

SEQ ID NO: 3212 - RNA, 441 nt, synthetic construct
  misc_feature 1..441: note = BAH14175 variant
  source 1..441: mol_type = other RNA
atgccccctagcaagccgcatccccctgtggtcggcaaagttacccaccactccatcgagctgtactgggacctcgaaaagaaagccaagagacaggggccccaagagcagtggttccggttttctattgaagaggaagatcctaaaatgcatacatatggaatcatttacacgggctatgctaccaagcacgtggtggaggggctggagccccgcacactttacagattccggctgaaggtcaccagcccttccggagaatgcgagtattctccgctcgtgagcgtttccacaacctctgaatacagcgaccgcccccattcccctctgagcagatctatggagatgacatccaaccttgagaaaatcttttgtctgagcttcggcctcacccggtctcgcaatgatacgatttttaagcactgcaacaatatctgttga

SEQ ID NO: 3213 - RNA, 2055 nt, synthetic construct
  misc_feature 1..2055: note = EAX08810 variant
  source 1..2055: mol_type = other RNA
atggccgagcatccccctctgctcgacaccacacagatcctgagctccgatatttctcttctgagcgctccgatcgtgtccgccgacggcacgcaacaggtcattctcgttcaggtgaaccccggggaagcgttcaccatcagacgggaggatggacagtttcaatgcattacaggccctgctcaggtgcccatgatgtctcctaatgggagcgtgccccctatctacgtcccgcccggatatgcccctcaggttatcgaagacaacggcgtgcgcagagtcgtggttgtgccccaggcccctgagttccaccccgggtcccacaccgtcctgcatcggtctccgcaccctccccttcctggatttattcccgtgcccacaatgatgcctccgccccctcgccatatgtacagccccgtgaccggcgctggcgatatgacaacccaatatatgcctcagtaccagtccagccaggtctatggggacgttgatgcccactctacgcacggaagatccaatttccgggacgaacgcagctctaagacctacgagagactgcaaaagaagctcaaagatcggcagggcacacagaaggacaaaatgtcctctcccccgagctcccctcaaaagtgtcccagccctatcaacgagcataatgggctgattaagggacagatcgctggcgggattaacaccggatccgccaaaatcaagtctggcaaaggcaaagggggaacacaggtggataccgaaattgaggaaaaagacgaggagacgaaggcgtttgaagccctgctcagcaatatcgtgaagcccgtcgcttccgatatccaggcccgcacagtggttctgacctggagccctccctcttcccttattaacggcgagacagacgaaagctctgtgccggagctgtatgggtacgaagtcctcatcagctccaccggaaaagacggcaagtacaaatctgtgtatgttggggaggagaccaatattacactgaacgatcttaagcctgctatggactaccacgccaaagtgcaagcggaatataatagcatcaagggaacgccctccgaggccgaaattttcaccacactgagctgcgagcccgatatccctaacccgcccagaatcgctaatcggaccaaaaactctctcacactgcagtggaaggccccttccgacaatggcagcaagattcagaactttgtcctggaatgggatgagggcaaagggaacggagagttctgtcagtgctacatgggctctcaaaagcagtttaaaatcaccaagctctcccccgctatggggtgtaaattccgcctgagcgccagaaatgactatggaacgtccggcttttctgaagaggtgctttactatacaagcgggtgcgccccttccatgcccgcttctcctgtcctgaccaaggcgggcattacctggctcagcctgcagtggtccaagcccagcggaacaccgtctgatgaaggcatctcctacattcttgagatggaagaggagaccagcgggtacggattcaaacctaagtatgacggcgaagatctggcctacacagtgaaaaacctccggcgctctacgaagtataaatttaaggttatcgcttacaattccgagggaaagagcaacccctctgaagtggtcgagttcaccacatgtcctgacaaacccgggatcccggtgaagcctagcgttaaaggcaagattcattcccacagcttcaaaatcacctgggatccccctaaggacaatgggggcgccacaattaacaagtatgtggtcgagatggccgaaggatctaatggcaacaaatgggagatgatctactccggggctaccagagaacacctgtgcgaccggctgaatcccggatgtttttatagactccgcgtgtactgcattagcgatggcgggcagtccgccgtgtctgagagcctgcttgttcaaacgcccgcggtccctccgggaccctgtctgcctccccggctccagggcagacctaaggctaaagaaatccagaccccctccgggtga

SEQ ID NO: 3214 - RNA, 492 nt, synthetic construct
  misc_feature 1..492: note = AAG35520 variant
  source 1..492: mol_type = other RNA
atgagcgagtccggcttcaagctgctctgccagtgtctggggtttggatctggccacttcagatgcgacagctcccggtggtgtcatgataacggggtgaattacaaaatcggagaaaagtgggaccgccaaggcgagaacgggcagatgatgtcttgcacctgtcttggaaatggcaaaggcgaatttaagtgcgatccccacgaggccacatgttatgacgatgggaaaacgtaccatgtcggagaacagtggcagaaggagtatctgggcgctatttgcagctgtacctgcttcgggggacaaagaggctggcggtgtgacaactgccgcagacctgggggagagccgtcccccgaaggcacaaccggccagtcttacaatcagtatagccagcggtaccaccaacgcacaaacaccaatgttaactgccctatcgagtgttttatgcccctcgatgtgcaggccgacagagaagattcccgggagtga

SEQ ID NO: 3215 - RNA, 1143 nt, synthetic construct
  misc_feature 1..1143: note = AAA52471 variant
  source 1..1143: mol_type = other RNA
atgatgttcagcggctttaacgccgactacgaggcttcctctagcagatgctcctctgccagccccgcgggggattccctgtcttattaccacagccctgctgactccttcagctctatgggatccccggtgaatgcccaggatttttgtaccgacctcgccgtcagctctgctaacttcatccccacagttacggccatttccaccagccctgatctgcaatggcttgtgcagcccgctctggtgtcttccgtcgcccctagccagacacgggcgccccatccttttggcgtgccggccccctccgctggggcctattctcgcgctggagttgtgaagaccatgacaggcgggagagcccagagcatcggacggcgcggcaaagtcgaacaactctcccctgaggaagaggaaaagagacggattcgcagagagcggaataaaatggcggccgctaagtgccgcaacagacggcgcgagctgaccgacacacttcaggccgaaaccgatcagctggaggacgagaaaagcgctctccagacggaaatcgccaatctgctgaaggagaaggaaaaactcgagttcattctggccgctcacagacccgcgtgtaagatccctgatgaccttggctttcccgaagagatgtctgtggcctccctggatctcaccgggggactgccggaagttgctacacctgagagcgaggaagccttcacccttcccctgctcaacgaccctgagcccaaaccctctgtggaacctgtcaagagcatctcctctatggagctgaaaacagaaccgtttgatgacttcctgtttcccgccagctcccggcctagcggctctgagaccgctcgctccgtgcccgacatggatctcagcgggtctttctacgccgcggactgggagcctctgcattccggaagccttggcatggggcccatggctacggaactggagccgctctgcacacctgtggtcacctgtacaccctcctgcaccgcctatacctctagctttgttttcacataccctgaagccgattccttcccctcttgtgctgccgctcacagaaagggaagctccagcaatgagccttcttccgacagcctgtcttcccccacgcttctggccctctga

SEQ ID NO: 3216 - RNA, 1296 nt, synthetic construct
  misc_feature 1..1296: note = AAG53607 variant
  source 1..1296: mol_type = other RNA
atgcccaaccctagaccgggcaagcccagcgccccttccctggctctcgggccctctcctggagccagcccctcctggcgggcggctcctaaagcctctgacctgcttggcgcccgcgggccgggaggcaccttccaggggagagatctgcggggaggcgctcacgccagctcctctagcctcaatcccatgcctccctcccaactgcagcttcctacactgcccctcgtgatggtcgctccgagcggcgcccgcctggggcctctgccccatctccaggcgctgcttcaggacagacctcactttatgcatcaactgtctacggttgatgcccacgctcggacccccgtgctccaggtgcatcccctggaatcccctgccatgatcagccttacaccgcccaccacagctaccggagtcttctctctgaaggcccgccctggcctgccccctgggattaacgtggcgtccctggaatgggttagcagagagcccgccctgctctgcacatttccgaatccttctgctccccggaaagactccaccctgagcgccgtgcctcagtcctcttacccccttctggctaacggagtctgtaagtggcctggctgcgaaaaagtgttcgaggaacccgaggattttctcaagcactgtcaggccgaccacctccttgatgagaaggggcgcgcccaatgcctgctccagagagaaatggttcagagcctggagcagcaactggtgctcgaaaaagagaagctgtccgctatgcaggcgcatcttgccggaaaaatggctctgacgaaggccagctctgtcgcctccagcgacaaaggctcttgttgcatcgtggctgccggcagccaggggccggtggtccctgcgtggtccggaccccgggaggctcccgattctctcttcgccgttcgcagacacctgtggggcagccatggaaattccacctttcctgagttccttcacaacatggactattttaagttccacaatatgcggccgccctttacatacgccaccctgattcgctgggctatcctcgaagcccctgaaaagcaaagaacactgaacgagatttatcattggttcacccggatgtttgctttcttcagaaatcaccccgccacgtggaaaaacgcgatccgccataatctgagcctccacaagtgttttgtgcgggtggaatctgagaaaggggccgtctggacagtggatgagctggagttcagaaagaaacgctcccagcggcctagcagatgctctaaccccacccctggcccctga

SEQ ID NO: 3217 - RNA, 1098 nt, synthetic construct
  misc_feature 1..1098: note = AAA52639 variant
  source 1..1098: mol_type = other RNA
atgtggctgagaagccaccggcagctctgcctggccttccttctggtgtgtgtcctctccgttatctttttcctgcatattcaccaagactcttttccccatggccttgggctgagcatcctctgccctgatcgcagactggtgaccccgcccgtggctattttctgtctgcctggaacagccatgggccccaacgcgtcctctagctgccctcagcaccccgcttccctctctgggacgtggaccgtctaccctaatggacggtttggcaaccagatggggcagtatgccacactgcttgccctggctcaactcaatggacgcagagccttcatcctgccggctatgcatgccgcgcttgcccccgtgtttcggattaccctgcctgttctcgctcccgaggtggacagccgcacaccttggagagaactgcagctgcacgattggatgtccgaggaatacgccgacctccgggatcccttcctgaaacttagcggctttccgtgttcttggaccttctttcaccatctgcgcgagcagatcagacgggagttcacactccacgaccatctgcgcgaagaggctcagtccgtccttggccaactgagactcgggcggaccggagatcgccctagaacgtttgtgggcgttcacgtgcggagaggggactatctgcaggtcatgccccagcgctggaagggagtggtgggcgatagcgcctacctgcggcaggcgatggactggttcagagcccgccacgaagctcctgtcttcgttgtgacctctaacgggatggagtggtgcaaggaaaatatcgatacatcccaaggagacgtgacctttgccggcgatggccaggaggctacaccctggaaagacttcgccctcctgacccagtgtaaccatacgattatgacaatcgggacctttggattctgggccgcttatcttgcgggcggggacacagtctacctggccaattttaccctccccgatagcgagttcctgaagatttttaaacctgaagctgccttccttccggagtgggtgggaatcaacgccgacctgtctcccctctggaccctggctaagccttga

SEQ ID NO: 3218 - RNA, 1380 nt, synthetic construct
  misc_feature 1..1380: note = EAW58359 variant
  source 1..1380: mol_type = other RNA
atggctcccctgtgccctagcccgtggctccccctgcttatccctgcccccgcccctggcctgaccgtgcagctcctgctttccctgctcctgctggtccccgttcaccctcaaagactcccgcggatgcaggaggactctcccctcgggggaggcagctccggggaagatgaccctcttggagaggaagatctgccctctgaggaagacagccctcgcgaggaggatcccccgggcgaagaggacctccctggggaagaggatctgcccggagaggaagaccttcctgaggtgaagcccaaatccgaagaggaaggctctctgaagctcgaggatctgcccacagtggaggcgcctggcgacccgcaggaaccccagaacaatgctcatagagataaagagggggacgatcaaagccactggcggtacggaggcgaccctccctggcctcgcgtctcccccgcctgtgccgggagattccagagcccggtggacattcggcctcagctggctgccttttgccccgctctccgccctctggaacttctgggattccagctgccccctctgcccgagcttagactgcggaacaatggccattctgttcaactcacgctgccgcctgggctggaaatggccctcggacccggccgcgagtatagagcgctgcagcttcatctgcactggggcgccgctgggcggcccggatccgagcacaccgtggaaggccaccgctttcctgccgagatccatgtcgtgcacctcagcacagctttcgccagagttgatgaagcgctggggcggccgggaggccttgccgtgctggctgcctttctcgaggaagggcccgaggagaactctgcttacgaacagctgctgtcccgcctcgaggaaattgccgaggagggaagcgaaacccaggtccctggcctggacatctctgcccttctgccctccgatttcagcagatattttcaatacgagggctccctcacaacccctccctgtgctcagggggtgatttggacagtgttcaatcagaccgtcatgctgtctgcgaagcaactgcatacgcttagcgacaccctctggggacctggcgattcccggctgcagctgaactttagagccacacagcccctcaatgggcgcgttatcgaagctagcttcccggccggagtggactcttcccctcgggccgctgagcccgtgcagctgaacagctgccttgccgcgggcgatatcctggctctcgtctttgggctgctgttcgccgtgacctctgttgcctttcttgtgcaaatgagacgccagcaccggagaggcacaaaaggaggcgtcagctatcgccctgctgaagtggccgagaccggggcttga

SEQ ID NO: 3219 - RNA, 417 nt, synthetic construct
  misc_feature 1..417: note = U19142.1 variant
  source 1..417: mol_type = other RNA
atgagctggagaggccggtccacctaccgccccagacctcggcgctatgtggagccgcccgaaatgatcgggcctatgagacccgagcagttctctgacgaagtcgagcctgccacacccgaagagggagagcctgctacgcaacggcaggacccggccgcggctcaggaaggcgaggacgaaggggccagcgccggacagggccccaagcctgaggctgattcccaagagcaggggcacccccagaccggatgcgaatgtgaggacggccctgatggccaggaaatggatcccccgaaccctgaggaagttaaaacacccgaggaggaaatgcgctctcattacgtggcccaaaccgggattctgtggctcctgatgaataactgctttcttaatctgagccctagaaagccctga

SEQ ID NO: 3220 - RNA, 351 nt, synthetic construct
  misc_feature 1..351: note = AAH69397 variant
  source 1..351: mol_type = other RNA
atgagctggagaggccggtccacctaccgccccagacctcggcgctatgtggagccgcccgaaatgatcgggcctatgagacccgagcagttctctgacgaagtcgagcctgccacacccgaagagggagagcctgctacgcaacggcaggatccggccgcggctcaggaaggccaggacgagggggccagcgccggacaaggccccaagcctgaagctcactcccaggagcaggggcatccccagaccggatgcgagtgtgaagatggccctgacggccaagagatggatcccccgaaccctgaagaggttaaaacacccgaagagggggagaagcagtctcagtgctga

SEQ ID NO: 3221 - RNA, 357 nt, synthetic construct
  misc_feature 1..357: note = AAA82746 variant
  source 1..357: mol_type = other RNA
atgaacctgagcagaggcaagtccacctactattggccccggcctcgcagatacgtgcagccgcccgaggtcatcgggcctatgcggcccgaacaattctctgacgaggttgaacctgccacacccgaggaaggagagcctgctacgcagcgccaggacccggccgcggctcaggagggcgaagacgagggggccagcgccggacaaggccccaaacctgaagctgattcccaggagcaggggcacccccagaccggatgcgagtgtgaagacggccctgatggccaagagatggatcccccgaatcctgaagaggtgaagacacccgaagagggggagaaacagtctcagtgctga

SEQ ID NO: 3222 - RNA, 354 nt, synthetic construct
  misc_feature 1..354: note = AAH69470 variant
  source 1..354: mol_type = other RNA
atgagctggagaggccggtccacctactattggccccgccctagacggtacgtgcagccgcccgagatgatcgggcctatgcgccccgaacaattctctgacgaggtcgaacctgccacacccgaggaaggagagcctgctacgcagagacaggacccggccgcggctcaggagggcgaagacgagggggccagcgccggacaaggccccaagcctgaagctgattcccaggagcaggggcacccccagaccggatgcgagtgtgaagacggccctgatggccaagagatggatcccccgaaccctgaagaggttaaaacacccgaagagggggagggacagtctcagtgctga

SEQ ID NO: 3223 - RNA, 354 nt, synthetic construct
  misc_feature 1..354: note = AAA82748 variant
  source 1..354: mol_type = other RNA
atgagctggagaggccggtccacctactattggccccgccctagacggtacgtgcagccgcccgaggtcatcgggcctatgcgccccgaacaattctctgacgaggttgaacctgccacacccgaggaaggagagcctgctacgcagagacaggacccggccgcggctcaggagggcgaagacgagggggccagcgccggacaaggccccaagcctgaagctgattcccaggagcaggggcacccccagaccggatgcgagtgtgaagacggccctgatggccaagagatggatcccccgaaccctgaagaggtgaaaacacccgaagagggggagaagcagtctcagtgctga

SEQ ID NO: 3224 - RNA, 354 nt, synthetic construct
  misc_feature 1..354: note = AAA82749 variant
  source 1..354: mol_type = other RNA
atgagctggagaggccggtccacctactattggccccgccctagacggtacgtgcagccgcccgaggtcatcgggcctatgcgccccgaacaattctctgacgaggttgaacctgccacacccgaggaaggagagcctgctacgcagagacaggacccggccgcggctcaggagggcgaagacgagggggccagcgccggacaaggccccaagcctgaagctgattcccaggagcaggggcacccccagaccggatgcgagtgtgaagacggccctgatggccaagaggtggatcccccgaaccctgaagaggtgaaaacacccgaagagggggagaagcagtctcagtgctga

SEQ ID NO: 3225 - RNA, 354 nt, synthetic construct
  misc_feature 1..354: note = AAC25989 variant
  source 1..354: mol_type = other RNA
atgagctggagaggccggtccacctactattggccccgccctagacggtacgtgcagccgcccgagatgatcgggcctatgcgccccgaacaattctctgacgaggtcgaacctgccacacccgaggaaggagagcctgctacgcagagacaggatccggccgcggctcaggagggcgaagacgagggggccagcgccggacaaggccccaagcctgaagctcactcccaggagcaggggcatccccagaccggatgcgagtgtgaagatggccctgacggccaagagatggatcccccgaaccctgaagaggttaaaacacccgaagagggggagaagcagtctcagtgctga

SEQ ID NO: 3226 - RNA, 351 nt, synthetic construct
  misc_feature 1..351: note = AAC33676 variant
  source 1..351: mol_type = other RNA
atgagctggagaggccggtccacctaccgccccagacctcggcgctatgtggagccgcccgaaatgatcgggcctatgagacccgagcagttctctgacgaagtcgagcctgccacacccgaagagggagagcctgctacgcaacggcaggacccggccgcggctcaggaaggcgaggacgaaggggccagcgccggacagggccccaagcctgaggctgattcccaagagcaggggcacccccagaccggatgcgaatgtgaggacggccctgatggccaggaaatggatcccccgaaccctgaggaagttaaaacacccgaggagggggaaaagcaatctcagtgctga

SEQ ID NO: 3227 - RNA, 1344 nt, synthetic construct
  misc_feature 1..1344: note = AAA35657 variant
  source 1..1344: mol_type = other RNA
atggagctgctcaagctgaacagaagcgtgcagggcaccgggcccggacctggcgcctccctttgccggccgggggctcccctgctcaattctagctccgtcggaaacctgtcttgtgaacctccccgcatcagaggcgccgggacacgggagcttgaactggcgattcgcatcacgctctacgctgttattttcctgatgagcgtgggaggcaatatgctgatcattgtggtcctcggcctgtccagacggcttcgcaccgtgacaaacgcctttctgctctctctggccgttagcgaccttctgctcgctgtggcctgcatgcctttcaccctgctgcccaatctcatggggacatttatcttcggaaccgtcatctgtaaagctgtgtcctatctgatgggcgttagcgtgtctgtctccacacttagcctggtggccattgcgctcgagagatactctgccatctgccggcctctgcaagctcgcgtgtggcagaccagatcccacgccgctcgggtcattgttgccacgtggcttctgagcgggctcctgatggtgccgtatcccgtgtacaccgtcgtgcagcctgttggaccccgcgtgctgcagtgtgtccatagatggccttctgcgcgggtgcgccaaacatggtccgttctcctgcttctgctcctgtttttcatccccggcgtggtcatggccgtggcttatgggcttattagcagagaactgtacctcggactgcggtttgatggcgactccgattctgacagccagtccagagtccgcaaccagggcgggctgccgggagccgtgcaccagaatggccggtgcagacctgagaccggggctgttggagaggatagcgacggctgttatgtgcaactcccccgctctcggcctgccctggaacttacagccctgaccgctcccgggcccggatccggcagcagacctacgcaggcgaagctcctggccaaaaagcgcgtcgtgcggatgctgcttgttatcgtggtcctcttctttctgtgctggctgccggtgtactctgctaacacatggagagccttcgatggccccggggcccatcgcgctctcagcggagcccctatttcctttatccatctgctttcttacgcgagcgcttgtgtgaatcccctggtttattgcttcatgcaccggagatttcgccaggcctgtctcgagacctgcgcccggtgctgtcctagacccccgcgggctcgccctagagccctgcccgacgaagatcctcccacaccttccatcgctagcctgtctcggctttcctacaccaccattagcacactcggccccgggtga

SEQ ID NO: 3228 - RNA, 2226 nt, synthetic construct
  misc_feature 1..2226: note = AAD22449 variant
  source 1..2226: mol_type = other RNA
atggccctgttcaccccctggaagctcagctcccagaaactgggctttttccttgtgacatttgggttcatctggggaatgatgctgctccactttacgattcaacagagaacccagcctgagtctagctccatgctgcgggaacagatccttgacctgtctaagcgctacattaaagctctcgccgaggaaaacagaaatgtcgttgatggcccgtatgcgggggtgatgacagcttacgacctgaagaaaaccctggccgtgctcctggataacatccttcaacggattggaaagctggagagcaaggtcgacaatctcgtggttaacggcacagggaccaattccacaaactctaccacggccgtgcccagcctggtcgctcttgaaaagatcaatgtggccgatatcattaacggagctcaggagaagtgcgttctgcctcccatggacggctatcctcattgtgagggcaaaatcaagtggatgaaagatatgtggcgctccgacccctgctacgccgattatggggtggacggaagcacctgttctttctttatttacctctccgaagtcgagaattggtgccctcacctcccgtggagagcgaagaacccctatgaagaggccgatcataatagcctggctgagatccggacagacttcaacattctctactctatgatgaagaaacacgaagagtttcgctggatgagactgcggatccgcagaatggccgatgcttggattcaggccatcaagtcccttgcggaaaaacagaatctggagaagcggaaacgcaagaaagtgctcgtgcatctgggccttctgaccaaggaaagcgggttcaagatcgccgagacagctttttctggaggccctctcggggagctggtccaatggtccgacctgattaccagcctctacctgcttggacacgacatcagaatttccgcctctctggctgaactcaaagagatcatgaagaaagttgtgggcaaccggagcggctgtcccacggtgggggatcgcattgtcgaactgatctatatcgacattgtgggacttgcccagttcaagaaaacactgggcccttcctgggttcactaccagtgcatgctcagagtgctggatagctttgggaccgagcccgagttcaatcatgccaactatgctcagtctaagggacacaagacaccgtggggcaaatggaacctgaatcctcaacagttctacaccatgtttccccatacccctgacaactccttcctcgggtttgtcgtggaacagcacctgaatagctctgatatccaccatattaacgagatcaagcggcaaaatcagagccttgtttatggaaaagtggactccttctggaagaacaaaaagatttacctggatatcatccacacatatatggaagtccatgcgacggtgtacggctctagcaccaagaatattccctcctacgtcaaaaaccacggcatcctcagcgggagagacctgcagtttctgcttcgcgagacaaagctgttcgtgggactgggctttccctatgaagggcctgccccgctggaggctattgccaatggatgtgccttcctcaaccccaaatttaatcctcccaagtcttccaaaaacaccgatttctttatcggcaagcctacactgcgggaacttaccagccagcatccctacgctgaggttttcattgggagaccgcacgtgtggacggtcgacctgaataaccaagaggaagtggaggatgccgttaaggcgatcctcaatcagaaaattgaaccttatatgccctacgagtttacatgcgagggcatgctgcagcgcatcaacgctttcatcgaaaagcaggacttctgtcacggacaagtgatgtggcctcccctgtctgcccttcaggtcaaactcgccgagcctggccagtcctgcaaacaggtgtgtcaagaaagccagctgatttgcgagccctcctttttccagcatctgaacaaagacaaggatatgctcaaatataaggtgacctgccagtctagcgaactggctaaggacatccttgttccgtcctttgatcctaaaaataagcactgtgtcttccaaggggacctgctcctgttttcttgcgccggagctcatccccggcaccagagagtgtgtccctgccgcgatttcattaaaggccaggtggccctgtgtaaggactgcctttga

SEQ ID NO: 3229 - RNA, 1743 nt, synthetic construct
  misc_feature 1..1743: note = EAX11770 variant
  source 1..1743: mol_type = other RNA
atggccggcaccgtgagaacagcttgcctggtcgttgccatgctcctgagccttgacttccccgggcaggcgcaacctccgccccctccccctgatgctacgtgtcaccaggtgcggtcctttttccagcgcctgcagcccggactcaagtgggtgcctgagaccccggtccccggctctgacctgcaagtgtgccttcctaaagggcccacatgttgcagcagaaagatggaagagaaataccagctgaccgcccggctcaacatggaacagctgctgcagtccgcctctatggagctcaagtttctgatcattcaaaatgctgccgttttccaggaggcttttgaaatcgtggtccgccatgccaaaaactatacaaatgcgatgttcaagaacaattaccctagccttacaccccaggcctttgagttcgtgggagaatttttcaccgatgtttccctgtatattctcggctctgacatcaacgtggatgacatggtcaatgagctgtttgatagccttttcccggtgatttacacccagctgatgaaccctgggctccccgactccgctctggatatcaatgaatgtctgagaggagcccggcgcgacctcaaggtgtttggcaacttccctaaactgatcatgacgcaagtcagcaagtctcttcaggttaccagaattttcctgcaggctctcaatctgggcatcgaggtgattaacacaaccgatcaccttaaattttccaaggactgcgggcggatgctgacacgcatgtggtattgtagctactgccaaggactcatgatggtgaaaccctgtggcgggtattgcaatgtcgtgatgcagggatgtatggccggcgttgtggagatcgataagtactggagagaatacattctgtctctggaggaactcgtcaacgggatgtatcggatctacgacatggagaatgtgctgcttggactgttctccaccattcatgacagcatccagtatgttcagaagaacgcgggcaaactcacgacaaccatcggcaagctgtgcgcccactctcaacagcgccagtacagatccgcttattaccccgaagatctttttattgacaaaaaggtgctgaaagtcgcccatgtggagcacgaggaaacactcagctcccggcgcagagagctgatccagaagctgaaatctttcattagcttttattccgctctccctgggtacatctgcagccactctccggtcgccgaaaacgataccctgtgttggaatggacaagagcttgtggaacggtactcccagaaggccgctagaaacggcatgaagaatcagttcaacctgcatgagctcaaaatgaaggggcccgagcctgttgtgagccagattatcgacaaactgaagcacatcaatcaactgcttcgcaccatgtctatgcccaaaggacgggtcctcgataagaacctggacgaagagggctttgaaagcggggattgcggagacgatgaggacgaatgtattggcggctccggggatggaatgatcaaggtgaaaaatcagctgagattcctcgcggagctggcctatgaccttgacgttgatgacgctcctggcaactctcagcaggccacacccaaggataatgagattagcacgtttcataacctggggaatgtgcactccccgctcaaactgctgaccagcatggccatctctgtcgtgtgcttctttttccttgtgcactga

SEQ ID NO: 3230 - RNA, 1743 nt, synthetic construct; identical to SEQ ID NO: 3229
  misc_feature 1..1743: note = AAA93471 variant
  source 1..1743: mol_type = other RNA

SEQ ID NO: 3231 - RNA, 1743 nt, synthetic construct
  misc_feature 1..1743: note = AAH35972 variant
  source 1..1743: mol_type = other RNA
atggccggcaccgtgagaacagcttgcctggtcgttgccatgctcctgagccttgacttccccgggcaggcgcaacctccgccccctccccctgatgctacgtgtcaccaggtgcggtcctttttccagcgcctgcagcccggactcaagtgggtgcctgagaccccggtccccggctctgacctgcaagtgtgccttcctaaagggcccacatgttgcagcagaaagatggaagagaaataccagctgaccgcccggctcaacatggaacagctgctgcagtccgcctctatggagctcaagtttctgatcattcaaaatgctgccgttttccaggaggcttttgaaatcgtggtccgccatgccaaaaactatacaaatgcgatgttcaagaacaattaccctagccttacaccccaggcctttgagttcgtgggagaatttttcaccgatgtttccctgtatattctcggctctgacatcaacgtggatgacatggtcaatgagctgtttgatagccttttcccggtgatttacacccagctgatgaaccctgggctccccgactccgctctggatatcaatgaatgtctgagaggagcccggcgcgacctcaaggtgtttggcaacttccctaaactgatcatgacgcaagtcagcaagtctcttcaggttaccagaattttcctgcaggctctcaatctgggcatcgaggtgattaacacaaccgatcaccttaaattttccaaggactgcgggcggatgctgacacgcatgtggtattgtagctactgccaaggactcatgatggtgaaaccctgtggcgggtattgcaatgtcgtgatgcagggatgtatggccggcgttgtggagatcgataagtactggagagaatacattctgtctctggaggaactcgtcaacgggatgtatcggatctacgacatggagaatgtgctgcttggactgttctccaccattcatgacagcatccagtatgttcagaagaacgcgggcaaactcacgacaaccatcggcaagctgtgcgcccactctcaacagcgccagtacagatttgcttattaccccgaagatcttttcattgacaaaaaggtgctgaaagtcgcccatgtggagcacgaggaaacactctccagccggcgcagagagctgatccagaagctgaaatcctttatttctttctatagcgctctccctgggtacatctgctcccacagcccggtcgccgaaaacgataccctgtgttggaatggacaagagcttgtggaacggtactctcagaaggccgctagaaacggcatgaagaatcagtttaacctgcatgagctcaaaatgaaggggcccgagcctgttgtgtcccagattatcgacaaactgaagcacatcaatcaactgcttcgcaccatgagcatgcccaaaggacgggtcctcgataagaacctggacgaagagggcttcgaatctggggattgcggagacgatgaggacgaatgtattggcggcagcggggatggaatgatcaaggtgaaaaatcagctgagatttctcgcggagctggcctatgaccttgacgttgatgacgctcctggcaactcccagcaggccacacccaaggataatgagatttctacgttccataacctggggaatgtgcacagcccgctcaaactgctgacctccatggccatcagcgtcgtgtgctttttctttcttgtgcactga

SEQ ID NO: 3232 - RNA, 1683 nt, synthetic construct
  misc_feature 1..1683: note = EAW93784 variant
  source 1..1683: mol_type = other RNA
atggagtgcctgtactatttcctcggctttctgcttctggccgctagactccccctggacgccgcgaagcggttccacgatgtgcttgggaacgaacgccctagcgcttacatgagagagcataatcagctgaacggatggtcctctgacgaaaatgattggaacgagaaactctatccggtctggaagcggggcgacatgcgctggaaaaatagctggaaagggggaagagttcaagccgtgctgacctccgattctcccgccctggtgggcagcaacatcacatttgctgtcaatctcattttccctcggtgtcagaaagaagacgccaacgggaatatcgtgtacgagaagaactgccgcaatgaggctggactgtccgccgatccctatgtttacaactggacggcgtggtctgaagacagcgatggcgagaatggcaccgggcagtcccaccataacgtgtttcctgacggaaagcccttccctcaccatccgggctggagacggtggaattttatttatgtcttccacacacttgggcagtactttcaaaaactgggacgctgtagcgtgagagtttctgtgaacaccgccaacgtcacactcggcccccagctgatggaagtgaccgtgtaccggcgccacgggagagcttatgtccctatcgcccaggttaaggatgtgtacgtggtcacagaccagattcccgtgttcgttaccatgtttcaaaagaatgatcggaactccagcgacgagacgttccttaaggacctgcctatcatgtttgatgtgctcatccatgacccctctcacttcctgaattattccaccattaactacaaatggagcttcggagataatacaggcctgtttgtctctaccaaccatacagtgaatcacacctatgttctcaacggcacgttctccctgaatcttacagtgaaggctgccgcgccggggccttgtccccctccccctcccccgccccgccctagcaagcccaccccttccctgggacccgccggcgacaacccgctcgagctgtctagaatccctgatgaaaattgccagattaaccggtacgggcactttcaggctacaatcaccattgtcgagggaatccttgaagtgaatattatccagatgaccgacgtcctgatgcccgtgccttggcccgagagctccctcatcgatttcgttgtgacatgccaaggcagcattcctacggaagtctgtaccatcatttctgaccccacatgcgagatcacccagaacacagtgtgttccccggttgatgtggacgagatgtgcctgctgaccgtcagacgcacgtttaatgggagcggaacatattgtgtgaacctcaccctgggcgatgacacctctcttgccctgacaagcaccctcatttccgtgcctgaccgggatcccgcttctcccctgagaatggccaacagcgcccttatctccgttggctgcctggctatcttcgtcacagtgattagcctcctggtgtacaaaaagcataaagaatacaatcctatcgagaactctccggggaatgtcgtgcgctccaagggactgagcgtttttctcaaccgggcgaaagccgtgttctttcccggcaatcaggaaaaggaccctctgcttaaaaaccaagagttcaagggggtctcttga

SEQ ID NO: 3233 - RNA, 1719 nt, synthetic construct
  misc_feature 1..1719: note = AAH32783 variant
  source 1..1719: mol_type = other RNA
atggagtgcctgtactatttcctcggctttctgcttctggccgctagactccccctggacgccgcgaagcggttccacgatgtgcttgggaacgaacgccctagcgcttacatgagagagcataatcagctgaacggatggtcctctgacgaaaatgattggaacgagaaactctatccggtctggaagcggggcgacatgcgctggaaaaatagctggaaagggggaagagttcaagccgtgctgacctccgattctcccgccctggtgggcagcaacatcacatttgctgtcaatctcattttccctcggtgtcagaaagaagacgccaacgggaatatcgtgtacgagaagaactgccgcaatgaggctggactgtccgccgatccctatgtttacaactggacggcgtggtctgaagacagcgatggcgagaatggcaccgggcagtcccaccataacgtgtttcctgacggaaagcccttccctcaccatccgggctggagacggtggaattttatttatgtcttccacacacttgggcagtactttcaaaaactgggacgctgtagcgtgagagtttctgtgaacaccgccaacgtcacactcggcccccagctgatggaagtgaccgtgtaccggcgccacgggagagcttatgtccctatcgcccaggttaaggatgtgtacgtggtcacagaccagattcccgtgttcgttaccatgtttcaaaagaatgatcggaactccagcgacgagacgttccttaaggacctgcctatcatgtttgatgtgctcatccatgacccctctcacttcctgaattattccaccattaactacaaatggagcttcggagataatacaggcctgtttgtctctaccaaccatacagtgaatcacacctatgttctcaacggcacgttctccctgaatcttacagtgaaggctgccgcgccggggccttgtccccctccccctcccccgccccgccctagcaagcccaccccttccctggccacaaccctcaaatcttacgacagcaacacccccggaccggctggcgataatcctctggagctttccagaatccccgacgaaaactgccagattaatcggtatgggcactttcaggccacaatcacgattgtcgagggaatcctggaagtgaacattatccagatgaccgatgtcctcatgcctgtgccctggcctgagagctctctgatcgacttcgttgtgacatgccaaggctccattcccaccgaagtctgtacaatcattagcgatccgacctgcgagatcacgcagaatacagtgtgttctcctgttgacgtggatgagatgtgcctgctcaccgtcagacgcacctttaacgggagcggaacatactgtgtgaacctgacccttggcgacgacacatccctggctctcacgtctaccctgattagcgtgcccgatcgggaccccgcctcccctcttagaatggccaatagcgctctgatctctgttggctgcctcgcgatcttcgtcacagtgatttccctgctggtgtacaagaaacataaggaatataacccgatcgagaatagccccgggaacgtcgtgcgctctaaaggactctccgtttttctgaatcgggccaaggctgtgttctttcctggcaaccaggaaaaagatccccttctgaagaatcaagagttcaagggggtcagctga

SEQ ID NO: 3234 - RNA, 621 nt, synthetic construct
  misc_feature 1..621: note = CAD43718 variant
  source 1..621: mol_type = other RNA
atggagtgcctgtactatttcctcggctttctgcttctggccgctagactccccctggacgccgcgaagcggttccacgatgtgcttgggaacgaacgccctagcgcttacatgagagagcataatcagctgaacggatggtcctctgacgaaaatgattggaacgagaaactctatccggtctggaagcggggcgacatgcgctggaaaaatagctggaaagggggaagagttcaagccgtgctgacctccgattctcccgccctggtgggcagcaacatcacatttgctgtcaatctcattttccctcggtgtcagaaggaagacgccaacgggaatatcgtgtacgagaagaactgccgcaatgaggctggactgtccgccgatccctatgtttacaactggacggcgtggtctgaagacagcgatggcgagaatggcaccgggcagtcccaccataacgtgtttcctgacggaaagcccttccctcaccatccgggctggagacggtggaattttatttatgtcttccacacacttgattggctgctccagacccccaaactgcttctgtacctcagcctgaagtttcaaccttctctgttcctcctgtacaactga

SEQ ID NO: 3235 - RNA, 621 nt, synthetic construct
  misc_feature 1..621: note = AAH11595 variant
  source 1..621: mol_type = other RNA
atggagtgcctgtactatttcctcggctttctgcttctggccgctagactccccctggacgccgcgaagcggttccacgatgtgcttgggaacgaacgccctagcgcttacatgagagagcataatcagctgaacggatggtcctctgacgaaaatgattggaacgagaaactctatccggtctggaagcggggcgacatgcgctggaaaaatagctggaaagggggaagagttcaagccgtgctgacctccgattctcccgccctggtgggcagcaacatcacatttgctgtcaatctcattttccctcggtgtcagaaggaagacgccaacgggaatatcgtgtacgagaagaactgccgcaatgaggctggactgtccgccgatccctatgtttacaactggacggcgtggtctgaagacagcgatggcgagaatggcaccgggcagtcccaccataacgtgtttcctgacggaaagcccttccctcaccatccgggctggagacggtggaattttatttatgtcttccacacacttgggtggctgctccagacccccaaactgcttctgtacctcagcctgaagtttcaaccttctctgttcctcctgtacaactga

SEQ ID NO: 3236 - RNA, 2640 nt, synthetic construct
  misc_feature 1..2640: note = CCDS5600.1 variant
  source 1..2640: mol_type = other RNA
atgaagatgctgaccagactccaggtgctgacacttgccctgttcagcaaaggctttctcctgtcccttggggaccacaacttcctgcggcgcgagatcaagattgaaggagatctcgtcctgggcgggctgtttcccatcaatgagaaaggaacgggcaccgaagagtgcgggagaattaacgaagaccggggaatccaacgcctcgaggctatgctgttcgccattgatgagatcaataaggacgattaccttctgcctggcgttaaactcggcgtgcatatcctggacacatgttctagagatacctatgcgcttgaacagagcctggagtttgtgcgggcttccctcacaaaggtcgacgaagccgagtacatgtgcccggatgggtcttatgccattcaggagaacatccccctgctgattgctggagtgatcggcgggagctactcctctgttagcattcaggtggccaatctcctgcgccttttccaaatccctcagatttcctatgctagcacctctgccaagctgtccgacaaaagcagatacgattattttgcgcggacagtgccccctgacttctaccaggccaaggctatggccgaaatcctccgctttttcaactggacctacgtctctacggttgcttccgagggagattatggcgaaaccgggatcgaggcctttgaacaggaggcgagactgcggaatatttgtatcgccacagctgagaaagtgggacgcagcaacattagaaagtcttacgactccgtcatccgggaacttctgcaaaaacccaatgcccgcgtggtggtcctcttcatgagaagcgacgattcccgggagctgattgctgccgcctctagagctaacgcgagctttacctgggttgcctccgacggctggggcgctcaggaaagcatcatcaaggggtctgagcacgtggcctatggagccattacactggaactcgcttcccagcctgtgcgccagttcgatcggtacttccaaagcctgaatccgtataacaatcatagaaacccctggtttcgcgacttctgggagcagaagtttcagtgctctcttcaaaataaacggaaccacagacgcgtctgtgataagcatctggccatcgacagctccaactacgagcaggaatctaaaattatgttcgtggttaatgcggtgtatgctatggcccacgccctccacaagatgcagcggaccctgtgccctaacacgacaaaactttgtgatgctatgaagatcctggacggcaaaaagctctacaaggattacctgctgaaaattaattttaccgcccccttcaaccctaataaggacgctgatagcatcgtcaaatttgacacattcggggacggaatgggcagatataacgtgtttaatttccagaacgttgggggaaagtactcctatctcaaagtgggccattgggccgagaccctgagccttgatgtcaattctatccactggtcccgcaacagcgtgcccacctctcaatgctccgacccgtgtgcgcctaatgaaatgaagaacatgcagcccggcgatgtctgctgttggatttgcatcccttgcgagccctacgaatatctggccgacgagtttacatgtatggattgcgggagcggacagtggcccacggctgacctcaccggctgttacgatctgcctgaggactatattcggtgggaagatgcctgggctatcgggccggtgacaattgcctgcctgggattcatgtgtacctgcatggttgtgacagtctttatcaagcataataacacgccccttgtgaaagcgtccggcagagagctctgttacattctgctgttcggggttggcctctcttactgcatgaccttctttttcatcgccaagcctagccccgtgatctgtgctctgcgccggcttggactgggctcctcttttgccatttgctatagcgctctcctgacaaaaaccaattgtatcgccagaattttcgacggggtcaagaacggagcccagcggcctaaatttatctcccccagctctcaagtgttcatttgcctgggccttatcctcgtgcagatcgttatggtctccgtgtggctgattctggaagctccggggacccgcagatacacactcgcggagaagcgggagaccgtgatcctgaagtgcaacgtcaaagatagctctatgcttatttccctgacatatgacgtgatcctcgttattctgtgtacggtgtacgcctttaagaccagaaaatgccctgaaaatttcaacgaggctaagtttatcggattcacaatgtataccacatgtatcatttggctggcctttcttcccatcttctacgtcaccagctctgattatcgcgtgcagacgaccacaatgtgcattagcgtttccctcagcggctttgtggtcctggggtgtctgttcgcccctaaagtgcacatcattctcttccagccccaaaagaatgttgtgacccaccggctgcatcttaacagattttctgtctccggcacaggaaccacgtacagccagtcctctgctagcacatacgtgcctaccgtgtgcaatggccgcgaagtcctggactccacaacctctagcctctga

SEQ ID NO: 3237 - RNA, 1947 nt, synthetic construct
  misc_feature 1..1947: note = CCDS4977.1 variant
  source 1..1947: mol_type = other RNA
atgagccaccatggcggggcccccaaggcttccacctgggtggtcgcctctagacggagctccacagtttctcgcgcgcctgagagacggccggctgaagaactgaaccgcacgggacccgaaggctacagcgtggggagaggaggccggtggcgcgggacctccagacctcccgaggccgtggccgctggacacgaggagctccctctgtgcttcgcccttaaatctcattttgtcggcgctgtgatcggccgcgggggaagcaagattaaaaatatccagtccacaaccaacacaaccattcaaatcattcaggagcagcccgaaagcctggttaagatcttcggctctaaagccatgcagacaaaggcgaaggccgtgatcgacaattttgtcaaaaagctcgaggaaaactataattccgagtgtgggattgataccgctttccaacctagcgtgggaaaagacggctctacggataacaatgttgtggccggggaccggccgctgatcgattgggaccagattagagaggaaggacttaagtggcagaaaaccaagtgggctgatctgccccctatcaagaaaaacttttacaaggagtccacagccaccagcgcgatgtctaaagtcgaagccgactcctggcggaaggagaatttcaacattacatgggatgacctcaaagatggcgaaaagcgccccatccctaatccgacctgcacgtttgacgatgctttccagtgttatcccgaggtgatggagaacattaaaaaggccggctttcaaaagcctacacccatccagagccaggcttggcctatcgtgctgcaggggattgacctgatcggagtcgcccaaaccggcacagggaaaaccctctgctacctgatgcccggattcattcaccttgttctgcagccctccctcaagggccagagaaatcggcctgggatgctggtgcttaccccgacacgcgaactggccctccaagtggagggagaatgttgcaaatattcttacaagggcctgagaagcgtctgtgtgtatggcgggggaaaccgggacgagcagatcgaggaactgaaaaagggcgttgatattatcatcgctacgcccgggagactcaatgacctgcagatgtccaactttgtgaaccttaagaatattacctacctggtcctcgatgaggcggacaaaatgctggatatgggattcgaacctcagatcatgaagattcttctggacgtgcgccccgatcggcaaacagttatgaccagcgccacatggcctcattctgtgcacagactcgctcagtcctacctgaaagagcccatgatcgtctatgtgggcaccctggacctcgtcgccgtgagctctgttaagcagaacattatcgtgacgacagaagaggaaaaatggagccacatgcagacctttctgcaatccatgtctagcaccgataaggtcatcgtgttcgtttcccgcaaggccgtggctgaccatcttagctctgatctgattctcgggaatatctccgtcgagagcctgcacggcgaccgggagcagagagaccgcgaaaaagcccttgagaacttcaagacaggaaaagtgcggattctgatcgcgaccgatctcgcttctagaggcctggacgtgcatgatgttacacacgtctacaattttgacttcccgcgcaacattgaagagtatgtgcaccggatcgggagaacgggacgcgccggccggaccggggtgtccattacaaccctgacaagaaatgattggcgggtcgccagcgagctcatcaacatcctggaacgcgctaatcagtccattcctgaggaacttgtgtctatggccgagagatttaaggctcatcagcaaaaacgggaaatggagagaaagatggagcgcccccagggacggcctaagaaattccactga

SEQ ID NO: 3238 - RNA, 1209 nt, synthetic construct
  misc_feature 1..1209: note = ACD02430 variant
  source 1..1209: mol_type = other RNA
atggcccagaaggagggcgggagaaccgtgccctgctgtagccggcctaaagtcgctgccctgacagcgggaacgctcctgcttctgaccgctatcggcgccgcctcctgggctattgttgccgtgctcctgcgctctgaccaagaaccgctttaccccgtgcaggtcagctccgctgatgccagactgatggtgttcgacaagacagaggggacctggcggctcctgtgctctagccgctccaacgcgagagttgccggactgtcttgtgaagagatgggctttctccgggctctgacacacagcgaacttgatgtgcgcaccgccggggctaatggaacatccggcttcttttgcgtcgacgagggcagactgcctcatacccagcggctcctggaggtgatcagcgtttgtgattgcccccgcgggagattccttgccgcgatttgtcaggactgcggacggcgcaaactgcctgtggatagaatcgtcggcgggcgggacacgtctctcggacgctggccctggcaagtgtccctgagatatgatggcgcccacctgtgtgggggaagcctcctgtctggcgactgggtgcttaccgctgcccattgctttcctgaacggaacagagtcctgtcccgctggcgggttttcgctggcgccgtggcccaggctagcccgcacgggctccagctgggagtgcaggcggtcgtgtaccatggcgggtatcttccctttagagatcctaattctgaggaaaactccaatgacattgccctggttcacctcagctctcccctgcctctgacagagtacatccaacccgtgtgtctcccggctgccggacaggccctggtcgatggcaagatctgcaccgtgacagggtggggaaacacccagtattacggccagcaagctggcgttcttcaggaggcccgcgtgcctattatctccaatgacgtctgcaacggggcggacttctatggaaatcagattaaacccaagatgttttgtgctggctaccctgaagggggaatcgatgcctgccaaggcgacagcgggggccccttcgtgtgtgaggattccattagccggacgcccagatggcgcctgtgcggaatcgtctcttggggcacagggtgtgccctcgctcagaagcctggagtgtacaccaaagtttccgactttcgggaatggattttccagtga

SEQ ID NO: 3239 - RNA, 1254 nt, synthetic construct
  misc_feature 1..1254: note = AAA36013 variant
  source 1..1254: mol_type = other RNA
atggcccagaaggagggcgggagaaccgtgccctgctgtagccggcctaaagtcgctgccctgacagcgggaacgctcctgcttctgaccgctatcggcgccgcctcctgggctattgttgccgtgctcctgcgctctgaccaagaaccgctttaccccgtgcaggtcagctccgctgatgccagactgatggtgttcgacaagacagaggggacctggcggctcctgtgctctagccgctccaacgcgagagttgccggactgtcttgtgaagagatgggctttctccgggctctgacacacagcgaacttgatgtgcgcaccgccggggctaatggaacatccggcttcttttgcgtcgacgagggcagactgcctcatacccagcggctcctggaggtgatcagcgtttgtgattgcccccgcgggagattccttgccgcgatttgtcaggactgcggacggcgcaaactgcctgtggatagaatcgtcggcgggcgggacacgtctctcggacgctggccctggcaagtgtccctgagatatgatggcgcccacctgtgtgggggaagcctcctgtctggcgactgggtgcttaccgctgcccattgctttcctgaacggaacagagtcctgtcccgctggcgggttttcgctggcgccgtggcccaggctagcccgcacgggctccagctgggagtgcaggcggtcgtgtaccatggcgggtatcttccctttagagatcctaattctgaggaaaactccaatgacattgccctggttcacctcagctctcccctgcctctgacagagtacatccaacccgtgtgtctcccggctgccggacaggccctggtcgatggcaagatctgcaccgtgacagggtggggaaacacccagtattacggccagcaagctggcgttcttcaggaggcccgcgtgcctattatctccaatgacgtctgcaacggggcggacttctatggaaatcagattaaacccaagatgttttgtgctggctaccctgaagggggaatcgatgcctgccaaggcgacagcgggggccccttcgtgtgtgaggattccattagccggacgcccagatggcgcctgtgcggaatcgtctcttggggcacagggtgtgccctcgctcagaagcctggagtgtacaccaaagtttccgactttcgggaatggattttccaggccatcaagacacacagcgaggcttctggcatggtgacccagctgtga

SEQ ID NO: 3240 - RNA, 2940 nt, synthetic construct
  misc_feature 1..2940: note = BAG62073 variant
  source 1..2940: mol_type = other RNA
atggagctggccgctctctgcagatggggcctgcttctggccctcctgccccctggggcggctagcacccaggacaactacctttccacagatgtgggatcttgtacgctggtctgcccgctccacaatcaagaagttaccgccgaggacggcacacagcggtgtgaaaagtgcagcaaaccctgtgcccgcgtgtgctatgggctgggaatggagcacctgagagaagtgcgggctgtcacctccgccaacatccaggagttcgctggctgtaagaaaatttttgggtctctcgccttcctgcctgagagctttgatggagaccccgcgtccaatacagcccctcttcagcccgaacaactccaggtgttcgagaccctggaagagatcacaggctacctgtatatttctgcttggcctgatagccttccggacctgtccgtttttcagaacctccaggtgatccgcggccggattctgcacaatggggcctacagcctgaccctccaaggactgggcatctcttggcttgggctgcggtccctccgcgagctgggaagcggccttgctctgatccatcacaacacgcatctctgcttcgtccacaccgtgccctgggatcagctgtttagaaatcctcaccaggccctgctccatacagcgaaccggcccgaagacgagtgtgttggggaaggactggcctgccaccagctttgtgctcgcggccattgctggggccctgggcccacccaatgcgtgaattgttctcagttcctgagaggacaggagtgcgtcgaagagtgtcgggtgctccaaggcctgccgcgcgagtatgtgaacgccagacactgccttccttgtcaccccgaatgccagcctcagaatgggtccgtcacatgttttggacccgaggctgatcagtgcgttgcctgtgcccattacaaggatccccctttctgcgtggctcggtgtccgagcggcgtgaaacccgacctgtcttatatgcctatttggaagtttcccgacgaagagggggcgtgccaaccttgccccatcaactgtacccactcctgcgtcgatctcgacgacaagggatgtccggccgaacagcgcgctagccctctgacgtccattatctctgccgtggttggcattctgctcgtggtcgtgctgggcgttgtgttcgggatccttattaaaagacggcagcagaagatcagaaaatacacaatgcgccggctgctccaagagaccgagctggtcgaacccctgacacctagcggagccatgcccaatcaggctcagatgagaatccttaaggagaccgaactccgcaaagtgaaggtcctgggctccggggcctttggaaccgtgtacaagggcatttggatccctgatggggagaacgttaaaattcccgtggcgatcaaggtcctgcgggaaaatacaagcccgaaagctaacaaggagattctcgacgaggcctatgtgatggccggcgttggatctccttacgtgtccagactgcttggcatctgcctgacgagcaccgtccagctcgtgacacaactgatgccctatgggtgtctgcttgatcatgtgcgcgaaaaccggggaagactcggctctcaggacctgctgaattggtgcatgcagatcgctaaagggatgagctacctcgaggatgttcgcctggtccaccgggaccttgccgctagaaacgtgctggtgaagtcccccaatcatgtcaaaattaccgatttcggactcgcccgcctgctggacatcgatgaaacagagtatcacgcggacggcgggaaggtgcctattaagtggatggcccttgagtctatcctccggagacggttcacccaccagagcgatgtttggtcctacggcgtgacggtctgggaactgatgacatttggagctaaaccgtatgacggcattcccgcccgcgagatccctgacctgctcgaaaagggggagagactgccccaacctcccatctgtaccattgatgtgtacatgatcatggttaaatgctggatgattgacagcgaatgtcggcctagattccgcgagcttgtgtctgagttttcccggatggctagagatccccagcgcttcgtcgtgatccagaacgaagacctgggaccggccagccctctcgattctaccttttacagatccctgctggaggacgatgacatgggcgatcttgttgacgcggaagagtatctcgtgccccaacaggggttcttttgccctgatcccgccccgggagctggcgggatggtccatcaccggcatcgcagctcctctacaagaagcggcggaggcgacctgaccctggggctcgaaccttccgaggaggaagcccccagatctcctctggctcccagcgagggagccggctccgatgtgttcgacggggaccttggaatgggcgccgctaaggggctgcagagcctccccacacacgatccttctccgctgcagcgctactccgaagaccccacggtgcctctgcccagcgagaccgatggctatgtcgcgcctcttacatgttctccccaacctgaatacgttaatcagccggacgtgagaccccagcctccctcccctcgggagggacccctgccggccgctcgccctgccggcgccaccctcgagagacccaaaacactgagccccgggaagaacggagtggtcaaggatgtgtttgctttcggcggggccgttgaaaatcctgagtatctcacgccccagggaggcgcggctcctcaaccgcatccccctcccgccttttctcctgccttcgacaacctgtactattgggatcaggatcccccggaacggggcgctcctcccagcacctttaaagggacccctacagccgagaatcccgagtaccttggactggacgtgcctgtctga

SEQ ID NO: 3241 - RNA, 264 nt, synthetic construct
  misc_feature 1..264: note = CCQ43016 variant
  source 1..264: mol_type = other RNA
atgatgagaatgaagaccttcgtgatgatccactttcatctgatgaacggcgggaaagccaagctctacagccggccccacgctaaactgcttcctgagcagcgcgtcacagacaagacgggagccccggttgaatggcccggccaaacccagtgctccacagagacccagacactggcggctatgcctgcccaggccgtgatgagagtgacctgtacagtcgtggatatgcataaatctgaatgcgctcccgcccaaacctga

SEQ ID NO: 3242 - RNA, 3768 nt, synthetic construct
  misc_feature 1..3768: note = AAI67147 variant
  source 1..3768: mol_type = other RNA
atggagctggccgctctctgccggtggggcctgcttctggccctcctgccccctggggcggctagcacccaggtgtgtacaggaacggacatgaagctgcggcttccggcctcccccgaaacccacctcgatatgctgcgccatctgtaccaaggctgccaggtcgttcaggggaacctcgagctgacatatcttcctaccaatgcctctctgagcttcctccaggacatccaagaagtgcagggatacgtgctgattgctcacaaccaggtcagacaggtgccccttcaacggctgcgcatcgttagaggcacacagctctttgaggataattatgccctggctgtgctggacaacggggatcctctcaataacaccacacccgtcaccggagcctcccctggcggcctgcgggaacttcagctgcgctctctcacggagattctgaaagggggagtgcttatccagagaaatccgcaactgtgttaccaggacaccattctctggaaggatatcttccataaaaacaatcagctggcgctgacactcatcgacaccaaccggagccgcgcctgccacccctgttcccctatgtgcaagggctctagatgttggggagagagctccgaagattgccaaagcctgacacggaccgtttgtgctgggggctgcgcccgctgtaaagggccccttcctacggactgctgccatgagcagtgtgctgccggatgcacaggccccaagcactctgattgtctggcgtgcctccactttaatcattccggcatttgtgaactgcactgcccggcccttgtgacctataacacagacaccttcgagagcatgcctaatcccgaggggagatacacctttggagcttcttgtgtcacagcctgcccttataactacctgtccacggatgtgggcagctgtaccctcgtgtgccccctgcataatcaggaagtcacagctgaggacgggacccagcggtgtgaaaagtgctctaaaccctgcgcccgcgtttgttacggactgggcatggagcacctcagagaagtgcgggccgtgacatccgctaacatccaagagttcgcggggtgcaagaaaatttttggaagcctggccttccttcctgagtcctttgacggcgatccggcttctaacaccgctcccctgcagcctgaacagctccaggtcttcgagacgctggaagagatcacaggctatctgtacattagcgcctggcccgactcccttcctgatctcagcgtgtttcaaaatctgcaggttatcagagggcgcattctgcacaacggagcctattctctcaccctgcagggccttgggatctcctggctgggactccggagcctgagagaactgggctctgggcttgccctcatccatcacaatacccatctgtgtttcgtgcacacagtcccctgggaccagctgtttcgcaacccgcatcaagcgctcctgcacaccgctaatcggcctgaggatgagtgcgtgggcgaaggacttgcctgtcaccagctgtgcgccagaggccattgttgggggcccggacctacacagtgcgttaactgtagccagttcctccgcggccaagagtgcgtggaagagtgtcgggtcctgcaggggctgcccagagaatacgtgaatgctcgccactgccttccttgccatcccgagtgtcagccgcaaaacggatccgtcacgtgcttcggccctgaggccgaccagtgtgtggcttgcgcccactataaggatcctcccttttgtgttgcgcggtgcccctctggggtgaaaccggacctcagctacatgcccatttggaagttccctgatgaagagggcgcctgtcagccctgccctatcaattgtacccactcctgcgtcgacctggatgacaagggatgtcccgctgaacagagagccagccctctgacatctattatctccgctgtggttggcattctcctggtggtcgtgcttggggtggtttttggaatcctgatcaaacgccggcaacagaagattagaaaatataccatgcggcgcctcctgcaggagacagagctggtcgaaccccttaccccgagcggcgccatgcctaaccaggcgcaaatgagaatcctcaaggagacggaactgcggaaagtgaaggtgctggggtctggagccttcggcaccgtctacaaagggatttggatccccgacggcgagaatgtgaagattcctgttgctatcaaggtgctcagagaaaacacatcccccaaagccaataaggagatcctggatgaggcttacgtcatggccggagtgggcagcccgtatgtttcccgccttctggggatttgcctcacctctacagtgcagctggtcacccagctgatgccttacggatgccttctggaccatgtgcgggaaaacagaggccgcctcgggagccaggatctgctcaattggtgtatgcaaatcgccaaaggaatgtcctatctggaggacgttagacttgtgcaccgggatctggctgcgcgcaacgtcctcgtgaagtctcccaaccatgtgaaaattacggactttggcctggccagactgcttgatatcgacgaaacagagtaccacgctgatgggggcaaggtccctattaagtggatggccctggaaagcatcctccggcgcagattcacccatcagtccgacgtttggagctatggagtgacagtgtgggagctgatgacctttggcgccaaaccctacgatgggattcccgctcgggagatccctgacctcctggaaaagggagagcgccttccgcagccccctatctgcaccattgatgtctatatgatcatggtgaaatgttggatgattgactctgaatgcagaccccggttccgcgagctggtttccgaatttagcagaatggcccgggaccctcaaagattcgtggtcatccagaatgaggatctcggccccgcgtctcctctggactccacattttaccgcagcctgcttgaggatgacgatatgggggacctggtggatgctgaagagtacctcgttccgcagcagggattcttttgtcccgaccctgcccccggcgccggcgggatggtgcaccaccggcatagatctagctccacgcgcagcggaggcggggatctgaccctcggactggaaccttctgaggaggaagctccccggtccccgcttgcccctagcgagggcgcggggtccgacgtcttcgatggagacctgggcatgggcgctgccaaggggctgcaatctctccccacacacgatcccagccctctgcagagatattccgaagaccccaccgtgcctcttccgtctgagacagacggatacgttgctcccctgacctgcagccctcagcccgaatatgtgaaccagcctgatgtccgcccccaaccgccttctccccgggagggccctctccccgccgccagacctgctggggccacgctggagcgccccaaaacactctccccgggaaagaatggcgtggtgaaggacgtcttcgcgtttgggggagccgttgaaaaccctgagtacctgacaccccagggcggcgctgctccccagcctcatccgccccctgccttcagccccgcctttgataatctttattactgggaccaggatcctcccgaaagaggggcccctccgtccaccttcaaaggaacccccaccgctgagaaccctgaatatctgggcctggacgtgcccgtgtga

SEQ ID NO: 3243 - RNA, 1260 nt, synthetic construct
  misc_feature 1..1260: note = AAD56009 variant
  source 1..1260: mol_type = other RNA
atggagctggccgctctctgcagatggggcctgcttctggccctcctgccccctggggcggctagcacccaggtgtgtacaggaacggacatgaagctgcggcttccggcctcccccgaaacccacctcgatatgctgcgccatctgtaccaaggctgccaggtcgttcaggggaacctcgagctgacatatcttcctaccaatgcctctctgagcttcctccaggacatccaagaagtgcagggatacgtgctgattgctcacaaccaggtcagacaggtgccccttcaacggctgcgcatcgttagaggcacacagctctttgaggataattatgccctggctgtgctggacaacggggatcctctcaataacaccacacccgtcaccggagcctcccctggcggcctgcgggaacttcagctgcgctctctcacggagattctgaaagggggagtgcttatccagagaaatccgcaactgtgttaccaggacaccattctctggaaggatatcttccataaaaacaatcagctggcgctgacactcatcgacaccaaccggagccgcgcctgccacccctgttcccctatgtgcaagggctctagatgttggggagagagctccgaagattgccaaagcctgacacggaccgtttgtgctgggggctgcgcccgctgtaaagggccccttcctacggactgctgccatgagcagtgtgctgccggatgcacaggccccaagcactctgattgtctggcgtgcctccactttaatcattccggcatttgtgaactgcactgcccggcccttgtgacctataacacagacaccttcgagagcatgcctaatcccgaggggagatacacctttggagcttcttgtgtcacagcctgcccttataactacctgtccacggatgtgggcagctgtaccctcgtgtgccccctgcataatcaggaagtcacagctgaggacgggacccagcggtgtgaaaagtgctctaaaccctgcgcccgcggaacacactccctgcctccgagacccgccgctgttcctgtgcccctccggatgcaacctggccccgcgcacccggtgctgagcttccttagaccttcctgggacctggtctctgccttttacagcctccccctggctcctctgtcccccaccagcgtgcctatctctcccgtttccgtggggcgcggaccggatcctgacgcccatgtcgccgtggatcttagccggtatgagggctga

SEQ ID NO: 3244 - RNA, 546 nt, synthetic construct
  misc_feature 1..546: note = U70863.1 variant
  source 1..546: mol_type = other RNA
ggcagccactccatgagatacttctttacctctgtgagccggcccgggcgcggagagcctagattcatcgccgtcggctatgttgacgatacacagtttgtgcggttcgactccgatgctgcctctcaacgcatggaaccgagagcgccctggattgagcaggaagggcctgagtactgggacggagaaacgcggaaggtgaaagctcatagccagacccaccgcgtcgatctgggcacactcagagggtattacaaccagtccgaggccggatctcataccgtgcaacggatgtatggctgcgacgttggcagcgattggcgctttctgagagggtaccaccagtatgcctacgacggaaaggattacatcgctcttaaagaggacctgcggtcctggacagccgctgatatggccgcgcagaccacaaagcataaatgggaaaccgcccacgtggctgagcagctccgcgcctatctggaaggcacgtgtgtcgagtggcttagacggtacctggagaatgggaaggaaaccctccaacgcaca

SEQ ID NO: 3245 - RNA, 543 nt, synthetic construct
  misc_feature 1..543: note = AH009136.2 variant
  source 1..543: mol_type = other RNA
agccactccatgagatacttctttacctctgtgagccggcccggccgcggggagcctagattcatcgccgtcggatatgttgacgatacacagtttgtgcggttcgactccgatgctgcctctcaacgcatggaaccgagagcgccctggattgagcaggaaggccctgagtactgggacggggaaacgcggaaggtgaaagctcatagccagacccaccgcgtcgatctgggaacactcagaggctattacaaccagtccgaggccgggtctcataccgtgcaacggatgtatggatgcgacgttggcagcgattggcgctttctgagaggctaccaccagtatgcctacgacgggaaggattacatcgctcttaaagaggacctgcggtcctggacagccgctgatatggccgcgcagaccacaaagcataaatgggaagccgctcacgtggccgagcagctccgcgcttatctggaaggaacctgtgtcgagtggcttagacggtacctggagaatggcaaggaaacgctccaacgcacc

SEQ ID NO: 3246 - RNA, 705 nt, synthetic construct
  misc_feature 1..705: note = AAG09781 variant
  source 1..705: mol_type = other RNA
atgctgagagtgcccgagcctcggccgggcgaagccaaggctgagggggccgcgccccctacccccagcaaacctctcacatccttcctgatccaggacattcttcgcgatggagctcaaagacagggcgggcggacgtctagccagcgccagagagaccccgaacctgagccggaacccgagcctgagggaggccggtcccgcgccggggcccaaaacgatcagctgtctaccggacccagagctgcccctgaagaggctgaaacactcgccgagaccgagcccgaacggcacctgggcagctaccttctggactccgagaatacatctggcgcgctcccgcgcctgcctcagacccccaagcagcctcagaaaagaagccgggccgctttttcccatacacaagtcatcgaactggagcgcaagttcagccaccagaaatatctctctgcccccgaaagagctcatctggccaagaaccttaagctgaccgagacgcaggttaaaatttggtttcaaaatcggcgctacaagaccaaaagaaagcagctctccagcgagctgggggatcttgaaaaacactcttccctgcccgcgctcaaggaggaagccttcagccgggcttctctggtgtccgtgtataacagctacccttattacccgtatctgtactgcgtcggatcctggtctcccgccttttggtga

SEQ ID NO: 3247 - RNA, 942 nt, synthetic construct
  misc_feature 1..942: note = BAG37303 variant
  source 1..942: mol_type = other RNA
atggccagcttcagaaagctgaccctctccgagaaagtgccccctaaccacccgtctcggaagaaagtcaattttctggacatgagccttgatgacatcattatctacaaggaactggagggcacaaacgctgaagaggagaaaaataagcgccagaaccattccaagaaagaatctcccagcagacaacagtccaaggcccaccggcatcgccacagacgggattattctcgctgcagaagcaattccgaggaagggaaccatgacaaaaagcctagccagaaaccctctggattcaagtccggccagcaccctctcaatgggcaacccctgattgagcaggaaaagtgtagcgataactacgaggcgcaggctgagaaaaatcagggacaatctgaaggcaaccagcaccagtccgaggggaatcctgacaagagcgaagagtctcagggacaaccggaagagaaccatcactccgagcggagccgcaatcatcttgaaagatccctgtctcagagcgatcggtcccagggccaactcaaacgccaccacccccagtatgagagaagccatggccagtacaagcggtctcacgggcagtccgaacgcagccatggacactctgagagaagccatggccactccgaacggtctcacgggcatagcgagagatcccacggacatagcaaacgctctcggtcccaaggcgacctggttgatacgcagagcgacctgatcgccacccagagagatctcattgccacacagaaggacctgatcgctacccaacgcgatcttatcgccacacagcgggacctgattgtgacccagagagacctcgtggctacagagcgcgatctgatcaaccagtctgggcggtcccacggacaaagcgaaagacaccagcgctattccaccggcaaaaatacgattaccacatga

SEQ ID NO: 3248 - RNA, 942 nt, synthetic construct
  misc_feature 1..942: note = AAI28135 variant
  source 1..942: mol_type = other RNA
atggccagcttcagaaagctgaccctctccgagaaagtgccccctaaccacccgtctcggaagaaagtcaattttctggacatgagccttgatgacatcattatctacaaggaactggagggcacaaacgctgaagaggagaaaaataagcgccagaaccattccaagaaagaatctcccagcagacaacagtccaaggcccaccggcatcgccacagacgggggtattctcgctgcagaagcaattccgaggaaggaaaccatgataaaaagcctagccagaaaccctctggcttcaagtccgggcagcaccctctcaatggacaacccctgattgagcaggaaaagtgtagcgacaactacgaggcgcaggctgagaaaaatcagggccaatctgaagggaaccagcaccagtccgagggaaatcctgataagagcgaagagtctcagggccaaccggaagagaaccatcactccgagcggagccgcaatcatcttgaaagatccctgtctcagagcgaccggtcccagggccaactcaaacgccaccacccccagtatgagagaagccatgggcagtacaagcggtctcacggacagtccgaacgcagccatggccactctgagagaagccatgggcactccgaacggtctcacggacatagcgagagatcccacggccatagcaaacgctctcggtcccaaggggatctggttgacacgcagagcgatctgatcgccacccagagagacctcattgccacacagaaggatctgatcgctacccaacgcgaccttatcgccacacagcgggatctgattgtgacccagagagacctcgtggctacagagcgcgacctgatcaaccagtctggacggtcccacggccaaagcgaaagacaccagcgctattccaccggcaaaaatacgattaccacatga

SEQ ID NO: 3249 - RNA, 384 nt, synthetic construct
  misc_feature 1..384: note = 12543784 variant
  source 1..384: mol_type = other RNA
atgatcaagaaaaacctgaagaaactcggcattgaggaaacctacctgaatatcattaaggccatctatgacagacccacagctagcattcagaaaacggagaacctttccaccaagacagggacctctcaagaataccacctgagccctctctggttctatatcgtgctggagatccttgcctccacaattcggcaggaaaagaatctgaaagatatccataccgagaaggaggaagtcaaactctctctgtttgcggacgctatgattctgtacctcaagaaaccgaacgatagcacacgcaagctgcttgagctgatcaagaaaattcactcctcttgcagaatcaagattaatatccatttcgccttttgtagccagtga

SEQ ID NO: 3250 - RNA, 1926 nt, synthetic construct
  misc_feature 1..1926: note = AAA63226 variant
  source 1..1926: mol_type = other RNA
atggccaaggctgccgcgatcggcattgacctggggaccacatacagctgcgtgggagtcttccagcacggcaaagttgagatcattgctaacgatcaagggaatagaacgaccccctcctatgtggcctttacagacaccgaacggctcatcggagatgccgctaagaaccaggtggccctgaatcctcagaacacagtcttcgacgctaaacgccttattggcagaaagtttggggatccggtggttcagtctgacatgaaacattggcccttccaagtgatcaatgatggagacaagcctaaggtccaggtgagctacaaaggcgagaccaaggccttttatcccgaagagatctcctctatggttctgacaaaaatgaaggaaattgcggaggcctacctcggctatcctgtgaccaacgctgtcatcacggtgcccgcctacttcaatgatagccagcggcaggctaccaaagacgccggggtgattgcgggactgaacgtccttcgcatcattaatgagcctacagccgctgccatcgcttatggcctggatagaaccgggaagggagaacggaacgttctcatttttgacctgggcgggggaacattcgatgtgtccatcctgaccatcgacgacggcatttttgaggtgaaggccacggccggcgatacacacctcgggggagaagacttcgataatcgcctggtcaaccattttgtggaggagttcaaaagaaagcacaaaaaggacatctctcaaaataaacgggctgttcgcagacttcggaccgcgtgtgaacgcgccaagagaacactgagctccagcacccaggcttctctcgagattgattccctgtttgaaggcatcgacttctacaccagcattacacgggcccgcttcgaggaactttgctctgatctgtttagatccacgctcgagccggtggagaaagccctgcgggacgctaagctggataaggcccagatccatgacctcgtcctggttgggggaagcaccagaatccccaaagtgcagaaacttctgcaagatttctttaacggccgcgacctcaataagtctattaaccctgacgaagcggtggcttacggggccgccgtccaggctgccatcctgatgggagataagtccgagaacgtgcaggaccttctgctcctggatgtcgctcccctgagcctcggcctggaaacagccggcggggtgatgaccgcgcttattaaacggaatagcacaatccctaccaagcaaacgcagattttcacaacctattctgacaaccagcccggagttctgatccaggtgtacgagggcgaaagagccatgaccaaggataataacctcctggggcgctttgagcttagcggaatcccgcctgctccccggggcgtccctcaaattgaggtgacattcgacatcgatgccaatgggattctgaacgttaccgctacagacaaatccacgggcaaggccaataaaatcaccattacaaacgataagggaagactcagcaaagaagagatcgaacgcatggtgcaggaggcggaaaagtataaggccgaggacgaggtccagcgggaaagagtgtctgctaaaaatgccctggagtcctacgcttttaacatgaagtccgccgtggaagatgagggcctgaaagggaagatttctgaggccgacaaaaagaaggttctcgataaatgtcaggaagtcatcagctggctggacgctaatacccttgcggagaaggacgagttcgaacacaaacgcaaggaactggagcaagtgtgcaaccccatcatttccggactctatcagggcgccgggggacccggccctgggggctttggagctcagggcccgaaagggggatctggcagcgggcccacaatcgaggaagtggattga

SEQ ID NO: 3251 - RNA, 1926 nt, synthetic construct; identical to SEQ ID NO: 3250
  misc_feature 1..1926: note = AAA63227 variant
  source 1..1926: mol_type = other RNA

SEQ ID NO: 3252 - RNA, 627 nt, synthetic construct
  misc_feature 1..627: note = AAI21098 variant
  source 1..627: mol_type = other RNA
atggccctgggccagaaactcttcatcaccatgagcagaggggctggacggctgcaaggcacactttgggccctggtgtttctcgggattctggtcggaatggttgtgccctcccctgcgggcacgcgcgctaacaatacccttctggactctagagggtggggaacactcctgagccggtcccgcgccggcctggccggcgagatcgctggggtgaactgggaatctggatacctcgtcggcattaagagacagcggcgcctgtattgcaatgtggggatcggattccaccttcaggttctgccggatggcagaattagcgggacccatgaggaaaacccctactccctcctggagatctctacagtggaacggggagtcgtgagcctttttggcgttcgctccgccctgttcgtggctatgaatagcaagggcagactctatgccaccccttcttttcaggaggagtgtaaattccgggaaacactgctgcccaacaattacaacgcgtatgagtccgacctctaccaagggacctatatcgccctgagcaagtacggacgcgtcaaaagaggctctaaggtgtcccctattatgacggtgacccactttcttccccggatctga

SEQ ID NO: 3253 - RNA, 1569 nt, synthetic construct
  misc_feature 1..1569: note = BAA74724 variant
  source 1..1569: mol_type = other RNA
atgcccagagcccctcggtgccgcgctgtgagaagcctgctccggtcccactaccgcgaggtcctgccgcttgccaccttcgttagacggctgggcccccaggggtggcgcctcgtgcaaagaggagaccctgcggcttttcgggccctggtggcccagtgtcttgtctgcgtgccctgggatgctcgccctccccctgccgctccgtctttcagacaggttagctgtctgaaggaactcgtggcccgggtcctgcagcgcctgtgcgagagaggcgcgaaaaacgtgctcgcctttgggttcgctctgcttgacggagcccggggcgggccccctgaagcctttacaacgtccgttcgctcttatctgcccaataccgtgacagatgccctcagaggaagcggcgcgtggggcctgcttctgcggagagtcggggacgatgtgctcgtgcatctgctggcccgctgtgctctcttcgtcctggttgccccttcctgcgcttaccaagtgtgtggacccccgctttatcagctgggcgccgccacccaggctcggcctccccctcacgcgtctgggcccagacgccggctcggatgcgagagagcctggaaccatagcgtgcgcgaagctggcgtccccctggggcttcctgccccgggagcccggagacgcggcggctccgctagccggtctctgcccctccctaagagaccccgccggggcgccgcgcctgagcccgagagaacaccggtgggacagggctcctgggctcaccctgggcggacccgcggacccagcgacagaggcttttgtgttgtgtctcctgcccggcccgccgaagaggctacatccctggaaggggccctgagcggaaccagacattctcacccttccgtcggccgccaacaccatgctgggcccccgagcacgtcccggcctcccagaccctgggataccccttgcccgcccgtgtacgccgagacaaaacacttcctctattctagcggggacaaggagcagctgcgcccttcctttcttctgagctctctcagacccatcctgaccggagcgcggcgccttgttgaaacaattttcctgggctccagccctgggtgtcagggactccccgccggctgccctgcttgcccctctgccaccgggaaatgtggcccgtgcttttggagctgtctgggaacgacaagatccgctcctaccggctgctctagccggcgcacagccagatgtgagctgcggagcccccagcaacctgtgtccgtccccgggcgctctccgagagcgctctggcggcctccccgcagacggacccagacccctgtggcctggtgctcctgtagcgcttctacagctcccctggctggagtcagacttcgcgccggcctgcccgcccctgctggggcgccgcggcccctcggactgcaggcccaaagacgccggttcctgagaaatacgaagaagtttatctcccttggcaaacatgctaagctcagcctgcaggaactgacctggaaaatgtccgtgcgcgattgcgcctggctccggagatctcct

SEQ ID NO: 3254 - RNA, 1680 nt, synthetic construct
  misc_feature 1..1680: note = BAA23606 variant
  source 1..1680: mol_type = other RNA
atgagactgcaccggctccgcgccagactgagcgctgtggcctgcggccttctgctcctgcttgtccgggggcagggacaagactccgcgtctcccatccgcaccacacatacgggccaggttctggggagcctcgtgcacgtgaagggagctaacgccggcgtccagaccttcctggggattccttttgccaaaccgcccctgggacctctcagattcgctccccctgagccccctgaatcctggtctggcgtgcgggatggcacaacccatccggccatgtgtctgcaggaccttacagctgttgagagcgaatttctgtcccaattcaatatgacctttccctctgatagcatgtccgaggactgcctctacctgagcatctatacccctgcccactctcatgaagggtccaaccttcccgtgatggtctggattcacggaggcgcgctggtgttcgggatggccagcctctacgatggatctatgctggctgccctggagaatgttgtggtcgtgatcattcagtatcgcctcggcgtgctggggtttttctccacaggagacaagcacgctacgggcaactggggctaccttgatcaggtcgccgcgctgagatgggttcagcaaaatatcgcccattttgggggaaaccctgaccgggtgaccatcttcggcgagagcgctgggggaacatctgtgtccagcctcgtcgtgtcccccatttctcagggcctgtttcacggggccatcatggaaagcggagttgcccttctgccgggcctcattgcttccagcgccgatgtgatctctaccgtcgtggctaatctgtccgcgtgtgaccaggttgatagcgaggccctggtgggctgcctccgcgggaaatctaaggaagagattctggctatcaacaaacctttcaagatgattcccggagtcgtggacggcgtctttcttcctagacatccccaggagctgctcgccagcgccgatttccaacccgtgccttccatcgttggggtgaataacaatgaatttggatggctgatcccgaaggtcatgcggatttatgacacacagaaagagatggaccgcgaggcttctcaggccgcgcttcaaaagatgctgaccctcctgatgctgccccctacgtttggcgatctcctgagagaggaatacatcggggacaacggcgatccccagacacttcaggctcagttccaagagatgatggccgacagcatgtttgtgattcctgccctgcaggttgctcacttccagtgttcccgggcccccgtgtatttttacgagttccagcaccaaccgagctggctcaaaaatatccgccctccccatatgaaggctgatcacggagacgaactgccttttgtcttcagatctttcttcggcgggaactacattaaatttaccgaggaagaggaacagctgtcccggaagatgatgaagtattgggccaatttcgcgagaaacggaaaccccaatggcgaggggcttcctcattggcccctctttgatcaggaggaacagtacctgcaactgaacctccagccggccgtgggacgcgctctgaaagcccaccggcttcagttctggaagaaagctctgcctcagaagatccaagagctcgaagaacccgaagagagacatacagagctgtga

SEQ ID NO: 3255 - RNA, 1740 nt, synthetic construct
  misc_feature 1..1740: note = AAH65269 variant
  source 1..1740: mol_type = other RNA
atgaacaagctgtacatcggcaatctcagcgagaacgccgctccctccgacctggaatctattttcaaagatgccaagatccctgtgagcgggccgtttcttgtcaaaaccggatatgcgttcgttgactgccccgatgagtcctgggctctgaaggccattgaagccctctctggcaaaatcgagctgcacgggaagcctattgaagtggagcatagcgtgcccaagagacagcggatccgcaaacttcaaatcagaaatattcctccccaccttcagtgggaggtcctcgactccctgctggtgcagtacggagttgtggaatcttgtgagcaggtcaacacagatagcgaaacggctgtggttaatgtgacctattccagcaaggaccaagcccggcaggctctcgataaactgaacggctttcagcttgagaatttcacactgaaggtcgcctacatccctgacgagatggcggcccagcaaaacccgctccagcagccccgcgggagacggggactgggccagcgcgggtcttccagacaaggcagccctggatctgtgtccaaacagaagccctgcgatcttcctctgcggctcctggtgcccacccagtttgtcggcgctattatcgggaaggaaggagccacaattcgcaatatcaccaaacaaacacagagcaagattgacgttcatagaaaagagaacgctggcgccgcggaaaagtctatcaccatcctgtccacgccggaggggaccagcgccgcttgtaaatccattctcgaaatcatgcacaaggaggcccaggatattaaattcacagaggaaatccctctgaagattcttgctcataataactttgtgggacggctgatcggcaaggagggccgcaatctcaaaaagatcgaacaggacaccgatacaaaaattaccatctctcccctgcaagagcttacgctgtataaccctgaaagaacaattaccgtgaaggggaatgtcgagacatgcgccaaagccgaggaagagatcatgaagaagattcgggaaagctacgagaacgacatcgcttccatgaacctccaggcgcacctgatccccggactgaatctcaacgccctgggcctttttccccctaccagcgggatgccgccccctacctctggacccccttccgctatgacacccccgtatcctcagttcgaacagagcgagacggagaccgtgcacctgttcattcccgccctctctgttggcgccatcattgggaaacaaggacagcatatcaagcagctgagccgctttgctggcgcctccattaaaatcgcgcctgctgaagcccccgacgccaaggtgagaatggtcattatcacaggccctcccgaggctcagttcaaagcccaagggcggatctacggaaagattaaggaagagaattttgtgtctccgaaagaggaagttaagctggaggctcacatcagagtgcctagcttcgccgcgggccgcgtcattgggaaaggaggcaagaccgtgaacgaactgcagaatctctccagcgccgaggtcgtggttccccgggatcagacacccgacgaaaacgatcaggtggtcgtgaaaatcaccgggcatttctacgcttgtcaagttgcccagagaaagattcaggagatcctgacgcaagtgaagcagcaccagcagcaaaaagctctgcagtctggccctccgcagtcccgccggaagtga

SEQ ID NO: 3256 - RNA, 537 nt, synthetic construct
  misc_feature 1..537: note = AAA63207 variant
  source 1..537: mol_type = other RNA
atgcacagctccgccctgctctgctgtctggtgcttctgaccggcgtcagagcttctcccgggcagggaacacaaagcgagaactcctgcacgcatttccctggcaatctcccgaacatgctgcgggaccttcgcgatgccttttctagagttaagaccttctttcagatgaaagaccagctggataatctcctgctgaaggaaagcctcctggaggacttcaaagggtaccttggatgtcaggcgctgtccgaaatgatccaattttatctcgaggaagtgatgccccaggctgagaaccaggatcctgacattaaggcccacgtcaattctctgggcgagaaccttaaaacactgcggctccgcctgagacggtgccatcgcttcctgccctgtgaaaataagagcaaggccgtggaacaggtgaaaaacgcttttaataagctccaagagaaagggatctacaaggccatgtccgagttcgatatttttatcaactatattgaggcttacatgaccatgaaaatcagaaattga

SEQ ID NO: 3257 - RNA, 1143 nt, synthetic construct
  misc_feature 1..1143: note = AAB17170 variant
  source 1..1143: mol_type = other RNA
atggccttcgtgtgcctggctatcggctgtctctacacctttctgattagcacaacgttcgggtgcacctcctctagcgacacagagatcaaggtcaatccccctcaggattttgaaattgttgacccgggatatcttggctacctgtatctccaatggcagccccctctgtcccttgatcacttcaaagagtgtaccgtggaatacgagctgaagtatagaaacatcgggtctgaaacatggaaaaccattatcacaaagaacctccattacaaagacggatttgatctgaataagggcatcgaggccaagattcacaccctgctcccctggcagtgcacgaacgggagcgaggtgcagtcctcttgggcggaaaccacatattggatcagccctcaaggcattcccgagaccaaagtccaggacatggattgtgtgtactacaattggcagtatctgctttgctcctggaagcctggaatcggcgttctgctcgacacaaactacaatctgttctattggtacgaagggcttgatcatgctctgcagtgtgtggactatattaaagccgatggacaaaacatcggctgccggtttccgtacctcgaggccagcgactataaggatttctacatttgtgtcaatgggtcttccgagaacaaacccatccgcagctcttactttaccttccagctgcagaatatcgtgaagcctctgccccctgtttatctcacgtttacaagagaatccagctgcgagattaagctgaaatggtctatcccccttggaccgattcctgctcggtgtttcgactacgaaatcgagattcgcgaagacgataccacactggtgaccgccaccgtcgagaacgagacatatacgctcaagaccacaaatgaaaccagacagctgtgctttgtggtgcggtccaaagtcaacatctactgcagcgacgatggcatctggtccgagtggtctgacaagcaatgttgggaaggggaggatcttagcaaaaagacactgctccgcttctggctgcccttcggatttattctgatcctcgttattttcgtgaccggcctgcttctgagaaaacctaatacgtatcccaagatgatccccgaatttttctgcgacacatga

SEQ ID NO: 3258 - RNA, 819 nt, synthetic construct
  misc_feature 1..819: note = AAA67527 variant
  source 1..819: mol_type = other RNA
atggacagctacctgctcatgtggggcctgcttaccttcatcatggtgcccgggtgccaggccgagctgtgtgatgacgatcctccggaaattccccacgctacatttaaggccatggcgtataaagagggaacgatgctcaactgcgaatgtaagagaggcttccggcgcatcaaatccgggtctctgtacatgctttgcaccggaaatagctcccattctagctgggacaaccaatgtcagtgcacatcctctgctaccagaaatacaaccaagcaggtcacacctcagcccgaggaacaaaaagagcggaagaccacggagatgcagagccctatgcagcccgttgatcaggcctccctgcctggccactgtcgcgaaccgcccccttgggagaacgaagccaccgagagaatttatcattttgtggtggggcaaatggtctactatcagtgcgtgcagggataccgggctctccaccgcggccccgccgagagcgtttgtaagatgacacatggcaaaaccagatggacacagcctcaactgatctgcaccggggaaatggagacgtctcagttccccggagaagagaagccgcaggcttcccctgaaggccggcccgagagcgagacatcttgtctggtgaccacaaccgactttcaaattcagaccgaaatggccgcgacaatggagacgtccatcttcaccacagaatatcaggtcgccgtggctgggtgcgtttttctcctgatcagcgtgcttctgctctctggactgacctggcagcgcagacaacggaaatcccgcagaacaatttga

SEQ ID NO: 3259 - RNA, 1656 nt, synthetic construct
  misc_feature 1..1656: note = AAA59143 variant
  source 1..1656: mol_type = other RNA
atggccgctcccgccctgagctggagactccctctgcttatcctgctcctgccgcttgcgacctcctgggcttctgccgccgtgaacggcacaagccagttcacgtgcttttacaattcccgggctaacatttcttgtgtctggagccaagacggggccctgcaggatacctcctgccaggttcacgcttggcccgaccgcagacggtggaatcagacatgtgagctcctgcctgtgtctcaagccagctgggcgtgcaacctgatcctcggagcccccgattcccagaagctgaccacagtggacattgtcacccttcgcgtgctgtgtagagaaggcgttcggtggcgcgtgatggctatccaggatttcaaaccttttgagaatctcagactgatggcccccattagccttcaggtcgtgcatgttgaaacacaccggtgcaacatctcttgggagatctcccaagctagccattatttcgaacgccacctggagtttgaggccagaaccctctctcctgggcatacgtgggaagaggcgccgctgctgaccctcaagcagaaacaggaatggatttgtctggagacacttacccccgacacacagtacgagttccaagtgcgggtcaagcctctgcagggagaatttaccacgtggtccccctggagccagcctctcgccttccgcacaaaacccgctgccctgggcaaggataccatcccgtggcttgggcatctgctcgtgggactgtctggcgcttttggcttcattatcctggtgtatctcctgattaattgcagaaacacagggccttggcttaagaaagtcctgaagtgtaatacccccgacccttccaaatttttcagccaactctcctctgagcacggaggcgatgttcagaagtggctgagctccccctttccctcctcttccttcagccctgggggacttgccccggaaatctctcccctggaggtgctcgaacgggacaaagtgacccagctgctgctccagcaagataaggtccctgagcccgccagcctgtcctctaaccacagccttacatcctgcttcacgaatcagggctactttttctttcatctgcctgacgctctcgagattgaagcgtgtcaggtgtatttcacctacgatccctatagcgaggaagacccggacgagggggttgccggagctcctacaggctctagcccccagcctctgcaacccctgagcggcgaagatgacgcctactgcacctttccttctcgcgatgaccttctcctgttctcccccagcctgctcgggggaccgtcccctccctctacagcccccggcgggagcggagctggcgaggagagaatgcctccgtccctgcaggaacgggtgcccagagattgggaccctcagccccttgggcctcccacccctggagtccccgatctggtggactttcagccgcctcccgagctcgttctgcgcgaagccggcgaggaagtgcctgatgcgggcccccgggagggggtctctttcccgtggagcagacctcccggacaaggcgagtttcgcgctctgaacgcccggcttcctctcaatacggacgcctacctgtccctgcaggaactccaggggcaggatcccacacacctggtgtga

SEQ ID NO: 3260 - RNA, 1110 nt, synthetic construct
  misc_feature 1..1110: note = AAA59145 variant
  source 1..1110: mol_type = other RNA
atgctgaagcccagcctccctttcacctccctgctttttctgcagctcccgctgcttggcgtggggctgaacacaacgatcctcacccccaatggaaacgaggacacaaccgccgatttctttctgacaaccatgcctacagactctctgagcgtctccaccctccccctgcctgaagttcaatgcttcgtgtttaatgtggagtacatgaactgtacgtggaactctagctccgaaccccagcctaccaatcttacactgcactattggtacaaaaattctgataacgacaaggtccagaaatgcagccattatctcttctccgaggaaatcaccagcggctgtcagctgcaaaagaaagagatccacctttaccagacatttgtggttcagctgcaggatccgagagagccccggcgccaagccacccagatgctcaagctgcagaatctggtgattccttgggcccccgaaaacctcacgctgcataaactttctgagtcccagctggaactcaattggaacaatagattcctgaaccactgccttgagcatctggtccaatatcggacagactgggatcacagctggaccgagcagtctgtggactaccgccacaagttttccctccctagcgttgatgggcagaagagatatacattccgggtgcgctctagatttaatcccctgtgtggatccgcgcaacattggagcgaatggtcccacccgatccattggggctctaacaccagcaaagagaaccctttcctgtttgctctcgaagccgtcgtgatttccgtggggagcatgggactgatcatctctcttctgtgcgtctacttctggctcgagcggaccatgccccgcattcctacactgaagaatcttgaagacctggttacggagtaccacggcaacttctccgcctggagcggcgtgtctaaagggctcgctgagagcctgcagcccgattattccgaaagactgtgtctcgtgtctgagattccccctaagggaggcgccctgggggaaggaccgggcgctagcccctgcaatcagcactccccttactgggctcccccttgttatacccttaagcccgagacatga

SEQ ID NO: 3261 - RNA, 405 nt, synthetic construct
  misc_feature 1..405: note = AAA74469 variant
  source 1..405: mol_type = other RNA
atgagaatgctgctccacctgagccttctggccctcggcgctgcctacgtgtatgcgatccccaccgagattcctacatccgctctggtcaaggaaacgcttgccctgctctctacccatcggacactgctgatcgccaacgagaccctccgcattccggttcccgtgcacaaaaatcatcagctgtgcacagaagagatcttccaagggattggaacccttgaaagccagacagtgcagggcgggaccgtcgagagactgtttaagaacctctccctgatcaaaaagtacatcgacggacagaaaaagaagtgtggcgaggaacggcgcagagtgaatcaattccttgattatctgcaggagtttctcggggttatgaacacggaatggattatcgagtcttga

SEQ ID NO: 3262 - RNA, 555 nt, synthetic construct
  misc_feature 1..555: note = AAH06487 variant
  source 1..555: mol_type = other RNA
atggtgagaaagctgaaattccacgagcagaagctcctgaaacaagtcgactttcttaactgggaagttaccgatcataatctgcacgagctccgggtgctgcgcagataccggcttcagcgcagagaagactatacacggtacaaccagctgagccgcgccgtgagagagctcgctcggcgcctgagagatctgcccgaacgggaccagttccgcgtcagagcctccgcggctctcctggataaactttatgccctgggcctcgtgcctacgcgggggtctctggagctttgcgactttgttaccgccagctccttctgtcgcagacggctgccgacagtgctcctgaagctgagaatggctcaacatctccaggccgctgtcgcctttgtggagcagggacacgttcgcgtgggccccgatgtcgtgaccgaccctgcgttcctggtgacacggtctatggaagattttgtcacctgggttgacagctccaagatcaagagacatgtgcttgagtacaatgaggaacgcgatgacttcgatctggaggcctga

SEQ ID NO: 3263 - RNA, 3150 nt, synthetic construct
  misc_feature 1..3150: note = AAH08786 variant
  source 1..3150: mol_type = other RNA
atgggcagcagaacccccgagtctcccctgcacgccgtgcagctccggtgggggccgcgcagacggccccctctgcttcccctgctcctgcttctgctccctccccctccgcgcgtcggaggcttcaacctggacgctgaagcccccgcggttctgtccgggcctcccggcagctttttcggcttttccgtggagttctacagacctgggacagatggagtgtctgtcctcgtgggcgctcccaaggccaatacgagccaaccgggcgttctgcaagggggagccgtgtatctttgcccttggggcgcttcccccacccagtgtacacctatcgaatttgactctaaagggagccggctgctcgagtccagcctgtcttccagcgaaggagaggagcccgtcgaatacaagtctcttcagtggttcggcgccaccgtgcgcgctcatgggtccagcattctggcctgcgcgcccctctattcttggagaacagagaaagaacctctgtccgatccggttggaacctgttacctgagcacagacaactttacccggatcctcgagtatgccccctgccgctccgatttctcttgggctgccggccagggctactgtcaagggggatttagcgctgagttcacgaagaccggcagagtggtccttgggggacctggctcctatttttggcaggggcagattctgagcgccacacaggaacagatcgcggagtcttactaccccgaatatctgattaatctcgtgcagggacagctgcaaacccggcaggcctccagcatctacgacgattcttatcttggctacagcgtggctgtcggcgagttctccggggacgatacagaagactttgttgccggagtgcctaaaggcaacctgacctatgggtacgtgacgatcctcaatggatctgatattcgcagcctgtataacttctccggcgagcagatggctagctacttcgggtacgccgtcgccgctacagacgtgaatggcgatggactggacgacctcctggttggcgcgccccttctgatggatagaaccccggacgggcggcctcaagaggtgggacgcgtctatgtgtacctccagcaccccgccggcatcgaacctacacccaccctgacccttacagggcatgatgagtttggaagattcggatcttccctgacgcctctcggggacctggatcaggacggctataacgatgttgctattggagccccctttggcggggaaacccagcaaggagtggtcttcgtgtttccgggcgggcctggaggcctggggagcaagccctctcaggtcctccagcccctgtgggccgcttcccacacacctgacttctttggcagcgcccttcggggaggcagagatctggacgggaatggatacccggatctcatcgtgggctccttcggggttgacaaggcggtggtctatcgcggacggcccattgtgtctgctagcgcctccctgaccatctttcctgccatgttcaaccccgaggaaagatcttgcagcctggagggcaatcctgttgcttgtattaacctttccttttgcctcaatgccagcgggaaacatgtggctgactctatcggcttcacagtcgagctgcagctggattggcaaaagcagaaaggaggcgtgcgccgggccctctttctggcgtccagacaggccacccttacgcagacactgctcatccaaaacggggctcgcgaagactgtcgggagatgaagatttacctgagaaatgaaagcgagttccgcgataaactgtctcccatccacattgcccttaacttctccctcgaccctcaggctcccgtggatagccacggactgcggccggccctgcattatcagtctaagagcagaatcgaagacaaggcgcagattctcctggattgcggcgaggacaacatctgtgttcctgatcttcaactggaggtctttggggaacagaatcacgtgtacctcggagacaaaaacgccctgaatctgaccttccatgctcagaacgtgggcgagggcggggcctacgaagctgagcttcgcgtcaccgctccccctgaggccgaatattccggactcgtgcggcaccccggcaattttagctctctgtcctgcgattacttcgccgttaaccaaagcagactgctcgtgtgcgacctggggaatccgatgaaggcgggagcctccctttggggcgggctgcggtttacagtccctcacctccgcgataccaaaaagacaatccagttcgactttcagattctgtctaaaaacctgaataacagccagtccgacgtggtttctttcagacttagcgtggaggctcaagcccaggtcacgctcaatggagtgtccaagcccgaagccgttctgtttcctgtgtctgattggcatccccgggaccagccccagaaagaggaagatctgggccctgctgtccaccatgtgtatgagctcatcaaccaaggcccgagctccattagccagggggtgctggagctttcttgtccccaggccctggaaggacagcaactcctgtacgtcaccagagttacaggcctgaattgcaccacaaaccaccctatcaatcccaaggggcttgagctggaccctgaaggatccctccatcaccagcagaagcgcgaggcgcccagccggtcttccgctagctctggccctcaaattctgaaatgtccggaagccgagtgcttcagactccgctgtgagctggggccccttcaccagcaggaatcccagagcctgcaactccattttagagtgtgggccaagaccttcctgcagcgggagcaccagcctttttccctgcagtgcgaagctgtgtataaagcccttaagatgccctaccgcatcctgcctagacaactcccccagaaagagcggcaggtcgcgacggctgtgcagtggaccaaggccgaaggaagctatggcgttccgctgtggatcattatcctcgccattctgttcggccttctgctcctggggctgcttatctacattctgtacaagctcggattctttaaacgctctctgccttatggcacagctatggagaaggcccaactcaaacctcccgctaccagcgatgcctga

SEQ ID NO: 3264 - RNA, 2397 nt, synthetic construct
  misc_feature 1..2397: note = AAH20057 variant
  source 1..2397: mol_type = other RNA
atgaacctgcagcccatcttctggattggcctcatcagctccgtgtgctgtgtctttgcccaaaccgacgagaatagatgcctgaaggctaacgccaaatcttgtggggaatgcattcaggcgggacctaattgtggctggtgcacaaacagcacgttccttcaggaggggatgccgacctccgctcggtgtgatgacctggaagccctcaagaaaaagggatgtccccctgatgacatcgagaatccccgcggctctaaagatattaagaagaacaaaaatgttacaaacagaagcaaggggaccgccgaaaaactgaagcctgaggacatcacacagatccaaccccagcagcttgtgctgcggctccgctccggagagcctcagacctttacactgaaattcaagagagctgaagattacccgattgacctgtattacctcatggatctgtcttatagcatgaaggacgatcttgagaatgtgaaatccctgggcaccgacctcatgaacgaaatgcggcgcatcacgagcgattttagaattggcttcgggtcttttgtcgagaagaccgtgatgccctacatctccacaacccctgccaaactgcggaatccctgcacaagcgagcaaaactgcacctctcctttctcctataagaatgttcttagcctgacgaacaaaggagaagtgtttaatgagctcgtcggcaagcagcgcatttctgggaacctggactcccccgaaggaggcttcgacgctatcatgcaagtggccgtttgtgggagcctgattggatggagaaacgtgacacggctcctggtcttttccaccgatgcgggcttccactttgccggcgacgggaaacttggaggcatcgtgctgccgaatgatgggcagtgccatctcgagaacaatatgtacacaatgtctcactattacgactaccctagcatcgctcatctggtgcagaaactttccgaaaacaatattcagaccatcttcgccgtcaccgaggagttccagcccgtttataaggaactgaagaacctcattcctaagagcgctgtgggaacactgtctgccaattccagcaacgtgatccaactgattatcgatgcgtacaattctctcagctccgaggtcatcctggaaaacggcaaactttctgagggggtgacgattagctataagtcctactgcaaaaatggagttaacggcaccggcgaaaatgggcgcaagtgtagcaacatctctattggagacgaggtgcagtttgagatctccattacaagcaataagtgccccaaaaaggattctgactccttcaaaatcagacccctgggctttaccgaagaggtcgaagtgatcctccagtatatttgtgagtgcgaatgtcagagcgaggggatccctgagtccccgaagtgccacgaaggaaacggcacattcgagtgtggggcctgccggtgtaacgaaggccgcgttggaagacattgcgagtgttctaccgatgaggtgaatagcgaagacatggatgcttactgccggaaagagaactcctctgaaatttgcagcaataacggcgagtgtgtctgcgggcaatgtgtgtgcagaaagcgcgacaatacgaacgaaatctattccggaaagttttgtgagtgcgacaatttcaactgtgatcggagcaatggcctgatttgcgggggaaacggcgtctgtaaatgcagagtgtgtgagtgcaatcccaactacacagggtctgcctgcgactgttcccttgatacctctacctgcgaagctagcaatggccagatctgtaacggacgcggcatttgcgagtgtggggtttgcaagtgtacagaccctaaatttcagggacagacctgcgaaatgtgtcaaacatgcctgggcgtgtgtgccgagcacaaggaatgcgtccagtgccgggccttcaataaaggggagaagaaggatacgtgtacccaggagtgctcctactttaacatcacaaaagtggaaagcagagacaagctcccccagcctgttcaacccgatccggtgtctcactgtaaagagaaggacgtcgatgactgctggttctattttacctacagcgtgaacggaaataacgaagtgatggttcatgtcgtggagaatcctgaatgtcccacaggccctgatatcattcccatcgtggctggggtcgtggcgggcattgttctgatcggactggccctcctgcttatttggaaactgctcatgatcatccacgaccgccgggagttcgctaagtttgagaaagaaaagatgaacgccaagtgggataccggcgagaatcctatttataaatccgccgtgacgaccgtcgtgaaccccaagtacgaagggaaatga

SEQ ID NO: 3265 - RNA, 2367 nt, synthetic construct
  misc_feature 1..2367: note = AAA36122 variant
  source 1..2367: mol_type = other RNA
atgggcatcgagctgctctgcctgttctttcttttcctggggagaaacgaccacgtgcagggaggctgtgccctcgggggagctgaaacctgcgaggattgtctgcttattggcccccaatgcgcctggtgtgcgcaggaaaattttacacatcctagcggggtcggagagcggtgcgacacgccggctaacctgctcgccaagggctgtcagctgaatttcatcgaaaaccccgtttcccaggtggagattctgaaaaataagcctctctctgtgggccgccaaaagaacagctccgatatcgtccagattgctccccagtctctgatccttaagctgagacctgggggagcccagaccctccaagtgcacgttcggcagacagaggactaccccgtggatctgtattaccttatggacctgagcgcctccatggatgacgatctcaataccatcaaagaactgggctctcgcctgagcaaggagatgtccaagctcacaagcaactttagactggggttcggatcttttgtcgaaaaacctgtgtccccgttcgttaagaccacacccgaggagattgctaatccttgcagctctatcccctatttttgtcttcctaccttcggctttaaacatattctgcccctcacgaacgacgccgaacggttcaatgagatcgtgaagaaccagaaaatttccgcgaatatcgataccccggaagggggatttgacgccattatgcaggctgccgtctgcaaggagaagatcggctggcgcaacgatagcctgcaccttctggtgttcgtgtctgacgctgactcccatttcggcatggatagcaaactcgccgggatcgtcattcctaatgacggactgtgtcacctggattccaagaacgaatactctatgagcacagttctcgagtatcccaccatcggccaactgattgacaaacttgtgcagaacaatgtgctgctcatctttgcggtcacacaggagcaagtgcacctgtacgaaaactatgccaaacttattcctggggctaccgttggactgctccagaaagattccggcaatatcctgcagctgatcattagcgcctacgaggaactcagatctgaggtggaactggaggtccttggggacacggagggactgaacctctccttcacagctatctgcaataacggcaccctgtttcagcatcaaaagaaatgcagccacatgaaggtgggcgatacagcctctttcagcgttaccgtgaatattccccattgtgaacggcgctccagacacatcattatcaagcccgtcgggctgggagacgcccttgagctcctggtgtctcctgaatgcaactgtgattgccagaaagaggtcgaagtgaatagctccaagtgtcaccatggcaacgggagctttcagtgcggagtttgtgcttgccacccgggccatatggggccccggtgtgagtgcggcgaggacatgctgtctaccgattcctgtaaagaagcgcctgaccaccccagctgctctggacgcggcgactgctactgtgggcagtgcatctgtcatctctccccttatggaaatatttacggcccctattgccaatgtgataacttcagctgcgtgagacacaaggggctgctttgtggaggcaatggggactgcgattgtggcgagtgcgtctgtcggtccggatggacaggcgaatactgcaactgcacgacctctacagacagctgtgtgtccgaggatggggttctgtgctctggacgcggcgactgtgtgtgcgggaaatgtgtctgcaccaatccgggagccagcggccctacatgtgagagatgccccacctgtggggatccttgcaactccaagcggagctgtatcgaatgccacctctctgctgccggccaggccagagaggaatgcgtggacaagtgtaaactggctggagccacgatttccgaggaagaggattttagcaaggacggctctgtgtcctgcagcctgcagggggagaacgaatgtcttatcacattcctcattaccaccgataatgagggaaaaacaatcattcattctatcaacgaaaaggactgccccaaacctcccaatatcccgatgattatgctgggcgttagcctggcgatcctcctgattggggtcgtgcttctgtgtatctggaagctcctggtgtcctttcacgatcgcaaggaggtcgctaaattcgaagccgagcggagcaaggccaaatggcagaccggaacaaaccctctgtatagaggctctacgtccacctttaagaatgtgacatacaaacatcgcgagaagcaaaaggttgaccttagcaccgactgctga

SEQ ID NO: 3266 - RNA, 786 nt, synthetic construct
  misc_feature 1..786: note = EAW71937 variant
  source 1..786: mol_type = other RNA
atgtgggacctggtgctcagcatcgccctgtccgtcggctgcaccggggctgttccccttattcagtctagaatcgtgggaggctgggagtgtgaaaagcacagccaaccttggcaagtggccgtctactcccatgggtgggcgcactgcggaggcgtgctggttcatccgcagtgggtgctcacagctgcccactgtctgaaaaagaactctcaggtctggcttgggcggcataatctgttcgagcccgaagatacgggacagcgcgtgcctgttagccactcctttccccaccctctctataacatgtctctgctgaaacatcagagcctcagacccgacgaggattccagccacgacctgatgcttctgcggctctctgaacctgccaagattaccgatgtggtcaaagtgctgggccttccgacacaggagcccgctctgggcaccacatgctacgcctccgggtggggaagcatcgagcctgaagagttcctccgccccagatctctgcagtgtgtgtccctgcatctcctgagcaatgacatgtgcgctcgggcctattctgaaaaggtcaccgagtttatgctttgtgcgggcctgtggacagggggaaaggatacctgcggcggggactccggaggccctctcgtttgtaacggcgtgctgcaagggattacgagctggggacccgagccgtgcgcccttcctgaaaaacccgctgtgtacaccaaggtcgtgcactatcgcaaatggatcaaggatacaatcgccgctaatccttga

SEQ ID NO: 3267 - RNA, 672 nt, synthetic construct
  misc_feature 1..672: note = EAW71938 variant
  source 1..672: mol_type = other RNA
atgtgggacctggtgctcagcatcgccctgtccgtcggctgcaccggggctgttccccttattcagtctagaatcgtgggaggctgggagtgtgaaaagcacagccaaccttggcaagtggccgtctactcccatgggtgggcgcactgcggaggcgtgctggttcatccgcagtgggtgctcacagctgcccactgtctgaaaaagaactctcaggtctggcttgggcggcataatctgttcgagcccgaagatacgggacagcgcgtgcctgttagccactcctttccccaccctctctataacatgtctctgctgaaacatcagagcctcagacccgacgaggattccagccacgacctgatgcttctgcggctctctgaacctgccaagattaccgatgtggtcaaagtgctgggccttccgacacaggagcccgctctgggcaccacatgctacgcctccgggtggggaagcatcgagcctgaagagttcctccgccccagatctctgcagtgtgtgtccctgcatctcctgagcaatgacatgtgcgctcgggcctattctgaaaaggtcaccgagtttatgctttgtgcgggcctgtggacagggggaaaggatacctgcggcgtttcccacccttacagccaacacctcgaggggaaaggatga

SEQ ID NO: 3268 - RNA, 189 nt, synthetic construct
  misc_feature 1..189: note = BAF98781 variant
  source 1..189: mol_type = other RNA
atgagcctgctcaagcaccagtccctgagacccgacgaggattctagccatgaccttatgctgctccggctgtccgaacctgccaaaatcaccgatgtggtcaaggttcttggcctgccgacacaagagcccgctctcgggacgacctgctacgcctctggatggggcagcattgaacctgaggaatga

SEQ ID NO: 3269 - RNA, 735 nt, synthetic construct
  misc_feature 1..735: note = BAG62239 variant
  source 1..735: mol_type = other RNA
atgggcaccctgtgggggtgccccggagcccctccggtgggcgctcacagctgtcccctccctaaggaggtctccagaacactggggtctggagaaggcatggccgttagccatcggaacaattccgggatgcttccccctggatctctgctccgcaacagccaggtgtggctgggcagacacaatcttttcgagcccgaagacacgggccggcgcgtgcctgtctcccattcttttccgcaccccctgtacaacatgagcctcctgaaacatcaatccctgagacctgatgaggacagctctcacgatctcatgctgcttcggctgtccgaacccgcgaagatcaccgacgtggttaaagtgctcgggctgcctacacaggagcccgctcttggaaccacatgctatgccagcggctgggggtctattgagccggaagagttcctgcgccctagatccctccagtgtgtcagcctgcatctgctctctaatgatatgtgcgcccgggcttactccgaaaaggtgaccgagtttatgctgtgtgccggactttggacaggcgggaaagatacctgcggaggcgacagcggcgggcccctggtttgtaacggagtgctccagggcatcacgtcctgggggcctgagccctgcgctctgcccgaaaagcctgccgtctataccaaggtggtgcactaccgcaaatggattaaggacacaatcgcggccaatccgtga

SEQ ID NO: 3270 - RNA, 786 nt, synthetic construct; identical to SEQ ID NO: 3266
  misc_feature 1..786: note = AAA74454 variant
  source 1..786: mol_type = other RNA

SEQ ID NO: 3271 - RNA, 150 nt, synthetic construct
  misc_feature 1..150: note = AAR10469 variant
  source 1..150: mol_type = other RNA
atgtgggacctggtgctcagcatcgccctgtccgtcggctgcaccgggattgctagatctggatgggttggcacaacgtgtcttagcctgaagacccaggcccgggggtccctctctgcgacagctagccacacccgctccacaatctga

SEQ ID NO: 3272 - RNA, 543 nt, synthetic construct
  misc_feature 1..543: note = AAR10468 variant
  source 1..543: mol_type = other RNA
atgtgggacctggtgctcagcatcgccctgtccgtcggctgcaccggggctgttccccttattcagtctagaatcgtgggaggctgggagtgtgaaaagcacagccaaccttggcaagtggccgtctactcccatgggtgggcgcactgcggaggcgtgctggttcatccgcagtgggtgctcacagctgcccactgtctgaaaaagaactctcaggtctggcttgggcggcataatctgttcgagcccgaagatacgggacagcgcgtgcctgttagccactcctttccccaccctctctataacatgtctctgctgaaacatcagagcctcagacccgacgaggattccagccacgacctgatgcttctgcggctctctgaacctgccaagattaccgatgtggtcaaagtgctgggccttccgacacaggagcccgctctgggcaccacatgctacgcctccgggtggggaagcatcgagcctgaagagtgtacccccggccctgacggggtggctggatctcccgatgcctgggtctga

SEQ ID NO: 3273 - RNA, 765 nt, synthetic construct
  misc_feature 1..765: note = EAW71943 variant
  source 1..765: mol_type = other RNA
atggccaccgctggcaacccctgggggtggttcctgggatacctcatcctgggcgtggccgggagccttgtctccggatcttgcagccagattatcaatggcgaggactgttcccctcactctcaaccgtggcaggcggctctggttatggaaaacgagctcttttgcagcggggtgctggtgcatccccagtgggtcctttccgccgcccactgtttccaaaattcttatacaattggactgggcctccatagcctggaagctgatcaggagcctggctcccagatggtggaagccagcctgtctgttagacaccccgagtacaaccggcctctcctggctaatgaccttatgctgatcaagctcgatgagtccgtgagcgaatctgacacgattcgctccatcagcatcgcctctcagtgccccaccgcggggaactcctgtctggtcagcggatggggccttctggccaatgggagaatgcctacagtgctccagtgcgttaacgtgtccgtcgtgtctgaggaagtgtgtagcaaactgtatgatccgctgtaccatccctccatgttttgcgctggaggcgggcaagaccagaaggatagctgtaatggagactctggcggccctctcatttgcaacgggtatctgcagggacttgtctccttcggcaaagccccctgtgggcaggttggagtgcctggcgtgtacaccaatctgtgcaagtttacagagtggatcgagaaaaccgtccaagctagctga

SEQ ID NO: 3274 - RNA, 228 nt, synthetic construct
  misc_feature 1..228: note = AAX30051 variant
  source 1..228: mol_type = other RNA
atggccaccgctggcaacccctgggggtggttcctgggatacctcatcctgggcgtggccgggagccttgtctccggatcttgcagccagattatcaatggcgaggactgttcccctcactctcaaccgtggcaggcggctctggttatggaaaacgagctcttttgcagcggggtgctggtgcatccccagtgggtcctttccgccgcccactgtttccagaagtga

SEQ ID NO: 3275 - RNA, 588 nt, synthetic construct
  misc_feature 1..588: note = AAL14782 variant
  source 1..588: mol_type = other RNA
atggccaccgctggcaacccctgggggtggttcctgggatacctcatcctgggcgtggccgggagccttgtctccggatcttgcagccagattatcaatggcgaggactgttcccctcactctcaaccgtggcaggcggctctggttatggaaaacgagctcttttgcagcggggtgctggtgcatccccagtgggtcctttccgccgcccactgtttccaaaattcttatacaattggactgggcctccatagcctggaagctgatcaggagcctggctcccagatggtggaagccagcctgtctgttagacaccccgagtacaaccggcctctcctggctaatgaccttatgctgatcaagctcgatgagtccgtgagcgaatctgacacgattcgctccatcagcatcgcctctcagtgccccaccgcggggaactcctgtctggtcagcggatggggccttctggccaatggggagctcacaggagtgtgcctgccttcctctagacggagctccgctcagagccgcggcctgacccaatcttccgccagccaggctgaatgtctcccgtgctgttctgcctga

SEQ ID NO: 3276 - RNA, 480 nt, synthetic construct
  misc_feature 1..480: note = AAL14781 variant
  source 1..480: mol_type = other RNA
atggccaccgctggcaacccctgggggtggttcctgggatacctcatcctgggcgtggccgggagccttgtctccggatcttgcagccagattatcaatggcgaggactgttcccctcactctcaaccgtggcaggcggctctggttatggaaaacgagctcttttgcagcggggtgctggtgcatccccagtgggtcctttccgccgcccactgtttccaaaattcttatacaattggactgggcctccatagcctggaagctgatcaggagcctggctcccagatggtggaagccagcctgtctgttagacaccccgagtacaaccggcctctcctggctaatgaccttatgctgatcaagctcgatgagtccgtgagcgaatctgacacgattcgctccatcagcatcgcctctcagtgccccaccgcggggaactcctgtctggtcagcggatggggccttctggccaatgggtga

SEQ ID NO: 3277 - RNA, 765 nt, synthetic construct
  misc_feature 1..765: note = AAD21580 variant
  source 1..765: mol_type = other RNA
atggccaccgctggcaacccctgggggtggttcctgggatacctcatcctgggcgtggccgggagccttgtctccggatcttgcagccagattatcaatggcgaggactgttcccctcactctcaaccgtggcaggcggctctggttatggaaaacgagctcttttgcagcggggtgctggtgcatccccagtgggtcctttccgccgcccactgtttccaaaattcttatacaattggactgggcctccatagcctggaagctgatcaggagcctggctcccagatggtggaagccagcctgtctgttagacaccccgagtacaaccggcctctcctggctaatgaccttatgctgatcaagctcgatgagtccgtgagcgaatctgacacgattcgctccatcagcatcgcctctcagtgccccaccgcggggaactcctgtctggtcagcggatggggccttctggccaatgggagaatgcctacagtgctccagtgcgttaacgtgtccgtcgtgtctgaggaagtgtgtagcaaactgtatgatccgctgtaccatccctccatgttttgcgctggaggcgggcacgaccaaaaggatagctgtaatggagactctggcggccctctcatttgcaacgggtatctgcagggacttgtctccttcggcaaagccccctgtgggcaggttggagtgcctggcgtgtacaccaatctgtgcaagtttacagagtggatcgagaaaaccgtccaggctagctga

SEQ ID NO: 3278 - RNA, 2673 nt, synthetic construct
  misc_feature 1..2673: note = AAC83230 variant
  source 1..2673: mol_type = other RNA
atgagccagggcatcctgtcccctcccgccgggctgctgtctgacgatgacgtggtcgttagcccgatgttcgagtccaccgctgccgatcttggatctgtggtgagaaagaacctgctcagcgactgctccgtcgtgtctacaagcctggaagataaacaacaggttccctccgaggacagcatggaaaaggtgaaagtctaccttcgggtgcgccctctgctcccctctgagctggaaagacaggaggatcagggctgtgttcggattgagaatgtggaaacgctggtcctccaagcgcctaaggactcctttgctctgaaaagcaacgagcgcgggatcggacaggccacccacagattcacattttctcagattttcggccccgaagtggggcaggcctcctttttcaatcttaccgtgaaggagatggtcaaggatgttctgaaaggacaaaactggctcatctatacatacggcgtgaccaatagcggcaagacacataccattcaggggacgatcaaagacggaggcatcctgcctcggtctcttgctctgatttttaactccctccaggggcagctgcacccgacccccgatctgaagcctctcctgagcaatgaggtgatctggcttgactccaaacaaattcgccaggaagagatgaagaagctgtctctcctgaacggaggccttcaggaagaggaactgagcacatccctcaaaagaagcgtctatatcgagtctcggattgggacctccacatccttcgattctggaatcgccggcctgagctccatttctcaatgcaccagctccagccagctggacgagacgtctcatcgctgggctcagcccgacacagcccctctccccgtgccggcgaatatcagattttccatctggattagcttctttgaaatctacaacgagctgctttatgatctgctcgaacctccctctcagcaacggaagcgccagaccctgagactttgtgaggaccagaatggcaacccttacgttaaagatctgaattggattcacgtgcaggacgccgaagaggcttggaagctcctgaaagtcgggcggaagaaccaatccttcgccagcacacatctgaatcagaactcctctcgcagccactccatcttttctattagaatcctccatctgcagggagagggcgatatcgtgcccaaaattagcgaactttccctgtgcgacctcgctgggagcgagcggtgtaaggatcagaagtctggagaaagactgaaagaggccggcaacatcaatacctccctgcacacccttgggcgctgcattgcggccctccggcaaaaccagcagaatagaagcaagcagaacctggttcccttccgcgactctaaactgacacgggtgttccaaggatttttcacgggcagaggccgctcctgtatgatcgtcaatgtgaacccttgcgctagcacctatgatgaaacactccacgtcgccaagttttctgctattgccagccagctggtgcatgccccgcccatgcagcttgggttcccttccctgcacagctttatcaaagagcactctctccaagtttcccccagcctggagaagggagctaaggcggacaccggcctggatgacgacatcgaaaatgaggccgatatttccatgtacgggaaagaagaacttctccaggtggtcgaggctatgaagacactgctgctcaaagaacggcaggagaagctgcagcttgaaatgcatctgagagacgagatctgtaacgaaatggtggagcaaatgcagcagcgcgagcagtggtgctctgaacacctcgatacccaaaaagagctgctggaagagatgtacgaagagaaacttaatattctcaaggagagcctgacgtccttctatcaggaagagatccaggaacgggacgagaaaattgaggagctggaggccctcctgcaggaagccagacaacagtctgttgctcatcagcaaagcggatccgagcttgccctgcgccggtctcagagactcgcggctagcgcctccacacagcagctgcaagaagtgaaggccaaactgcagcagtgtaaggctgagcttaacagcaccaccgaggaactccacaaataccagaagatgctggagcctcccccgtctgccaagccttttacaatcgatgtcgacaaaaagctggaagagggccaaaagaatattcggctcctgcgcaccgaacttcagaagctgggggagtccctccagagcgctgagagagcctgctgccattctacaggcgcgggaaaactgcggcaggccctgacgacctgtgatgacatccttatcaagcaagatcagacactggctgaactccagaacaatatggtgctggtgaaactcgacctgagaaagaaggccgcttgcattgccgagcagtatcacaccgttcttaaactgcaaggccaggtctccgcgaagaaacgcctcgggacaaaccaggaaaatcaacagcccaaccagcagcctcccggaaagaaacctttcctgcggaacctgcttcccagaaccccgacgtgtcaaagctctaccgattgctccccttacgcccgcatcctgagaagccggcgcagccccctcctcaagagcggcccctttgggaagaaatattga

SEQ ID NO: 3279 - RNA, 1113 nt, synthetic construct
  misc_feature 1..1113: note = AAH34621 variant
  source 1..1113: mol_type = other RNA
atggccatcaccctggaggaagctccctggctcggctggctgcttgtgaaggccctgatgagattcgcgtttatggtcgttaacaatctcgtggctattcctagctacatctgctatgtgattatcctgcagccgcttcgggtcctggactccaaacgcttctggtacattgaggggatcatgtataagtggctcctgggaatggtggcctcttggggctggtacgccgggtatacagttatggaatggggagaggatatcaaagctgtgagcaaggacgaagccgtcatgctggtgaaccaccaagctacgggcgatgtttgtaccctcatgatgtgcctgcaggacaaagggcttgtggtcgcccagatgatgtggctgatggatcatatttttaagtacacaaatttcggaatcgtgtccctcgtgcacggcgactttttcattagacagggccggtcttatcgcgatcaacagctgcttctgctcaagaaacatctggagaacaattacagaagccgggaccgcaagtggatcgtcctgtttcccgaagggggattcctcagaaaacggcgcgagacctcccaggcgtttgccaagaaaaacaatctgcctttccttacaaacgttaccctgcccagatctggcgctacaaagattatcctcaatgccctggtggctcagcaaaagaacgggagccctgccggaggcgatgcgaaagagcttgactccaagagcaaagggctgcagtggattatcgataccacgatcgcctaccccaaggctgaacctattgacatccagacctggattctcggatatcggaaaccgacagtgacccacgtccattaccgcatctttcccattaaggatgtgcctctggagacagacgacctgaccacgtggctctatcagagattcgttgagaaagaagatctgctttctcacttttacgagacaggcgcctttcccccttccaagggccacaaggaagctgtgagccgggagatgaccctgtctaatctctggatcttcctgatccaatccttcgccttccttagcgggtatatgtggtacaacattatccagtatttttaccattgtctgttctga

SEQ ID NO: 3280 - RNA, 2178 nt, synthetic construct
  misc_feature 1..2178: note = AAH14924 variant
  source 1..2178: mol_type = other RNA
atggccatggacagctccctgcaggctagactcttccccggcctggccatcaagattcaacggtctaacgggcttatccacagcgcgaatgtgcgcaccgtcaacctggagaaatcctgcgtttctgtggaatgggctgagggaggcgccacaaaggggaaagaaattgattttgacgatgtggccgctatcaatcctgagctcctgcagcttctgccgctccatcccaaggacaacctgcctctgcaggaaaatgtcacgattcagaaacaaaagagacggagcgtgaactccaagatccccgcccctaaagagtctctccgcagcagatccacccggatgagcacagtttctgagctgcgcatcaccgctcaggaaaatgatatggaggtggaacttcccgccgcggccaactccagaaagcagttcagcgtccctccggctcccacacggccttcttgtcccgccgtggctgagattcctctgcgcatggtttccgaggaaatggaggaacaggtgcacagcatcagaggatcttccagcgccaatcccgtcaactccgtgcggcgcaaatcttgcctcgtgaaggaggtcgaaaagatgaagaataagagagaggagaaaaaggcgcaaaacagcgaaatgcggatgaaacgcgcccaggagtacgactccagctttccgaattgggagttcgctagaatgattaaggagtttcgggccaccctggaatgtcatcctcttacaatgaccgatcccatcgaggagcacagaatttgcgtttgtgtgcgcaaacggcctctgaacaagcaggaactcgctaaaaaggagatcgacgtgatttctatcccctccaagtgcctgctgctcgtccatgaacccaaactgaaggtggatcttacgaaatatctggagaatcaggccttctgttttgacttcgcctttgatgaaaccgctagcaacgaggttgtgtacagattcacagcgcgccctctcgtccaaaccatctttgagggcgggaaggccacatgcttcgcttatggacagaccggctctggcaaaacgcacacaatgggaggggacctgagcggcaaggcccagaacgcctccaaggggatttacgctatggcctctcgggatgtgtttcttctgaaaaatcaaccgtgttatagaaagctcggactggaagtttacgtgaccttcttcgagatctataacggcaaactgtttgacctcctgaataagaaagcgaaacttcgcgtcctggaagacgggaagcaacaggtgcaggtcgtgggactccaggagcacctggttaacagcgctgatgacgtgattaaaatgatcgatatgggctccgcctgccggacaagcggccagaccttcgccaattctaactccagcagatctcatgcttgttttcagattatccttcgcgccaaggggcggatgcacggaaaattctccctggtcgacctcgctggcaatgagagaggggccgataccagctccgcggaccgccagacacggatggaaggagccgagatcaacaagtctctgctggctctcaaagaatgcattagagccctgggccaaaataaggctcatacgccctttcgggagagcaaacttacccaggtgctgcgcgattccttcatcggggaaaactctagaacatgcatgattgccaccatcagccctggaatttccagctgtgagtacacactcaataccctgcggtacgcggacagagttaaggagctgtctccccactccggccctagcggcgaacagcttatccagatggagacggaagagatggaagcctgctctaacggggctctcatccccggaaatctgtccaaggaggaggaagaactgagctctcaaatgagctcctttaacgaagccatgacacagattcgcgagctcgaagagaaagctatggaggaactgaaggagatcattcagcagggcccggattggcttgaactgagcgagatgaccgagcaacctgactatgatctcgaaaccttcgtgaataaagccgagtctgccctggctcagcaggcgaagcacttttccgccctgcgggacgtcatcaaagctcttagactcgccatgcaactggaggaacaggccagccgccagatttcctctaagaagagaccccagtga

SEQ ID NO: 3281 - RNA, 342 nt, synthetic construct
  misc_feature 1..342: note = AAH62223 variant
  source 1..342: mol_type = other RNA
atgaacttctacctgctcctggccagctccatcctttgcgctctgattgtgttttggaagtatagacggttccagcgcaataccggcgagatgtctagcaactccacagccctcgcgctggtcagaccctctagctccgggcttatcaattctaacacggacaataacctggctgtttacgatctcagccgggacattctgaataactttcctcactccatcgcccgccaaaaacggattctggtgaatctcagcatggtggaaaacaagctggtcgagcttgaacataccctgctctctaaaggattcagaggcgcctccccgcaccgcaagagcacatga

SEQ ID NO: 3282 - RNA, 2583 nt, synthetic construct
  misc_feature 1..2583: note = AAA56833 variant
  source 1..2583: mol_type = other RNA
atgggcccctgggggtggaagctgagatggaccgtggccctcctgcttgctgccgcgggaacagctgtcggcgaccggtgcgagcgcaacgagttccagtgtcaagatgggaaatgcatcagctacaagtgggtttgtgacggatccgccgaatgccaggatggctctgacgaaagccaggagacgtgtctgtccgtgacctgcaaatctggggattttagctgtggaggcagagtgaatcggtgcattcctcagttctggcgctgtgacggccaagtcgattgcgacaacgggtccgatgaacagggatgtccgcccaagacatgctctcaggacgagtttagatgccacgatggcaaatgtatcagccggcagttcgtgtgcgactccgatcgcgactgtctcgacgggagcgatgaggcctcttgccctgttctgacctgtggacccgcttcctttcaatgcaatagctctacatgtattcctcagctttgggcctgcgacaacgatcccgactgtgaagatggctccgacgagtggcctcagagatgccgggggctgtatgtgttccagggagatagctctccgtgttccgcttttgagttccattgcctcagcggcgaatgcatccactcctcttggcgctgtgacggcgggcccgattgcaaggacaagagcgatgaggaaaattgtgccgtcgcgacctgcagacctgacgagtttcaatgttccgacggaaactgcattcatggcagccggcagtgtgatcgcgaatacgactgcaaagatatgtctgacgaggtggggtgtgttaatgtgacactgtgcgaaggacccaacaagttcaaatgtcactccggcgagtgcatcaccctggataaggtctgcaatatggccagagactgtcgggattggagcgacgagcctatcaaagaatgcgggacgaacgagtgtctcgataataacggaggctgctctcatgtgtgtaatgacctgaagattggctatgaatgcctttgtcccgatgggtttcagctggtggctcaacgcagatgcgaggacatcgatgaatgtcaggacccggatacctgcagccagctctgtgtcaacctggagggaggctacaagtgccagtgcgaggaagggttccaacttgaccctcacacaaaagcctgtaaggctgttggatccattgcctatctgtttttcaccaatcggcacgaggtgagaaaaatgacactcgaccgctctgaatacaccagcctgatccccaacctgcggaacgtggtcgcgctcgatacggaggtggcctccaatagaatttattggagcgacctgtctcagcgcatgatctgctccacacagcttgatcgggctcatggcgttagctcttacgacaccgtgatttccagagatatccaggcccctgacgggctggctgtcgattggatccacagcaacatttactggacagactccgtgctcggcaccgtttctgtggccgataccaagggagtcaaacgcaagacactgttccgggaaaatggcagcaaacccagagccatcgtggtcgaccccgtgcatgggtttatgtattggacggattggggaacccctgctaagattaagaaaggcgggcttaacggagttgacatctactccctggtgacagagaatattcaatggccgaacggcatcaccctcgacctgctgtctgggcgcctctattgggtcgatagcaagctgcactccatcagctctattgacgtgaatggcggaaaccggaaaacaatccttgaggatgaaaagagactggcgcaccccttctccctcgccgtttttgaggacaaagtgttctggaccgatattatcaatgaagctatttttagcgccaaccgcctgacgggctctgacgtcaatcttctggccgagaacctcctgtcccctgaggatatggtgctgttccataatctcacacagcccagaggggtgaactggtgtgaacggaccaccctgagcaatggaggctgccagtacctttgtctgcctgctccccagatcaacccgcactctcctaagtttacatgcgcctgtcccgacgggatgctcctggcgcgggatatgcgcagctgcctgaccgaggctgaagccgccgttgctacacaagagacgtccaccgtcagacttaaggtgagctctacagccgtgcggacccagcatacaaccacgagacctgtccccgacacctcccgcctccctggagctacacccggcctgaccacagtggaaatcgttaccatgagccaccaggccctgggggatgtggcgggccggggaaacgagaaaaagccgtcctctgtcagagccctcagcattgtgctgcctatcgttcttctggtgttcctctgtctgggcgtctttctgctttggaaaaattggcgcctcaagaacattaattccatcaacttcgacaatcccgtgtatcagaaaacgacagaggacgaagttcatatttgccacaaccaagatgggtactcttatcccagcagacagatggtgtccctggaggacgatgtcgcttga

SEQ ID NO: 3283 - RNA, 1302 nt, synthetic construct
  misc_feature 1..1302: note = CAA70989 variant
  source 1..1302: mol_type = other RNA
atggtgtggaaggtcgccgttttcctgagcgtggctctcggcatcggggccgtgcccattgacgatcctgaggacggaggcaaacactgggtcgtgatcgttgcggggtccaacggatggtacaattatagacatcaggctgatgcctgccacgcctaccaaattatccatcggaacggcattccggacgaacagatcgtggtcatgatgtatgatgacatcgcttactctgaggataatcccacccctgggattgtgatcaaccgccccaatggaacagacgtttatcagggcgtgcctaaggattacacgggcgaagacgtcacaccccagaactttctggccgtgcttagaggggatgctgaggccgtgaaaggaattggcagcgggaaggtcctgaaatccggacctcaagaccacgttttcatctattttaccgatcatggctctaccgggattctcgtgttcccgaatgaagacctgcacgtgaaggaccttaacgagacaatccactacatgtacaagcataaaatgtatcggaagatggtcttttacattgaggcgtgtgaaagcggatccatgatgaatcatctgcccgataacatcaatgtgtatgccaccacagctgccaaccctcgcgagtctagctacgcttgctattacgacgagaaaagatccacctatctcggcgattggtacagcgttaattggatggaggactctgatgtggaggacctgacgaaggaaaccctgcacaaacagtaccacctcgtcaagtcccacacaaacaccagccatgtgatgcagtatggcaataagacaatctctaccatgaaagttatgcagttccaagggatgaagcggaaagcctccagccccgtgcctctgcccccggtcacgcaccttgatctgacaccttctcccgacgtgcctctcaccattatgaagcgcaaactgatgaacacaaacgatcttgaggaatccagacagctgaccgaggaaatccagcggcatctcgacgcgcgccacctgattgaaaagagcgtcagaaaaatcgtgtccctgctcgccgcttctgaggccgaagttgagcagctgcttagcgaacgggctcccctgaccggacattcctgttaccccgaggccctcctgcactttcgcacacactgcttcaattggcatagccctacgtatgaatacgcccttagacacctgtatgtgctcgtcaacctgtgtgagaagccgtaccccctgcatcggattaagctctctatggatcacgtgtgcctgggccactattga

SEQ ID NO: 3284 - RNA, 1797 nt, synthetic construct
  misc_feature 1..1797: note = AAL36991 variant
  source 1..1797: mol_type = other RNA
atgacccccatcgtgacagtcctgatttgcctcggcctgagccttgggcctagaacgcacgttcagaccggaacaatcccgaagcccaccctgtgggccgagcctgactccgtgattacacaaggctctcccgtgaccctcagctgtcaggggtccctggaagctcaggagtaccggctttatcgcgagaaaaagtctgccagctggatcacacggattagacctgagctggtcaaaaacggacagttccatatcccctccatcacctgggaacacacgggccgctacgggtgccaatattactctagagcgcggtggagcgagctctccgatcctctggtgctggttatgaccggagcttatccgaagcccacactcagcgcccagccttctcccgtggtcacctccggcggccgcgtgacactgcagtgtgagagccaggttgcctttgggggattcattctttgcaaagaaggcgaggaagaacatcctcaatgtctgaactctcagccccacgctagagggtccagccgggccatcttttctgtgggaccggtctcccctaatcgcagatggagccatcggtgctacggctatgacctcaattccccctacgtgtggtctagcccttccgatctgcttgagctgctcgtgcccggggtcagcaagaagccctctctgtccgttcagcctggaccggtggtggctcccggcgaaagcctgaccctccagtgtgtctctgacgtgggctacgatcgcttcgttctgtataaagagggggaaagagaccttcggcaactgcctggacgccagccccaggccggcctcagccaagcgaactttacgctggggcctgtgtccagatcttacggaggccagtatcggtgctacggggcccacaatcttagctccgagtgtagcgctccctctgatccgctggacattctcatcacaggacagattagaggcacccctttcatctccgtccagcccggccctacagtggccagcggggaaaacgttaccctgctgtgccaatcttggcgccagtttcacaccttcctcctgacaaaggctggagccgcggatgctccccttcggctgagatccattcatgagtatcctaaataccaggccgagtttcccatgagcccggtgacgtccgcccacgctggcacctatcgctgttacgggtctctcaatagcgacccttacctgctttcccatccctctgaacccctggagctcgtcgtgagcggaccttccatgggcagctctccgccccctacagggcccatctccacccctgccggccccgaagatcagcctctgacacccaccggaagcgacccgcaatctggcctggggcggcacctcggagtcgtgatcggcattctggttgccgtggtccttctgctcctgctgcttctcctgctgttcctcatcctgagacaccgccggcaggggaagcattggacgtccacacagagaaaagctgattttcagcaccctgcgggagccgtgggccccgagcctaccgaccgcgggcttcaatggcggagctctcccgctgccgacgcccaggaagagaacctgtatgctgccgttaaggatacccagccggaggacggcgtggaaatggatacaagagcggctgccagcgaggcccctcaggacgtcacctacgctcaactccattccctgacactgcgccggaaggccacggaaccccctcccagccaggagagagaaccccctgctgagccgtctatttatgccacccttgcgatccactga

SEQ ID NO: 3285 - RNA, 498 nt, synthetic construct
  misc_feature 1..498: note = CCDS6385.2 variant
  source 1..498: mol_type = other RNA
atggccctgctcgctctgcttctggtggtcgccctccccagagtttggaccgacgcgaacctgacagctcggcagcgcgatcctgaggacagccaaagaacggatgaaggcgacaatcgggtgtggtgccacgtgtgtgagcgcgaaaacaccttcgagtgccagaatccgagacggtgtaagtggacagaaccctactgcgtcatcgccgccgtgaaaatttttcctcgcttctttatggttgctaagcagtgttccgccgggtgcgctgccatggagagacccaaacctgaggaaaagcggttccttctggaggaacccatgccgtttttctatctcaaatgttgcaagatccgctactgtaacctggagggacctcccattaattctagcgtgtttaaggagtatgcgggctccatgggggaatcttgcggaggcctgtggctcgccatcctgcttctgctcgctagcattgccgctgggctgtccctttcttga

SEQ ID NO: 3286 - RNA, 375 nt, synthetic construct
  misc_feature 1..375: note = AAA68873 variant
  source 1..375: mol_type = other RNA
atgagcctggagcagaagtcccaacactgcaaacccgaagagggcctcgacacccaggaagaggccctggggcttgtgggagtccaggctgccacaacggaggaacaggaggcggtttctagctcctctcctctggtgccgggcaccctcggggaagtgcccgctgccggaagccctggccccctgaagtcccctcaaggggcctctgctatccccacagccattgatttcaccctttggagacagagcatcaaaggatccagcaaccaggaggaagagggcccttctacatccccggaccccgagagcgtctttcgggctgccctgtctaagaaagtggcggatctcattcatttcctgctgctcaagtactga

SEQ ID NO: 3287 - RNA, 957 nt, synthetic construct
  misc_feature 1..957: note = AAH02455 variant
  source 1..957: mol_type = other RNA
atgctgctcggccaaaagagccagagatacaaagccgaggaagggctgcaggctcagggagaggcccccggccttatggacgtgcagatccctaccgcggaggaacaaaaggctgcctcctctagctccacactgattatggggacgctcgaagaggtcaccgattctggaagcccgtctccccctcagtcccccgagggcgccagctccagcctgacagttaccgactctacactttggtcccagagcgatgaagggtcttccagcaacgaggaagagggaccttctacctcccccgaccctgctcacctggagagcctcttccgggaagccctggatgagaaagtggctgaactggtgcgctttctcctgagaaagtatcagatcaaagagccggtcacaaaggccgaaatgcttgagtccgtgattaagaattacaaaaaccatttccccgacatcttttctaaggcgagcgagtgcatgcaagttattttcggcatcgatgtgaaagaagtcgaccctgccggccactcctatatcctggtgacctgtctcgggctgagctacgatggacttctgggcgacgatcagtctacgcccaagaccgggctcctgattatcgttctgggaatgattctcatggagggctcccgggctcctgaagaggccatctgggaagctctgagcgtgatggggctttatgacggacgcgagcattctgtctactggaaactgagaaagctcctgacacaggagtgggtgcaggaaaattatcttgagtaccggcaagcccccggcagcgatccggtgcgctacgaatttctgtggggccctagagcgctcgccgagacctcctatgtcaaggttctggaacacgtggtgcgggtcaacgctcgcgtgagaatttcttaccccagcctgcatgaggaggccctcggggaagagaaaggagtttga

SEQ ID NO: 3288 - RNA, 1290 nt, synthetic construct
  misc_feature 1..1290: note = AAH04479 variant
  source 1..1290: mol_type = other RNA
atggagacccagttcagacggggcgggctgggatgcagccccgcctccatcaagcgcaaaaagaaaagagaagactctggcgattttgggctccaagtgagcacaatgttctccgaggacgattttcagtctacggaacgggctccttacggaccgcagctgcagtggagccaagaccttccccgcgtccaggttttcagagagcaggccaacctggaagatcggtcccctcgcagaacccagcggattacaggcggggagcaagtgctctggggacccatcacccagatttttcctacagtgcgccccgcggacctgaccagagtcatcatgcctcttgagcagcggtctcagcactgtaagccggaagagggcctgcaagctcaggaagaggatctcggcctggtgggggcccaggccctgcaagctgaggaacaggaggccgctttctttagctccacactcaatgttggaaccctggaggaacttcccgccgcggaaagcccttctccccctcagagcccccaggaggagtccttctctccgacggccatggacgctatttttggctccctgagcgatgaagggtctggatcccaagagaaagaaggccctagcacctcccccgacctcatcgatcctgagtctttcagccaggacatcctgcatgataagattatcgaccttgtgcatctgctcctgcgcaagtatagagtcaaagggctgattacaaaggccgaaatgctcggatccgtgatcaaaaactacgaggactattttcccgagattttccgggaagctagcgtttgcatgcagctgctttttggcatcgatgtgaaggaggtcgaccccacctctcactcctacgtgctggtgacaagcctcaatctgtcttatgatggcattcagtgtaacgaacaaagcatgcctaaatccgggcttctgatcatcgtcctcggagttattttcatggagggcaattgcatcccggaagaggtgatgtgggaggtgctgtctattatgggggtctacgccggacgcgaacacttcctgtttggcgagcccaagagactcctgacccagaactgggtgcaggaaaagtatcttgtttacagacaggtgcctgggacggaccccgcgtgttacgagttcctgtggggacctcgggcccatgctgagacaagcaaaatgaaggtcctcgaatatatcgccaatgctaacggccgcgatcccacctcctacccgagcctgtatgaggacgcccttcgggaagagggcgaaggggtgtga

SEQ ID NO: 3289 - RNA, 1110 nt, synthetic construct
  misc_feature 1..1110: note = EAW99421 variant
  source 1..1110: mol_type = other RNA
atgcccagagcccctaagcggcagcgctgcatgccggaggaagacctgcaaagccagtccgagacccagggactcgaaggggctcaggcgcccctggccgtggaggaagatgcttctagctccacatctacgagctcctctttccctagctcctttcccagcagctcctcttcttcctcctcttcctgttaccctcttatccccagcacccctgaggaggtctccgccgacgatgaaacaccgaatccccctcaatctgcccagattgcttgcagctcccccagcgttgtggcctctctgcctctcgaccagtccgatgagggaagctctagccagaaagaagagtccccctctaccctgcaagtgcttccggacagcgagtccctgcctagaagcgaaatcgatgagaaggtcacagacctcgtgcagttcctgctgtttaaatatcagatgaaggaacccattaccaaagctgagatcctcgaatctgttattaagaactacgaggatcacttccctctgctttttagcgaggccagcgaatgtatgctgctcgtgttcggcatcgacgtcaaggaggtggatcccacagggcattcttttgttctggtgacctcccttggactgacgtatgacggcatgctcagcgatgtccagtccatgcccaaaaccgggatcctgattctgatcctctctattatcttcattgaaggatactgcacacctgaggaagtgatctgggaggcgctgaacatgatgggcctttatgacggcatggagcacctgatttacggggaaccgcggaagctcctgacccaagactgggtgcaggagaattatcttgaataccgccaggtccccggaagcgatcctgccagatacgagtttctgtggggcccccgggctcatgccgaaatccgcaaaatgtccctcctgaagttcctggctaaagttaacgggtctgaccctcggagctttcccctctggtatgaggaggccctgaaggatgaagaggaaagagcgcaagaccgcatcgccacaaccgatgacacgacagctatggcctccgcttctagctccgccaccggcagcttctcttacccggagtga

SEQ ID NO: 3290 - RNA, 945 nt, synthetic construct
  misc_feature 1..945: note = AAH03408 variant
  source 1..945: mol_type = other RNA
atgcccctggagcagagaagccaacactgcaagcctgaagagggcctcgaagcccagggggaggctctgggacttgtgggcgcccaggcgccggctaccgaagaacaggagacagcctcctctagctccacgctggtcgaagttaccctccgggaggtgcccgccgctgaatctcctagccctccccattctccccaaggggcctccacactgcctaccacaatcaactacaccctttggagccagtccgacgagggaagctctaatgaggaacaggagggcccgtccacattccccgatctggaaaccagctttcaggtggctctctctcgcaaaatggccgagctggtccacttcctgctcctgaagtacagagcgcgggaaccttttacgaaagccgagatgcttgggtccgtgattcgcaacttccaagactttttccccgttatctttagcaaggcttctgagtacctgcagctcgtgttcggaattgaagtcgtggaggttgtgagaatcggccatctgtatattcttgtcacctgtctgggcctctcctacgatgggctgctgggagacaatcagatcgtgcctaaaacaggcctcctgatcattgtgcttgccatcattgctaaggaaggggattgcgcccccgaggaaaagatctgggaggagctgagcgtcctcgaagcgtccgacggacgggaggattctgtttttgcccacccgcgcaaactgcttacccaggacctggtgcaagaaaactatctcgagtacagacaggtgcctggcagcgatcccgcttgttatgagttcctgtgggggcctcgggccctggtcgagacatcctacgtgaaggttctccatcatctgcttaaaattagcggaggcccccacatctcttatccccctctgcacgagtgggcttttcgcgaaggcgaggaatga

SEQ ID NO: 3291 - RNA, 930 nt, synthetic construct
  misc_feature 1..930: note = AAA03229 variant
  source 1..930: mol_type = other RNA
atgagcctggagcagagatccctccactgcaagcccgaagaggccctggaagctcaacaggaggcccttggcctggtgtgtgtccaggcggctacctctagctcctctcctctcgttctggggacacttgaagaggtgccgacggccggaagcaccgatccccctcagtctccccaaggcgcctccgctttccctacaaccatcaactttacacggcagcgccagcccagcgaggggtccagctctagagaagaggaaggaccttccaccagctgcattctggagtctctcttccgggccgtgatcaccaaaaaggtcgctgacctggtgggctttctgctcctgaaataccgcgccagagagccggttacaaaggcggaaatgcttgagtccgtgattaaaaattataagcattgtttccccgaaatctttgggaaggccagcgagtctctgcagctcgtcttcggaattgacgtgaaagaagctgatcctacgggccactcctacgttctggtgacctgccttggcctgagctatgacgggctcctgggagataaccaaatcatgcccaagacaggctttctgatcattgtcctcgtgatgatcgccatggaagggggacatgctcctgaggaagagatttgggaggagctgtccgtgatggaagtctacgacggccgggagcactctgcctatggggagccccgcaaacttctgacccaggatctcgttcaggaaaagtacctggagtatagacaggtgccggacagcgatcctgcgcggtacgagttcctttggggaccccgcgccctggctgaaacatcctacgtgaaagtcctcgaatatgtgatcaaggttagcgccagagtgcggtttttctttccttctctgcgcgaggctgccctgagagaggaagaggaaggcgtctga

SEQ ID NO: 3292 - RNA, 945 nt, synthetic construct
  misc_feature 1..945: note = AAA17729 variant
  source 1..945: mol_type = other RNA
atgcccctggagcagagaagccaacactgcaagcctgaagagggcctcgaagcccggggcgaggctctgggacttgtgggcgcccaggcgccggctaccgaggaacagcagacagcctcctctagctccacgctggtcgaggttaccctcggggaagtgcccgccgctgactctcctagccctccccattctccccaaggagcctccagcttctccacaaccatcaactacacactgtggcgccagagcgatgaggggtcttccaatcaggaagaggaggggcctagaatgtttccggaccttgaaagcgagttccaggctgccatttctcggaaaatggtggaactggtccactttctcctgctgaagtaccgcgcgagagagcccgtgaccaaagccgaaatgctcgagtccgttctgcggaactgtcaagatttctttcctgtgatcttcagcaaggcttctgagtaccttcagctggtctttggaattgaagtggttgaggtggtccccatctcccatctctatattctggtgacatgccttggcctgagctacgacggcctcctgggggataatcaggtgatgcctaaaaccggactgctcatcatcgtcctggccattatcgctattgaaggcgactgtgcccccgaggaaaagatctgggaggagctttccatgctggaagttttcgaggggcgcgaagattctgtgtttgcgcacccgagaaagctcctgatgcaggaccttgtgcaagagaactatctggaataccggcaggtccctggaagcgatcccgcctgctatgagttcctctggggccctcgcgctctgattgagacgtcctacgtgaaagttctgcatcacaccctcaagatcgggggagaaccccacattagctatccccctctgcatgagagagcccttcgggaaggcgaggagtga

SEQ ID NO: 3293 - RNA, 945 nt, synthetic construct
  misc_feature 1..945: note = AAA17446 variant
  source 1..945: mol_type = other RNA
atgcccctggagcagagaagccaacactgcaagcctgaagagggcctcgaagcccgcggggaggctctgggacttgtgggcgcccaggcgccggctaccgaggaacaggaggccgcctcctctagctccacactggtcgaagttacgctcggggaggtgcccgctgccgaatctcctgatccccctcagagcccccaaggagcttcctctctgcctaccacaatgaactacccgctttggagccagtcctatgaggacagctctaatcaggaggaagagggcccctccaccttccctgacctggaaagcgagtttcaggccgcgctctctcggaaagtggccgaactggtccatttcctgctcctgaagtacagagctcgggagcccgtgacaaaagccgagatgcttgggtccgttgtgggaaactggcaatactttttccctgtcatctttagcaaggcttcttccagcctgcagctcgtgttcggcattgaactgatggaggttgatcccatcggccacctttatatttttgccacctgtctggggctctcctatgacggactgctgggcgataatcagatcatgccgaaagcggggctcctgattatcgtgcttgccatcattgctcgcgaaggagactgcgcccctgaggaaaagatctgggaggagctgtctgtcctcgaagtgttcgagggcagagaagatagcattctgggggaccccaagaaacttctgacacagcattttgtgcaagagaactacctcgaatatcggcaggtccctggatccgatcccgcttgttacgagttcctgtggggcccccgcgccctggttgagaccagctacgtgaaggtgctccaccatatggtcaaaatctctggcgggcctcacatttcctatccgcccctgcacgaatgggtgcttagagagggagaagagtga

SEQ ID NO: 3294 - RNA, 954 nt, synthetic construct
  misc_feature 1..954: note = EAW99410 variant
  source 1..954: mol_type = other RNA
atgagctccgagcagaagtctcaacactgcaaacccgaagagggcgtggaagcccaggaggaagctctggggctcgtcggagcccaggcgcctaccacagaggagcaggaagctgccgttagctcctctagcccgctggtgcccggcacgcttgaggaagtgcctgccgctgagtccgccgggccccctcaatctccccagggagctagcgccctgcctaccacaatctccttcacctgttggagacagccgaacgagggctctagctcccaggaagaggaagggcccagcacatctcctgacgcggagtccctctttcgggaagccctgagcaataaggtcgatgagcttgctcatttcctgctccgcaaatacagagccaaggagctggtgaccaaagctgaaatgctggagcgggttattaagaactataagcgctgctttcccgtgatcttcggaaaagcctctgaatccctcaagatgatttttggcatcgacgtcaaagaggtggatcctgcgagcaatacatacaccctggttacgtgtcttggcctgtcctatgacgggctcctgggaaacaatcaaattttccccaagaccggccttctgatcatcgtgctcgggacaattgccatggaaggagattctgctagcgaggaggaaatctgggaggaactgggcgtcatgggggtgtacgacggaagagagcacaccgtgtatggcgaaccgcggaaactgctcacacaggattgggtccaggagaactacctggagtatcgccaggttcctggctccaatcccgccagatacgaatttctttgggggcctcgggctctggccgagaccagctacgtgaaggtgctcgaacatgtcgtgcgcgttaacgccagagtgcggattgcttatccctctctgcgcgaggcggcccttctggaggaagaggaaggagtctga

SEQ ID NO: 3295 - RNA, 954 nt, synthetic construct; identical to SEQ ID NO: 3294
  misc_feature 1..954: note = AAA68871 variant
  source 1..954: mol_type = other RNA

SEQ ID NO: 3296 - RNA, 954 nt, synthetic construct
  misc_feature 1..954: note = AAY27261 variant
  source 1..954: mol_type = other RNA
atgagctccgagcagaagtctcaacactgcaaacccgaagagggcgtggaagcccaggaggaagctctggggctcgtcggagcccaggcgcctaccacagaggagcaggaagctgccgttagctcctctagcccgctggtgcccggcacgcttgaggaagtgcctgccgctgagtccgccgggccccctcaatctccccagggagctagcgccctgcctaccacaatctccttcacctgttggagacagccgaacgagggctctagctcccaggaagaggaagggcccagcacatctcctgacgcggagtccctctttcgggaagccctgagcaataaggtcgatgagcttgctcatttcctgctccgcaaatacagagccaaggagctggtgaccaaagctgaaatgctggagcgggttattaagaactataagcgctgctttcccgtgatcttcggaaaagcctctgaatccctcaagatgatttttggcatcgacgtcaaagaggtggatcctacaagcaatacctacacgctggttacctgtcttggcctgtcctatgacgggctcctgggaaacaatcaaattttccccaagacaggccttctgatcatcgtgctcgggaccattgcgatggaaggagattctgccagcgaggaggaaatctgggaggaactgggcgtcatgggggtgtacgacggaagagagcacacagtgtatggcgaaccgcggaaactgctcacccaggattgggtccaggagaactacctggagtatcgccaggttcctggctccaatcccgctagatacgaatttctttgggggcctcgggccctggctgagacgagctacgtgaaggtgctcgaacatgtcgtgcgcgttaacgccagagtgcggattgcctatccctctctgcgcgaggctgcgcttctggaggaagaggaaggagtctga

SEQ ID NO: 3297 - RNA, 945 nt, synthetic construct
  misc_feature 1..945: note = BAF82126 variant
  source 1..945: mol_type = other RNA
atgcccctggagcagagaagccaacactgcaagcctgaagagggcctcgaagcccgcggggaggctctgggacttgtgggcgcccaggcgccggctaccgaagaacaggaggccgcctcctctagctccacactggtcgaagttacgctcggggaggtgcccgctgccgaatctcctgatccccctcagagcccccaaggagcttcctctctgcctaccacaatgaactacccgctttggagccagtcctatgaggacagctctaatcaggaggaagagggcccctccaccttccctgacctggaaagcgagtttcaggccgcgctctctcggaaactggccaagctggtgcatttcctcctgcttaaatacagagctcgggaacccgtcacaaaggccgagatgctggggtccgtggttggaaactggcaatatttcttccctgtgatctttagcaaggcttctgattccctccagctggtcttcggcattgagcttatggaagtggaccccatcggccacgtttacatttttgccacctgtctggggctcagctatgatggactgctgggcgacaatcagatcatgccgaaaacagggttcctcattatcatcctggcgattatcgccaaggagggagattgcgctcctgaagagaaaatttgggaggagctttccgtgctggaggtctttgaaggccgcgaggacatcattttcggggatcccaagaaactcctgacccagtactttgtgcaagaaaactatcttgagtacagacaggtgcctggatctgaccccgcctgttacgaatttctgtggggcccccgggctctcatcgagacgagctatgtcaaggttctgcatcacatggtgaaaatttccggcgggcctcgcatcagctacccgctgctccatgagtgggccctgagagaaggagaggaatga

SEQ ID NO: 3298 - RNA, 945 nt, synthetic construct
  misc_feature 1..945: note = AAA19006 variant
  source 1..945: mol_type = other RNA
atgcccctggagcagagaagccaacactgcaagcctgaagagggcctcgaagcccgcggggaggctctgggacttgtgggcgcccaggcgccggctaccgaagaacaggaggccgcctcctctagctccacactggtcgaagttacgctcggggaggtgcccgctgccgaatctcctgatccccctcagagcccccaaggagcttcctctctgcctaccacaatgaactacccgctttggagccagtcctatgaggacagctctaatcaggaggaagagggcccctccaccttccctgacctggaaagcgagtttcaggccgcgctctctcggaaagtggccaagctggtccatttcctgctcctgaaatacagagctcgggaacccgtgacaaaggccgagatgcttgggtccgttgtgggaaactggcaatatttcttccctgtcatctttagcaaggcttctgattccctgcagctcgtgttcggcattgagctgatggaagttgaccccatcggccacgtgtacatttttgccacctgtcttgggctgagctatgatggactcctgggcgacaatcagatcatgccgaaaacagggttcctgattatcatcctcgcgattatcgccaaggagggagattgcgctcctgaagagaaaatttgggaggagctgtccgtccttgaggtgtttgaaggccgcgaggactctatcttcggggatcccaagaaactgctcacccagtactttgtgcaagaaaactatctggagtacagacaggtccctggaagcgaccccgcctgttacgaatttctttggggcccccgggctctgattgagacgtcctatgttaaggtgctccatcacatggtgaaaatcagcggcgggcctcgcatttcttacccgctgctgcatgagtgggccctcagagaaggagaggaatga

SEQ ID NO: 3299 - RNA, 945 nt, synthetic construct
  misc_feature 1..945: note = CAG46567 variant
  source 1..945: mol_type = other RNA
atgcccctggagcagagaagccaacactgcaagcctgaagagggcctcgaagcccgcggggaggctctgggacttgtgggcgcccaggcgccggctaccgaagaacaggaggccgcctcctctagctccacactggtcgaagttacgctcggggaggtgcccgctgccgaatctcctgatccccctcagagcccccaaggagcttcctctctgcctaccacaatgaactacccgctttggagccagtcctatgaggacagctctaatcaggaggaagagggcccctccaccttccctgacctggaaagcgagtttcaggccgcgctctctcggaaagtggccaagctggtccatttcctgctcctgaaatacagagctcgggaacccgtgacaaaggccgagatgcttgggtccgttgtgggaaactggcaatatttcttccctgtcatctttagcaaggcttctgattccctgcagctcgtgttcggcattgagctgatggaagttgaccccatcggccacgtgtacatttttgccacctgtcttgggctgagctatgatggactcctgggcgacaatcagatcatgccgaaaacagggttcctgattatcatcctcgcgattatcgccaaggagggagattgcgctcctgaagagaaaatttgggaggagctgtccgtccttgaggtgtttgaaggccgcgaggactctatcttcggggatcccaagaaactgctcacccagtactttgtgcaagaaaactatctggagtacagacaggtccctggaagcgaccccgcctgttacgaatttctttggggcccccgggctctgattgagacgtcctatgttaaggtgctccatcacatggtgaaaatcagcggcgggcctcgcatttcttacccgctgctgcatgagtgggcctttagagaaggagaggaatga

SEQ ID NO: 3300 - RNA, 948 nt, synthetic construct
  misc_feature 1..948: note = AAA68877 variant
  source 1..948: mol_type = other RNA
atgagcctggagcagagaagcccccactgcaagcctgacgaagatctcgaggcccaaggcgaagacctggggcttatgggagctcaggagccgaccggcgaagaggaggaaacaacgtctagctccgattctaaagaggaagaggtgagcgccgcggggtcctctagccctccccagtctccccagggaggcgcttcctcctccatcagcgtctactataccctgtggtctcaattcgacgaggggtccagctctcaggaagaggaggaaccttccagctccgttgatcccgcccagctcgaatttatgttccaggaggccctgaaacttaaggtggctgagctggtgcattttctcctgcacaagtaccgggtcaaagaacctgtgacaaaggccgagatgctggaatctgttattaagaactataaacgctacttcccggtgatctttggaaaggctagcgagttcatgcaagtcatttttggcaccgacgtgaaagaagttgatcccgccggccattcctatatcctcgtgacagcgctggggcttagctgtgactctatgctgggagatggccactccatgcctaaggccgctctcctgattatcgtccttggggtgatcctgaccaaagacaattgcgcccccgaggaggtgatttgggaagctctcagcgtcatgggagtttacgtgggcaaggagcatatgttctatggggaacctagaaagctgctgacacaggattgggtgcaggagaactacctcgaataccggcaggtccccggatctgacccggcccactatgagtttctgtggggcagcaaagcgcacgccgagacctcctacgaaaaggtgatcaattatcttgttatgctgaacgctcgcgagcctatttgttacccctctctctatgaagaggtgctgggcgaggaacaagagggggtctga

SEQ ID NO: 3301 - RNA, 1044 nt, synthetic construct
  misc_feature 1..1044: note = AAI01309 variant
  source 1..1044: mol_type = other RNA
atgcccagaggccaaaagagcaaactgcgggcccgcgagaagagacggcaggctcgcgggggactcgaagacctgatcgatgcccttgacattctggaggaagaggaagagtcccctccgtctgcgagcgcttgcctcaaagatgtgttccagtcctctctggacggcgccagcaacaatccccacgggcttagagaggcccagtccacctctacaagcgctacggccgcttcccatacccggcaccctgaaggagtgaacgatcagatggaggaacgccccatctgtacacaagacctggaggccaccgatagctttcctagaggccccgttgacgagaaggtgattatcctcgtgcattacctgctgtataaataccagatgaaggaacctattacaaaggcggatatgctccggaatgtcacccagatgtctaaatcccagttcccggtgatcctgagccgcgcctctgagcaccttgaactgatctttgggctcgacctgaaggaggttgaacccaacaaacatatttatgtgcttgtcaataagctggatctcggatgcgacgctaaactgtccgatgagacaggcgtgcctaagaccggcctgctcatgacggttctggggatcattttcaccaacggaaattgtgtggccgaggaagaggtctggaaggtgtttaacacaatgggcctttacgacgggatcgaacacttcatgtttggagagcccagaaaactgctcaccaaggacctggtgaaagaaaattatcttgagtaccaacaggtccctaacagcgatcccccgcggtatcagttcctgtggggccctcgcgctcacgccgagacatctaagatgaaagttctcgaatttctggcgaaggtgaatgacaccgccccctccgagttcagcaactggtacacggaagctctgcaggatgaggaagagagagcccgggctcgcgtggccgccaaagctagagtctccgcgacagccggggctcggtctaaggtcaagagctccaaaagctctcaactccagtga

SEQ ID NO: 3302 - RNA, 975 nt, synthetic construct
  misc_feature 1..975: note = CCDS43927.1 variant
  source 1..975: mol_type = other RNA
atgagccaggaccaggagtcccccagatgcacccacgatcagcatctgcagacattctctgaaacgcagagcctcgaggtggcccaagtctccaaggctctggagaaaacccttctgtctagctcccaccctctcgttccgggcaagctgaaagaagcccccgcggctaaggccgaatctcctcttgaggtgccccagagcttttgttccagctctatcgccgtgacaaccacatccagctctgagtccgacgaagctagctctaaccaggaggaagaggattcccctagctcctctgaggacaccagcgatccccggaatgtccctgccgacgctctggatcagaaagtggccttcctcgttaactttatgctgcataagtgccaaatgaagaaaccgattacaaaggcggacatgctgaaaatcattatcaaggatgacgaatcccacttcagcgagattctcctgcgcgcctctgaacatcttgagatgatctttgggctggatgtggtcgaagtggaccccaccacgcactgttacggactcttcatcaaactgggccttacctatgatgggatgctgtccggagagaagggcgttcctaagacagggctcctgattatcgtgctgggagtcatttttatgaaaggcaatagagctaccgaggaagaggtgtgggaagtgctcaacctgacaggcgtctacagcgggaagaaacacttcatctttggagagccccggatgcttattaccaaggacttcgttaaagaaaagtatctggagtaccaacaggtggccaattctgaccctgctcgctatgagtttctctggggccccagagccaaagcggaaacgagcaagatgaaggtgctggagttcgtcgccaaagtgcatgggtcctacccgcactcttttcctagccagtatgctgaagcccttaaggaggaagaggagcgggctcgcgccagaatctga

SEQ ID NO: 3303 - RNA, 1011 nt, synthetic construct
  misc_feature 1..1011: note = CCDS59524.1 variant
  source 1..1011: mol_type = other RNA
atgcccagaggccaggccagcaagcggcgcgctagagagaaacggcgccaagccagaggggaagaccagtgcctgggaggcgcgcaggctaccgccgccgagaaggaaaaactcccttcctctagctccccggcttgtcagtctccccctcagagcttccccaacgccgggatccctcaagagtcccagcgggcttcttaccccagctcccctgccagcgcggtgtctctgacatccagcgatgaaggagccaagggccagaaaggggagtctccgaatagctttcacggaccctcctcttccgagagcacgggccgcgaccttctgaacaccaagacaggcgaactcgtccaattcctgcttaataagtatattagaaaagagcctatcacccgggaagctatgctgaaggttattaaccgcaaatacaagcagcattttcccgagatcctcagacggtccacagagaatgtggaagtggtcttcgggctgtatctgaaagagatggatccttctcgccagagctacgtgctcgttggaaagctggactttcccaaccagggctcccttagcgatgggggaggcttcccgctgtctgggctcctgatggtgcttctgtccaccatttttatgcacggaaatagagccacagaagaggaaatgtgggagtgcctcaacgctctgggcatgtataagggccggaaacatttcatctacggggagcctcaagaactggtcaccaaggacctcgtgcgcgagggatatctggaataccagcaggttcccagctctgatcctcccagatacgagtttctttggggcccccgggccagagcggaaacgagcaaaatgaaggtgctggagttcgtcgccaaactcaatgacaccgtggcttccacatataagtctcgctacgaggaagccctgcgggaggaagaggaacaagctagagcccgcgccgtggctcgggatagcgcgagagcccgcgcttcccggagctttcagccttga

SEQ ID NO: 3304 - RNA, 1044 nt, synthetic construct
  misc_feature 1..1044: note = AAC23616 variant
  source 1..1044: mol_type = other RNA
atgcccagaggccaaaagagcaaactgcgggcccgcgagaagagacggaaagctcgcgaagagacccaggggctcaaggtgagacacgccacagcggctgaaaaagaggaatgcccttcctctagcccggtcctgggagacacgcccacctcctctcctgccgccggcatcccccagaagcctcagggggctccccctacaaccacagccgctgccgcggttagctgtaccgagtccgatgagggagccaagtgccagggcgaagagaacgcttctttcagccaagccacaacctccacggaaagctctgtgaaagacccggtggcttgggaggccgggatgcttatgcattttattctgcggaagtacaaaatgcgcgagcccatcatgaaggcggatatgctcaaagtcgtggacgaaaagtataaggatcacttcaccgagattctgaatggagcctccagacggcttgaactggtttttggcctcgacctgaaagaggataaccctagctctcatacatacaccctggtgtccaagctcaatctgacaaacgacggcaatcttagcaacgattgggacttcccccgcaatgggctgctcatgcctctgcttggagtcatctttctgaaaggcaactctgctaccgaagaggagatttggaagttcatgaatgtgctcggggcctatgatggagaggaacacctgatctacggcgaacccagaaaatttatcacgcaggacctggttcaggagaagtatctcaaatacgaacaggtgccgaactccgatcctccccggtatcaattcctgtgggggcctcgcgcttacgccgagacaaccaagatgaaggtccttgagtttctggccaaaatgaatggagctacacccagagacttccccagccattacgaagaggcgctccgggacgaagaggaacgcgcccaggtgagatcctctgtgcgggctagacgccggaccaccgccacaacgtttagagcccgcagccgggctcctttctccagaagctctcacccgatgtga

SEQ ID NO: 3305 - RNA, 960 nt, synthetic construct
  misc_feature 1..960: note = AAD10635 variant
  source 1..960: mol_type = other RNA
atgcccagaggccaaaagagcaaactgcgggcccgcgagaagagacggaaagctcgcgacgaaaccagagggctcaacgtgcctcaggtcacagaggccgaagaggaagaggcgccgtgctgttcctctagcgtttccggaggcgctgcctctagctcccccgccgctgggatccctcaggagccccagcgggcccctacgaccgctgccgcggccgctgccggagtgtctagcacaaagtccaaaaagggcgctaagagccaccagggggaaaagaatgcctcttccagccaagcgtctacctccacaaagagcccctctgaggatcctctgacccgcaaatccggaagccttgtgcagttcctgctctacaagtataaaattaagaagtccgtcacaaaaggcgaaatgctgaagatcgtgggcaaaagatttcgggagcatttcccggagattcttaagaaagcctctgaagggctgagcgttgtgtttggactcgagctgaacaaggtcaatcccaacggccacacctacacgttcatcgacaaagtggatctgaccgacgaagagtccctcctgagctcttgggattttcctcgcagaaaacttctgatgcccctcctgggggttattttccttaatggaaactccgctacagaagaggagatctgggaatttctgaatatgctcggcgtgtatgacggggaggaacatagcgtcttcggagagccttggaagctgatcaccaaagatctggtgcaggaaaagtacctcgagtataaacaggtgccctctagcgacccgcctcggtttcaattcctgtggggcccccgcgcctacgctgagacatccaagatgaaagtccttgaatttctggccaaggttaacggcaccacgccttgcgccttccccacacactatgaggaagctctcaaggatgaggaaaaagcgggggtgtga

SEQ ID NO: 3306 - RNA, 1041 nt, synthetic construct
  misc_feature 1..1041: note = AAD10636 variant
  source 1..1041: mol_type = other RNA
atgcccagaggccaaaagagcaccctgcacgcccgggagaaacgccaacagacaagagggcagacgcaggaccatcaaggagctcagatcaccgccacaaacaagaaaaaggtgtccttctctagccctctcattctgggcgcgaccatccagaaaaagtccgctgggcggtctcgcagcgcccttaagaaaccgcagagagccctgtccacaaccacatctgtcgatgttagctacaagaaatcctataagggagctaatagcaaaattgaaaagaagcaatctttttcccagggcctcagctctaccgtgcagtcccggacggaccccctgatcatgaaaaccaacatgcttgtgcagttcctgatggagatgtacaagatgaaaaagcctattatgaaagccgatatgctcaagatcgtccagaaaagccacaagaattgctttcccgaaatcctgaagaaagcctctttcaacatggaggtggtttttggggtggacctgaagaaagtcgattccacaaaggacagctatgtgctcgtttccaaaatggatctgcctaataacggaaccgtgacacgcggcagaggcttccccaagaccgggcttctgctcaatctgcttggagtcatttttatgaagggcaactgtgctacggaagagaaaatctgggagttcctgaataagatgcggatttacgacgggaaaaagcattttatcttcggagaacctcgcaaactcattacacaggatctggtgaagctgaagtatctcgagtacagacaggtgccgaactctaatcccgcgcggtatgaatttctgtggggccctcgcgcccacgctgagaccagcaaaatgaaggtccttgagttctgggccaaagttaacaagacagtgccctccgcttttcaattctggtacgaagaggccctgagagacgaagaggaacgggtgcaggcggccgctatgctcaatgatgggagctctgccatgggacgcaaatgctccaaggctaaggccagctctagctcccatgcctga

SEQ ID NO: 3307 - RNA, 1041 nt, synthetic construct
  misc_feature 1..1041: note = AAC23619 variant
  source 1..1041: mol_type = other RNA
atgcccagaggccagaagtctaaactgcgggcccgcgagaagagacaacggacccgcgggcagacacaggacctcaaagtgggacagcctacggctgccgaaaaggaggaatccccgtctagctcctctagcgtcctgagagataccgcgtcctctagccttgctttcggcatcccccaagagcctcagcgggaaccccctacaacctccgccgccgctgccatgagctgcacagggtctgacaaaggagatgagtcccaggacgaggaaaacgctagcagctcccaggccagcacctctacagagcgctccctgaaggatagcctcaccagaaagacgaaaatgctggttcaatttcttctgtacaagtataaaatgaaggaacccaccacaaaagcggagatgctcaagattatctccaagaaatacaaggagcacttccctgaaatttttcggaaagtgtctcagcgcaccgagctggtgttcggcctggccctcaaggaagtcaatccgacaacccatagctatatcctggtgtccatgcttgggcccaacgacggaaatcagagctctgcttggacgctgcctagaaacggcctcctgatgccccttctgtccgttatttttctcaatggcaactgtgcccgggaggaagagatctgggagttcctgaatatgctggggatctacgatggaaaacgccacctcatttttggcgaacctagaaagctgatcacacaggaccttgtgcaagagaaatatctggaataccagcaggtccccaacagcgatccgcctcggtatcaattcctctgggggccccgcgctcatgccgagacctctaagatgaaggtgctggaatttcttgcgaaagttaatgacacaacccctaacaatttccccctgctctacgaggaggccctgagagatgaagaggaacgggctggagccagaccccgcgtggctgcccggagaggcaccacagccatgacgagcgcttactcccgcgcgacctctagctccagctctcagcctatgtga

SEQ ID NO: 3308 - RNA, 828 nt, synthetic construct
  misc_feature 1..828: note = CCDS65233.1 variant
  source 1..828: mol_type = other RNA
atgaccagcgccggcgtgttcaacgctgggtccgacgagagagccaattctcgggatgaagagtacccctgcagctccgaagtctctcctagcacagagtcctcttgtagcaactttatcaatattaaggttggactgctcgaacagttcctgctttataaatttaagatgaaacaacgcatcctgaaggaggacatgctcaaaattgtgaacccgagataccagaatcagttcgcggagatccaccggcgcgcttccgaacatattgaggtggtctttgccgtggatctgaaggaagttaaccccacgtgccacctttatgacctggtgagcaagctcaaactgcctaataacggcagaatccatgtcgggaaggtgctgcccaaaaccggactcctgatgacattccttgttgtgatctttctgaagggcaattgtgccaacaaagaggatacctggaagttcctcgacatgatgcagatttacgatgggaagaaatattacatctatggagagcctcggaagctgattacacaagactttgtccgccttacctacctggaataccaccaggtgccctgctcttatcctgctcattaccagttcctctggggcccgagagcctatacagagacctccaaaatgaaggtgctggaatacctggctaaagtcaatgatatcgcccccggcgcgtttagctctcagtatgaggaagccctccaagacgaggaggaatcccctagccagcggtgttctcgcaactggcactactgctccgggcaggattgtctgagagctaagttcagctccttttctcagccctattga

SEQ ID NO: 3309 - RNA, 1224 nt, synthetic construct
  misc_feature 1..1224: note = AAH67286 variant
  source 1..1224: mol_type = other RNA
atgcccagaggccacaagagcaaactgcggacctgcgagaagcgccaggaaacaaacgggcaacctcagggactcacgggcccgcaggccaccgctgagaaacaggaagagtcccattctagctcctctagctccagagcctgtctgggggactgccggcgctctagcgatgcgtccatcccccaagaaagccagggagtgtctcctacaggctcccccgacgctgtcgttagctactctaagtccgatgtggccgccaatgggcaggacgagaaaagcccttctacctccagagatgctagcgtgccccaggagtcccaaggagcctctcctacaggcagcccggacgctggcgtctccgggagcaagtatgatgtggccgcgaacggacaggacgaaaagtctccctccaccagccacgatgtttctgtgcctcaggagagccagggcgcctcccccacagggtctcctgacgctggagtcagcggctccaaatacgatgtggccgctgaaggggaggacgaggaaagcgtttctgcctcccaaaaggcgattatcttcaaacggcttagcaaggatgccgtgaaaaagaaggcttgtaccctggcccagtttctccagaaaaagttcgagaaaaaggaatctattctgaaagctgacatgcttaagtgcgtccgcagagagtataaaccctactttccgcaaatcctgaatcggacgtcccagcatctcgtggtggccttcggagtcgaactgaaggagatggacagctccggcgagtcttataccctggttagcaagctcggcctgccttccgaagggattctttctggagataacgccctgcccaaaagcggcctcctgatgtcccttctggtggtgatctttatgaatgggaactgtgctacagaggaagaggtctgggagttcctcggactgctgggcatctacgacgggattctccacagcatctatggagatgcgcgcaagattatcaccgaagacctggtgcaggataaatacgttgtgtacagacaggtctgcaattctgaccctccctgttatgagtttctttggggcccccgggcctacgctgaaacaaccaagatgcgcgtgctgagagttctcgccgattccagcaacacgtctcctggcctgtatccgcatctttacgaggacgccctgattgatgaagtggagcgggctctccgcctgagagcctga

SEQ ID NO: 3310 - RNA, 3429 nt, synthetic construct
  misc_feature 1..3429: note = CCDS35417.1 variant
  source 1..3429: mol_type = other RNA
atgggcgacaaggatatgcccaccgccgggatgcctagcctgctccagtcctctagcgagtccccgcaatcttgccccgaaggagaggacagccagtcccctctgcagatcccccagtctagccctgaatccgatgacacactttaccccctgcaaagccctcagtctagatccgagggcgaagatagctctgacccgctccagcggccccctgaggggaaagattcccagagccccctgcaaattcctcagtcttcccccgagggagacgatacgcagagcccgcttcagaactcccaatctagccctgaaggcaaggactccctgagccccctcgagatctctcagtcccctcccgaaggggaggatgtgcagagccccctgcaaaatcctgcttctagcttcttttcctctgccctgctcagcattttccagtccagcccggagtctacccagtccccctttgaaggattccctcagagcgtcctgcaaatccccgtttctgcggcttccagctccacacttgtgtctatttttcagagctcccctgagtctacccagagccccttcgaaggctttccgcagtcccctctgcaaatccccgtgagccgctctttctccagcacactcctgtctatctttcagtccagccctgagagaacccagtctacattcgaaggctttgcccagagcccccttcaaattcctgtctccccctcctcttccagcaccctgctctccctgttccagtcttttagcgagcggacgcagtccaccttcgaggggttcgcccagtctagcctgcaaatcccggtgtccccttcttttagctccacactcgttagcctgttccagtcttcccccgaacgcacccagagcacatttgagggattcccccaatctcctcttcagattccggtgtcctcctcttccagctccaccctgctcagcctgtttcagtctagccccgaaagaacgcactccacattcgagggctttcctcagtctcttctgcaaatccccatgaccagctccttctctagcacactcctgtccatttttcagtctagccctgaatccgctcagagcaccttcgaggggtttccccagtctcctctgcaaatccccggatccccgagcttctcttccaccctcctgagcctttttcagtcctctcctgagcggacacatagcacgttcgaaggcttcccccagtcccctctgcagattcccatgaccagctctttttccagcacactcctgtctatccttcaaagctccccggagtctgcccagagcgctttcgaagggtttcctcagtcccctctgcaaatccccgtctctagctccttcagctataccctcctgtctctgtttcagtccagccccgagcgcacacactccaccttcgaaggatttccccagtctcctctccagattccggtgagctcctctagctccagctctacgctgctttccctgttccaaagctctcccgagtgtacacagtccacctttgagggcttccctcagagccccctccagatccctcaatctccccctgaaggcgagaacacccatagcccgctgcagattgttccctccctgcctgaatgggaggactctcttagcccccactactttcctcagtccccgccccagggggaggatagcctctcccctcattatttcccccaatctccccctcagggagaagacagcctgtcccctcactactttccccagtctccgcagggcgaggacagcctgtcccctcactatttcccccaatctccccctcagggggaagatagcatgagccccctctacttcccgcagagccctctgcaaggagaggaatttcagtcttcccttcagagccccgtgtctatctgctccagctctacaccttccagcctgccccagtccttccctgagagctctcaaagcccgcccgagggccctgtccagagccccctccattctccccagagccctccggaagggatgcactcccagtctcccctgcaaagccctgagtccgcccccgaaggagaggactctctgagccctcttcagattccccagtcccctctcgaaggcgaggatagcctgtcttccctgcattttccgcagagccctcccgagtgggaagactctctcagccccctgcacttccctcaatttcccccgcagggcgaggatttccagtcctcccttcaatctcctgtgagcatctgttccagctctacctccctgagcctcccccagtcttttcccgaaagccctcagtcccctcccgaggggccggcgcagtctcccctgcaaagacctgtgagctccttcttttcttatacactggccagccttctccagtccagccacgaatctccccagtcccctcccgagggaccggctcagagccctctgcaatcccccgtctctagcttcccttcctctacgagctccagcctgtctcagtccagccccgtttcttcctttcctagctctacctccagctctctcagcaaatccagccccgagtccccgctgcagtctcctgtgatcagcttctcctctagcacatccctttctcccttcagcgaagagtccagctctcccgtggacgaatacacctccagctctgatacactgctcgagtccgacagcctgaccgattctgagtccctgattgaaagcgagcctctttttacgtacaccctcgacgaaaaggtcgatgagctggcccggttcctgctcctgaaatatcaggtgaagcaaccgatcacaaaggctgaaatgcttaccaatgttatttctcgctacacaggctattttcccgtgatcttcagaaaagcccgggagtttattgagatcctgttcgggatctccctccgcgaagtcgaccctgacgatagctacgtgtttgttaacaccctggacctgacgagcgagggatgcctttccgatgaacagggcatgtctcagaatagactgctcattctgatcctcagcattatcttcattaaggggacatatgcgtccgaggaagtgatctgggacgtcctgtctggcattggagtgcgggccggccgcgagcattttgctttcggggagcccagagaacttctgaccaaagtctgggtgcaggagcactacctcgaatatcgggaggttcctaacagctctccccctagatacgaatttctgtggggaccccgcgcccattccgaggtgatcaagcggaaagtcgtggagttcctggctatgcttaagaatacagttccgatcacctttcctagctcctacaaggatgccctgaaagacgtggaagagagagcccaagctattatcgataccacagacgatagcacggcgaccgaatctgcctccagctctgtcatgtcccccagcttctcctctgagtga

SEQ ID NO: 3311 - RNA, 1122 nt, synthetic construct
  misc_feature 1..1122: note = AAF07210 variant
  source 1..1122: mol_type = other RNA
atgccccctgtgccgggcgtccccttcagaaacgttgacaatgatagccctacctccgtggagctggaagactgggtggatgcccagcaccccacagacgaggaagaggaagaggcttctagcgcctcctctacgctctacctggtctttagcccttcctctttcagcacctccagctctcttatcctcgggggacccgaggaagaggaagtgccttccggcgttattccgaacctgacagagagcatcccctcttcccctccccaagggcctccccagggaccgagccagtctcctctgtccagctgctgttcctcttttagctggtccagcttctctgaggaatccagctctcagaagggcgaggataccgggacatgccaaggacttcccgacagcgaatcctcttttacctatacactggatgagaaagtggcggaactcgtcgagttcctgctgctcaagtacgaggctgaagaacctgtgaccgaagccgagatgctgatgattgttatcaaatataaggactactttcccgtgattcttaaacgggcccgcgagttcatggagctgctctttggcctggctcttatcgaggtcggccccgatcatttctgtgtgtttgccaatacggtggggctgaccgacgaaggaagcgatgacgagggcatgcctgaaaactccctcctgatcattatcctgagcgtcattttcatcaaggggaattgcgcttctgaggaagttatttgggaggtgctcaacgccgtgggagtctatgcgggcagagagcactttgtgtacggggaaccgcgggagctgcttacaaaggtttgggtgcagggacattatctggaataccgcgaggtcccccactccagccctccctactatgagttcctctggggccctagagcccattctgaatccatcaaaaagaaagtgctggagttccttgctaagctgaataacaccgttcccagctcctttccgtcttggtacaaagatgccctcaaggacgtggaggaacgggtccaggctacaattgacaccgccgatgacgcgacggtgatggccagcgaatccctgtctgtcatgagctccaatgtgagcttctctgagtga

SEQ ID NO: 3312 - RNA, 1932 nt, synthetic construct
  misc_feature 1..1932: note = AAM08355 variant
  source 1..1932: mol_type = other RNA
atgctgctcccctgccactgggtgctggacgccaccttcagcgatggctcccttgggcagtgggtcaagaacacatgtgctacgtacgccctgtctcctgttgtgctcccgccccaacctcagccccggaaaaaggcgaccgacaaagattatagcgcttttcatctgggacaccttagagaggtgcgcctgttcctcagaggcgggacatccgaccagcggatggattctctggtcctgtgccctacctactttaagctctggcgcacactgagcggatcccccggccttcagctgtctgacctccatttcgggagccaacctgaaggaaaattttccctgagacgggccgtgagcgttaagcagcgcgaggaaccgcaggattggccccttaatgagaagagaaccctgtggaaagactctgatctccctacatggcggcgcggcaccggctatacgctgtccctgcccgccgtgagccctgggaagagactctggggagaaaaagctggctctctgcccgagtccgagccgcttttcacctacacactggacgaaaaggtcgataaactcgtgcagtttctgcttctgaagtatcaagccaaggagcctctcacccgggctgaaatgcagatgaacgttatcaatacatacaccgggtatttccccatgatttttcgcaaagccagagagttcatcgagattctgtttggaatcagcctgacggaagtggaccctgatcacttctacgtctttgtgaacacactcgacctgacctgtgagggctctctttccgacgaacaggggatgccccagaatcggctgctcattctgatccttagcgtgatcttcattaagggaaactgcgcgtccgaggaagtcatctgggaggttctgaatgccattggcccctggtctgctctcgccggcttcgctgatgtgctgagccgcctggccctctgggagtccgaagggcctgaggcgttttgtgaagagagcggactgagatctgccgaaggctccgtgcttgacctggctaacccgcaagggctcgccggacatcggcaggaggatggcagacgcgggctgacagaggctagcccccagcagaaaaagggaggcgaagacgaggatatgcctgccgccggcatgccccctctgccccaatctccgcctgaaattccccctcaggggccccctaaaatcagcccccagggaccgcctcaatcccctccccagtctccccttgacagctgctccagcccgctcctgtggacccggctggatgaggaatcttccagcgaggaggaagacaccgctacatggcacgcgctccccgagtctgaatccctgcctagatacgcccttgatgagaaggtcgctgagctggtgcagttcctcctgctgaaatatcagacgaaggaacccgttaccaaggccgagatgcttacaaccgtgatcaaaaagtacaaagactattttcctatgattttcggcaaggcccacgaatttatcgagctcatcttcgggattgctctgacagatatggaccccgacaatcatagctactttttcgaagataccctggacctcacgtatgagggatccctgatcgatgaccaaggcatgcctaaaaactgtcttctgattctcatcctgtctatgatttttatcaaggggagctgcgtccccgaggaagtgatctgggaggttctgtccgccattggcccgatccagcgccctgcgcgggaagtgcttgagttcctctctaagctgagctccattatccccagcgcttttccttcttggtacatggatgccctgaaagacatggaagatagagcccaggctattatcgacacaaccgatgacgccaccgctatggcctccgcgagcccctctgtcatgtccacaaatttctgtccggagtga

SEQ ID NO: 3313 - RNA, 2337 nt, synthetic construct
  misc_feature 1..2337: note = AAG23757 variant
  source 1..2337: mol_type = other RNA
atggcccagaagatggactgcggcgctgggctgctcggattccaagccgaggcgagcgtggaagattccgctctgcttatgcagaccctgatggaggccatccagatttctgaagctccccctacaaaccaggctacggccgctgccagcccgcaatcctctcagccccctaccgcgaatgagatggccgacatccaggtcagcgctgccgctgccagacccaaatccgcgtttaaggttcagaacgccacaaccaaaggccctaatggggtgtacgatttctctcaagctcacaacgccaaggacgtgcccaatacacagcctaaagctgcctttaagagccagaacgccaccccgaagggacccaatgctgcgtatgatttctcccaggccgctacaaccggcgaactcgccgccaacaaaagcgagatggcttttaaggcccaaaatgcgacgaccaaagtcgggcctaacgctacatacaatttctctcagtccctgaacgccaatgaccttgccaacagccggcccaagaccccttttaaagcctggaatgatacaaccaaggcccccacggctgacacacagacccaaaacgtgaaccaggccaagatggcgacatctcaggccgatattgagaccgacccgggaatctccgaacctgatggcgctaccgcccagacaagcgctgacggctctcaagcccagaatctggagtcccgcacgattatcagagggaaacggacccgcaagatcaacaatctcaacgttgaagagaatagctccggagatcagagacgggcgcccctggccgctggcacatggcgctctgcccctgtgcccgtcaccacacagaatccccctggggctccgcccaacgtgctgtggcaaacccctctcgcctggcagaaccccagcggatggcagaatcagacggccagacaaacacctcccgctcggcagtccccgcctgcgcgccagacccctcccgcctggcagaaccccgttgcttggcaaaatcctgtgatttggcccaacccggtcatctggcagaatcctgtgatttggcccaaccccatcgtgtggcctggcccggtcgtttggcccaatcctctggcctggcagaatccccctgggtggcaaacccctcccggatggcagacacccccgggctggcagggccctcccgactggcaggggcctcccgactggccgcttcctcccgattggcctctgcctcccgactggcccctcccgaccgattggcccctgcctcccgactggattcctgccgattggcccatccctccggactggcaaaaccttagacccagccctaacctgcggccctctcctaactcccgcgctagccagaatcccggagccgcgcagccgagagatgtggctctcctgcaggagcgggccaacaaactggtgaagtatctcatgctgaaagactacacaaaggtccctattaaacgctctgaaatgcttagagatatcatccgggagtatacggacgtgtaccccgaaattatcgagagagcctgtttcgttctggaaaagaagtttggcattcaactcaaagagatcgataaggaggaacatctgtatattcttatcagcacccccgagtccctggctgggatcctcggaacaaccaaagacacacctaagctgggcctgctcctggtgattcttggggtcatcttcatgaatggaaaccgcgcctctgaagcggtgctgtgggaggctctccggaaaatgggcctgagacccggcgttcgccaccctcttctgggggacctccggaagctgctgacctacgaatttgtgaagcagaaatacctcgattatagacgcgtcccgaatagcaatccccctgagtacgagttcctgtggggacttcggtcctatcatgaaacgagcaagatgaaagtgctgagatttattgccgaggtccagaagcgcgacccccgggattggaccgcccagttcatggaagctgccgacgaggctctcgatgccctggacgcggccgctgccgaagctgaggccagagccgaggctcgcacacggatgggcatcggggatgaagcggtgtctggaccttggtcctgggacgatattgagttcgaactgcttacctgggacgaggagggcgattttggggacccctggagcagaatcccgttcacattttgggcccggtaccaccaaaacgctcgctctagattccctcagacctttgccggccccatcattggacctggcgggacggcctccgctaacttcgccgcgaattttggagctatcggcttcttttgggttgaatga

SEQ ID NO: 3314 - RNA, 1821 nt, synthetic construct
  misc_feature 1..1821: note = AAD28598 variant
  source 1..1821: mol_type = other RNA
atgagcgacacctccgagtctggcgccgggctgacaagattccaggctgaagccagcgagaaggattcctctagcatgatgcaaacgctcctgaccgtgacacagaacgtcgaagttcccgagacccctaaagcgtccaaggctcttgaagtgtctgaggacgtgaaagtcagcaaggcctccggagtgagcaaagccacagaggtttctaagaccccggaagctcgggaggcccccgctacacaggcctccagcaccacgcagctgaccgatacacaagtgctcgcggccgaaaataagtctctggctgccgacaccaaaaagcagaacgctgatcctcaggccgtcacaatgcccgcgaccgagacgaaaaaggtgtcccacgttgccgacacaaaagtgaataccaaggctcaggagacagaagccgctcctagccaagcccccgccgatgagcctgaaccggagtctgctgcggcccagtcccaggaaaaccaggacacccgccccaaggtcaaagctaagaaagccagaaaggtgaaacatcttgatggcgaggaggacgggagctccgatcaatctcaggccagcggaaccacaggcgggcggcgcgtgtccaaggctctgatggccagcatggcgagacgggcttctcgcggacctatcgccttttgggccagacgggcttcccgcacgagactcgccgcttgggcccggcgcgcgctgctgagcctcagatctcccaaagcccggcgcggcaaggctagacggagagccgctaagctgcagagctcccaagaacctgaggccccgccgcctcgcgacgtcgcgcttctgcagggccgggccaatgatctcgttaaatacctgcttgctaaggaccagaccaaaattcccatcaagagatctgacatgctgaaagatattatcaaggaatatacagacgtgtaccctgagattatcgaacgcgccgggtatagcctcgagaaggtgttcggaatccagctgaaagagattgataagaacgaccacctgtacatcctcctgtccacccttgaacccacagatgctggcattctggggaccacgaaagacagccccaagctcggactgcttatggtcctgctctctatcatttttatgaatggcaaccggtccagcgaggccgtgatctgggaagttctgagaaaactggggctccgccctggcattcatcactctctgttcggagatgtgaagaaacttatcacagacgagtttgtcaagcaaaagtatctggattacgcccgggtgcccaattccaatccccctgaatatgagttcttttggggcctcagaagctactacgagacctccaaaatgaaggttctgaaattcgcttgcaaggtgcagaagaaagaccccaaggaatgggcggcccagtatcgcgaggctatggaagccgatcttaaagccgctgccgaggcggctgccgaggccaaggctcgggccgaaatcagagcgcgcatggggattggactgggctctgagaacgctgccgggccttgtaactgggacgaagccgacatcggaccctgggctaaagcccggattcaggctggcgccgaggcgaaggccaaagctcaagaaagcgggtccgcctctaccggagctagcacatccaccaataacagcgcctctgcctccgctagcacatctggcggcttttccgcgggggccagcctcacggctaccctgacattcggactgtttgccggcctcgggggagccggcgcttctaccagcgggtccagcggcgcctgcggattctcttacaagtga

SEQ ID NO: 3315 - RNA, 2226 nt, synthetic construct
  misc_feature 1..2226: note = AAH63838 variant
  source 1..2226: mol_type = other RNA
atggccgagggcagcttctccgtgcagtctgaaagctactccgtcgaggacatggatgaagggtctgacgaggttggagaagaggagatggtggaaggcaacgattatgaggaatttggggctttcggaggctacgggaccctgacatcctttgacatccacattctcagagccttcggatccctgggccccggccttcggatcctgtctaatgagccttgggagctcgaaaacccggtgctggcgcaaacgcttgtcgaggctctgcagctcgatcccgaaaccctggccaatgagacagccgctcgcgccgctaacgtggccagagcggccgctagcaatcgggccgctcgcgccgcggccgctgccgctagaaccgccttttcccaggttgtggccagccatcgggtcgctacacctcaggtgtctggggaagacacccaacccacaacctatgcggccgaggctcagggacctacgcccgagcctccgctggccagcccccagaccagccagatgctcgttacatctaagatggccgctcctgaagcccccgcgacctccgctcaaagccagacaggctctcctgcccaggaggccgctaccgaagggccctccagcgcctgcgctttctcccaggccccgtgtgcgcgcgaggtggatgccaacagaccttctacggcttttctgggacaaaatgacgtcttcgattttacacagcccgccggcgtgagcgggatggctttccctcggcccaaacgccccgcccctgcgcaggaagccgctaccgagggaccgtccgccgctagcggcgtgccccaaacaggccctgggagagaggtcgccgccacccggcccaagaccacaaaatctggaaaggctcttgcgaaaacgcgctgggttgaacctcagaacgtggtggccgctgccgccgctaaggccaagatggcgacctccattcccgagccggaaggcgctgccgccgctacagcccagcacagcgcggagccttgggctagaatgggagggaaacggaccaagaaatctaagcatctggacgatgaatacgagagctccgaggaggaacgcgaaacacccgccgtccctcccacctggagagcctctcagcctagcctcacggtgcgggctcaactggcccccagaccgcctatggctccccgctcccagatccccagccggcacgttctttgcctgcctccgagaaatgtgacactcctgcaggagcgcgccaacaaactggtcaagtatctcatgattaaggactacaaaaagatccccatcaaacgggcggatatgctgaaggacgtgattagagagtatgacgaacattttcctgagatcattgaacgcgccacctacacccttgagaaaaagttcggcatccacctgaaagaaattgataaggaggagcacctctacatcctggtttgtacacgggactcttccgctagacttctggggaagaccaaagatacaccccgcctcagcctgctgctcgtgattctgggagtcatctttatgaatggcaaccgggcctctgaagctgtgctttgggaggccctgagaaagatgggcctccgccctggggtccggcatcccttcctgggagaccttagaaaactgatcacggatgacttcgtgaagcagaaatatctcgaatacaagaagattcctaattccaatcccccggagtatgaatttctgtggggcctgcgggcccgccacgagaccagcaaaatgagagttctccggttcatcgctcaaaatcagaacagagatcctcgcgagtggaaggcgcattttctggaagccgtggacgatgctttcaaaacaatggacgtcgatatggccgaggaacacgcccgggctcagatgagagcccagatgaacattggggacgaggcgcttatcggacgctggtcctgggacgatattcaagtggaactgctcacctgggacgaggatggcgactttggggatgcttgggccagaatccccttcgccttttgggctcggtaccaccagtatatcctgaactctaaccgcgccaatagacgggcgacatggcgcgctggcgttagctccggaaccaacggcggggcctctacgagcgtgctggacggaccttccaccagctctacaattagaacccggaatgccgctcgcgccggcgcttccttctttagctggatccagcatagatga

SEQ ID NO: 3316 - RNA, 1122 nt, synthetic construct
  misc_feature 1..1122: note = CAG33449 variant
  source 1..1122: mol_type = other RNA
atgccccctgtgccgggcgtccccttcagaaacgttgacaatgatagccctacctccgtggagctggaagactgggtggatgcccagcaccccacagacgaggaagaggaagaggcttctagcgcctcctctacgctctacctggtctttagcccttcctctttcagcacctccagctctcttatcctcgggggacccgaggaagaggaagtgccttccggcgttattccgaacctgacagagagcatcccctcttcccctccccaagggcctccccagggaccgagccagtctcctctgtccagctgctgttcctcttttagctggtccagcttctctgaggaatccagctctcagaagggcgaggataccgggacatgccaaggacttcccgacagcgaatcctcttttacctatacactggatgagaaagtggcggaactcgtcgagttcctgctgctcaagtacgaggctgaagaacctgtgaccgaagccgagatgctgatgattgttatcaaatataaggactactttcccgtgattcttaaacgggcccgcgagttcatggagctgctctttggcctggctcttatcgaggtcggccccgatcatttctgtgtgtttgccaatacggtggggctgaccgacgaaggaagcgatgacgagggcatgcctgaaaactccctcctgatcattatcctgagcgtcattttcatcaaggggaattgcgcttctgaggaagttatttgggaggtgctcaacgccgtgggagtctatgcgggcagagagcactttgtgtacggggaaccgcgggagctgcttacaaaggtttgggtgcagggacattatctggaataccgcgaggtcccccactccagccctccctactatgagttcctctggggccctagagcccattctgaatccatcaaaaagaaagtgctggagttccttgctaagctgaataacaccgttcccagctcctttccgtcttggtacaaagatgccctcaaggacgtggaggaacgggtccaggctacaattgacaccgccgatgacgcgacggtgatggccagcgaatccctgtctgtcatgagctccaatgtgagcttctctgattga

SEQ ID NO: 3317 - RNA, 2874 nt, synthetic construct
  misc_feature 1..2874: note = AAM08354 variant
  source 1..2874: mol_type = other RNA
atgagcctggtgtcccagaactctagacggcgcagacggcgcgtcgccaaggctaccgcccacaatagctcctggggcgagatgcaagcgcccaacgctcctgggctcccggccgacgttcccggatctgatgtgcctcagggccccagcgactcccagatcctgcaggggctttgcgcctctgaaggacctagcacatccgtgctgcccacgagcgctgagggcccttctaccttcgtcccgcccacaatttccgaagccagctctgcttccgggcaacctaccatcagcgagggacccggcacatctgtgctccctaccccctccgaaggcctgagcacatccgggccgcctaccatttctaaaggactttgtacgagcgttaccctggccgcgtccgagggcagaaatacaagccggccccctacctcttccgaggaacccagcacatctgtgccccctaccgccagcgaggtcccgtccacgtctctgccccctacacccggggaaggaaccagcacatccgtgcctcccaccgcttacgagggcccgagcacctctgttgtgcctacacccgatgaggggccttccacgagcgtcctccccacccctggagaaggccccggcacatctgtgccgctggccgctaccgaggggctctccacaagcgtgcaggccacccctgacgaaggaccctccacgtctgtgccccctacagcgaccgagggcctgagcaccccggttccccctacacgcgatgaagggccctccacctctgtgcctgccacacccggagagggccctagcacgtccgtgcttcccgctgccagcgacgggcagtctatctccctggtcccgaccagaggaaagggcagctctacatccgtgcctcccaccgctacagagggcctcagcacctctgttcagcctacggccggggaaggaagctccaccagcgtgcccccgacacctggcgggggactgtctacctccgtgccccctacagccaccgaggaacttagcacgtccgtccctcccacacccggcgaggggccgtctaccagcgttctgcccattcctggcgaaggactctccacatctgtgccccctaccgctagcgatggctccgacacctctgtgccccctacaccgggggagggagcgagcacgctggtccaacccaccgcccctgatggccccgggtccagcgtcctgcctaaccccggagagggcccgtctacactcttttccagctctgcttccgtggaccggaatcctagcaaatgctctctggttcttcccagcccccgcgtgaccaaggcctccgtcgattccgacagcgaagggcctaaaggcgccgagggacccatcgagttcgaagtgctgagagattgtgaatctcctaacagcatctccattatgggcctcaatacatctcgggttgctatcaccctgaagccgcaggaccccatggagcagaacgtggccgagcttctgcagtttctcctggtcaaggaccaaagcaaatatcctattcgcgaatccgagatgagagaatacatcgtgaaggagtatcggaatcagttccccgagattctgcgcagagcggctgcccatctcgaatgcatctttcggttcgagctgagagaacttgatcctgaggcccacacgtacattctgctcaacaaactggggcccgtgccgtttgaaggacttgaggagtctcctaatggccccaagatggggctgctcatgatgatcctgggacagatcttcctgaacggcaatcaagctaaagaagccgagatttgggaaatgctctggcgcatgggggttcagcgggagagacgcctgagcatctttggcaaccctaagcggcttctgtccgtcgagttcgtgtggcagagatatctcgactaccgccccgtgacagattgtaagcctgtcgaatatgagtttttctggggaccccggtctcatctggaaaccaccaaaatgaagattctgaaatttatggctaagatctacaataaagacccgatggattggcctgagaagtacaacgaagcccttgaggaagacgcggccagagctttcgccgagggctggcaggctctcccccacttccgccggccctttttcgaggaagccgcggccgaggtgcctagcccggattccgaagttagctcttattccagcaaatacgctccccattcttggcctgagtccagactggagagcaaggcccgcaagctggtgcaactctttctgcttatggactccacaaaactgcccattcctaagaaagggatcctctattacatcggacgggaatgctctaaggtcttccccgatctgctgaacagagctgcccggacccttaatcacgtgtatggcacagagctcgttgtgctggaccctcgcaaccacagctacacgctgtataatagacgggaaatggaggaaaccgaggagattgtcgattccccgaacagacccgggaataactttctcatgcaggtcctgagcttcatctttattatgggaaatcatgcccgcgaatctgctgtttgggcgttccttcggggcctgggggtgcaggccggcagaaaacacgtcatcacatgtcgctacctctcccagagatacattgacagcctgcgggtgcctgactctgatcccgtgcaatatgagtttgtctggggacctcgcgctagactggaaaccagcaagatgaaggcccttcggtacgttgcccgcatccatagaaaagagccccaggactggccgcagcagtatcgggaagctatggaggatgaggccaaccgcgcggacgtgggccacagacaaatcttcgtgcacaattttcggtga

SEQ ID NO: 3318 - RNA, 1572 nt, synthetic construct
  misc_feature 1..1572: note = AAH93964 variant
  source 1..1572: mol_type = other RNA
atgagcctggtgtcccagaacgccagacactgctctgctgagatcaccgccgactacggcgatgggcggggagaaattcaagcgacaaatgctagcggctcccccacgtctatgctcgtcgttgacgcccctcagtgtccgcaggcccccatcaacagccagtgcgtgaatacctcccaagctgtgcaggatcctaacgacctggaggtccttattgatgaacagtctcgcagactgggggccctccgggtgcatgaccccctggaggatcgcagcatcgctcttgttaatttcatgagaatgaagtcccagacagaaggaagcattcaacagtctgagatgctggagtttctccgggaatattccgaccagttccctgagatcctgcgcagagccagcgcgcacctggatcaggtgtttggcctcaacctgcgggtcatcgacccccaagccgatacctacaatcttgtgtctaaacgcgggttccagattacagacagaatcgctgaatccctggatatgcctaaggccagcctcctggctcttgttctgggacatattctcctgaacggcaatcgggcccgcgaggcgtctatctgggacctgctcctgaaagtggacatgtgggataagccgcagagaattaacaatctttttggcaacacccggaatctgctcacaaccgacttcgtctgtatgcgctttctggagtattggcccgtgtacgggacgaaccctcttgagttcgagtttctgtggggatccagagcccaccgggaaatcaccaaaatggaggctctcaagttcgtgagcgatgcccatgacgaagaaccctggtcctggcctgaggaatataataaggctctggagggcgataaaacaaaggaaagatctctgaccgccgggctcgagttttggagcgaagacacaatgaacgataaagccaacgacctggtccaacttgctatttccgttaccgaggagatgctgcccatccaccaggatgaactcctggcgcacacgggaaaggagttcgaagacgtgtttccgaatatccttaaccgcgccacactgattctcgatatgttctacggcctgagcctgatcgaggtggacacctctgaacatatttatctcctggtccagcagcctgagtccgaggaggaacaagtgatgcttgaaagcctggggcggcccacacaggagtacgttatgcctatcctcggactgattttcctgatgggcaatagagtgaaagaggctaacgtctggaatcttctccgccggttttctgtggacgttggcagaaagcacagcatcacccgcaagctgatgcggcagagatacctggaatgccgccccctctcctattctaaccccgtggagtacgaactgctttgggggcctcgggcccatcacgagaccatcaaaatgaaggtcctggaatatatggccagactctaccgcaaacggccgcagaattggcccgagcaatatagagaggctgtggaagatgaggaagcccgggctaagagcgaggcgacaattatgttctttctggaccctacgtga

SEQ ID NO: 3319 - RNA, 924 nt, synthetic construct
  misc_feature 1..924: note = CCDS3269.1 variant
  source 1..924: mol_type = other RNA
atgctgcagacccccgagagcagaggcctccctgtgccgcaagccgaaggggagaaggacggaggccacgatggggaaacacgggctcccacggcctcccaggagcgccctaaagaagaactgggagcgggcagagaggaaggggctgccgagcccgcccttacccggaagggagctcgcgccctggctgccaaagcgctcgccagacggcgcgcttacagacggctgaaccgcacagtcgccgaacttgttcagttcctgctcgtgaaggacaaaaagaagtctcctatcaccagaagcgagatggtgaaatatgtcattggcgatctgaagatcctgtttcccgacattatcgctcgggccgcggagcatctccgctacgtgttcggctttgaactgaaacagttcgatagaaagcaccatacatatattcttatcaataaactgaagcctctcgaggaagaggaagaggaggaccttgggggagatggcccgcggctggggctgctcatgatgatcctgggactgatttacatgcgcggcaactccgccagagaagctcaagtttgggagatgctccggagactgggggtgcagccctctaagtatcactttcttttcggataccctaaacgcctgatcatggaagactttgtccagcagcggtatctcagctacagacgcgtgccccataccaatcctcccgagtacgagttctcctggggcccgcggtctaacctggagattagcaagatggaggttcttggctttgtggccaaactgcacaagaaagaacctcaacactggcccgtccagtatagagaggctctcgccgatgaagccgaccgcgctcgggcgaaggccagagctgaggcctccatgcgcgcccgggctagcgccagagcggggatccatctgtggtga

SEQ ID NO: 3320 - RNA, 660 nt, synthetic construct
  misc_feature 1..660: note = AAD31314 variant
  source 1..660: mol_type = other RNA
atgcccagaggccggaagtctcgcagacggcgcaacgccagagctgccgaggaaaatcggaacaatcgcaaaatccaggcgtccgaggcttctgaaacccctatggccgccagcgtggtcgcttccacaccggaggacgatctgtctgggcccgaagaggaccctagcacgcccgaggaagcctccaccacacctgaggaagctagcagcaccgcccaagcgcagaagccctccgttcctagaagcaacttccagggaacaaagaagtctctcctgatgtccattcttgccctgatctttattatgggcaatagcgctaaagaggccctcgtgtggaaggtgctggggaaacttggaatgcagccgggccggcaacactctatcttcggggatcccaaaaagattgtcaccgaggaatttgtgcgcagaggatacctgatctataaacctgttccccggtccagccctgtggagtacgagttcttttggggcccccgcgctcatgtcgaatcttccaagctcaaagtgatgcacttcgttgccagagtgcggaaccgctgcagcaaggactggccgtgtaattatgattgggactccgatgacgatgcggaagtcgaggccatcctgaactctggcgctagagggtacagcgccccttga

SEQ ID NO: 3321 - RNA, 3750 nt, synthetic construct
  misc_feature 1..3750: note = CCDS73700.1 variant
  source 1..3750: mol_type = other RNA
atgagccagctgtccaagaacctcggcgactctagcccgcctgccgaggctccgaaaccccctgtgtactccagacccaccgtcctgatgcgggcccctcccgcgtctagccgcgctcctccggttccctgggatcctccccctatcgaccttcaagcctccctggccgcttggcaggcgccccagccggcttgggaagcccctcaggggcaactccccgcgcctgtggtgcccatgacacagccccctgccctgggaggcccgattgtccccgctcctccccttgggggacctatgggcaagcccccgacgcctggggtgctgatggttcatccccctccccctggagcccccatggctcagccgcctacccccggcgtgctcatggtccacccctctgcccctggcgcgccgatggcccatccccctccccctgggacacccatgagccaccctcccccgcctggaacccccatggctcaccctcccccgcctggcacacccatggcccatcctcctccgcccgggacccccatggtgcatccccctccccctggaacacccatggctcaccctccgccccctggcacccccatggcccaccctcccccgcctgggacgcccatggcccatccccctccccctggaaccccgatggctcatccccctccccctggcacacccatggcgcagccgcctgcccccggcgttctgatggctcaacctctgacccccggggtgctcatggtccagcctgccgcccccggagctccgatggtgcagcctcctcccgccgcgatgatgacacagccccaaccgtccggcgctcccatggccaaacctcccgggcctggagtgctgatgatccatccccctggcgccagagctccgatgacccagccccctgccagcggggctcccatggcccagcctgcggctcccccggcccaacctatggcccctcccgctcagcccatggcctcttgggcgccccaggcccagcctcttattctgcaaatccagtcccaggtcattcgggctccgccccaggttcctcaaggaccccaggcccctcccgctcagctcgccacgccgcctggctggcaggccacaagccccggctggcaagctacccagcaggggtggcaggcgacacctctgacctggcaaaccacacaggtgacgtggcaggcccccgctgtgacctggcaagtccctcccccgatgcgccagggacctcctcccatcagacccggcccgccccctatccggcccgggcctccccctgtgcgccaggctcccccgcttattagacaggcccctcccgttatccggcaagcccctcccgtgattcgccaggccccgcctgtcatcagacaggcgcccgctgtgattcggcaggctccccctgttatccgccaagcgccccctgtgattagacaggccccgcccgtcatccggcaggcccctcccctgatccgccaggcccctccccctattagaccggctccccaagtgctcgccacacagcctcccctgtggcaggccctgcctcccccgcctcccctccggcaagctccccaggccagactgcctgctccccaggtccaggccgcgcctcaagtgccgaccgctccccctgccacacaggttcccgccgctcctcccgccggaccccaggtgcctcagcccgtccttcctgctcccctgtctgccccgctctccgcgcctcaagccgtgcactgccccagcatcatttggcaggctcccaagggccagcctcccgttcctcacgagatcccgacctctatggagttccaggaagtgcaacagacgcaggccctggcctggcaggctcaaaaagcccccacacacatttggcagcctcttcccgcgcaggaagctcaacgccaggcccctcccctggtccagctcgagcagccttttcaaggggccccgccctcccagaaggctgtgcagatccagctgcctccccaacaggcccaggcgagcggccctcaggctgaggtgcccaccctgccgctccaaccttcctggcaggcccctcccgccgttctgcaggctcaacccggaccccctgtcgccgctgccaatttcccgcttggctctgccaagagcctgatgaccccctccggggaatgtcgggccagctctatcgatagacgcggatccagcaaagagcggagaacatctagcaaggaacgccgggctccttccaaagacagaatgatttttgccgctaccttctgcgcccccaaggccgtgtctgctgcgcgcgcccacctccctgctgcctggaaaaacctgcccgccacaccggagacgtttgctcctagctccagcgtgttccccgccacctctcagtttcagcctgcgtcccttaatgctttcaagggccccagcgccgcctctgagacacctaagtccctgccctatgctctccaggatccgtttgcctgtgtcgaagcgctgcccgccgtgccttgggttccccaacctaacatgaatgctagcaaagcctcccaggctgtgccgaccttcctgatggccacagctgccgcgccccaggccaccgctacgacccaggaggcctctaagacaagcgtcgaacctccccggagatccgggaaagctacccgcaagaaaaagcacctcgaggcccaagaagactctcggggacatacactggcctttcacgattggcagggccctagaccctgggagaaccttaatctgagcgactgggaggtgcagtcccctatccaggttagcggggattgggaacaccccaacaccccgcggggcctctctggatgggagggcccttccacgagccgcattctgtctgggtgggaaggaccctccgctagctgggcgctgtctgcctgggagggccctagcacatccagagctcttgggctcagcgaatctcccggatccagcctgccggtggtcgtgtccgaggttgcctctgtgagccctggctcctctgccacccaagacaatagcaaagtcgaggctcagcccctgtctcccctcgatgaacgggccaacgcgctggtgcagttccttctggtgaaggaccaggccaaggtccctgttcaaagatccgagatggtgaaagtgatcctccgcgaatacaaggatgagtgcctggacattatcaatcgggctaacaataaactggaatgtgcctttgggtatcagcttaaggagatcgacaccaaaaaccatgcttacattatcattaataagctcggctatcacacaggaaacctggtcgccagctacctggatagacccaagttcggcctcctgatggtggttctttccctgatcttcatgaaagggaactgcgtgcgcgaggacctcatttttaatttcctgtttaagctgggacttgatgtcagagaaaccaacggcctcttcgggaatacgaaaaagctgatcacagaggtgtttgttcggcagaaatatctggaataccgccggattccttacaccgagccggcggagtatgagttcctctggggacccagagcctttctggaaacaagcaagatgcttgtgctgcgcttcctcgctaagctgcataaaaaggaccctcaatcttggccctttcactacctggaagcccttgctgagtgtgaatgggaggataccgacgaggatgaacctgacacaggcgattccgcccacgggcccaccagcagaccgcctccccggtga

SEQ ID NO: 3322 - RNA, 282 nt, synthetic construct
  misc_feature 1..282: note = AAC39608 variant
  source 1..282: mol_type = other RNA
atgaagctgctcatggtgctgatgcttgccgctctgagccagcactgctacgccggctccgggtgtcccctcctggagaacgtcatctctaaaaccattaatcctcaagttagcaagacagaatataaagagcttctgcaggaatttatcgacgataacgcgacgaccaatgctattgacgagctcaaggaatgctttctgaaccagacagatgagaccctgtccaatgtggaggtgttcatgcagctcatctacgactctagcctgtgtgatcttttctga

SEQ ID NO: 3323 - RNA, 363 nt, synthetic construct
  misc_feature 1..363: note = AAH67220 variant
  source 1..363: mol_type = other RNA
atgaagctgctcatggtgctgatgcttgccgctctgagccagcactgctacgccggctccgggtgtcccctcctggagaacgtcatctctaaaaccattaatcctcaagttagcaagacagaatataaagagcttctgcaggagttcatcgacgataacgcgacgaccaatgctattgacgaactcaaggaatgctttctgaaccagacagatgagaccctgtccaatgtggaggtgttcatggtcatctcttttagctcctacaaactcttcaagtctccggaccagggacaagtgggcagctcctttctgacagataacgccaaggccaccagcgaacaggctttctcttatattgggtga

SEQ ID NO: 3324 - RNA, 357 nt, synthetic construct
  misc_feature 1..357: note = AAA19238 variant
  source 1..357: mol_type = other RNA
atgcccagagaggacgcccacttcatctacggctatcctaagaaagggcatggacacagctacaccacagctgaagaggccgcgggcattgggatcctgacggtgattctcggagtcctgcttctgatcggctgctggtattgtcggcgcagaaacgggtaccgggctctcatggataagtccctgcatgttggaacccagtgcgcccttacacgcagatgtccgcaagaaggctttgaccaccgggattctaaagtgagcctgcaggagaagaattgcgaacccgtggtccctaacgctccccctgcctatgagaaactctccgccgagcagtctccccctccgtacagcccctga

SEQ ID NO: 3325 - RNA, 1482 nt, synthetic construct
  misc_feature 1..1482: note = EAW93427 variant
  source 1..1482: mol_type = other RNA
atgctgcccagatgggagctcgccctgtaccttctggctagcctcggcttccacttttattccttctacgaagtgtataaggtctctcgggagcatgaagaggaactggaccaggagtttgagcttgaaaccgatacactgttcgggggactcaaaaaggacgccacggattttgagtggagcttctggatggaatggggcaaacaatggctggtttggctgctcctggggcacatggtggtgtcccagatggcgacccttctggctcgcaagcatagaccttggatcctcatgctgtacggaatgtgggcctgctggtgtgtccttggcacaccgggggtggccatggttctgctccacaccacaatttctttttgcgtggctcagttccggagccagctgctgacctggctctgttccctgcttctgctctctacactgcgccttcaaggagtcgaggaggtgaaaagacggtggtataagaccgaaaacgagtactatctgctccagtttacgctgaccgttcgctgcctgtactacacatccttctccctcgaactgtgttggcagcagcttcccgccgctagcacctcttattcctttccttggatgctggcctacgtgttctattaccccgtcctccataatggccctatcctgagcttttctgagttcattaagcaaatgcagcagcaggaacacgactcccttaaagcgagcctgtgcgtgctcgccctgggcctggggagactcctgtgttggtggtggcttgctgagctgatggcccacctcatgtatatgcatgctatctactcttccattcccctgctggagacagtgagctgctggacccttggaggcctcgccctggcgcaagtcctgttcttttatgttaagtacctcgtgctgttcggggtgcctgcccttctgatgcggctcgatggactgacgccgcccgctctgcctcgctgtgtctccacaatgttttctttcaccggcatgtggagatactttgacgtggggcttcacaacttcctcatccggtatgtttacatccccgtgggaggcagccagcatggcctgctggggacactcttttccaccgccatgaccttcgcttttgtcagctattggcacggaggctacgattatctgtggtgctgggccgcccttaattggctgggggtgacagttgaaaacggagtgcgcagactcgtcgagacgccttgtattcaggactctctggctcggtacttcagcccccaagcgcgcagacggtttcacgccgctctggccagctgctctaccagcatgcttatcctctccaatctggtgttcctgggcgggaacgaagtcggaaaaacatattggaatagaatttttatccagggctggccgtgggtgaccctctctgttctgggcttcctttactgctacagccatgtggggattgcctgggctcagacatatgccaccgattga

SEQ ID NO: 3326 - RNA, 954 nt, synthetic construct
  misc_feature 1..954: note = AAD41349 variant
  source 1..954: mol_type = other RNA
atggccgtgcagggcagccaaagacggctgctcgggtccctgaactctacccccacagctatccctcagcttggactggccgcgaatcagacgggcgctcgctgcctcgaggtcagcatttccgacgggctgttcctttctctgggactcgttagcctggtggaaaacgccctggtggtcgccaccatcgctaagaatagaaacctccactccccgatgtactgttttatttgctgtctggccctttctgatctgctcgtgagcggctccaatgttctggagacagctgtgatccttctgctcgaagccggggcgctggtcgcccgggctgccgtgctgcagcaactcgacaacgttattgatgtgattacctgcagctctatgctgtccagcctttgtttcctgggagctatcgccgtcgaccgctatatctctatcttttacgcgctcagatatcattccattgtgacactgccccgggcccgcagagctgtggccgctatctgggtcgccagcgttgtgttctctaccctttttattgcctactatgatcacgtggctgtcctgctctgcctggtggttttctttctggcgatgctcgtgctgatggccgtcctttacgtgcatatgctggctcgggcctgtcagcacgcccagggcatcgctcgcctccataaaagacagcggcctgttcaccaaggcttcgggctgaagggagccgtgacacttaccattctgctcggcatctttttcctgtgctgggggccctttttcctgcacctcacgctgatcgtcctttgtcctgagcatcctacctgcggatgtatttttaaaaatttcaacctgttcctcgcgctgatcatttgcaatgctatcattgaccccctgatctatgcctttcactcccaggaacttcgcagaacactcaaggaggtgctgacctgcagctggtga

SEQ ID NO: 3327 - RNA, 954 nt, synthetic construct; identical to SEQ ID NO: 3326
  misc_feature 1..954: note = AHC09522 variant
  source 1..954: mol_type = other RNA

SEQ ID NO: 3328 - RNA, 954 nt, synthetic construct
  misc_feature 1..954: note = AHC09804 variant
  source 1..954: mol_type = other RNA
atggccgtgcagggcagccaaagacggctgctcgggtccctgaactctacccccacagctatccctcagcttggactggccgcgaatcagacgggcgctcgctgcctcgaggtcagcatttccgacgggctgttcctttctctgggactcgttagcctggtggaaaacgccctggtggtcgccaccatcgctaagaatagaaacctccactccccgatgtactgttttatttgctgtctggccctttctgatctgctcgtgagcggctccaatgttctggagacagctgtgatccttctgctcgaagccggggcgctggtcgcccgggctgccgtgctgcagcaactcgacaacgttattgatgtgattacctgcagctctatgctgtccagcctttgtttcctgggagctatcgccgtcgaccgctatatctctatcttttacgcgctcagatatcattccattgtgacactgccccgggcccgccaggctgtggccgctatctgggtcgccagcgttgtgttctctaccctttttattgcctactatgatcacgtggctgtcctgctctgcctggtggttttctttctggcgatgctcgtgctgatggccgtcctttacgtgcatatgctggctagagcctgtcagcacgcccagggcatcgctcggctccataaacgccaaagacctgttcaccagggcttcgggctgaagggagccgtgacacttaccattctgctcggcatctttttcctgtgctgggggccctttttcctgcacctcacgctgatcgtcctttgtcctgagcatcctacctgcggatgtatttttaaaaatttcaacctgttcctcgcgctgatcatttgcaatgctatcattgaccccctgatctatgcctttcactcccaggaacttcggcgcacactcaaggaggtgctgacctgcagctggtga

SEQ ID NO: 3329 - RNA, 954 nt, synthetic construct
  misc_feature 1..954: note = BAE94313 variant
  source 1..954: mol_type = other RNA
atggccgtgcagggcagccaaagacggctgctcgggtccctgaactctacccccacagctatccctcagcttggactggccgcgaatcagacgggcgctcgctgcctcgaggtcagcatttccgacgggctgttcctttctctgggactcgttagcctggtggaaaacgccctggtggtcgccaccatcgctaagaatagaaacctccactccccgatgtactgttttatttgctgtctggccctttctgatctgctcgtgagcggctccaatgttctggagacagctgtgatccttctgctcgaagccggggcgctggtcgcccgggctgccgtgctgcagcaactcgacaacgttaccgatgtgattacatgcagctctatgctgtccagcctttgtttcctgggagctatcgccgtcgaccgctatatctctatcttttacgcgctcagatatcattccattgtgaccctgccccgggcccgcagagctgtggccgctatttgggtcgccagcgttgtgttctctacactttttatcgcctactatgatcacgtggctgtcctgctctgcctggtggttttctttctggcgatgctcgtgctgatggccgtcctttacgtgcatatgctggctcgggcctgtcagcacgcccagggcattgctcgcctccataaaagacagcggcctgttcaccaaggcttcgggctgaagggagccgtgacccttacgatcctgctcggcatctttttcctgtgctgggggccctttttcctgcacctcaccctgattgtcctttgtcctgagcatcccacatgcggatgtatctttaaaaatttcaacctgttcctcgcgctgattatctgcaatgctattatcgaccctctgatttatgcctttcactcccaggaacttcgcagaaccctcaaggaggtgctgacatgcagctggtga

SEQ ID NO: 3330 - RNA, 954 nt, synthetic construct
  misc_feature 1..954: note = AHC09531 variant
  source 1..954: mol_type = other RNA
atggccgtgcagggcagccaaagacggctgctcgggtccctgaactctacccccacagctatccctcagcttggactggccgcgaatcagacgggcgctcgctgcctcgaggtcagcatttccgacgggctgttcctttctctgggactcgttagcctggtggaaaacgccctggtggtcgccaccatcgctaagaatagaaacctccactccccgatgtactgttttatttgctgtctggccctttctgatctgctcgtgagcggctccaatatgctggagacagctgttatccttctgctcgaagccggggcgctggtggcccgggctgccgtcctgcagcaactcgacaacgtgattgatgttattacctgcagctctatgctgtccagcctttgtttcctgggagctatcgccgtggaccgctatatctctatcttttacgcgctcagatatcattccattgtcacactgccccgggcccgcagagctgtggccgctatctgggtggccagcgtcgttttctctaccctttttattgcctactatgatcacgtggctgtgctgctctgcctggtcgtgttctttctggcgatgctcgttctgatggccgtgctttacgtccatatgctggctcgggcctgtcagcacgcccagggcatcgctcgcctccataaaagacagcggcctgtgcaccaaggcttcgggctgaagggagccgttacacttaccattctgctcggcatctttttcctgtgctgggggccctttttcctgcacctcacgctgatcgtgctttgtcctgagcatcctacctgcggatgtatttttaaaaatttcaacctgttcctcgcgctgatcatttgcaatgctatcattgaccccctgatctatgcctttcactcccaggaacttcgcagaacactcaaggaggtcctgacctgcagctggtga

SEQ ID NO: 3331 - RNA, 954 nt, synthetic construct
  misc_feature 1..954: note = BAE94311 variant
  source 1..954: mol_type = other RNA
atggccgtgcagggcagccaaagacggctgctcgggtccctgaactctacccccacagctatccctcagcttggactggccgcgaatcagacgggcgctcgctgcctcgaggtcagcatttccgacgggctgttcctttctctgggactcgttagcctggtggaaaacgccctggtggtcgccaccatcgctaagaatcagaacctccactccccgatgtactgttttatttgctgtctggccctttctgatctgctcgtgagcggctccaatgttctggagacagctgtgatccttctgctcgaagccggggcgctggtcgccagagctgccgtgctgcaacagctcgacaacgttattgatgtgattacctgcagctctatgctgtccagcctttgtttcctgggagctatcgccgtcgaccggtatatctctatcttttacgcgctccgctatcattccattgtgacactgcccagagcccggcaggctgtggccgctatctgggtcgccagcgttgtgttctctaccctttttattgcctactatgatcacgtggctgtcctgctctgcctggtggttttctttctggcgatgctcgtgctgatggccgtcctttacgtgcatatgctggctcgcgcctgtcagcacgcccaaggcatcgctagactccataaacggcagcgccctgttcaccagggcttcgggctgaagggagccgtgacacttaccattctgctcggcatctttttcctgtgctgggggccctttttcctgcacctcacgctgatcgtcctttgtcctgagcatcctacctgcggatgtatttttaaaaatttcaacctgttcctcgcgctgatcatttgcaatgctatcattgaccccctgatctatgcctttcactcccaggaacttagacggacactcaaggaggtgctgacctgcagctggtga

SEQ ID NO: 3332 - RNA, 954 nt, synthetic construct
  misc_feature 1..954: note = BAE94309 variant
  source 1..954: mol_type = other RNA
atggccgtgcagggcagccaaagacggctgctcgggtccctgaactctacccccacagctatccctcagcttggactggccgcgaatcagacgggcgctcgctgcctcgaggtcagcatttccgacgggctgttcctttctctgggactcgttagcctggtggaaaacgccctggtggtcgccaccatcgctaagaatagaaacctccactccccgatgtactgttttatttgctgtctggccctttctgatctgctcgtgagcggctccaatgttctggagacagctgtgatccttctgctcgaagccggggcgctggtcgcccgggctgccgtgctgcagcaactcgacaacgttattgatgtgattacctgcagctctatgctgtccagcctttgtttcctgggagctatcgccgtcgaccgctatatctctatcttttacgcgctcagatatcattccattgtgacactgccccgggcccgccaggctgtgggcgccatctgggtcgctagcgttgtgttctctaccctttttattgcctactatgatcacgtggccgtcctgctctgcctggtggttttctttctggctatgctcgtgctgatggcggtcctttacgtgcatatgctggccagagcttgtcagcacgcccagggcatcgcccggctccataaacgccaaagacctgttcaccaggggttcggactgaagggcgctgtgacacttaccattctgctcgggatctttttcctgtgctggggaccctttttcctgcacctcacgctgatcgtcctttgtcctgagcatcctacctgcggctgtatttttaaaaatttcaacctgttcctcgccctgatcatttgcaatgcgatcattgaccccctgatctatgcttttcactcccaggaacttcggcgcacactcaaggaggtgctgacctgcagctggtga

SEQ ID NO: 3333 - RNA, 954 nt, synthetic construct
  misc_feature 1..954: note = BAE94308 variant
  source 1..954: mol_type = other RNA
atggccgtgcagggcagccaaagacggctgctcgggtccctgaactctacccccacagctatccctcagcttggactggccgcgaatcagacgggcgctcgctgcctcgaggtcagcatttccgacgggctgttcctttctctgggactcgttagcctggtggaaaacgccctggtggtcgccaccatcgctaagaatagaaacctccactccccgatgtactgttttatttgctgtctggccctttctgatctgctcgtgagcggctccaatgttctggagacagctgtgatccttctgctcgaagccggggcgctggtcgcccgggctgccgtgctgcagcaactcgacaacgttaccgatgtgattacatgcagctctatgctgtccagcctttgtttcctgggagctatcgccgtcgaccgctatatctctatcttttacgcgctcagatatcattccattgtgaccctgacacgggcccgcagagctgtggccgctatttgggtcgccagcgttgtgttctctaccctttttatcgcctactatgatcacgtggctgtcctgctctgcctggtggttttctttctggcgatgctcgtgctgatggccgtcctttacgtgcatatgctggctcgggcctgtcagcacgcccagggcattgctcgcctccataaaagacagcggcccgttcaccaaggcttcgggctgaagggagccgtgacgcttaccatcctgctcggcatctttttcctgtgctgggggccctttttcctgcacctcacactgattgtcctttgtcctgagcatcctacctgcggatgtatctttaaaaatttcaacctgttcctcgcgctgattatctgcaatgctattatcgaccccctgatttatgcctttcactcccaggaacttcgcagaacactcaaggaggtgctgacctgcagctggtga

SEQ ID NO: 3334 - RNA, 954 nt, synthetic construct
  misc_feature 1..954: note = BAE94307 variant
  source 1..954: mol_type = other RNA
atggccgtgcagggcagccaaagacggctgctcgggtccctgaactctacccccacagctatccctcagcttggactggccgcgaatcagacgggcgctcgctgcctcgaggtcagcatttccgacgggctgttcctttctctgggactcgttagcctggtggaaaacgccctggtggtcgccaccatcgctaagaatagaaacctccactccccgatgtactgttttatttgctgtctggccctttctgatctgctcgtgagcggctccaatatgctggagacagctgttatccttctgctcgaagccggggcgctggtggcccgggctgccgtcctgcagcaactcgacaacgtgattgatgttattacctgcagctctatgctgtccagcctttgtttcctgggagctatcgccgtggaccgctatatctctatcttttacgcgctcagatatcattccattgtcatcctgccccgggcccgcagagctgtggccgctatttgggtggccagcgtcgttttctctacactttttatcgcctactatgatcacgtggctgtgctgctctgcctggtcgtgttctttctggcgatgctcgttctgatggccgtgctttacgtccatatgctggctcgggcctgtcagcacgcccagggcattgctcgcctccataaaagacagcggcctgtgcaccaaggcttcgggctgaagggagccgttacccttacaatcctgctcggcatctttttcctgtgctgggggccctttttcctgcacctcaccctgattgtgctttgtcctgagcatcccacgtgcggatgtatctttaaaaatttcaacctgttcctcgcgctgattatctgcaatgctattatcgaccctctgatctatgcctttcactcccaggaacttcgcagaaccctcaaggaggtcctgacatgcagctggtga

SEQ ID NO: 3335 - RNA, 951 nt, synthetic construct
  misc_feature 1..951: note = BAE94306 variant
  source 1..951: mol_type = other RNA
atggccgtgcagggcagccaaagacggctgctcgggtccctgaactctacccccacagctatccctcagcttggactggccgcgaatcagacgggcgctcgctgcctcgaggtcagcatttccgacgggctgttcctttctctgggactcgttagcctggtggaaaacgccctggtggtcgccaccatcgctaagaatagaaacctccactccccgatgtactgttttatttgctgtctggccctttctgatctgctcgtgagcggctccaatgttctggagacagctgtgatccttctgctcgaagccggggcgctggtcgcccgggctgccgtgctgcagcaactcgacaacgttattgatgtgattacctgcagctctatgctgtccagcctttgtttcctgggagctatcgccgtcgaccgctatatctctatctacgcgctcagatatcattccattgtgacactgccccgggcccgccaggctgtggccgctatctgggtcgccagcgttgtgttttctacccttttcattgcctactatgatcacgtggctgtcctgctctgcctggtggtgtttttcctggcgatgctcgttctgatggccgtcctttacgtgcatatgctggctagagcctgtcagcacgcccagggcatcgctcggctccataaacgccaaagacctgttcaccagggctttgggctgaagggagccgtgacacttaccattctgctcggcatcttctttctgtgctgggggcccttctttctgcacctcacgctgatcgtcctttgtcctgagcatcctacctgcggatgtattttcaaaaattttaacctgttcctcgcgctgatcatttgcaatgctatcattgaccccctgatctatgccttccactcccaggaacttcggcgcacactcaaggaggtgctgacctgcagctggtga

SEQ ID NO: 3336 - RNA, 954 nt, synthetic construct
  misc_feature 1..954: note = AAQ62977 variant
  source 1..954: mol_type = other RNA
atggccgtgcagggcagccaaagacggctgctcgggtccctgaactctacccccacagctatccctcagcttggactggccgcgaatcagacgggcgctcgctgcctcgaggtcagcatttccgacgggctgttcctttctctgggactcgttagcctggtggaaaacgccctggtggtcgccaccatcgctaagaatagaaacctccactccccgatgtactgttttatttgctgtctggccctttctgatctgctcgtgagcggctccaatgttctggagacagctgtgatccttctgctcgaagccggggcgctggtcgcccgggctgccgtgctgcagcaactcgacaacgttattgatgtgattacctgcagctctatgctgtccagcctttgtttcctgggagctatcgccgtcgaccgctatatctctatcttttacgcgctcagatatcattccattgtgacactgccccgggcccgcagagctgtggccgctatctgggtcgccagcgttgtgttctctaccctttttattgcctactatgatcacgtggctgtcctgctctgcctggtggttttctttctggcgatgctcgtgctgatggccgtcctttacgtgcatatgctggctcgggcctgtcagcacgcccagggcatcgctcgcctccataaaagacagcggcctgttcaccaaggcttcgggctgaagggagccgtgacacttaccattctgctcggcatctttttcctgtgctgggggccctttttcctgcacctcacgctgatcattctttgtcctgagcatcctacctgcggatgtatctttaaaaatttcaacctgttcctcgcgctgattatctgcaatgctattatcgaccccctgatctatgcctttcactcccaggaacttcgcagaacactcaaggaggtcctgacctgcagctggtga

SEQ ID NO: 3337 - RNA, 954 nt, synthetic construct
  misc_feature 1..954: note = AAQ62975 variant
  source 1..954: mol_type = other RNA
atggccgtgcagggcagccaaagacggctgctcgggtccctgaactctacccccacagctatccctcagcttggactggccgcgaatcagacgggcgctcgctgcctcgaggtcagcatttccgacgggctgttcctttctctgggactcgttagcctggtggaaaacgccctggtggtcgccaccatcgctaagaatagaaacctccactccccgatgtactgttttatttgctgtctggccctttctgatctgctcgtgagcggctccaatgttctggagacagctgtgatccttctgctcgaagccggggcgctggtcgcccgggctgtggttctgcagcaactcgacaacgtgattgatgtcattacctgcagctctatgctgtccagcctttgtttcctgggagccatcgctgtggaccgctatatctctatcttttacgccctcagatatcattccattgtgacactgccccgggcgcgcagagccgtcgctgccatctgggttgctagcgtggtgttctctaccctttttattgcctactatgatcacgtcgccgtgctgctctgcctggttgtgttctttctggctatgctcgtcctgatggcggtgctttacgttcatatgctggcccgggcttgtcagcacgcccagggcatcgcccgcctccataaaagacagcggcctgtgcaccaaggcttcgggctgaagggagctgtcacacttaccattctgctcggcatctttttcctgtgctgggggccctttttcctgcacctcacgctgatcgtgctttgtcctgagcatcctacctgcggatgtatttttaaaaatttcaacctgttcctcgccctgatcatttgcaatgcgatcattgaccccctgatctatgcttttcactcccaggaacttcgcagaacactcaaggaggtcctgacctgcagctggtga

SEQ ID NO: 3338 - RNA, 954 nt, synthetic construct
  misc_feature 1..954: note = AAQ62974 variant
  source 1..954: mol_type = other RNA
atggccgtgcagggcagccaaagacggctgctcgggtccctgaactctacccccacagctatccctcagcttggactggccgcgaatcagacgggcgctcgctgcctcgaggtcagcatttccgacgggctgttcctttctctgggactcgttagcctggtggaaaacgccctggtggtcgccaccatcgctaagaatagaaacctccactccccgatgtactgttttatttgctgtctggccctttctgatctgctcgtgagcggctccaatgttctggagacagctgtgatccttctgctcgaagccggggcgctggtcgcccgggctgccgtgctgcagcaactcgacaacgttattgatgtgattacctgcagctctatgctgtccagcctttgtttcctgggagctatcgccgtcgaccgctatatctctatcttttacgcgctcagatatcattccattgtgacactgccccgggcccgcagagctgtggccgctatctgggtcgccagcgttgtgttctctaccctttttattgcctactatgatcacgtggctgtcctgctctgcctggtggttttctttctggcgatgctcgtgctgatggccgtcctttacgtgcatatgctggctcgggcctgtcagcacgcccagggcatcgctcgcctccataaaagacagcggcctgttcaccaaggcttcgggctgaagggagccgtgacacttaccattctgctcggcatctttttcctgtgctgggggccctttttcctgcacctcacgctgatcgtcctttgtcctgagcatcctacctgcggatgtatttttaaaaatttcaacctgttcctcgcgctgatcatttgcaatgctatcattgaccccctgatctatgcctttcactcccaggaacttcgcagaacactcaaggaggtgctgacccggagctggtga

SEQ ID NO: 3339 - RNA, 954 nt, synthetic construct
  misc_feature 1..954: note = AAQ62973 variant
  source 1..954: mol_type = other RNA
atggccgtgcagggcagccaaagacggctgctcgggtccctgaactctacccccacagctatccctcagcttggactggccgcgaatcagacgggcgctcgctgcctcgaggtcagcatttccgacgggctgttcctttctctgggactcgttagcctggtggaaaacgccctggtggtcgccaccatcgctaagaatagaaacctccactccccgatgtactgttttatttgctgtctggccctttctgatctgctcgtgagcggctccaatgttctggagacagctgtgatccttctgctcgaagccggggcgctggtcgcccgggctgccgtgctgcagcaactcgacaacgttattgatgtgattacctgcagctctatgctgtccagcctttgtttcctgggagctatcgccgtcgaccgctatatctctatcttttacgcgctcagatatcattccattgtgacactgccccgggcccgcagagctgtggccgctatctgggtcgccagcgttgtgttctctaccctttttattgcctactatgatcacgtggctgtcctgctctgcctggtggttttctttctggcgatgctcgtgctgatggccgtcctttacgtgcatatgctggctcgggcctgtcagcacgcccagggcatcgctcgcctccataaaagacagcggcctgttcaccaaggcttcgggctgaagggagccgtgacacttaccattctgctcggcatctttttcctgtgctgggggccctttttcctgcacctcacgctgatcgtcctttgtcctgagcatcctacctgcggatgtatttttaaaaatttcaacctgttcctcgcgctgatcatttgcaatgctatcattgaccccctgatctatgcctttcactcccaggaacttcgcagaatgctcaaggaggtgctgacatgcagctggtga

SEQ ID NO: 3340 - RNA, 954 nt, synthetic construct
  misc_feature 1..954: note = AAQ62972 variant
  source 1..954: mol_type = other RNA
atggccgtgcagggcagccaaagacggctgctcgggtccctgaactctacccccacagctatccctcagcttggactggccgcgaatcagacgggcgctcgctgcctcgaggtcagcatttccgacgggctgttcctttctctgggactcgttagcctggtggaaaacgccctggtggtcgccaccatcgctaagaatagaaacctccactccccgatgtactgttttatttgctgtctggccctttctgatctgctcgtgagcggctccaatgttctggagacagctgtgatccttctgctcgaagccggggcgctggtcgcccgggctgccgtgctgcagcaactcgacaacgttattgatgtgattacctgcagctctatgctgtccagcctttgtttcctgggagctatcgccgtcgaccgctatatctctatcttttacgcgctcagatatcattccattgtgacactgccccgggcccgcagagctgtggccgctatctgggtcgccagcgttgtgttctctaccctttttattgcctactatgatcacgtggctgtcctgctctgcctggtggttttctttctggcgatgctcgtgctgatggccgtcctttacgtgcatatgctggcttgggcctgtcagcacgcccagggcatcgctcggctccataaacgccagagacctgttcaccaaggcttcgggctgaagggagccgtgacacttaccattctgctcggcatctttttcctgtgctgggggccctttttcctgcacctcacgctgatcgtcctttgtcctgagcatcctacctgcggatgtatttttaaaaatttcaacctgttcctcgcgctgatcatttgcaatgctatcattgaccccctgatctatgcctttcactcccaggaacttcggcgcacactcaaggaggtgctgacctgcagctggtga

SEQ ID NO: 3341 - RNA, 954 nt, synthetic construct
  misc_feature 1..954: note = AAQ62971 variant
  source 1..954: mol_type = other RNA
atggccgtgcagggcagccaaagacggctgctcgggtccctgaactctacccccacagctatccctcagcttggactggccgcgaatcagacgggcgctcgctgcctcgaggtcagcatttccgacgggctgttcctttctctgggactcgttagcctggtggaaaacgccctggtggtcgccaccatcgctaagaatagaaacctccactccccgatgtactgttttatttgctgtctggccctttctgatctgctcgtgagcggctccaatgttctggagacagctgtgatccttctgctcgaagccggggcgctggtcgcccgggctgccgtgctgcagcaactcgacaacgttattgatgtgattacctgcagctctatgctgtccagcctttgtttcctgggagctatcgccgtcgaccgctatatctctatcttttacgcgctcagatatcattccattgtgacactgccccaggcccggcgcgctgtggccgctatctgggtcgccagcgttgtgttctctaccctttttattgcctactatgatcacgtggctgtcctgctctgcctggtggttttctttctggcgatgctcgtgctgatggccgtcctttacgtgcatatgctggctagagcctgtcagcacgcccagggcatcgctcggctccataaacgccaaagacctgttcaccagggcttcgggctgaagggagccgtgacacttaccattctgctcggcatctttttcctgtgctgggggccctttttcctgcacctcacgctgatcgtcctttgtcctgagcatcctacctgcggatgtatttttaaaaatttcaacctgttcctcgcgctgatcatttgcaatgctatcattgaccccctgatctatgcctttcactcccaggaacttcggcgcacactcaaggaggtgctgacctgcagctggtga

SEQ ID NO: 3342 - RNA, 954 nt, synthetic construct
  misc_feature 1..954: note = AAQ62970 variant
  source 1..954: mol_type = other RNA
atggccgtgcagggcagccaaagacggctgctcgggtccctgaactctacccccacagctatccctcagcttggactggccgcgaatcagacgggcgctcgctgcctcgaggtcagcatttccgacgggctgttcctttctctgggactcgttagcctggtggaaaacgccctggtggtcgccaccatcgctaagaatagaaacctccactccccgatgtactgttttatttgctgtctggcccttctggatctcctggtgtctggcagcaatgttcttgagacagctgtgatcctgctcctggaagccggggcgctggtcgcccgggctgccgtgctccagcaactggacaacgttattgatgtgattacctgctccagcatgctttcttccctgtgtttcctcggagctatcgccgtcgaccgctatatcagcatcttttacgcgctgagatatcattctattgtgacacttccccgggcccgcagagctgtggccgctatctgggtcgcctccgttgtgttcagcaccctgtttattgcctactatgatcacgtggctgtcctcctgtgcctggtggttttctttctcgcgatgctggtgcttatggccgtcctgtacgtgcatatgctcgctcgggcctgtcagcacgcccagggcatcgctcgcctgcataaaagacagcggcctgttcaccaaggcttcgggcttaagggagccgtgacactgaccattctcctgggcatctttttcctgtgctgggggccctttttcctccacctgacgcttatcgtcctgtgtcctgagcatcctacctgcggatgtatttttaaaaatttcaacctcttcctggcgctgatcatttgcaatgctatcattgacccccttatctatgcctttcactctcaggaactccgcagaacactgaaggaggtgctgacctgctcctggtga

SEQ ID NO: 3343 - RNA, 954 nt, synthetic construct
  misc_feature 1..954: note = AAQ62969 variant
  source 1..954: mol_type = other RNA
atggccgtgcagggcagccaaagacggctgctcgggtccctgaactctacccccacagctatccctcagcttggactggccgcgaatcagacgggcgctcgctgcctcgaggtcagcatttccgacgggctgcttctgtctctcggactggttagcctggtggaaaacgccctcgtggtcgccaccatcgctaagaatagaaacctgcactccccgatgtactgtttcatttgctgtcttgccctgtctgatctcctggtgagcggctccaatgttcttgagacagctgtgatcctgctcctggaagccggggcgctggtcgcccgggctgccgtgctccagcaactggacaacgttattgatgtgattacctgcagctctatgctttccagcctgtgttttctcggagctatcgccgtcgaccgctatatctctatcttctacgcgctgagatatcattccattgtgacacttccccgggcccgcagagctgtggccgctatctgggtcgccagcgttgtgttttctaccctgttcattgcctactatgatcacgtggctgtcctcctgtgcctggtggtgtttttcctcgcgatgctggttcttatggccgtcctgtacgtgcatatgctcgctcgggcctgtcagcacgcccagggcatcgctcgcctgcataaaagacagcggcctgttcaccaaggctttgggcttaagggagccgtgacactgaccattctcctgggcatcttctttctgtgctgggggcccttctttctccacctgacgcttatcgtcctgtgtcctgagcatcctacctgcggatgtattttcaaaaattttaacctcttcctggcgctgatcatttgcaatgctatcattgacccccttatctatgccttccactcccaggaactccgcagaacactgaaggaggtgctgacctgcagctggtga

SEQ ID NO: 3344 - RNA, 954 nt, synthetic construct
  misc_feature 1..954: note = AAO21073 variant
  source 1..954: mol_type = other RNA
atggccgtgcagggcagccaaagacggctcctcgggtccctgaactctacccccacagctatccctcagcttggactggccgcgaatcagacgggcgctcgctgcctcgaggtcagcatttccgacgggctgttcctttctctgggactcgttagcctggtggaaaacgccctggtggtcgccaccatcgctaagaatagaaacctccactccccgatgtactgttttatttgctgtctggccctttctgatctgctcgtgagcggctccaatgttcgggagacagctgtgatcctgcttctggaagccggggcgctcgtcgcccgcgctgccgtgctgcagcaactggacaacgttattgatgtgattacctgcagctctatgctctccagcctgtgtttccttggagctatcgccgtcgacagatatatctctatcttttacgcgctgcggtatcattccattgtgacactcccccgcgccagacgggctgtggccgctatctgggtcgccagcgttgtgttctctaccctgtttattgcctactatgatcacgtggctgtccttctgtgcctcgtggttttctttctggcgatgctggtgctcatggccgtcctgtacgtgcatatgcttgctcgcgcctgtcagcacgcccagggcatcgctagactgcataaacggcagcgccctgttcaccaaggcttcgggctcaagggagccgtgacactgaccattcttctgggcatctttttcctctgctgggggccctttttcctgcacctgacgctcatcgtcctgtgtcctgagcatcctacctgcggatgtatttttaaaaatttcaaccttttcctggcgctcatcatttgcaatgctatcattgaccccctgatctatgcctttcactcccaggaactgagacggacacttaaggaggtgctgacctgcagctggtga

SEQ ID NO: 3345 - RNA, 954 nt, synthetic construct
  misc_feature 1..954: note = AHC09567 variant
  source 1..954: mol_type = other RNA
atggccgtgcagggcagccaaagacggctgctcgggtccctgaactctacccccacagctatccctcagcttggactggccgcgaatcagacgggcgctcgctgcctcgaggtcagcatttccgacgggctgttcctttctctgggactcgttagcctggtggaaaacgccctggtggtcgccaccatcgctaagaatagaaacctccactccccgatgtactgttttatttgctgtctggcccttcccgatctgctcgtgtctggcagcaatgttctggagacagctgtgatccttctgctcgaagccggggcgctggtcgcccgggctgccgtgctgcagcaactcgacaacgttattgatgtgattacctgctccagcatgctgtcttccctttgtttcctgggagctatcgccgtcgaccgctatatcagcatcttttacgcgctcagatatcattctattgtgacactgcctcgggcccgcagagctgtggccgctatctgggtcgcctccgttgtgttcagcaccctttttattgcctactatgatcacgtggctgtcctgctctgcctggtggttttctttctggcgatgctcgtgctgatggccgtcctttacgtgcatatgctggctcgggcctgtcagcacgcccagggcatcgctcgcctccataaaagacagcggcccgttcaccaaggcttcgggctgaagggagccgtgacacttaccattctgctcggcatctttttcctgtgctgggggccctttttcctgcacctcacgctgatcgtcctttgtcctgagcatcctacctgcggatgtatttttaaaaatttcaacctgttcctcgcgctgatcatttgcaatgctatcattgacccgctgatctatgcctttcactctcaggaacttcgcagaacactcaaggaggtgctgacctgctcctggtga

SEQ ID NO: 3346 - RNA, 954 nt, synthetic construct
  misc_feature 1..954: note = AHC09812 variant
  source 1..954: mol_type = other RNA
atggccgtgcagggcagccaaagacggctgctcgggtccctgaactctacccccacagctatccctcagcttggactggccgcgaatcagacgggcgctcgctgcctcgaggtcagcatttccgacgggctgttcctttctctgggactcgttagcctggtggaaaacgccctggtggtcgccaccatcgctaagaatagaaacctccactccccgatgtactgttttatttgctgtctggccctttctgatctgctcgtgagcggctccaatgttctggagacagctgtgatccttctgctcgaagccggggcgctggtcgcccgggctgccgtgctgcagcaactcgacaacgttattgatgtgattacctgcagctctatgctgtccagcctttgtttcctgggagctatcgccgtcgaccgctatatctctatcttttacgcgctcagatatcattccattgtgacactgccccgggcccgcagagctgtggccgctatctgggtcgccagcgttgtgttctctaccctttttattgcctactatgatcacgtggctgtcctgctctgcctgatggtgttctttctggcgatgctcgttctgatggccgtgctttacgtccatatgctggctcgggcctgtcagcacgcccagggcatcgctcgcctccataaaagacagcggcctgtgcaccaaggcttcgggctgaagggagccgttacacttaccattctgctcggcatctttttcctgtgctgggggccctttttcctgcacctcacgctgatcgtgctttgtcctgagcatcctacctgcggatgtatttttaaaaatttcaacctgttcctcgcgctgatcatttgcaatgctatcattgaccccctgatctatgcctttcactcccaggaacttcgcagaacactcaaggaggtcctgacctgcagctggtga

SEQ ID NO: 3347 - RNA, 954 nt, synthetic construct
  misc_feature 1..954: note = AHC10192 variant
  source 1..954: mol_type = other RNA
atggccgtgcagggcagccaaagacggctgctcgggtccctgaactctacccccacagctatccctcagcttggactggccgcgaatcagacgggcgctcgctgcctcgaggtcagcatttccgacgggctgttcctttctctgggactcgttagcctggtggaaaacgccctggtggtcgccaccatcgctaagaatagaaacctccactccccgatgtactgttttatttgctgtctggccctttctgatctgctcgtgagcggctccaatgttctggagacagctgtgatccttctgctcgaagccggggcgctggtcgcccgggctgccgtgctgcagcaactcgacaacgttattgatgtgattacctgcagctctatgctgtccagcctttgtttcctgggagctatcgccgtcgaccgctatatttctatcttttacgcgctcagatatcattccattgtgacactgccccgggcccgcagagctgtggccgctatctgggtcgccagcgttgtgttctctaccctttttattgcctactatgatcacgtggctgtcctgctctgcctggtggttttctttctggcgatgctcgtgctgatggccgtcctttacgtgcatatgctggctcgggcctgtcagcacgcccagggcacagctcgcctccataaaagacagcggcctgttcaccaaggcttcgggctgaagggagccgtgacccttacgatcctgctcggcatctttttcctgtgctgggggccctttttcctgcacctcaccctgatcgtcctttgtcctgagcatcccacatgcggatgtatctttaaaaatttcaacctgttcctcgcgctgattatctgcaatgctattatcgaccctctgatttatgcctttcactcccaggaacttcgcagaaccctcaaggaggtgctgacatgcagctggtga

SEQ ID NO: 3348 - RNA, 954 nt, synthetic construct
  misc_feature 1..954: note = AHC09641 variant
  source 1..954: mol_type = other RNA
atggccgtgcagggcagccaaagacggctgctcgggtccctgaactctacccccacagctatccctcagcttggactggccgcgaatcagacgggcgctcgctgcctcgaggtcagcatttccgacgggctgttcctttctctgggactcgttagcctggtggaaaacgccctggtggtcgccaccatcgctaagaatagaaacctccactccccgatgtactgttttatttgctgtctggccctttctgatctgctcgtgagcggctccaatgttctggagacagctgtgatccttctgctcgaagccggggcgctggtcgcccgggctgccgtgctgcagcaactcgacaacgttattgatgtgattacctgcagctctatgctgtccagcctttgtttcctgggagctatcgccgtcgaccgctatatttctatcttttacgcgctcagatatcattccacagtgaccctgccccgggcccgcagagctgtggccgctatttgggtcgccagcgttgtgttctctacactttttatcgcctactatgatcacgtggctgtcctgctctgcctggtggttttctttctggcgatgctcgtgctgatggccgtcctttacgtgcatatgctggctcgggcctgtcagcacgcccagggcattgctcgcctccataaaagacagcggcctgttcaccaaggcttcgggctgaagggagccgtgacccttacgatcctgctcggcatctttttcctgtgctgggggccctttttcctgcacctcaccctgatcgtcctttgtcctgagcatcccacatgcggatgtatctttaaaaatttcaacctgttcctcgcgctgattatctgcaatgctattatcgaccctctgatttatgcctttcactcccaggaacttcgcagaaccctcaaggaggtgctgacatgcagctggtga

SEQ ID NO: 3349 - RNA, 954 nt, synthetic construct
  misc_feature 1..954: note = AHC10044 variant
  source 1..954: mol_type = other RNA
atggccgtgcagggcagccaaagacggctgctcgggtccctgaactctacccccacagctatccctcagcttggactggccgcgaatcagacgggcgctcgctacctcgaggtcagcatttccgacgggctgttcctttctctgggactcgttagcctggtggaaaacgccctggtggtcgccaccatcgctaagaatagaaacctccactccccgatgtattgctttatttgttgcctggccctttctgatctgctcgtgagcggctccaatgttctggagacagctgtgatccttctgctcgaagccggggcgctggtcgcccgggctgccgtgctgcagcaactcgacaacgttattgatgtgatcacctgtagctctatgctgtccagcctttgcttcctgggagctatcgccgtcgaccgctacatttctatcttttatgcgctcagataccattccattgtgacactgccccgggcccgcagagctgtggccgctatctgggtcgccagcgttgtgttctctaccctttttattgcctattacgatcacgtggctgtcctgctctgtctggtggttttctttctggcgatgctcgtgctgatggccgtcctttatgtgcatatgctggctcgggcctgccagcacgcccagggcatcgctcgcctccataaaagacagcggcctgttcaccaaggcttcgggctgaagggagccgtgacacttaccattctgctcggcatctttttcctgtgttgggggccctttttcctgcacctcacgctgatcgtcctttgccctgagcatcccacctgtggatgcatttttaaaaatttcaacctgttcctcgcgctgatcatttgtaatgctatcattgaccctctgatctacgcctttcactcccaggaacttcgcagaacactcaaggaggtgctgacctgcagctggtga

SEQ ID NO: 3350 - RNA, 954 nt, synthetic construct
  misc_feature 1..954: note = AHC09532 variant
  source 1..954: mol_type = other RNA
atggccgtgcagggcagccaaagacggctgctcgggtccctgaactctacccccacagctatccctcagcttggactggccgcgaatcagacgggcgctcgctgcctcgaggtcagcatttccgacgggctgttcctttctctgggactcgttagcctggtggaaaacgccctggtgctcgccaccatcgctaagaatagaaacctgcactccccgatgtactgttttatttgctgtcttgccctgtctgatctcctggtcagcggctccaatgtgcttgagacagctgttatcctgctcctggaagccggggcgctggtggcccgggctgccgtcctccagcaactggacaacgtgattgatgttattacctgcagctctatgctttccagcctgtgtttcctcggagctatcgccgtggaccgctatatctctatcttttacgcgctgagatatcattccattgtcacacttccccgggcccgcagagctgtggccgctatctgggtggccagcgtcgttttctctaccctgtttattgcctactatgatcacgtggctgtgctcctgtgcctggtcgtgttctttctcgcgatgctggttcttatggccgtgctgtacgtccatatgctcgctcgggcctgtcagcacgcccagggcatcgctcgcctgcataaaagacagcggcctgtgcaccaaggcttcgggcttaagggagccgttacactgaccattctcctgggcatctttttcctgtgctgggggccctttttcctccacctgacgcttatcgtgctgtgtcctgagcatcctacctgcggatgtatttttaaaaatttcaacctcttcctggcgctgatcatttgcaatgctatcattgacccccttatctatgcctttcactcccaggaactccgcagaacactgaaggaggtcctgacctgcagctggtga

SEQ ID NO: 3351 - RNA, 954 nt, synthetic construct
  misc_feature 1..954: note = AHC11042 variant
  source 1..954: mol_type = other RNA
atggccgtgcagggcagccaaagacggctgctcgggtccctgaactctacccccacagctatccctcagcttggactggccgcgaatcagacgggcgctcgctgcctcgaggtcagcatttccgacgggctgttcctttctctgggactcgttagcctggtggaaaacgccctggtggtcgccaccatcgctaagaatagaaacctccactccccgatgtactgttttatttgctgtctgcccctttctgatctgctcgtgagcggctccaatgttctggagacagccgtgatccttctgctcgaagctggggccctggtcgcgcgggccgctgtgctgcagcaactcgacaacgttattgatgtgattacctgcagctctatgctgtccagcctttgtttcctgggagccatcgctgtcgaccgctatatctctatcttttacgccctcagatatcattccattgtgacactgcctcgggcgcgcagagccgtggctgccatctgggtcgctagcgttgtgttctctaccctttttattgcctactatgatcacgtggccgtcctgctctgcctggtggttttctttctggctatgctcgtgctgatggcggtcctttacgtgcatatgctggcccgggcttgtcagcacgcccagggcatcgcccgcctccataaaagacagcggcccgttcaccaaggcttcgggctgaagggagctgtgacacttaccattctgctcggcatctttttcctgtgctgggggccctttttcctgcacctcacgctgatcgtcctttgtcctgagcatcctacctgcggatgtatttttaaaaatttcaacctgttcctcgccctgatcatttgcaatgcgatcattgacccgctgatctatgcttttcactcccaggaacttcgcagaacactcaaggaggtgctgacctgcagctggtga

SEQ ID NO: 3352 - RNA, 954 nt, synthetic construct
  misc_feature 1..954: note = AHC10733 variant
  source 1..954: mol_type = other RNA
atggccgtgcagggcagccaaagacggctgctcgggtccctgaactctacccccacagctatccctcagcttggactggccgcgaatcagacgggcgctcgctgcctcgaggtcagcatttccgacgggctgttcctttctctgggactcgttagcctggtggaaaacgccctggtggtcgccaccatcgctaagaatagaaacctccactccccgatgtactgttttatttgctgtctggccctttctgatctgctcgtgagcggctccaatgttctggagacagctgtgatccttctgctcgaagccggggcgctggtcgcccgggctgccgtgctgcagcaactcgacaacgttattgatgtgattacctgcagctctatgctgtccagcctttgtttcctgggagctatcgccgtcgaccgctatatctctatcttttacgcgctcagatatcattccattgtgacactgccccgggcccgcagagctgtggccgctatctgggtcgccagcgttgtgttctctaccctttttattgcctactatgatcacgtggctgtcctgctctgcctggtggttttctttctggcgatgctcgtgctgatggccgtcctttacgtgcatatgctggctcgggcctgtcagcacgcccagggcatcgctcgcctccataaaagacagcggcctgttcaccaaggcttcgggctgaagggagccgtgacacttaccattctgctcggcatctttttcctgtgctgggggccctttttcctgcacctcacgctgatcgtcctttgtcctgagcatcctacctgcggatgtatttttaaaaatttctccctgttcctcgcgctgatcatttgcaacgctatcattgaccccctgatctatgcctttcacagccaggaacttcgcagaacactcaaggaggtgctgacctgctcctggtga

SEQ ID NO: 3353 - RNA, 954 nt, synthetic construct
  misc_feature 1..954: note = AHC10696 variant
  source 1..954: mol_type = other RNA
atggccgtgcagggcagccaaagacggctgctcgggtccctgaactctacccccacagctatccctcagcttggactggccgcgaatcagacgggcgctcgctgcctcgaggtcagcatttccgacgggctgttcctttctctgggactcgttagcctggtggaaaacgccctggtggtcgccaccatcgctaagaatagaaacctccactccccgatgtactgttttatttgctgtctggccctttctgatctgctcgtgagcggctccaatgttctggagacagctgtgatccttctgctcgaagccggggcgctggtcgcccgggctgccgtgctgcagcaactcgacaacgttattgatgtgattacctgcagctctatgctgtccagcctttgtttcctgggagctatcgccgtcgaccgctatatctctatcttttacgcgctcagatatcattccattgtgacactgccccgggcccgcagagctgtggccgctatctgggtcgccagcgttgtgttctctaccctttttattgcctactatgatcacgtggctgtcctgctctgcctggtggttttctttctggcgatgctcgtgctgatggccgtcctttacgtgcatatgctggctcgggcctgtcagcacgcccagggcatcgctcgcctccataaaagacagcggcctgttcaccaaggcttcgggctgaagggagccgtgacacttaccattctgctcggcatctttttcctgtgctgggggccctttttcctgcacctcacgctgatcgtcctttgtcctgagcatcctacctgcggatgtatttttaaaaatttcaacctgttcctcgcgctgatcatttgcaatgctatcattgaccccctgatccacgcctttcattcccaggaacttcgcagaacactcaaggaggtgctgacctgcagctggtga

SEQ ID NO: 3354 - RNA, 954 nt, synthetic construct
  misc_feature 1..954: note = AHC09527 variant
  source 1..954: mol_type = other RNA
atggccgtgcagggcagccaaagacggctgctcgggtccctgaactctacccccacagctatccctcagcttggactggccgcgaatcagacgggcgctcgctgcctcgaggtcagcatttccgacgggctgttcctttctctgggactcgttagcctggtggaaaacgccctggtggtcgccaccatcgctaagaatagaaacctccactccccgatgtactgttttatttgctgtctggccctttctgatctgctcgtgagcggctccaatgttctggagacagctgtgatccttctgctcgaagccggggcgctggtcgcccgggctgccgtgctgcagcaactcgacaacgttattgatgtgattacctgcagctctatgctgtccagcctttgtttcctgggagctatcgccgtcgaccgctatatctctatcttttacgcgctcagatatcattccattgtgacactgccccgggcccgcagagctgtggccgctatctgggtcgccagcgttgtgttctctaccctttttattgcctactatgatcacgtggctgtcctgctctgcctggtggttttctttctggcgatgctcgtgctgatggccgtcctttacgtgcatatgctggctcgggcctgtcagcacgcccagggcatcgctcgcctccataaaagacagcggcctgttcaccaaggcttcgggctgaagggagccgtgacacttaccattctgctcggcatctttttcctgtgctgggggccctttttcctgcacctcacgctgatcgtcctttgtcctgagcatcctacctgcggatgtatttttaaaaatttcaacctgttcctcgcgctgatcatttgcaatgctatcattcaccccctgatctatgcctttcattcccaggaacttcgcagaacactcaaggaggtgctgacctgcagctggtga

SEQ ID NO: 3355 - RNA, 954 nt, synthetic construct
  misc_feature 1..954: note = AHC10869 variant
  source 1..954: mol_type = other RNA
atggccgtgcagggcagccaaagacggctgctcgggtccctgaactctacccccacagctatccctcagcttggactggccgcgaatcagacgggcgctcgctgcctcgaggtcagcatttccgacgggctgttcctttctctgggactcgttagcctggtggaaaacgccctggtggtcgccaccatcgctaagaatagaaacctccactccccgatgtactgttttatttgctgtctggccctttctgatctgctcgtgagcggctccaatgttctggagacagctgtgatccttctgctcgaagccggggcgctggtcgcccgggctgccgtgctgcagcaactcgacaacgttattgatgtgattacctgcagctctatgctgtccagcctttgtttcctgggagctatcgccgtcgaccgctatatctctatcttttacgcgctcagatatcattccattgtgacactgccccgggcccgcagagctgtggccgctatctgggtcgccagcgttgtgttctctaccctttttattgcctactatgatcacgtggctgtcctgctctgcctggtggttttctttctggcgatgctcgtgctgatggccgtcctttacgtgcatatgctggctcgggcctgtcagcacgcccagggcatcgctcgcctccataaaagacagcaccctgttcaccaaggcttcgggctgaagggagccgtgacacttaccattctgctcggcatctttttcctgtgctgggggccctttttcctgcatctcacgctgatcgtcctttgtcctgagcaccctacctgcggatgtatttttaaaaatttcaacctgttcctcgcgctgatcatttgcaatgctatcattgaccccctgatctatgcctttcattcccaggaacttcggcgcacactcaaggaggtgctgacctgcagctggtga

SEQ ID NO: 3356 - RNA, 954 nt, synthetic construct
  misc_feature 1..954: note = AHC11615 variant
  source 1..954: mol_type = other RNA
atggccgtgcagggcagccaaagacggctgctcgggtccctgaactctacccccacagctatccctcagcttggactggccgcgaatcagacgggcgctcgctgcctcgaggtcagcatttccgacgggctgttcctttctctgggactcgttagcctggtggaaaacgccctggtggtcgccaccatcgctaagaatagaaacctccactccccgatgtactgttttatttgctgtctggccctttctgatctgctcgtgagcggctccaatgttctggagacagctgtgatccttctgctcgaagccggggcgctggtcgcccgggctgccgtgctgcagcaactcgacaacgttattgatgtgattacctgcagctctatgctgtccagcctttgtttcctgggagctatcgccgtcgaccgctatatctctatcttttacgcgctcagatatcattccattgtgacactgccccgggcccgcagagctgtggccgctatctgggtcgccagcgttgtgttctctaccctttttattgcctactatgatcacgtggctgtcctgctctgcctggtggttttctttctggcgatgctcgtgctgatggccgtcctttacgtgcatatgctggctcgggcctgtcagcacgcccagggcatcgctcgcctccataaaagacagcggcctgttcaccaaggcttcgggctgaagggagccgtgacacttaccattctgctcggcatctttttcctgtgctgggggccctttttcctgcacctcacgctgatcgtcctttgtcctgagcatcctacctgcggatgtatttttaaaaatttcaacctgttcctcacactgatcatttgcaatgcgatcattgaccccctgatctatgcttttcactcccaggaacttcgcagaaccctcaaggaggtgctgacatgcagctggtga

SEQ ID NO: 3357 - RNA, 954 nt, synthetic construct
  misc_feature 1..954: note = AHC09535 variant
  source 1..954: mol_type = other RNA
atggccgtgcagggcagccaaagacggctgctcgggtccctgaactctacccccacagctatccctcagcttggactggccgcgaatcagacgggcgctcgctgcctcgaggtcagcatttccgacgggctgttcctttctctgggactcgttagcctggtggaaaacgccctggtggtcgccaccatcgctaagaatagaaacctccactccccgatgtactgttttatttgctgtctggccctttctgatctgctcgtgagcggctccaatgttctggagacagctgtgatccttctgctcgaagccggggcgctggtcgcccgggctgccgtgctgcagcaactcgacaacgttattgatgtgattacctgcagctctatgctgtccagcctttgtttcctgggagctatcgccgtcgaccattatatctctatcttttacgcgctccgctatcactccattgtgacactgcccagagcccggcgcgctgtggccgctatctgggtcgccagcgttgtgttctctaccctttttattgcctactatgatcatgtggctgtcctgctctgcctggtggttttctttctggcgatgctcgtgctgatggccgtcctttacgtgcacatgctggctagagcctgtcagcatgcccagggcatcgctcggctccacaaacgccagagacctgttcaccaaggcttcgggctgaagggagccgtgacacttaccattctgctcggcatctttttcctgtgctgggggccctttttcctgcatctcacgctgatcgtcctttgtcctgagcaccctacctgcggatgtatttttaaaaatttcaacctgttcctcgcgctgatcatttgcaatgctatcattgaccccctgatctatgcctttcattcccaggaacttcggcgcacactcaaggaggtgctgacctgcagctggtga

SEQ ID NO: 3358 - RNA, 954 nt, synthetic construct
  misc_feature 1..954: note = AHC11840 variant
  source 1..954: mol_type = other RNA
atggccgtgcagggcagccaaagacggctgctcgggtccctgaactctacccccacagctatccctcagcttggactggccgcgaatcagacgggcgctcgctgcctcgaggtcagcatttccgacgggctgttcctttctctgggactcgttagcctggtggaaaacgccctggtggtcgccaccatcgctaagaatagaaacctccactccccgatgtactgttttatttgctgtctggccctttctgatctgctcgtgagcggctccaatgttctggagacagctgtgatccttctgctcgaagccggggcgctggtcgcccgggctgccgtgctgcagcaactcgacaacgttattgatgtgattacctgcagctctatgctgtccagcctttgtttcctgggagctatcgccgtcgaccgctatatctctatcttttacgcgctcagatatcattccattgtgacactgccccgggcccgcagagctgtggccgctatctgggtcgccagcgttgtgttctctaccctttttattgcctactatgatcacgtggctgtcctgctctgcctggtggttttctttctggcgatgctcgtgctgatggccgtcctttacgtgcatatgctggctcgggcctgtcagcacgcccagggcatcgctcgcctccataaaagacagcggcctgttcaccaaggcttcgggctgaagggagccgtgacacttaccattctgctcggcatctttttcctgtgctgggggccctttttcctgcacctcacgctgatcgtcctttgtcctgagcatcctacctgcggatgtatttttaaaaatttcaacctgttcctcgcgctgatcatttgcaatgctatcattgaccccctgatctatgcctttcacaaccaggaacttcgcagaacactcaaggaggtgctgacctgctcctggtga

SEQ ID NO: 3359 - RNA, 954 nt, synthetic construct
  misc_feature 1..954: note = AHC09665 variant
  source 1..954: mol_type = other RNA
atggccgtgcagggcagccaaagacggctgctcgggtccctgaactctacccccacagctatccctcagcttggactggccgcgaatcagacgggcgctcgctgcctcgaggtcagcatttccgacgggctgttcctttctctgggactcgttagcctggtggaaaacgccctggtggtcgccaccatcgctaagaatagaaacctccactccccgatgtactgttttatttgctgtctggccctttctgatctgctcgtgagcggctccaatgttctggagacagctgtgatccttctgctcgaagccggggcgctggtcgcccgggctgccgtgctgcagcaactcgacaacgttattgatatgattacctgcagctctatgctgtccagcctttgtttcctgggagctatcgccgtggaccgctatatctctatcttttacgcgctcagatatcattccattgtcacactgccccgggcccgcagagctgtggccgctatctgggtggccagcgtcgttttctctaccctttttattgcctactatgatcacgtggctgtgctgctctgcctggtcgtgttctttctggcgatgctcgttctgatggccgtgctttacgtccatatgctggctcgggcctgtcagcacgcccagggcatcgctcgcctccataaaagacagcggcctgtgcaccaaggcttcgggctgaagggagccgttacacttaccattctgctcggcatctttttcctgtgctgggggccctttttcctgcacctcacgctgatcgtgctttgtcctgagcatcctacctgcggatgtatttttaaaaatttcaacctgttcctcgcgctgatcatttgcaatgctatcattgaccccctgatctatgcctttcactcccaggaacttcgcagaacactcaaggaggtcctgacctgcagctggtga

SEQ ID NO: 3360 - RNA, 954 nt, synthetic construct
  misc_feature 1..954: note = AHC11324 variant
  source 1..954: mol_type = other RNA
atggccgtgcagggcagccaaagacggctgctcgggtccctgaactctacccccacagctatccctcagcttggactggccgcgaatcagacgggcgctcgctgcctcgaggtcagcatttccgacgggctgttcctttctctgggactcgttagcctggtggaaaacgccctggtggtcgccaccatcgctaagaatagaaacctccactccccgatgtactgttttatttgctgtctggccctttctgatctgctcgtgagcggctccaatgttctggagacagctgtgatccttctgctcgaagccggggcgctggtcgcccgggctgccgtgctgcagcaactcgacaacgttattgatgtgattacctgcagctctatgctgtccagcctttgtttcctgggagctatcgccgtcgaccgctatatctctatcttttacgcgctcagatatcattccattgtgacactgccccgggcccgcagagctgtggccgctatctgggtcgccagcgttgtgttctctaccctttttattgcctactatgatcacgtggctgtcctgctctgcctggtggttttctttctggcgatgctcgtgctgatggccgtcctttacgtgcatatgctggctcgggcctgtcagcacgcccagggcatcgctcgcctccataaaagacagcggcctgttcaccaaggcttcgggctgaagggagccgtgacacttaccattctgctcggcatctttttcctgtgctgggggccctttttcctgcacctcacgctgatcgtcctttgtcctgagcatcctacctgcggatgtatttttaaaaatttcaacctgttcctcgcgctgatcattcgcaatgctatcattgaccccctgatctatgcctttcactcccaggaacttagacggacactcaaggaggtgctgacctgcagctggtga

SEQ ID NO: 3361 - RNA, 954 nt, synthetic construct
  misc_feature 1..954: note = AHC09521 variant
  source 1..954: mol_type = other RNA
atggccgtgcagggcagccaaagacggctgctcgggtccctgaactctacccccacagctatccctcagcttggactggccgcgaatcagacgggcgctcgctgcctcgaggtcagcatttccgacgggctgttcctttctctgggactcgttagcctggtggaaaacgccctggtggtcgccaccatcgctaagaatagaaacctccactccccgatgtactgttttatttgctgtctggccctttctgatctgctcgtgagcggctccaatgttctggagacagctgtgatccttctgctcgaagccggggcgctggtcgcccgggctgccgtgctgcagcaactcgacaacgttattgatgtgattacctgcagctctatgctgtccagcctttgtttcctgggagctatcgccgtcgaccgctatatctctatcttttacgcgctcagatatcattccattgtgacactgccctgggcccggcgcgctgtggccgctatctgggtcgccagcgttgtgttctctaccctttttattgcctactatgatcacgtggctgtcctgctctgcctggtggttttctttctggcgatgctcgtgctgatggccgtcctttacgtgcatatgctggctagagcctgtcagcacgcccagggcatcgctcggctccataaacgccagagacctgttcaccaaggcttcgggctgaagggagccgtgacacttaccattctgctcggcatctttttcctgtgctgggggccctttttcctgcacctcacgctgatcgtcctttgtcctgagcatcctacctgcggatgtatttttaaaaatttcaacctgttcctcgcgctgatcatttgcaatgctatcattgaccccctgatctatgcctttcactcccaggaacttcggcgcacactcaaggaggtgctgacctgcagctggtga

SEQ ID NO: 3362 - RNA, 954 nt, synthetic construct
  misc_feature 1..954: note = AHC11794 variant
  source 1..954: mol_type = other RNA
atggccgtgcagggcagccaaagacggctgctcgggtccctgaactctacccccacagctatccctcagcttggactggccgcgaatcagacgggcgctcgctgcctcgaggtcagcatttccgacgggctgttcctttctctgggactcgttagcctggtggaaaacgccctggtggtcgccaccatcgctaagaatagaaacctccactccccgatgtactgttttatttgctgtctggccctttctgatctgctcgtgagcggctccaatgttctggagacagctgtgatccttctgctcgaagccggggcgctggtcgcccgggctgccgtgctgcagcaactcgacaacgttattgatgtgattacctgcagctctatgctgtccagcctttgtttcctgggagctatcgccgtcgaccgctatatctctatcttttacgcgctcagatatcattccattgtgacactgccccgggcccgcagagctgtggccgctatctgggtcgccagcgttgtgttctctaccctttttattgcctactatgatcacgtggctgtcctgctctgcctggtggttttctttctggcgatgctcgtgctgatggccgtcctttacgtgcatatgctggctcgggcctgtcagcacgcccagggcatcgctcgcctccataaaagacagcggcctgttcaccaaggcttcgggctgaagggagccgtgacacttaccattctgctcggcatctttttcctgtgctgggggccctttttcctgcacctcacgctgatcgtcctttgtcctgagcatcccgaatgcggatgtatttttaaaaatttcaacctgttcctcgcgctgatcatttgcaatgctatcattgaccctctgatctatgcctttcactcccaggagcttcgcagaaccctcaaggaggtgctgacatgcagctggtga

SEQ ID NO: 3363 - RNA, 954 nt, synthetic construct
  misc_feature 1..954: note = AHC10874 variant
  source 1..954: mol_type = other RNA
atggccgtgcagggcagccaaagacggctgctcgggtccctgaactctacccccacagctatccctcagcttggactggccgcgaatcagacgggcgctcgctgcctcgaggtcagcatttccgacgggctgttcctttctctgggactcgttagcctggtggaaaacgccctggtggtcgccaccatcgctaagaatagaaacctccactccccgatgtactgttttatttgctgtctggccctttctgagctgctcgtgagcggctccaatgttctggaaacagctgtgatccttctgctcgaggccggggcgctggtcgcccgggctgccgtgctgcagcaactcgataacgttattgacgtgattacctgcagctctatgctgtccagcctttgtttcctgggagctatcgccgtcgatcgctatatctctatcttttacgcgctcagatatcattccattgtgacactgccccgggcccgcagagctgtggccgctatctgggtcgccagcgttgtgttctctaccctttttattgcctactatgaccacgtggctgtcctgctctgcctggtggttttctttctggcgatgctcgtgctgatggccgtcctttacgtgcatatgctggctcgggcctgtcagcacgcccagggcatcgctcgcctccataaaagacagcggcctgttcaccaaggcttcgggctgaagggagccgtgacacttaccattctgctcggcatctttttcctgtgctgggggccctttttcctgcacctcacgctgatcgtcctttgtcctgaacatcctacctgcggatgtatttttaaaaatttcaacctgttcctcgcgctgatcatttgcaatgctatcattgatcccctgatctatgcctttcactcccaggagcttcgcagaacactcaaggaggtgctgacctgcagctggtga

SEQ ID NO: 3364 - RNA, 954 nt, synthetic construct
  misc_feature 1..954: note = AHC09597 variant
  source 1..954: mol_type = other RNA
atggccgtgcagggcagccaaagacggctgctcgggtccctgaactctacccccacagctatccctcagcttggactggccgcgaatcagacgggcgctcgctgcctcgaggtcagcatttccgacgggctgttcctttctctgggactcgttagcctggtggaaaacgccctggtggtcgccaccatcgctaagaatagaaacctccactccccgatgtactgttttatttgctgtctggccctttctgatctgctcgtgagcggctccaatgttctggagacagctgtgatccttctgctcgaagccggggcgctggtcgcccgggctgccgtgctgcagcaactcgacaacgttattgatgtgattacctgcagctctatgctgtccagcctttgtttcctgggagctatcgccgtcgaccgctatatctctatcttttacgcgctctgctatcattccattgtgacactgcccagagcccggcgcgctgtggccgctatctgggtcgccagcgttgtgttctctaccctttttattgcctactatgatcacgtggctgtcctgctctgtctggtggttttctttctggcgatgctcgtgctgatggccgtcctttacgtgcatatgctggctagagcctgccagcacgcccagggcatcgctcggctccataaacgccagagacctgttcaccaaggcttcgggctgaagggagccgtgacacttaccattctgctcggcatctttttcctgtgttgggggccctttttcctgcacctcacgctgatcgtcctttgccctgagcatcccacctgtggatgcatttttaaaaatttcaacctgttcctcgcgctgatcatttgcaatgctatcattgaccctctgatctatgcctttcactcccaggaacttcggcgcacactcaaggaggtgctgacctgtagctggtga

SEQ ID NO: 3365 - RNA, 1665 nt, synthetic construct
  misc_feature 1..1665: note = CCDS816.1 variant
  source 1..1665: mol_type = other RNA
atgaccgcccccggcgctgccgggagatgccctccgacaacgtggctgggaagcctcctgcttctggtgtgtctcctggcgtcccggtctatcaccgaggaagtcagcgagtactgctcccacatgattggctctgggcatcttcagagcctgcaacgcctcatcgactcccagatggaaacatcttgtcagattaccttcgagtttgttgatcaggaacaactgaaggaccccgtgtgctatctgaaaaaggctttcctcctggtgcaggatatcatggaggacacaatgagatttcgggataacacccctaatgccattgccatcgtccagcttcaggagctgagcctccgcctgaaatcctgtttcacaaaggactacgaggaacacgataaggcttgcgtgagaaccttttatgaaacgccccttcaactgctcgagaaagttaagaacgtgttcaatgagaccaaaaacctgctggacaaggattggaatatctttagcaaaaactgtaataactctttcgccgaatgctccagccaggacgtcgtgacaaagcctgattgtaattgcctctaccccaaagctattccttcttccgacccggccagcgtttctccccatcagcctctggcgccctccatggcccctgtggctggacttacctgggaggatagcgaaggcacagaggggtcctctctgctccccggagaacagccgctgcacaccgtcgaccctggcagcgccaagcaacggccccctcgctccacgtgtcagagctttgagcctcccgagacacccgtggtgaaggactctaccatcggcgggtccccgcagcccagacctagcgtcggagctttcaaccccggcatggaagatattcttgactctgccatggggacaaattgggttcctgaggaagcgagcggagaggcctccgaaatccccgtgccgcaaggcaccgagctgtctcctagccggcccgggggaggctccatgcagaccgagcctgctcgccccagcaactttctctctgcctccagccctctgcccgcttctgccaaaggccagcagccggccgatgtgacagggacggctctgcctagagtcggacccgtgcggcccaccggccaagactggaatcatacacctcagaagaccgatcacccgtccgcgctcctgcgcgatccccctgaacccgggagccctagaatttcctctcttcggccccagggactgagcaacccttccacactctctgcccagccccaactgagccgctcccacagctctggctccgttcttccgctgggggagctcgaaggaagacggagcaccagagaccgccggtctcctgctgagcccgaaggcggccctgcctccgagggggccgctagacccctgccgcgcttcaatagcgtgcctctgacggacacaggacatgagcggcagtctgaaggcagctttagcccccagctccaggagtccgtcttccatctgcttgtgccttctgttatcctggtgctcctggccgtcgggggactgcttttctatagatggcgccggagatcccaccaagaaccccagcgcgcggatagccccctcgagcagcctgagggctccccgctgacccaggacgatcggcaagtggaactgcccgtctga

SEQ ID NO: 3366 - RNA, 1893 nt, synthetic construct
  misc_feature 1..1893: note = EAW85719 variant
  source 1..1893: mol_type = other RNA
atggccctgcccaccgctagacctctcctgggcagctgcgggacaccggcccttggatcccttctcttcctgctgttttctctgggctgggtgcagcccagccggacgctcgcgggggagaccggacaagaagctgcccctctggacggcgtcctggccaatccccctaacatctcctctctcagcccccgccagctgcttgggttcccttgtgctgaggtttccggactgtctacagaaagagtgcgggagctcgccgtggctctggcccagaagaacgtcaaacttagcaccgaacagctgcgctgcctcgcgcacagactgtccgagccgcccgaggatctggacgccctccctctggatcttctgctctttctgaatcccgacgctttcagcggccctcaagcctgtacacggtttttctctcgcattaccaaggctaacgtggatcttctgcccagaggcgccccggaacggcagcgcctcctgcctgcggccctggcttgctggggcgttagaggatccctcctgagcgaggccgacgtgcgggctcttggcgggctggcctgtgatctccccggacgctttgtcgccgaatctgctgaggtgctgcttcctagactggtttcctgccccggccccctcgaccaggatcagcaagaggcggcccgggctgccctgcaagggggaggccctccgtacgggccccctagcacatggtctgtgtccaccatggacgccctgcgcgggctcctgcccgtccttggacagcctatcattagaagcatcccccagggcattgtggctgcctggcggcagagatcctctcgcgatccgagctggcggcagcctgaaagaacgatcctgcgcccccggttcagacgcgaggtggagaaaaccgcgtgtccttccgggaagaaagctcgggagatcgacgaaagcctcatcttttataagaagtgggagctggaggcctgcgtcgatgccgctctgcttgccacacagatggacagagttaatgctattcccttcacctacgaacaactcgacgtgctgaaacataagctggatgagctctatcctcagggataccccgaatctgtgattcagcacctgggctatctttttctgaaaatgtccccggaggacatccgcaagtggaacgtcacaagcctcgaaaccctgaaagccctgcttgaggtgaataaggggcatgagatgtctcctcaggcgccccggagacccctccctcaagttgccacgctgattgatcgcttcgtgaagggacggggccagctggacaaagatacactcgacaccctgacagctttttacccgggctatctttgtagcctgtcccccgaagaactctctagcgtccctccctccagcatctgggccgtgagacctcaggatctggatacctgcgacccccggcagctggacgttctttaccctaaggctcgcctcgccttccaaaacatgaatgggtctgaatacttcgtgaaaattcagtcctttctgggaggcgcgcccaccgaggatctgaaggccctcagccagcagaacgtctctatggacctggctacattcatgaaacttagaacggacgccgtgctgccgctcaccgtcgctgaagtgcaaaagctgctggggcctcacgttgagggacttaaagccgaggaacggcatagacccgtgcgcgattggatcctccggcagagacaggacgatctggacacactgggcctcgggctgcagggcggaatccctaatggctatcttgtcctggatctctccatgcaagaggccctgagcgggaccccctgtctgcttggaccgggccctgtgctgacagttctcgctctgctcctggcgtccacccttgcctga

SEQ ID NO: 3367 - RNA, 1515 nt, synthetic construct
  misc_feature 1..1515: note = CCDS46865.1 variant
  source 1..1515: mol_type = other RNA
atggaggccctgagagtgcagatgttcatgccctgcagctttgaatccctctacctgtctagcgctgagcaccctggcgcctccaagccgcccatctctagctcctctatgaccagccggattcttctgcgccaacagctcatgagagaacagatgcaggagcaagaacggcgcgagcagcagcagaaactgcaagcggctcagttcatgcagcagagagtccctgtttcccaaacacccgccatcaacgtgagcgtgcctacgacccttccctctgccacacaggtccctatggaggtgctgaaggttcagacccatctcgaaaatccgacaaaatatcacattcaacaggctcagcggcagcaagtgaagcagtacctgtccaccacactggccaacaaacatgctaatcaggtcctcagcctgccctgtcctaaccagcccggggaccacgtgatgcctcccgttccgggatcttccgcccctaatagccccatggcgatgcttaccctgaactctaattgcgagaaggaaggcttttataagttcgaggagcaaaaccgcgccgaatccgagtgtcctgggatgaatacgcatagcagagcttcctgcatgcagatggatgacgtgatcgatgacattatctctctcgaaagctcctacaacgaggaaatcctgggacttatggatcccgccctgcagatggctaataccctccccgtcagcggcaacctgattgacctgtatgggaatcagggactccctccgcccggcctgacaatctctaactcctgtcctgccaatcttcccaacattaaacgggagctgaccgagagcgaagcgcgcgccctcgctaaggagagacagaaaaaggataaccacaatctgatcgaacggcgcagacggtttaacattaatgaccgcatcaaagagcttggcacactgattcctaagtctaacgatcccgacatgagatggaataaggggaccatcctcaaagccagcgtggattacatccggaagctgcaaagagaacagcagcgcgctaaagagctggagaaccggcaaaagaaactcgaacacgccaatagacatctgcttctgcgcattcaggagctcgaaatgcaggcccgggctcacggactgtcccttatcccgtctacgggcctgtgcagccctgacctcgtgaacagaattatcaagcaagagcccgtcctggaaaattgttcccaggatctgctccagcatcacgcggacctgacatgcaccacaacccttgacctgaccgatgggacaattacgttcaacaataacctcggaaccggcacagaggccaatcaggcttatagcgttcctaccaaaatggggtctaagctggaggacatcctgatggatgacacactttcccccgtgggagtgaccgatcctctcctgagctctgtctcccccggcgccagcaagacgtcctctcgccggagctccatgtctatggaagagacagaacacacctgttga

SEQ ID NO: 3368 - RNA, 1260 nt, synthetic construct
  misc_feature 1..1260: note = CCDS2913.1 variant
  source 1..1260: mol_type = other RNA
atgctggagatgctcgaatacaaccactatcaagtgcaaacccatctggagaatcccacaaagtaccacatccagcaggcccagagacaacaggtcaaacagtatcttagcacgaccctggctaacaagcatgccaatcaggttctctccctgccttgcccgaaccaacccggcgaccacgtgatgcctcccgtgcctgggtctagcgcgcccaattcccctatggctatgcttacactgaactctaattgtgaaaaagagggattctacaagtttgaggaacagaaccgggccgagagcgaatgcccgggcatgaatacccattcccgcgcctcttgtatgcagatggatgacgtcattgatgacatcattagcctcgagtccagctataacgaagagatcctggggctgatggatcccgctctccagatggccaatacactgcctgtgtctggaaaccttattgacctgtacggcaatcaagggcttccccctcccggactgaccatctccaacagctgcccggctaatcttcctaacatcaaaagagagctgacagcctgtattttccccaccgaatctgaggcgcgggccctcgctaaggaacgccagaagaaagataaccacaatctgatcgagagacggcgcagatttaacattaatgaccggatcaaggaactgggcacgctcattcctaaatccaacgatcccgacatgcgctggaataagggcaccatcctgaaagccagcgttgattatattagaaagctccagcgggagcaacagcgcgctaaggagctggaaaacagacagaaaaagctcgagcacgccaatcggcatctgcttctgcgcatccaggaactcgagatgcaagcgagagcccacgggctgtctctgatcccctccacaggactctgcagccctgacctggtgaaccggattatcaaacaggaaccggtccttgagaattgttcccaggatctgctccagcatcacgctgacctgacctgcacaaccacgcttgacctgacagatggcaccattacattcaacaataacctcgggaccggaaccgaggccaatcaggcttactctgtgcccacaaagatgggcagcaaactggaagacatcctgatggatgacacgctctcccctgttggggtgaccgatcccctgcttagctctgtctcccctggagccagcaagacatctagcagacgctcctctatgagcatggaggaaaccgagcacacatgttga

SEQ ID NO: 3369 - RNA, 1581 nt, synthetic construct
  misc_feature 1..1581: note = XM_005264754 variant
  source 1..1581: mol_type = other RNA
atgcaaagcgagtccggcatcgtgcccgacttcgaagtcggggaggaatttcacgaggaacctaagacctactatgagctgaaatctcaaccgctcaagagctcctctagcgccgagcatcccggagcttccaaacctcccatttctagctccagcatgacatctagaatcctgcttcggcagcagctgatgcgcgaacagatgcaagagcaggaaagacgggagcagcagcaaaagctccaggccgcgcagttcatgcagcaacgcgttcctgtgtcccagacgcccgctattaacgtgagcgtccctaccacactgccgtctgccacccaggtgcccatggaggttcttaaagtgcaaacacacctggaaaatcctaccaagtaccatatccagcaggcccagagacaacaggtcaagcagtatctctccacaaccctggctaacaaacacgccaatcaggtgctgagcctcccctgccctaaccaacccggcgatcatgttatgccgcctgtgcccgggtcttccgctcctaatagccccatggccatgctgacgcttaactccaattgtgagaaggaaggattttacaaattcgaggaacagaaccgggcggagtctgagtgccccggcatgaatacccacagccgcgcctcctgtatgcagatggacgatgtcattgacgatatcatcagcctggaatcttcctataacgaggaaattctcgggctgatggaccctgcccttcagatggctaatacactgccggtgagcggaaacctcatcgatctgtacggcaatcaaggcctgccccctcccgggctcaccatttctaacagctgccctgctaatctgcccaacatcaagagagagcttacagcctgtatttttccgaccgaatccgaggcgcgggccctggctaaagagcgccagaagaaggacaaccacaatctcatcgaaagacggcgcagattcaacattaatgatcggatcaaagagctgggaacgcttatccctaagtctaacgaccccgatatgcgctggaataaaggcacaattctgaaggccagcgtggactatatcagaaaactccagcgggaacagcaaagagctaaggagctggaaaaccgccagaaaaagctggagcatgccaatcggcacctcctgcttcgcattcaggagctggaaatgcaagccagagctcatgggctctccctgatccctagcaccggactttgctctcccgatctggtcaaccggattatcaagcaggagcctgttctcgaaaattgttcccaggacctgctgcagcaccacgcggacctcacatgcaccaccacactggatcttacggacggcaccatcacatttaacaataacctggggaccggaacagaggccaatcaggcttacagcgtgcccaccaaaatgggctctaagctcgaggatattctgatggacgatacgctgtccccggtgggcgtcacagaccctcttctcagctccgtgtctcccggggccagcaaaacctcctctagacgcagctccatgagcatggaagagaccgaacatacatgttga

SEQ ID NO: 3370 - RNA, 1065 nt, synthetic construct
  misc_feature 1..1065: note = BAG52140 variant
  source 1..1065: mol_type = other RNA
atggcccccgctgcctggctgagaagcgcggctgcccgggccctcctgcctccgatgcttctgctcctgcttcagccccctcccctgctcgctcgcgccctgcctcccgacgtgcaccatctgcacgctgagagacggggccctcaaccgtggcatgccgcgctcccctcctctcctgcccccgctcctgccacacaggaagctccccgcccggccagctccctgagacctccccggtgcggggtccctgatccctctgacggacttagcgcgcgcaacagacagaagcggatcctgcgcttcccctggcagctcgttcaagaacaggtgagacagacaatggccgaggctctgaaagtgtggtccgatgtcacgcctcttacctttacagaggtgcacgaaggccgggccgacattatgatcgatttcgctcgctactggcatggggacgatctgccgtttgacggacccggcgggattctcgcccacgccttctttcctaagacccacagagagggagatgttcatttcgactatgatgagacatggaccatcggcgacgatcagggcacagacctgctgcaagtggctgcgcacgaatttgggcatgtcctcggactgcagcacaccacggccgctaaagcccttatgtctgccttctacacctttcggtatcccctgagcctctcccctgacgattgtcgcggcgtgcagcacctgtacgggcagccctggccgacagttaccagcagaacccctgctcttggaccccaagccggcattgacacaaatgagatcgcgcctctggaacccgatgctcctcccgacgcctgcgaggcctctttcgatgctgtgtccacgatcagaggggagctctttttctttaaggccggattcgtctggcggctgcgcggcggccagctgcagccggggtatcctgctctcgccagccggcattggcaaggactgccctctcccgtggacgcggccttcgaagatgctcagggccacatttggtttttccaggggacaaccggagtgtccacccctgccccgggcgtctga

SEQ ID NO: 3371 - RNA, 804 nt, synthetic construct
  misc_feature 1..804: note = AAV40839 variant
  source 1..804: mol_type = other RNA
atgagactgaccgtgctctgcgccgtctgtctgcttcccggcagcctggctctccctctgccgcaggaggccgggggaatgtccgaacttcaatgggagcaggcgcaggactacctgaagcggttctatctctacgattctgaaacaaagaacgctaatagcctggaggccaagctgaaagaaatgcagaagtttttcggcctccccatcacggggatgctgaactcccgcgttattgagatcatgcaaaaacctagatgcggagtgcccgacgtggccgagtattctctttttcctaatagccccaagtggacctccaaggtcgtgacataccggattgtttcttatacccgcgatctgcctcacatcacagtggacagactcgtcagcaaagctctgaacatgtggggcaaggaaattccgcttcatttccggaaagtggtttgggggaccgccgatatcatgatcggatttgctcgcggcgcccacggcgactcctaccccttcgatgggcctggaaatacactggcgcatgcctttgctcccggcaccgggctcggaggcgacgcccacttcgatgaggacgaaagatggacggatgggagctctctgggaattaactttctgtatgctgccacccatgagctcggccactccctgggcatggggcacagctctgaccctaatgcggtgatgtaccccacatacggaaacggcgatccgcagaatttcaaactttcccaggacgacatcaaagggattcagaagctgtatggaaagcggagcaactctcgcaaaaagtga

SEQ ID NO: 3372 - RNA, 3768 nt, synthetic construct
  misc_feature 1..3768: note = J05582.1 variant
  source 1..3768: mol_type = other RNA
atgacccccggcacacagagccctttctttctgctcctgcttctgacggtgctcaccgtcgttacagggtccggacacgcctctagcaccccgggcggggagaaggaaacatccgctacccaaagatctagcgtgccctcctctacagagaaaaacgccgtgagcatgacctccagcgtcctgtcttcccatagccctggatctggctccagcacgacccaggggcaggacgtgacacttgcgcccgctaccgaacctgcctctggatccgccgctacatggggccaggatgttaccagcgtgcccgtcacgcggcctgccctgggctccacaaccccgcccgctcacgacgtgacatctgcccctgataataagcccgcgcctgggagcaccgctcccccggcccatggagttacctccgcccctgacacacgccccgctcctggcagcacggcccctcccgcgcacggggtgacctctgcccccgatacaagaccggctcccggatccaccgcccctcccgctcatggcgtcacaagcgcccctgacacccggcccgccccggggtctacggctcctcccgcgcacggagtgacaagcgcccctgatacccgccccgctcctggctccaccgctcccccggcccacggcgtgacatctgcccctgacaccagacccgcccccgggagcacagcgcctccggctcatggagtcacgtccgcccccgatacccggcctgcccccggcagcacagctcctcccgcccacggggttacctctgctcctgacacacgccccgccccgggatccaccgcgcctcccgcccatggcgtgacgagcgctcctgataccagacccgccccggggtctacagctcctcccgcccacggagtgacctccgcgcctgacacacggcccgcccccggcagcaccgctcctccggcccacggcgtcacgtccgctcccgatacacgccctgcccccgggtctaccgcccctcccgctcatggagtgacaagcgcgcctgacaccagaccggcccccggctccaccgctcctcccgcccacggggttacatctgcccctgacacgcggcccgctccgggaagcaccgcccctcccgcgcatggcgtgacatccgctcccgatacccgccctgcccccgggagcacagcccctccggctcacggcgtcacctctgcccccgacacgagacctgcgcccggatccacagctcctcccgcccatggcgtgaccagcgccccggatacccggcctgctcccgggtctacagcccctcccgctcacggagttacctccgcccctgacacacgccccgcgccgggcagcacggcccctcccgctcacggggtgacctctgcccccgatacaagacctgctccgggaagcaccgctccccctgcccatggcgtcacatccgcccccgacacccggcctgcgcccgggagcacggcccctccggctcacggcgtgacctctgcccccgatacaagacctgcccccggatccaccgctcctcccgcccatggcgtcacaagcgcgccggacacccgccctgctcccgggtccacagctccccctgcccacggagtgacctctgcccccgatacgcggcctgccccgggcagcacagcgccccctgctcacggggttacctccgcccccgacaccagacctgcccccggatctacagctccgcctgcccatggcgtgaccagcgctcccgatacgcgccctgcccccgggtccacagcgcctcccgcccacggcgtcacctctgctccggacacacggcctgcccccggaagcaccgctccccctgcccatggcgtgacatccgccccggacaccagacccgctcctgggagcacggcgccccctgcccacggagttacctctgctcccgatacacgccctgcccccggctccaccgccccgcctgctcatggggtgacaagcgcccccgacacccggcctgcgcccggatctacggctccgcctgcccacggcgtcacatccgcccccgataccagacccgctcctgggagcacagcgccccctgcccacggcgtgacctctgccccggacacccgccccgctcctggatccacagctccccctgcccatggcgtgacgagcgcccccgatacccggcctgctccggggtccacagcgccccctgcccacggagttaccagcgcccccgacacaagacctgctcccggctctaccgccccgcctgctcatggggtcacgagcgcccccgatacacgccccgcccctggatccaccgctccccctgcgcacggcgtgacctctgccccggacacacggcccgctcctggcagcaccgctccccctgcccatggggtgacatccgcccccgatacgagaccggcccctggatctaccgcgccccctgcccacggcgtcacaagcgctcccgacacccggccggcccctgggtccacagctcctcccgcccacggagtgacctctgcgcccgatacgcgccccgcccctggcagcaccgctccgcccgcccatggggttacatccgctcctgacaccagacccgcccctggaagcacagctccccctgcccacggcgtgacctctgcgccggatacacggcccgcccctggctccacggctccccctgcccatggggtcaccagcgctcccgacacaagaccggcccctggatctaccgcccctcccgcgcacggcgtgacctccgctcccgacacacgccccgcccctgggagcacggctccgcccgcccacggagttacctccgcccctgataaccggcccgctctcggctctacagcccctcccgtgcataatgtcaccagcgcgtccgggagcgcctctggatccgctagcacactggtgcacaacggcacctctgccagagctacgacaaccccggccagcaaatccacccctttctctatccccagccatcactccgacacacctaccacactggcgtctcatagcaccaagacggatgcctccagcacacaccactcttccgttccccctctcaccagctccaatcattctacaagcccccaactgtccaccggcgtgagctttttctttctttctttccacatttccaacctgcagtttaatagctctctcgaggacccgtccacggattactatcaggaactgcagcgcgacatcagcgagatgttccttcaaatttacaaacaagggggatttctgggcctctctaacatcaagttcagacccgggtccgtcgtggtgcagctgaccctggcttttcgggagggaacaattaatgtccatgatgttgaaacccagttcaaccagtataagacagaggccgctagccgctacaatctcaccatctctgacgtgagcgtgtccgatgtcccttttcccttctctgcccagagcggcgctggggtgcctggatggggcatcgccctgcttgttctggtgtgcgtcctcgtggcgctggccattgtttatcttatcgctctggccgtgtgtcagtgcagacggaaaaactacggccaactcgacattttcccggctcgcgatacatatcaccccatgtccgaataccctacctaccacacgcatgggagatatgtgccccctagctccacagaccggtctccctacgagaaggtcagcgccggaaatggcgggtcctctctgagctataccaaccctgccgttgcggctgcctccgccaatctgtga

SEQ ID NO: 3373 - RNA, 2136 nt, synthetic construct
  misc_feature 1..2136: note = NM_032853 variant
  source 1..2136: mol_type = other RNA
atgatggccgacgctaagtacgtgctgtgcagatgggagaaacggctctggcccgccaaggtcctggcgcgcaccgctacaagcacgaaaaacaagagacggaaagaatatttccttgccgttcagatcctgtccctcgaggaaaagattaaggtgaaatctaccgaggtggaaatcctggaaaagagccaaattgaggccatcgcttcctctcttgccagccagaatgaagtccctgctgccccgctggaggaactcgcgtaccgcagatccctgcgggtggccctggatgttctctctgagggcagcatttggtcccaggagagctctgctgggacaggacgcgccgacagatccctgcggggcaaacccatggaacacgtgagctctccttgtgattccaactctagctcccttccccgcggggacgtcctgggaagctccagacctcaccggcgcagaccctgcgtgcagcaatctctcagctccagctttacctgtgagaaggatcctgaatgcaaagttgaccacaagaagggcctgcggaaatctgagaatccgcgcgggccccttgtgctgcctgctggaggcggcgcccaggatgaatccgggagcagaatccatcacaagaactggacactcgcgtctaaacggggaggcaatagcgcccagaaggcttccctgtgtctgaacgggtctagcctctccgaggacgataccgagagagacatgggaagcaaaggcgggtcttgggccgctccctccctgcctagcggagtccgcgaagatgacccctgcgccaatgccgagggccatgatccgggccttcctctggggtctctcacagctccccctgcgcccgaaccctccgcctgtagcgagcctggagaatgcccggctaagaaacggcccagactggacggctcccagcgccctcccgccgtgcaacttgagcctatggccgctggggccgcgccctctccgggacctggccccgggcctcgggagagcgtgacccccagatccacggctcgcctgggacctcccccgtctcacgccagcgccgacgctacccggtgtctcccttgccccgattcccagaagctggaaaaggagtgtcagagctctgaagagtccatgggcagcaactctatgagatccatcctggaagaggacgaggaagatgaggaaccccctcgcgtcctcctgtatcacgagccgcggagcttcgaggttggcatgcttgtgtggcataaacacaagaaataccccttttggcctgccgtggtcaagtctgtgagacagcgcgacaaaaaggctagcgttctgtatattgaagggcatatgaatcccaagatgaaaggattcacagtgtccctcaagagcctgaaacactttgattgcaaggagaaacaaacccttctgaaccaggcccgggaagacttcaatcaggatatcggctggtgcgtctctctcattacagactacagagtgcggctggggtgtggatcctttgcgggcagcttcctggagtattacgccgctgatatctcctaccctgttcgcaagtctattcaacaggacgtgctcgggaccaagctgccccagcttagcaaaggctcccctgaggagcccgtcgtgggatgcccgctgggccagagacaaccttgtcggaagatgctccccgatagatctcgcgccgctcgggacagagccaaccagaaactggtcgagtatatcgtgaaggcgaaaggggccgaaagccatctgcgcgctattcttaagtccagaaagccttctcggtggctccagacgtttctgagctccagccagtacgttacatgcgtggagacctatctggaagacgagggacaactcgatctggtcgtgaaataccttcagggcgtttatcaggaagtgggggccaaggtcctgcagcgcacaaatggagacagaatccggttcatcctcgatgtgctgctgcccgaggctattatctgtgccatttctgccgtggacgaggttgattacaaaaccgctgaagagaagtatatcaaaggcccgtcccttagctaccgcgaaaaggagatttttgacaaccaactcctggaagagagaaatcggcgcagacggtga

SEQ ID NO: 3374 - RNA, 438 nt, synthetic construct
  misc_feature 1..438: note = AAD44697 variant
  source 1..438: mol_type = other RNA
atgaccgtgcacaacctgtacctcttcgacagaaatggcgtctgcctgcattatagcgagtggcaccggaagaaacaggccgggatccccaaggaagaggaatacaaacttatgtatggaatgctgttttccattcgctctttcgttagcaagatgtcccctctcgatatgaaagacggctttctggctttccaaacatctagatacaaacttcattattacgagacgccgaccgggatcaaggtggtgatgaacacagatctgggagtcggccccattcgggacgtgctccaccatatctatagcgccctgtacgttgaactggtggtcaagaatcctctctgtcccctggggcagaccgtgcagtccgagctttttcgctctagactggatagctacgttcggtccctccctttctttagcgcgcgcgctggatga

SEQ ID NO: 3375 - RNA, 1395 nt, synthetic construct
  misc_feature 1..1395: note = AAH02712 variant
  source 1..1395: mol_type = other RNA
atgcccagctgctccacctctacaatgcctggcatgatctgtaagaacccggacctggagttcgatagcctccagccctgcttttaccctgacgaagatgacttctattttgggggacccgattccacgcctcccggcgaggacatttggaaaaagttcgaactgcttcctaccccgcccctgtctcctagcagagggtttgccgagcactcctctgaaccccctagctgggtgacagagatgctcctggagaatgaactttggggatcccccgctgaggaagatgccttcggcctcgggggactgggcggcctgaccccgaaccctgtcatcctgcaagactgtatgtggagcgggttttctgcgcgggagaaactcgagcgcgctgtttccgaaaagctgcagcatggaagaggaccccctacagccgggagcaccgcccagtctcccggagctggcgccgcttcccccgccgggcggggacacggcggcgcggccggggctggacgcgccggcgctgcccttcctgcggagctggcccatccggctgccgaatgcgtggatcccgctgtggtcttcccttttcccgtgaataaaagagagcctgcccccgttccggccgctcctgcgagcgcccccgctgccgggcctgccgtggcttctggagccggcattgcggctcccgccggggcccctggagtcgctcccccgcggcctggcggccgccagacatccgggggagaccacaaggccctcagcacctccggcgaagatacgctgtctgacagcgatgacgaggacgatgaggaagaggacgaagaggaagagatcgatgtggttaccgtggagaagagacggtccagctctaacacaaaagctgtcaccacattcaccattacggtgcgccccaagaatgccgcgcttgggcccggcagagcccaatccagcgaactgatcctcaaacggtgtctgcctatccatcagcagcacaactacgctgccccgtctccctatgtggagagcgaagacgctcctccccagaagaaaattaagtccgaggcctctcctcgccccctcaagagcgtcatccctcccaaagcgaagtccctgagcccgagaaattctgattccgaagacagcgagcggcgcagaaaccacaatattctggagcggcaaagacgcaacgatcttcggtcttcctttctgacactcagagaccatgttcctgaactggtgaaaaatgagaaggccgctaaagtggtcatccttaagaaagccaccgaatacgtgcacagcctgcaggctgaggagcatcagctcctgctggaaaaggagaagctccaggcccgccaacagcagctgcttaaaaagattgaacacgcccggacatgctga

SEQ ID NO: 3376 - RNA, 3132 nt, synthetic construct
  misc_feature 1..3132: note = AAC78645 variant
  source 1..3132: mol_type = other RNA
atgcccctgctcgagggcagcgtgggggtcgaagacctggttcttctggagcctctcgtggaagagtccctgcttaagaacctgcagctcagatacgaaaataaagagatctatacctacattggaaacgtggtcatctctgtgaatccgtatcaacagctgcccatttacggccctgagttcatcgccaagtatcaggattacacattttatgaactgaaaccccacatttacgctctcgccaacgttgcgtaccagagcctgcgggaccgcgatagagaccaatgcatccttatcacgggggagtccggatctggcaagaccgaagctagcaaactggtgatgtcctatgtcgccgccgtgtgtgggaagggagagcaggttaattctgtgaaggagcagctcctgcagagcaaccctgtccttgaagcgttcggcaatgccaaaacaattcggaacaataactccagccgctttggcaagtacatggatatcgagttcgactttaaagggtctcccctgggaggcgtgattaccaattatctcctggaaaagtccagactggtgaaacaactcaagggggagcggaacttccatatcttttaccagctgcttgctggagccgatgaacagctgctcaaggcgctgaaacttgagcgcgacacaaccggctatgcctacctgaatcacgaggtcagcagagttgatgggatggacgatgcttcttccttccgggccgtgcagagcgctatggccgtgattggattttctgaagaggaaatccgccaagtcctcgaggtgacatccatggttctgaagctgggcaacgtgctcgtcgcggacgagttccaggccagcggcattcctgcttccgggatcagagatggacggggcgtgcgcgagatcggggagatggttggacttaattctgaagaggtggaaagagccctgtgcagccggaccatggagacggctaaagaaaaggtcgtgaccgccctgaacgtcatgcaggcccaatatgctcgcgacgcgctcgccaaaaacatttactccagactgtttgactggatcgtgaatcggattaacgagagcatcaaggttggcattggggagaaaaagaaggtgatgggagtccttgatatctacggcttcgaaatcctggaggacaattcttttgaacagttcgtgattaactattgtaatgagaaactccagcaggttttcatcgagatgacactgaaggaagaacaagaagagtacaaaagagaaggcattccgtggaccaaggtggattattttgacaacgggatcatttgcaaactgatcgagcataatcagcgcggaatcctcgctatgctggatgaggaatgtcttcggcccggcgtcgtgtccgacagcacattcctggccaagctcaaccagctgttttctaagcacgggcattacgagagcaaagtgacccagaatgcccaaagacagtatgatcacacgatgggactgtcctgcttccgcatttgtcactacgctggcaaggttacatataacgtcacctcttttatcgacaaaaataacgatcttctcttccgggacctgctgcaggccatgtggaaggcgcagcatcctctcctgagaagcctttttcccgaagggaatcctaaacaggcttccctgaagcggcccccgacagccggcgcccaattcaagagctctgtggctattctcatgaaaaacctgtactccaagagccctaattacatccggtgcattaaacccaacgagcaccagcagagaggacaattttcttccgatctggtggccacccaggctcgctatcttggcctcctggaaaacgtccgggtgagacgcgccgggtacgcgcatcggcagggatatggccctttcctggagagataccggctcctgagccgctccacctggccccactggaatgggggagacagagagggcgttgaaaaggtgcttggggagctgtctatgagctccggcgaactcgcctttggaaaaacaaagatcttcattcggtctcccaagacgctgttttatctggaggaacaaagacgccttcggctccagcagctggctaccctgatccagaaaatctacagaggctggcgctgtagaacacactatcaactcatgcgcaagagccagattctgatctccagctggttccgcgggaacatgcagaaaaagtgctacggaaaaattaaggcctctgtccttctgatccaggctttcgtgagaggctggaaagcccggaagaattaccgcaagtattttagatccgaggcggccctcaccctggctgacttcatttacaaaagcatggttcaaaagtttctgcttgggctcaaaaacaatctgccttctacaaacgtgctggataagacctggccggccgctccctataaatgtctctccacggccaatcaggagctgcagcagcttttctaccaatggaagtgcaagcggtttcgcgaccagctgagccctaaacaggtcgaaatcctcagagagaagctgtgcgcctctgaactgttcaaaggaaagaaagctagctatccccaatccgtgcctatccccttttgtggcgattacattgggcttcagggcaacccgaagctgcagaagctcaaaggaggcgaggaggggcctgttctgatggcggaagccgtgaagaaagtcaatcggggaaacggcaagacaagctctcgcatcctcctgcttaccaaagggcatgtgattctgaccgacacaaagaagtcccaggctaaaatcgtgattggactcgataatgtcgccggcgttagcgtgacctccctgaaggacgggctgttctctcttcacctgagcgagatgtcctctgtgggcagcaaaggagattttctcctggtctccgaacatgtgatcgagctcctgacaaagatgtatagagccgttcttgacgctacgcaacggcagctgaccgtgacagtcaccgaaaaattctctgtgagatttaaggagaacagcgttgccgtgaaagtcgtgcagggccccgctgggggagataattccaagctccgctacaagaaaaagggcagccactgcctggaggttacagtgcagtga

SEQ ID NO: 3377 - RNA, 3411 nt, synthetic construct
  misc_feature 1..3411: note = AAH53558 variant
  source 1..3411: mol_type = other RNA
atggccaagatggaggtgaaaaccagcctgctcgacaacatgatcggcgtcggggatatggttctgcttgaacccctgaatgaggaaacattcattaacaatctcaagaaaagatttgaccactccgagatctacacgtatattggatctgtggtgatcagcgtcaacccttaccggtccctgccgatttattctcccgaaaaggtggaggagtaccgcaatagaaacttctatgaacttagccctcatatctttgctctgtccgatgaggcctaccggtctctccgcgaccaggataaagaccaatgcatcctgattaccggcgaaagcggggcgggaaagacagaggcttccaagctggttatgagctatgtggccgccgtctgtggcaaaggggctgaggtgaatcaggttaaggaacagctcctgcagtctaaccccgtgcttgaggccttcggaaatgctaaaaccgtcagaaacgataattccagccggtttggcaagtacatggacatcgaatttgattttaaaggcgaccctcttgggggagtgatttctaactacctcctggagaagtcccgcgtggtcaagcaacccagaggcgaacggaatttccacgttttctatcagcttctgagcggggcctctgaggagctcctgaacaaactgaagctcgaacgcgatttctccagatacaattatctgagccttgactccgcgaaagtgaacggagtggatgacgccgctaactttcggacagtccgcaatgccatgcagatcgtgggcttcatggaccatgaggctgaatctgttctggccgtggtcgcggccgtgctcaagctggggaacattgagtttaaacctgaaagcagagttaatggacttgatgagtccaagatcaaagacaagaacgagctgaaggaaatttgcgagctcaccggcatcgatcagagcgtgctggaacgggctttctctttccgcacagtcgaggccaaacaagaaaaggtgtccaccacgctgaatgtcgctcaggcctactatgccagagacgctctcgcgaaaaacctgtacagccggctgttttcttggctggtgaatagaatcaacgagagcattaaggcccagaccaaagttcgcaagaaggtgatgggcgtcctcgatatctatgggttcgagatttttgaagacaattccttcgagcagtttatcattaactactgtaatgaaaaactgcaacagatcttcatcgagcttacactgaaggaggaacaggaggaatacattcgggaggatatcgaatggacccacattgactattttaacaatgctatcatttgcgatctcatcgagaacaatacaaacggaatcctggccatgctggacgaggaatgtctcagaccgggcaccgtgacggatgagacattcctggaaaaacttaaccaagtttgcgccacccatcagcactttgagtctcgcatgagcaagtgttcccggttcctgaatgacacaagcctcccccactcttgctttcgcattcagcattacgctgggaaagtgctgtatcaggtcgaaggattcgtggacaagaacaatgatctgctttacagagacctctcccaagccatgtggaaggcgagccacgctctgatcaaatctctgtttcctgagggcaaccccgccaagattaatctcaaacggcctcccaccgccgggtcccagttcaaggctagcgtggccaccctgatgaaaaaccttcagacaaagaatccgaactatatcagatgtattaagcctaatgataaaaaggctgcccatatcttcaacgaggcgctggtttgccaccagattcgctacctcggactgctggaaaatgtccgggtgagacgcgccggctatgcttttcggcaagcctacgagccctgtcttgaaagatacaaaatgctctgcaagcagacgtggcctcactggaaaggccccgctcggtccggggtggaggtcctgttcaacgaactggagatccccgtggaggaatattcttttggacgcagcaagatcttcattagaaatcctcggaccctctttaaactggaggaccttagaaagcagcgcctggaagatctcgccacactgatccagaagatttaccggggctggaaatgcagaacccatttcctgcttatgaagaaatcccaaatcgttattgcggcctggtatcgcagatacgctcagcagaagcggtatcagcaaacaaaatctagcgccctcgtgatccagtcctacatccgcgggtggaaggctagaaagattctgcgggagctgaaacaccagaagcgctgtaaagaggccgtcaccacgatcgccgcttattggcatggaacacaagcgagacgggaactccgcagactgaaggaggaagcccggaacaaacacgctattgccgtgatctgggcctactggcttggcagcaaggctcgcagagagctgaagcggctcaaagaagaggccagacgcaagcatgcggttgctgtgatttgggcctactggctggggctgaaagtccggagagagtatcgcaagtttttccgggccaatgctggcaaaaagatctacgaatttacccttcagagaatcgtgcagaagtatttcctcgagatgaaaaacaagatgccgtctctgtcccccattgacaaaaactggcctagccgcccctacctgtttctcgattctacccacaaggaactgaaacggatcttccacctttggagatgcaagaaatatcgcgaccagtttacagatcaacagaagctgatttacgaggaaaagctcgaggcctccgagctgttcaaagacaagaaagcgctgtatcctagctctgttggacagcccttccagggcgcttaccttgaaatcaataagaacccgaaatacaagaagctgaaagatgccattgaggaaaagatcatcattgccgaggtggtcaataaaatcaaccgggctaatggaaagagcacctccagaatttttctcctgacaaacaataacctcctgcttgccgaccagaaaagcgggcaaatcaagtctgaagtgcctctggtggatgtcacgaaggtttccatgagctcccagaatgacggcttctttgctgtgcatctcaaagaggggtctgaggccgcgagcaagggagacttcctgttttcctctgatcacctgattgaaatggccaccaaactttatcggacaaccctgagccagacaaagcaaaaactcaacatcgagatttccgacgagttcctggtgcagtttcgccaggataaggtctgtgtgaagttcatccaaggcaatcagaaaaacgggtctgttcctacctgcaagcggaaaaataacagactcctggaagtggctgtcccctga

SEQ ID NO: 3378 - RNA, 3192 nt, synthetic construct
  misc_feature 1..3192: note = CCDS42226.1 variant
  source 1..3192: mol_type = other RNA
atggccctccaggtggagctcgtccccaccggcgaaatcattagagttgtgcaccctcatcggccgtgcaagctggctcttgggagcgacggagtgcgcgtcacaatggagtccgccctgacggcgagagatcgggtgggcgttcaagacttcgtgctcctggaaaactttacctctgaggctgccttcatcgaaaatcttcgcagacggtttcgcgagaacctgatttacacatatatcgggcccgtcctcgtgagcgttaatccttacagagatctgcagatttattcccggcagcacatggagcgctacagaggagtgtctttctatgaagtgccccctcatctgtttgccgtcgctgacaccgtgtaccgggccctccgcacagagagacgggatcaggctgtcatgatcagcggcgaatccggggccggaaaaaccgaggcgacaaagcgcctgcttcaattctatgccgagacctgtcccgctcctgaaagaggcggcgccgttcgggacagactgctccagtctaacccggtgctggaggcttttgggaatgccaaaacgcttcgcaacgataatagctcccggttcggaaagtacatggacgtgcagtttgatttcaaaggcgcgcccgtcgggggacacatcctgagctacctcctggaaaagtctagagtggttcatcagaaccacggcgagcgcaattttcacattttctatcaactgctcgaagggggagaggaggaaaccctgcggagacttggcctggagcgcaaccctcagtcctacctctatctggtgaagggccagtgcgccaaagtcagctctatcaatgacaagtccgattggaaagtggttcggaaggctcttacagtgattgactttaccgaagatgaggtcgaagacctgctcagcatcgtggcctctgtcctgcatctggggaacattcacttcgctgccaatgaggagtccaacgcccaggtgacaaccgaaaatcaactcaaatacctgacgagacttctgagcgttgagggatccacactccgcgaagctctgacccatcggaagatcattgcgaagggcgaggaacttctgtctcccctcaacctggagcaggccgcttatgccagagacgccctggctaaagccgtgtacagccgcacattcacctggctcgtcgggaagatcaaccggtccctggcgagcaaagatgtggagtctccttcctggagaagcaccacagttcttggactgctcgacatctatggctttgaagtgttccagcacaattcttttgagcaattctgtattaactactgcaatgaaaagctgcagcagctgtttatcgagcttacgctcaaaagcgagcaggaagagtacgaagctgaggggattgcctgggaacccgtccaatatttcaacaataagatcatttgtgatctggtggaggagaaatttaagggaatcatctccattctggacgaagagtgcctccggccgggcgaagccaccgatctgacattccttgagaagctggaagacaccgtgaaacaccatcctcactttctcacacataagctggctgatcagcgcaccagaaaatctctgggccggggagagttcagacttctccactacgccggagaggttacgtatagcgtcacaggctttctggacaagaacaatgatctgctgttccgcaacctgaaagaaaccatgtgttccagcaagaatcccatcatgtctcagtgctttgaccggtccgagcttagcgataagaaaagacctgaaaccgtggctacacagttcaagatgtctctgctccaactggtggagattctgcagtccaaagaacccgcctacgtccgctgtatcaagcccaacgacgcgaaacagcctgggagattcgacgaggtgcttattcggcatcaggttaagtatctcggactgctggagaatctccgcgtgagacgggccggctttgcttaccgcagaaagtatgaagccttcctgcaacggtacaaaagcctttgcccggagacctggcccacatgggctgggcgccctcaggatggcgtcgccgtgctggttagacacctcggatacaagcccgaagagtataaaatgggccggacgaagatctttatccgcttccctaaaaccctgtttgcgacagaggacgccctggaagtgagacggcagtcccttgctaccaagattcaggccgcttggagagggttccactggcgccaaaagtttctccgggtcaaaagatctgccatctgtattcagagctggtggcgcggaacactgggccggagaaaggccgctaaacgcaagtgggcggcccagaccatccggagactgattcgcgggttcgtgctccggcatgctcccagatgcccggagaacgcctttttcctggatcacgttcggacgtcctttcttctgaatctccgcagacaactgcctcagaacgtgctggacacctcttggcccacacctccccctgcccttcgggaagctagcgagctgctccgcgaactgtgcatcaaaaatatggtctggaagtactgtagatccattagccccgagtggaaacagcagctccaacagaaggccgtggcgtctgagatcttcaaggggaaaaaggataactatccgcagtccgtgcctcggctgtttatcagcaccagacttggcacagacgaaatttctccccgcgtcctgcaggctctcgggtccgagcccatccaatacgccgttcctgtggtgaaatatgatcggaagggctacaaaccgagaagccgccagctgctgcttacccccaacgccgtcgtgattgttgaagacgctaaggtgaagcagcggatcgattatgccaatctgacgggaatttctgtcagctccctcagcgactctctgttcgtgctccatgttcagagagcggataacaaacaaaagggcgacgtggtcctgcagtccgatcacgtgatcgagacacttaccaaaacagctctgagcgccaatcgcgttaactccatcaatattaaccaggggtctatcaccttcgccggaggccctgggcgggacggaaccattgactttacacccggcagcgaactcctgatcacgaaggctaaaaatgggcacctggccgtggtcgctcctagacttaactcccgctga

SEQ ID NO: 3379 - RNA, 3021 nt, synthetic construct
  misc_feature 1..3021: note = AAI46764 variant
  source 1..3021: mol_type = other RNA
atggccgagcaggaaagcctggagttcggcaaggctgactttgtgctcatggataccgtctccatgcccgagttcatggccaacctgagacttcggtttgagaaagggcgcatctacacattcattggagaagttgtggtgtctgtcaatccttataagctgctcaacatctacggcagagacacgattgagcaatataaagggcgggagctgtacgaacgcccgccccacctttttgcgatcgctgatgccgcctataaggctatgaaaagacggagcaaggatacctgcattgtgatctccggagagtctggcgccgggaagacagaagctagcaaatacatcatgcagtatattgccgcgatcaccaatccttcccagcgcgccgaggttgagagagtgaagaacatgctgctcaaatctaattgtgtcctggaggctttcggaaacgccaagacaaatcggaacgacaatagctcccgctttggcaaatacatggacattaacttcgattttaagggcgaccccatcgggggacatattaataactacctgctcgaaaagagcagagtgatcgttcagcaacctggcgaacggtctttccactccttttatcagctgcttcaagggggaagcgagcagatgctgcgctctctccatctgcagaaatcccttagctcttacaattatattcacgtgggcgctcagctgaagtccagcatcaacgatgccgcggagttcagagtcgtggccgacgctatgaaagtgatcgggtttaagcccgaagagattcagaccgtctacaaaatcctcgccgctattctgcatctgggaaatctcaagttcgttgtggatggcgacacacctctgatcgaaaacggcaaagtggtctccattatcgccgagcttctgtctaccaagacggatatggtggaaaaggccctcctgtatcggaccgttgctacagggcgcgacatcattgacaaacagcacaccgagcaagaagcgagctacggaagagatgccttcgctaaggccatctatgagcggctgttttgctggattgtgacaagaatcaacgacattatcgaggtcaaaaattacgataccacgatccacggcaagaacacagtgattggggttctggacatctacggattcgaaatttttgataataactccttcgagcagttttgtatcaattattgcaacgaaaaactccagcaactgttcattcagctggtgctcaagcaggagcaggaagagtaccaacgcgagggcatcccgtggaagcatattgactattttaataaccagatcatcgtcgatctggtggaacagcagcacaaagggattatcgccattcttgacgatgcttgtatgaatgtcggaaaggtgaccgacgagatgttcctggaagccctcaacagcaaactgggcaagcatgcgcacttttcttcccggaaactttgcgctagcgataagatcctggagttcgacagagactttcgcattcggcactacgccggcgatgttgtgtattctgtcatcgggttcatcgacaagaataaagatacactctttcaagacttcaagagactgatgtacaacagctccaatcccgtgctgaaaaacatgtggcctgagggaaagctctctattaccgaagttaccaaacgccccctgacagccgctacgcttttcaagaatagcatgatcgccctggtggataacctcgcttccaaggagccttattacgtccggtgtattaaacccaacgacaagaaaagcccgcagatctttgatgacgaaagatgccgccatcaggtggagtacctgggcctgcttgaaaatgtgcgggttagacgcgccgggttcgcgtttcggcagacctatgagaagttcctccacagatacaaaatgatttctgagtttacatggcctaaccatgatctgccctccgacaaggaagccgtcaaaaagctgatcgagcggtgtggattccaagatgacgtggcttatggcaagaccaaaatctttattcgcacacctagaaccctcttcacgctggaagaacttcgggcccagatgctgatcagaattgtgctctttctgcagaaggtctggcgcgggacactggctcggatgagatacaaacgcaccaaggccgcgcttaccatcattagatattaccggcgctataaagttaagagctacatccacgaagtggccagacggttccatggcgtgaagacaatgcgcgattacggaaaacacgtcaagtggccctctccccctaaagtgctcagacggtttgaggaggctctgcagaccatcttcaatcgctggagagcctcccaactgattaagagcatcccggcttccgacctcccccaggttcgggccaaagtggccgctgtcgaaatgctgaagggccagcgcgcggaccttgggctgcaaagagcctgggagggaaactatctcgcttctaagcctgatacaccccagacgagcggcacctttgtgcctgttgccaatgaactgaaacggaaggacaaatacatgaacgtgctgttctcctgccacgtcagaaaggtgaatcgcttctctaaagtggaggatcgggccatttttgtcacagacagacatctttataagatggatcccaccaagcagtacaaagttatgaagacaatcccgctctataacctgaccgggctgagcgtgtccaatggaaaagaccagctcgtggtcttccacacgaaggataacaaagacctgattgtgtgtctttttagcaagcaacctacccatgaatctcgcatcggcgagctggttggggtgctcgtcaatcacttcaaatccgagaagcggcaccttcaggtgaacgttacaaatcccgtgcagtgcagcctgcatggcaagaaatgcaccgtctctgtggaaacaagacttaaccagcctcaacccgattttaccaagaatcgctccggattcattctcagcgttcctggcaactga

SEQ ID NO: 3380 - RNA, 3327 nt, synthetic construct
  misc_feature 1..3327: note = CCDS32254.1 variant
  source 1..3327: mol_type = other RNA
atgggcagcaagggggtgtaccagtatcactggcaatcccataacgtcaaacactctggagttgacgatatggtgctgctcagcaagatcaccgaaaattccattgtggaaaacctgaaaaagagatacatggacgattatatcttcacatacattggctctgtccttatcagcgtgaatccctttaaacagatgccttatttcggggagaaggaaattgagatgtaccagggagccgctcagtatgaaaacccgccccatatctacgccctggcggacaatatgtaccggaacatgatcattgatcgcgagaatcaatgcgttatcatttccggcgagtctggggctggaaagacggtggccgccaaatatatcatgagctacatttccagagtcagcggcggcgggaccaaggtgcagcacgttaaagacatcattctccagtctaaccctctgcttgaggcttttggaaatgccaagacagtgcggaacaataactccagccgcttcggcaaatattttgagatccagttctctcccgggggagaacctgatggcgggaagatctccaattttctgctcgaaaagagcagagtcgtgatgcggaaccccggagagcgctctttccatatcttttaccaactgattgaaggcgcttccgccgagcagaaacacagcctgggcattacctccatggactattactattacctctctctgagcgggtcctacaaggtggatgacatcgatgacagacgggagttccaggagacacttcacgcgatgaatgtcattggaatctttgccgaggaacagaccctggttctccaaatcgtggctggcattctgcatcttgggaacatcagcttcaaagaggtgggaaactatgccgctgtcgaatctgaggaatttctggccttccctgcgtacctcctgggcattaatcaggatcgcctgaaggagaaactcacatccagacagatggacagcaagtggggagggaaatctgaaagcatccacgtgaccctgaacgttgagcaagcctgttatacgcgggacgctcttgccaaggctctgcatgcccgcgtgttcgattttctcgtcgactccattaataaggccatggagaaagatcacgaagagtacaacatcggcgtgctggacatctatggcttcgaaatttttcagaagaatgggttcgagcagttttgcatcaacttcgttaatgaaaaacttcagcaaatttttatcgagctgaccctcaaggctgagcaggaagagtacgtgcaggaaggaattagatggacaccgatcgagtatttcaacaataaaattgtctgtgatctgatcgagaacaaggtgaatccccctggcatcatgtctattctggacgatgtctgcgcgaccatgcacgccgtgggggaaggagctgaccagacactcctgcaaaaacttcagatgcagatcggcagccatgagcactttaactcctggaatcaggggttcattatccatcactacgccggcaaagttagctacgatatggacggattttgtgaacggaaccgcgatgtgctgttcatggacctcattgagctgatgcaatcttccgaacttccctttatcaagagcctgttccctgagaatctccaggccgacaaaaagggcagacccaccacggctgggtctaaaatcaagaagcaggccaacgatctggtctccacactgatgaaatgcaccccgcattatattcggtgtatcaagcctaacgagacaaagaagcccagagactgggaagagagccgcgtgaaacaccaggttgaatacctcggactgaaggagaatattcgggtgagacgcgcgggctatgcttaccggagaatcttccaaaagtttcttcagcgctatgccattctgaccaaagccacctggccttcctggcagggggaagagaagcaaggagtcctccatctgctgcagtctgtgaacatggatagcgaccagttccagcttggccggtccaaagtgtttatcaaggctcccgagtctctcttcctgctggaagagatgagagaacgcaaatacgatgggtatgcccgggttatccaaaagagctggagaaaatttgtcgctcgcaagaagtacgtgcagatgcgggaggaagcctccgacctcctgcttaataaaaaggagagacggcgcaacagcattaatagaaacttcatcggcgattacattggaatggaggaacaccccgagctgcagcagtttgtgggcaaacgggaaaagatcgacttcgcggatacagtcacgaaatatgacagacgctttaagggggtgaagcgggatctcctgctgacccctaaatgcctttacctcattggaagagagaaggttaaacaaggcccggacaaggggctggtgaaagaggtcctgaagcgcaagatcgaaatcgagcggattctctctgtgtccctgagcacaatgcaggatgacatcttcattcttcacgaacaggagtatgactctctgctcgaatccgtttttaaaaccgagttcctgagcctgcttgccaagagatacgaggagaaaacacagaagcaactccccctgaaattttctaataccctggaactcaagctgaagaaagaaaactggggaccttggagcgctggcgggtcccgccaggtgcagttccatcaaggcttcggagatcttgccgtcctgaagcccagcaataaagtgctccaggtttctatcggccctgggctgcccaagaactccagaccgacgcggcgcaatacaacccagaacaccggatatagctccggcacacagaatgctaactaccctgtgagagccgcgccccctccccctgggtatcaccaaaatggagtcattcggaaccagtacgtgccctacccgcacgcccctggctctcagcgcagcaaccagaaatccctgtatacctctatggctagacctccccttccccggcaacagagcacatcctctgaccgcgtgagccagacgccggagtccctcgattttctgaaggtccccgaccagggggccgctggcgttagacggcaaaccacaagcagacctccccctgccggaggccgccccaaacctcagcccaagccgaagcctcaggtgccccagtgtaaagccctgtacgcttatgatgcgcaagacaccgatgaactctctttcaatgccaacgacatcattgatatcatcaaggaggacccttccgggtggtggacaggacggctgagaggcaaacaggggctttttcccaataactacgtgaccaagatttga

SEQ ID NO: 3381 - RNA, 3297 nt, synthetic construct
  misc_feature 1..3297: note = AAH28071 variant
  source 1..3297: mol_type = other RNA
atgggcagcaaggagagattccactggcagtcccataacgtgaaacaatctggggtcgacgatatggttctgctcccccagatcaccgaagacgccattgctgccaatctgcggaagcgctttatggatgactacatcttcacatatattggaagcgtgcttatctccgtgaacccttttaaacagatgccgtacttcacggatagagagattgacctgtatcagggcgcggctcaatacgaaaatccccctcacatctatgccctcaccgataacatgtaccggaatatgctgatcgactgcgagaaccagtgtgtcattatctctggggaaagcggagccggcaagacagtggctgccaaatatattatggggtacatctccaaggtttctggaggcggcgagaaggtgcagcatgtcaaagatattatccttcagagcaatcccctgctcgaggcttttgggaacgccaagaccgtgcgcaataacaattccagcagattcggaaaatactttgaaattcaattctctcggggcggggagcctgacggaggcaagatctccaactttctgctggaaaaatcccgcgttgtgatgcagaatgagaacgagagaaatttccacatctattaccagctcctggaaggggcgtctcaggagcaacggcagaaccttggactgatgacacccgattattactattacctcaaccagtccgacacctatcaagtcgatggcacagacgaccgcagcgattttggcgaaaccctgtctgccatgcaagtgattgggatccctccgtccattcagcagcttgtgctgcagctcgtcgctggaatcctgcatctgggcaatattagcttctgcgaggacgggaactacgccagagttgaatccgtggatctcctggcttttcccgcctaccttctgggaatcgactctggccggctccaggagaagctgacgagccgcaagatggattccagatggggagggcggagcgagtctatcaatgtgacccttaacgtcgaacaggcggcctatacacgcgacgctctggccaaaggcctctacgctagactgttcgatttcctggtggaggccattaatcgggccatgcagaagcctcaagaagagtattccatcggcgttctcgacatttacgggtttgaaatcttccagaaaaacggatttgagcagttctgtattaattttgtgaacgagaagctgcagcaaatcttcatcgaacttaccctgaaagctgagcaggaagagtatgtccaggaaggcattagatggacacccatccagtactttaataacaaggtggtttgcgatctcattgagaataaactgagccctcccgggatcatgtctgtgcttgacgatgtctgtgcgaccatgcacgccacgggaggcggggctgaccaaacactgctccagaagctgcaggccgccgtgggcacccacgagcatttcaacagctggtccgctggatttgtcattcaccattatgccggcaaggtgtcttacgacgttagcgggttctgcgaacgcaatcgggatgtgctgttttccgacctcatcgagctgatgcaaacaagcgaacaggcgttccttagaatgctgtttccggagaaactcgatggagacaagaaaggccgcccttctaccgctgggtccaagattaaaaagcaggccaacgatctggtcgccaccctgatgcggtgtacaccccactacatcagatgcatcaagcctaatgagacgaaacgcccccgggactgggaagagaacagagtgaagcaccaggttgaatatcttggactcaaagagaacattcgcgtgcggagagctggcttcgcctaccgccggcaattcgctaagtttctgcagagatatgccatcctgacccccgaaacatggcctcggtggcgcggggatgagagacagggcgtccagcatctcctgcgggcggtgaatatggagccggaccaataccagatgggaagcaccaaagtgttcgttaagaaccccgaatctctttttctgctcgaggaagtcagagagcgcaagttcgatggctttgcccggacaattcagaaggcttggagacgccacgtggccgtgagaaaatatgaagagatgcgggaggaagctagcaatatcctgctgaacaaaaaggagcgcagacggaatagcattaaccgcaatttcgtcggggactaccttggactcgaagagagacctgaactgcggcagtttctgggcaaacgcgagagagtggatttcgccgactccgttaccaagtatgatcggcgctttaagcccatcaaaagagacctcatcctgacgcctaagtgtgtgtacgtcattgggcgggagaaagtgaagaaaggacccgaaaagggccaagtttgcgaggtgcttaaaaagaaggtcgacatccaggcgctgagaggggtgtctctcagcacacgccaggatgacttctttattctgcaagaagatgccgctgactccttcctggagtctgtttttaaaaccgagttcgtgagccttctctgtaagcggttcgaagaggccaccagacgcccgctgcctctgacattttccgataccctccagttccgggtcaaaaaggaaggctggggaggcgggggaacaagaagcgtgacgttttctcgcggcttcggggacctggctgtgcttaaagtcggaggccggaccctgacagtttccgtgggggatggcctccccaagagctctaagcctaccagaaaaggaatggccaagggcaaaccccgccggtccagccaggcccctacaagagctgcgcccgccccgcctcgggggatggaccgcaacggagtgcctccctctgctagaggcgggcccctgccgctggagatcatgagcggaggcggcacccatcggccccctcgcgggcccccttccacgagccttggagcctctagacggcccagagcccgccctccctccgaacacaataccgagtttctcaacgtcccggatcagggcatggctgggatgcaacggaagagaagcgtgggacagcgccctgttcccggcgtggggcggcctaaaccccagccgagaacacatggacctcgctgccgggccctgtaccagtatgtcggccaagacgtggatgagctgtccttcaatgttaacgaagtgattgagatcctcatggaagacccctctggctggtggaaggggagactgcacggacaggagggcctttttcctgggaattacgtcgaaaagatctga

SEQ ID NO: 3382 - RNA, 3057 nt, synthetic construct
  misc_feature 1..3057: note = CCDS34629.1 variant
  source 1..3057: mol_type = other RNA
atggaggacgaagagggccccgaatacgggaagcctgatttcgtgctgctcgaccaggtcaccatggaggattttatgagaaacctgcaacttcggttcgaaaaaggacgcatctatacatacattggcgaggttctggtgagcgtgaatccgtatcaggagctccccctgtacgggcctgaagccatcgctagatatcagggacgggagctttacgaaagaccccctcacctgtatgccgtcgcgaacgctgcctacaaggccatgaaacatcgctcccgggacacgtgcattgtgatctctggcgagagcggggctggaaagaccgaggcctccaaacacattatgcagtacatcgctgccgttacaaatccctctcaacgcgcggaagtggagagagtcaaggatgtgctcctcaagagcacctgtgttctggaagcctttggcaacgctcggacaaatcgcaaccataattcctctagattcggcaaatatatggacatcaactttgatttcaagggggaccctattggaggccacatccatagctacctgctggagaaatcccgggtgcttaagcagcacgtcggggaacgcaattttcacgccttctatcagctgctcagaggaagcgaggataaacagctgcatgagcttcacctggaacggaacccggctgtgtacaattttacccatcaaggcgccgggctcaacatgacagtgcactctgcgctggactccgatgagcagagccaccaggccgtcaccgaagctatgcgcgttattggattctctcccgaggaagtggagtccgtgcatagaatcctggccgctattctccacctgggcaatatcgagtttgtcgaaacggaggaaggcgggcttcagaaggagggactggccgtggccgaagaggctctcgttgaccatgtggcggagctgaccgccacacctcgggatcttgtcctgagaagcctcctggctcgcaccgtggcctctggcgggcgggaactgattgagaagggacacacagccgctgaagcctcctatgcgagagacgcttgcgccaaagccgtttaccaacgcctcttcgagtgggtggtcaaccggatcaatagcgtgatggagcccagaggccgcgaccctcggagagatgggaaggacaccgtcatcggagtgctggatatttatggctttgaagttttccccgtgaactccttcgagcagttttgtatcaactactgcaatgaaaaacttcagcaactgttcattcagctcatcctgaagcaggagcaggaagagtacgagcgcgaaggcattacgtggcaatctgtcgagtattttaacaatgctacaatcgtggaccttgttgaacggccgcatagagggatcctggccgtgctcgatgaggcttgtagctccgccggaaccattacagaccgcatcttcctgcagaccctggatatgcaccaccggcatcacctccattacaccagcagacagctgtgccctacagacaaaacgatggaatttggccgggatttccgcattaagcactatgcgggggacgtcacctactctgtggagggatttatcgataaaaacagagacttcctttttcaggacttcaagcggctgctctataattccacagatcccaccctgagagccatgtggcctgacggccaacaggatattacagaggtgaccaagcgccccctgacggctgggacactttttaaaaacagcatggttgccctcgtcgaaaatctggcttctaaggagcccttctacgtgcggtgtatcaaacctaacgaagacaaggtggccggcaaactggatgagaatcactgcagacatcaggtcgcgtatctcggactgcttgaaaacgtgcgcgttagacgggccggctttgctagccgccagccgtactccagattcctgctccggtacaagatgacctgtgagtatacctggcccaatcatctgctggggtctgacaaggccgctgtgagcgcccttctcgagcaacacggactgcagggcgatgtcgccttcgggcactccaaactgtttatccgcagccctagaacactcgtgaccctggaacagtctcgggctcgccttattcccatcattgttctgctcctgcagaaggcgtggagaggaacactggcccggtggcgctgcagacggcttagagctatctacacgattatgcgctggttccggagacataaagtgcgcgcccacctcgccgagctgcaacggagatttcaggctgcccgccagcctcccctgtatggccgggacctcgtctggccgctgcctcccgcggtgcttcaacctttccaggatacctgtcacgctctgttttgcagatggcgcgcccggcagctcgttaagaacattcccccttccgacatgccccagatcaaagccaaggtggctgccatgggggcgctgcaaggcctgagacaggattggggatgccggcgcgcttgggccagagactaccttagctctgccacagataatccgaccgcttccagcctcttcgcccagcggctgaagacactgcaggacaaagacggctttggggctgtcctcttctcctctcatgtgcgcaaggtgaacagatttcacaaaatccggaatagagccctgcttctgaccgatcaacatctctataagctggaccctgatcgccagtaccgggtcatgagagcggttcccctggaagccgtgacgggacttagcgtgacctccggcggggaccagctggtcgtgctccacgctcgcggacaggatgacctggttgtgtgtctccatcggtctagaccccctctggataaccgcgtcggcgagcttgtgggggttctggccgctcactgccaaggcgagggacggacactcgaagtgagagtcagcgactgtatcccgctgtcccaccgcggcgtgagacggctgattagcgttgagccccgccctgaacagcccgagcctgatttcagatgcgcccgggggtcttttacccttctgtggccctcccgctga

SEQ ID NO: 3383 - RNA, 3069 nt, synthetic construct
  misc_feature 1..3069: note = CCDS53826.1 variant
  source 1..3069: mol_type = other RNA
atggagggcgccctgaccgctagagacaaggtgggggtccaggatttcgttctcctggacgcctacacaagcgaatccgcgtttgtggataaccttcggaaacgcttctctgagaatctgatctatacgtacattggaaccctcctggtgagcgtcaacccctatcaagaacttggcatctacacagtgtcccagatggagctgtatcagggggttaactttttcgaactccctccgcacgtgtacgctattgccgacaatgcctatagaatgatgtgcgctgagctgaataaccattttatcctgatttctggagagagcggcgccgggaagaccgaggcttccaaaaagatcctcgagtacttcgccgtcacatgtcccatgacccagtctctgcaaatcgcgcgggatcgccttctgtttagcaatcctgtgctcgaagccttcggaaacgctagaacactgcggaatgacaactccagccgctttggcaaatacatggatattcagttcgactttcagggcatccccgttgggggacacattatctcttatcttattgagaagtccagagtggtctaccagaatgagggcgaacggaacttccatatcttttatcaactgctcgccgggggagaggaagaacgcctgagctacctgggcctcgaaagagatcctcagctgtataagtacctttctcaggggcactgcgctaaagagtccagcatttctgacaagaatgattggaaaaccgtgtccaacgccttcagcgtgatcgacttcacggaggcggatctggaaaatctctttggaatcattgcctccgtcctgcatcttggcaacatcggcttcgaggaagacgaccaggggtgtgctaccattcccgatacacacgagatcaagtggattgccaaactgctcggagttcacccttctgtgctgctggaagctctcacccatcggaagatcgaggccaagacagaggaagtgatctgcccgctgacccttgagctgagcgtctatgcccgcgacgctatggcgaaagccgtgtacggcagaacgtttacatggctcgttaacaagattaattccagcctggtgaacaaagatttcacccggaagacagtcatcgggcttctggacatttacggatttgaagtgttcgataaaaatggctttgagcaattctgtatcaactattgcaatgaaaagctccagcagctgctgattgagcgcaccctcaaagctgagcaagccgaatacgagatggaagggatcgagtgggagcccatcaagtattttaacaataagattatctgtgacctggttgaagagagacacaaaggaattatctctattcttgatgaagagtgcatccggcctggccccgccaccgacctgtccttcctcgaaaagctggaggagaaagtgggcaagcatgctcactttgaaacaagaaaactggccgggcctaagggacgcaagcggattggctggatggagttcagacttctccactacgcgggggaagtcacgtattgtaccaaaggatttctggagaagaacaatgatctgctctaccgccatctgaaagaagtgctttgcaagagcaaaaacatcatcctgcgggagtgtttcctcctggctgagctggaaaatagacgccggcccccgacagtcggcacccagttcaagaactctcttagctccctcctggagacactgatttctaaggaacctagctatatcagatgcattaaacccaatgaccgcaaggagccttccaaatttgatgacttcctcatccggcaccagattaagtacctggggcttatggaacatctgagagtgcgccgggccggctttgcctacagacggaaatatgagcacttcctccagcgctacaagagcctgtgccccgacacctggccccattggcacggacctccggctgagggcgttgaaagactgatcaagtatatcgggtacaaacccgaggaatataaacttggaaaaacgaagatttttatccggttccctagaacactctttgccaccgaggatgctttcgagttttctaaacaccaactggtggcccgcattcaggcgacctacaagcggtgtctgggcagacgcgaatatgtcaaaaagagacaggccgctatcaagctcgaggcccattggcgcggggctctggcccggaaagcgattcagagacggaagtgggccgtgcgcatcatcagaaaattcattaagggatttatctcccggaacaaacccctttgccctgacaatgaagagttcattgtttttgtgcgcaagaactacatcctgaacctcagataccatctgcccaagacagtcctggataaaagctggcttcggccgcctggcattctcgaaaatgcttctgacctgctgcgcaagatgtgtgtgagaaacctcgtgcaaaaatattgccgggggatcaccgccgagagaaaggctatgatgcagcagaaagttgtcacatccgagatcttccgcggccggaaggatggatacacggaaagcctgaatcagcccttcgtgaactccagaattgacgagggcgatatcaatcctaaggtgcttcaactgatttctcacgaaaagatccagtatggggtccccgtgattaagtacgaccgcaaaggatttaaggcccggcagagacagctcatcctgacccaaaaagccgcttatgttgtggagctggcgaagattaagcagaaaatcgaatacagcgcccttaagggcgtctccacatctaacctgagcgatgggatcctcgtgattcacgtttcccctgaggacagcaaacagaagggagatgctgtgctgcaatgtggccacgtcttcgaggccgtgaccaaactcgttatgctggtgaagaaagaaaatatcgtcaacgtggtgcaggggtctcttcagtttttcatttcccccggcaaggagggaacaatcgtctttgacaccggcctggaggaacaggtttataagaataaaaacgggcaactcacggtggtgagcgtccgccggaagtcttga

SEQ ID NO: 3384 - RNA, 2379 nt, synthetic construct
  misc_feature 1..2379: note = BAC84969 variant
  source 1..2379: mol_type = other RNA
atgatcaccgtgaaccccgacggcaagattatggtcagacggtgcctggttacactccgccctttcagactgtttgtgcttgggatcggattctttacgctgtgtttcctcatgaccagcctgggcgggcagttttccgcccggcgccttggagattctccgttcacaattagaaccgaggtgatgggcgggcccgaaagccggggagtcctgcgcaaaatgtccgacctcctggagctgatggtgaagagaatggatgctctcgcccggctggaaaattctagcgagcttcaccgcgcgggcggcgacctgcattttcctgctgatagaatgccccctggggccggactcatggaacggatccaagccattgctcagaacgtttccgacatcgccgtgaaagtcgatcagatcctgcgccactctcttctgctccatagcaaggtgtccgagggcagacgggaccagtgcgaggctcccagcgatcctaaattcccggactgttctgggaaggttgaatggatgcgcgccagatggacatccgatccctgctacgcgtttttcggagtggacggcaccgagtgtagctttctgatttatctgtctgaagtcgagtggttctgccctcccctcccttggcggaatcaaacagccgctcagagagcccccaagccgctgcctaaagtgcaggctgtgtttcgctccaaccttagccatctgctcgatctgatggggtctggaaaggagtcccttatcttcatgaaaaagcggaccaaaagactgacggcccagtgggcgctcgccgctcaacgcctggcccagaagctgggcgctacccagcgggaccagaagcaaattctcgtccacatcggcttcctgacagaagagagcggggacgttttctcccccagagtgcttaaaggaggccctctgggggaaatggtgcagtgggccgatattctcaccgccctgtacgtccttggacacggcctgcgcgtgacagtttctctcaaggagctgcagagcaatctgggggtgcctcccggacggggctcctgtcccctcaccatgccgctgcccttcgaccttatctatacggattaccacggcctgcaacagatgaaaagacatatggggctcagctttaagaaatatcgctgccggattagagtcatcgacacattcggaaccgaacctgcttacaaccacgaggagtatgcgacactgcatggctaccgcaccaattgggggtactggaacctgaatcccaagcagtttatgaccatgttccctcacacacccgataactcttttatgggattcgtgtccgaggaacttaatgaaacggagaaacggctcatcaagggcgggaaggccagcaacatggctgttgtgtatggcaaagaagcctctatttggaagctgcagggaaaagagaagtttctgggcatcctcaataaatacatggagattcacgggaccgtctattacgaaagccaaagaccgcctgaggtgcccgccttcgtcaagaaccatggactgcttcctcagcccgaatttcagcagctgctccggaaggctaaactgttcatcggctttgggttcccttatgagggacccgccccgctggaagcgattgctaatggctgtatcttccttcaatcccgcttttctcctccccacagctccctcaaccatgagttctttagagggaagcccacaagccgggaggtgttctctcagcacccttacgccgaaaactttatcggcaaaccgcatgtttggaccgtggactataataactccgaggaatttgaggccgctattaaggccatcatgagaacacaggtcgatccctacctgccttacgagtatacctgcgaaggaatgctggagcgcattcacgcttacatccagcaccaagacttttgtcgggcccccgatcctgcgctccccgaagcccatgctcctcagagccccttcgtgctggccccgaatgctacgcaccttgagtgggccagaaacacatctctggcgcctggcgcctggccccctgctcatgccctccgcgcttggctggccgttcccgggagagcctgcaccgatacctgcctggaccacggacttatttgtgaaccgtcctttttcccttttctcaatagccaggacgctttcctgaaactccaggtgccctgcgactccacagagtctgagatgaaccacctgtatcctgcgtttgcccaacccggccaggaatgttacctgcagaaggagccccttctgttcagctgcgctgggtccaataccaagtatcggcgcctctgtccttgcagagatttccggaaaggacaagtcgccctgtgtcagggctgcctgtga

SEQ ID NO: 3385 - RNA, 36 nt, synthetic construct; identical to SEQ ID NO: 2377
  misc_feature 1..36: note = AF164963.1 variant
  source 1..36: mol_type = other RNA

SEQ ID NO: 3386 - RNA, 2211 nt, synthetic construct
  misc_feature 1..2211: note = AAI11702 variant
  source 1..2211: mol_type = other RNA
atgaaggagatgagcgccaacaccgtgctggactcccagagacaacagaaacactacggcatcacatctcccattagcctcgcttcccctaaggaaatcgatcatatttatacgcagaaactgatcgacgccatgaagccgttcggggtctttgaggatgaagaggaacttaatcaccggctggttgtgctcggaaaactgaacaatcttgtgaaggagtggatttctgacgtcagcgagtccaagaacctgcccccttctgtggttgcgaccgtgggcgggaaaatcttcacatttggaagctaccgcctcggcgtccataccaagggggctgatatcgacgccctgtgcgtggcccccagacacgttgaacggtccgatttctttcagagcttctttgagaaactgaagcatcaagacggcattcgcaatctcagagctgtggaagatgccttcgtccctgtgatcaaatttgagttcgacggaattgagatcgatctggtgtttgctcggcttgccattcagacaatctctgacaacctggatctccgcgacgactccagactgcggagccttgatattcgctgtatcagatctctgaatggctgccgggtcaccgacgaaatcctccacctggttcccaacaaggagacattccgcctgaccctcagagcggtgaagctgtgggccaaacggcgcgggatttattccaatatgcttggatttctgggcggggtgagctgggctatgctcgtcgccagaacgtgtcagctgtaccctaacgctgccgcgtctacccttgtgcacaagttcttcctggtgttttccaaatgggaatggccgaatcccgttctcctgaagcagcctgaggaaagcaacctgaatctccccgtctgggatcctcgggtgaacccctccgacagatatcatctgatgccgatcattacccctgcctacccccaacaaaattctacatataacgttagcacatccacccgcacggtgatggtcgaggagttcaaacagggacttgctgtgacagatgaaatcctgcagggcaagagcgactggtctaaactcctggagcctcccaactttttccagaagtaccggcactacattgtccttaccgcctccgctagcacagaagagaatcatctggaatgggtggggctcgttgagtctaagatcagagtgctggtcggaaacctggagcgcaatgaatttatcaccctcgcccacgtgaacccccagagcttccctggcaataaagagcaccataaggataacaattatgtttccatgtggtttctgggcattatcttccggagagtggaaaacgccgagtctgtcaatattgaccttacctacgatatccagagctttacagacacggtgtatcgccaagctaacaatattaacatgctgaaagaagggatgaagatcgaggcgacccacgtgaaaaagaagcagctccatcactacctgccggccgagatcctgcagaaaaagaaaaagcagtcccttagcgatgttaatcggtcttccggaggcctccaaagcaaaagactgtctctggactccagctgcctcgactcctctcgcgatacagacaacgggacccccttcaatagccctgcttccaagtctgatagcccctccgtcggagaaacagagcggaacagcgccgaacctgccgctgtgattgtggagaagcccctgtctgtcccgcctgcccagggcctttccatccccgtgattggggcgaaagttgacagcaccgtgaagacggtctctcctcccacagtgtgtaccatccctaccgttgtgggaagaaacgtcattccccgcatcacaaccccgcataatcctgctcagggccagccccacctgaacggcatgtccaatattacaaaaacggtgacccccaagcggagccactctcctagcatcgatgggacaccgaaaagactcaaggacgttgagaagtttatccggctggaatccaccttcaaagatccccgcacagccgaggaaagaaagcggaaaagcgtggacgccattggaggcgagtctatgcctatccccaccattgatacgtccagaaagaaacgcctgcctagcaaggaacttcccgactcctctagccctgtccccgctaacaatatccgggtgattaaaaactccatcagactcaccctgaatcgctga

SEQ ID NO: 3387 - RNA, 1377 nt, synthetic construct
  misc_feature 1..1377: note = AAG28389 variant
  source 1..1377: mol_type = other RNA
atgagcaccgagggcgggttcggaggcacatcctctagcgacgcccagcaatccctgcagtctttttggcccagagtgatggaagagatccggaacctcacggtcaaggatttccgcgttcaggaactgcctcttgctagaattaaaaagatcatgaaactggacgaggatgtgaagatgattagcgccgaagcgccggtgctctttgctaaagccgcccagatcttcattaccgagctgacacttcgggcttggatccacaccgaggacaataagcgcagaacactgcaacggaacgatatcgccatggctattaccaagtttgaccagttcgattttctcatcgacattgtcccccgcgatgaactgaaacctcccaagagacaggaggaagtgcggcagtccgttacgcctgccgagcccgtgcaatactatttcaccctggcgcagcagcctacggccgtccaggtgcaagggcagcagcaaggacagcagaccacatctagcaccacaaccatccagccgggccaaattatcattgctcagccccagcaggggcaaacgacacctgttaccatgcaagtgggagagggccagcaggtccagatcgtgcaggcccagccccagggccaagctcagcaggcccaatccgggacaggacagaccatgcaagtgatgcagcagatcattaccaatacaggcgaaatccagcagattcctgtccagctcaacgcggggcaactgcagtacatccgccttgcccagcccgttagcggaacacaggtggtgcaaggccagattcagaccctggctacaaatgcccaacaggggcagagaaacgcttctcagggaaaaccgcggcgctgcctcaaggagaccctgcaaatcacacagaccgaagtccagcagggccaacagcagttttcccagttcacggacggccaaagaaatagcgtgcagcaggcccgggtttctgagcttacaggggaagccgagcctcgcgaggtgaaagctaccggaaactccaccccctgtacaagctctctgcctaccacacatcctccctcccacagagcgggcgccagctgcgtctgttgctcccagccccaacagtctagcacgtccccgccccctagcgatgctctccagtgggtggttgtggaagtctctgggacccccaatcaactggagacacatcgggaactgcacgcccctctccccggaatgacctccctgagcccgcttcatccttctcagcagctgtatcagatccaacaggtgacaatgcccgccggccaggacctcgctcagcctatgtttattcaaagcgccaaccagccctccgatgggcaggcgcctcaggtcaccggagactga

SEQ ID NO: 3388 - RNA, 2802 nt, synthetic construct
  misc_feature 1..2802: note = CCDS33423.1 variant
  source 1..2802: mol_type = other RNA
atgagaatggccgctaccgcctgggcgggcctgcaggggccccctctcccgacactgtgccccgctgtgcggacgggactttactgtcgcgaccaagcccacgccgagagatgggctatgaccagcgaaacatcctctggcagccattgcgcccggtcccgcatgctgagacggcgcgctcaggaggaagattctaccgtcctcatcgacgttagccctcccgaggccgaaaagagagggtcctatggatctacagcgcacgccagcgagcctggcgggcagcaggctgccgcttgtcgggccggatcccccgcgaaacctcgcattgccgatttcgtgctggtgtgggaggaagaccttaagctggatagacaacaggacagcgctgcccgggatcgcaccgacatgcatagaacatggcgggagacctttctcgataacctgcgcgctgccggcctgtgcgtcgaccagcaggatgtgcaagacggcaatacgaccgttcactacgccctcctgtctgcttcctgggcggtgctttgttattacgccgaagatctgagactcaaactgccgcttcaggagctgcccaaccaggctagcaattggtctgccgggctcctggcctggctgggaatccctaacgtcctcctggaggtggttcccgacgtgcctcccgaatattactcctgccggttcagagtcaataaacttccgcgctttctgggcagcgacaaccaggatacattctttacctctacaaagcggcatcaaattctcttcgagatcctggctaagaccccttatgggcacgaaaagaaaaatcttctgggcattcaccagctcctggccgagggagtgctgtccgcggcttttcccctccatgacgggcctttcaagacgcctcccgaaggaccccaggccccgagactgaaccaacgccaggtgctttttcagcactgggcccggtggggcaaatggaataagtaccagcccctggatcatgtcagacgctacttcggcgagaaagttgctctctattttgcctggctggggttctacacaggatggcttctgcctgctgccgtggtgggcaccctcgtctttctggtggggtgtttcctggttttcagcgacatccccacacaagagctctgcggatccaaggattcttttgaaatgtgtcctctgtgccttgactgtcccttctggctgctcagctccgcgtgcgccctggctcaggccggccggctgtttgatcacgggggaaccgtgttctttagccttttcatggctctctgggccgtcctgctgctcgagtattggaagagaaaatctgcgaccctggcctaccgctgggactgctccgattatgaagacacagaggaacggccgagacctcagtttgctgccagcgctcccatgacggcccctaaccccatcaccggcgaggatgagccttacttccccgaacgctctcgggccagacggatgcttgctggcagcgtggttattgtggtcatggtggcggtcgtggttatgtgtctggtgtccatcattctctatcgcgccatcatggctattgtcgtgtctagaagcgggaatacactgctggccgcctgggcttcccggatcgccagccttaccggatctgttgtgaacctcgtctttattctgatcctgtccaagatctacgtgagcctcgcgcacgtgctgacaagatgggagatgcatcgcacccagacgaaattcgaagacgcttttacacttaaggttttcatttttcaattcgtcaatttctactcttccccggtgtatatcgcctttttcaaaggccggtttgtggggtaccctggaaactatcacaccctgttcggcgtcagaaatgaggaatgcgccgctgggggctgtctcattgagctggcccaggagctgcttgtgatcatggttggaaagcaggttattaacaacatgcaggaagtcctcatccccaaactgaagggctggtggcaaaagtttcgcctgagaagcaaaaagcggaaagcgggggcttccgccggagcctctcagggcccctgggaggacgattacgaactcgtgccttgcgaggggctgttcgacgagtatcttgaaatggttctgcagtttggattcgtgaccatctttgtcgctgcctgtccgctcgctcccctgttcgccctgcttaataactgggtggagattcgcctcgatgcgagaaagtttgtttgcgaataccggcgccctgtggccgagagagctcaggacatcggcatttggttccatatcctggccgggctgacacacctcgctgtcattagcaatgcctttctgcttgccttctcctctgatttcctgccccgggcttattaccgctggaccagagcgcatgacctccggggctttctgaacttcacactggcccgcgctcctagctcctttgccgccgctcacaatagaacgtgtcggtacagagccttccgcgatgacgatggacactatagccaaacctactggaaccttctggcgatccggctcgcttttgtgatcgtgttcgaacatgtcgtgttttctgtgggcagactgctcgacctgcttgtgcccgatattcctgagtccgtcgagatcaaagtgaagcgcgaatattacctggccaagcaggccctcgctgagaatgaagttctgttcgggacaaacggaaccaaagacgagcagcccgaaggcagcgagctgtcttcccactggacaccgtttaccgtgcctaaggccagccaacttcagcagtga

SEQ ID NO: 3389 - RNA, 885 nt, synthetic construct
  misc_feature 1..885: note = AAA36380 variant
  source 1..885: mol_type = other RNA
atggaggacagcatggatatggacatgagccccctgagacctcagaactacctcttcggctgcgaactgaaggccgataaagactatcactttaaggtggataatgacgagaacgaacatcaactttctctgcggaccgtcagcctcggggctggagccaaagatgagctgcacatcgttgaagcggaggctatgaattacgagggctccccgattaaggtgacacttgccacgctgaaaatgtctgtgcagcccaccgtcagcctcgggggattcgaaatcacacctcccgtggttctgcgcctgaagtgtggctccgggcctgtgcatatttctggacagcacctcgtcgccgtggaggaagacgctgagagcgaggatgaagaggaagaggacgttaagctgctttccatcagcggcaaaagatctgcccccggcgggggatccaaggtgcctcagaaaaaggtcaaactggctgccgatgaagacgatgacgacgatgacgaggaggatgacgatgaagacgatgacgatgacgattttgacgacgaggaagcggaggaaaaggccccggtgaagaaaagcattcgggatacccccgctaagaacgcccaaaaatctaatcagaacggcaaggactccaaacctagctctacaccccgctccaaggggcaggagagcttcaaaaagcaggagaagacccctaaaacacccaagggaccgtcctctgtggaagatatcaaagctaagatgcaagccagcatcgagaaaggcgggtccctccctaaggtcgaagcgaagtttattaattatgttaaaaactgcttcagaatgaccgaccaggaggccatccaggatctgtggcagtggcggaagtccctttga

SEQ ID NO: 3390 - RNA, 3915 nt, synthetic construct
  misc_feature 1..3915: note = CCDS47686.1 variant
  source 1..3915: mol_type = other RNA
atgcagctgaagatcatgcccaaaaagaaaagactcagcgccggccgggtgcctctgattcttttcctgtgccaaatgatctccgctctcgaggtcccgctggaccccaaacttctggaagatctcgttcagcctcccaccattacacagcagtctcctaaagactacatcattgatccccgcgagaacatcgtgatccaatgtgaagccaaggggaagcctccgcccagcttttcctggacgagaaatggaacccacttcgacattgataaagaccctctggtgacaatgaagcccggcaccgggacactgatcattaacatcatgtctgagggaaaagcggaaacctatgagggcgtctaccagtgcacagctcggaatgagcgcggggccgccgtgagcaacaatattgttgtgagaccttcccggtctcccctctggaccaaggaaaaactggagccgatcacgcttcagagcggacagtccctggtcctcccttgtagaccccctattggcctgccccctcccatcatcttttggatggataacagcttccaacgccttccgcagtctgaacgggtgtcccagggcctgaatggggacctctattttagcaacgttctgcccgaggatacccgcgaggactacatttgctatgctagattcaatcatacacagaccatccaacagaagcagcctatttctgtgaaggtcatctccgtggatgaactgaacgacacaattgccgctaatctcagcgataccgagttttacggagccaaatcttcccgggaaagaccccctacgttcctgacacccgagggcaacgcgagcaataaggaggaacttcgcgggaacgtgctgtccctcgagtgtatcgccgaaggactgccgacccctatcatttattgggctaaagaggacggcatgcttcccaagaatcggacagtctacaaaaactttgaaaagaccctgcaaatcattcacgtttctgaggccgacagcgggaactaccagtgcatcgctaaaaatgccctcggagcgattcatcacaccatctccgtgcgcgtgaaggccgctccttattggatcacagctccccagaacctggtcctgagccctggcgaagatggcacgctcatttgtagagctaatgggaaccccaagccgcggatctcttggctgaccaatggagtgcctattgagatcgcccccgacgatccctccagaaaaattgacggcgatacaatcattttcagcaacgttcaggagcgctctagcgccgtgtaccaatgcaatgcttccaacgaatatgggtaccttctggcgaatgcctttgtcaacgtgctcgctgagcctccgcggatcctgacccccgccaatacactttatcaggttatcgccaacagacctgctctgctcgactgtgccttctttggatctcccctgcctaccattgaatggttcaagggcgcgaaagggagcgctctgcatgaggatatctacgtgctccacgaaaatggaacgctggagattcccgtcgcccagaaggactccacaggcacctatacctgcgtggcccgcaacaaacttggcatggctaagaatgaggtccacctggaaatcaaggatcctacatggattgtgaaacagcccgagtacgccgttgtgcaacgggggagcatggtctctttcgaatgtaaggtgaaacatgaccacaccctctccctgacagttctgtggcttaaggataacagagagctcccgagcgacgagcgctttacggtggacaaagatcatctggtcgtggctgacgtgtctgatgacgattccggaacctacacatgcgttgccaacaccacactggacagcgtctccgcgtctgccgtgctcagcgtggtcgctcctacccccacgcctgcccccgtgtatgatgttccgaatcctcccttcgacctggaacttaccgatcagctggacaagtccgtgcagctctcttggacacctggcgatgacaacaatagccccatcaccaagtttatcattgagtacgaagatgctatgcacaaacccgggctgtggcaccatcagacagaggtctccggaacccaaacgacagcccagctgaaacttagcccttatgtgaactactctttccgggttatggcggtcaattccatcggcaagagcctcccgtctgaagcctccgagcagtatctgaccaaggctagcgagcccgacaaaaaccctacagccgtggaagggctgggctctgagcccgacaatctcgtgattacctggaagcctctgaacggatttgaaagcaatggccccgggcttcagtacaaggtttcctggagacaaaaagatggagacgatgagtggaccagcgtggtcgtggctaacgtgtctaagtatatcgtctccggcacacctacgttcgttccgtacctgattaaagtgcaggccctcaatgacatggggtttgcccccgaacctgctgtggtcatgggacacagcggcgaggatctgcccatggtggcgcctgggaacgttcgcgtgaatgtcgtgaactccaccctggccgaggttcattgggaccccgtgccgcttaagtctatccggggccacctccagggatacagaatctattactggaaaacacaaagctcctctaagcgcaatcggagacatattgaaaagaagatcctgaccttccagggcagcaagacacacgggatgctgcctggactcgagcccttttcccactataccctgaacgtccgggtggttaacggcaaaggggaaggacccgcttctcctgatcgcgtgttcaatacgcccgagggcgtccctagcgccccgtccagccttaagattgtgaaccccacactggactctctcaccctggaatgggatcctccctcccatcctaatgggatcctgaccgagtacacacttaaatatcagcccattaacagcacccacgagctcggcccgctggtggacctgaagatccctgccaataaaacaagatggacgctcaagaacctgaatttttctacccggtacaagttctatttttacgctcagacatccgccggaagcggctctcaaatcaccgaagaggcggtcacaaccgttgatgaagctgggattcttccccctgacgtgggagccggcaaagtgcaggccgtcaaccccagaatctccaatctgacggctgccgcggctgagacctacgccaacattagctgggagtatgaagggcctgagcatgtgaatttctacgttgaatatggagtggccggctccaaggaggaatggcgcaaagagatcgtcaacgggagccggtctttctttggcctcaagggactgatgcccggcacagcttacaaagtgagagttggggccgtgggagatagcggcttcgtctcctctgaggacgtgtttgaaaccgggccggctatggccagccgccaggtcgacattgcgacacagggatggttcatcggcctgatgtgcgccgtggcccttctgattctcatcctgctcatcgtttgttttattagacggaataagggcgggaagtatcctgtgaaagagaaggaagatgcccacgctgaccccgagatccaacccatgaaagaagatgacggaaccttcggcgagtactccgatgccgaggaccacaagcctctgaaaaaggggtctcgcacaccgagcgatagaaccgtcaagaaagaagactccgatgactctcttgtggattatggagagggcgttaacgggcagtttaatgaagacggcagcttcattggacagtactccggcaagaaagagaaggaacccgccgaggggaacgagagctctgaagctccttcccccgtgaacgcgatgaatagctttgtctga

SEQ ID NO: 3391 - RNA, 1305 nt, synthetic construct
  misc_feature 1..1305: note = AAB51320 variant
  source 1..1305: mol_type = other RNA
atgagcatcgagaagatttgggccagagaaatcctggactcccggggcaaccccaccgtggaggtcgatctctacacagctaaagggctgttccgcgccgcggttccttctggagctagcacgggcatttatgaagcccttgagctgagagacggggataagcagcggtacctcggaaaaggcgtgctgaaggccgtggaccacatcaattccaccattgctccggcccttatctctagcgggctgtccgtcgtggaacaagagaaactcgataacctgatgctggagctcgacggaacagaaaataagtctaagtttggcgctaacgccatcctgggcgttagccttgcggtgtgcaaagccggggctgccgagcgcgaactgcccctctatagacatattgctcagctggccggaaattccgatcttatcctgcctgtccccgcgttcaacgtgattaatggcgggagccacgccggaaacaagctcgctatgcaggagtttatgatcctgcctgttggcgccgagtctttccgggacgctatgcgcctgggggccgaagtgtaccataccctcaaaggagtcattaaggataaatatggcaaggacgccacaaatgtgggcgatgagggaggatttgctcccaacatcctggaaaattccgaggcgcttgaactggtgaaggaggccattgacaaagctggctacaccgagaagatcgtcatcgggatggatgttgccgccagcgagttctatagagacggaaaatacgacctcgattttaagtctcctacagacccgtcccggtacattaccggcgatcagctgggggctctttatcaagacttcgtgcgcgattaccccgtggtcagcatcgaggacccttttgatcaggacgattgggccgcgtggtctaaattcacggctaacgtggggattcagatcgttggcgacgatctgaccgtgacaaatcccaagagaattgaacgggccgtcgaggaaaaagcctgtaactgcctcctgctgaaggtgaatcagatcggctccgttaccgaggctatccaagcctgtaagctcgctcaggagaacgggtggggagtgatggtcagccaccgctccggcgaaacagaggacacctttattgccgacctggtggtcgggctttgcacgggacagatcaaaacaggcgcgccttgtagatctgaacggctggccaagtataaccagctcatgcgcattgaggaagaactgggggatgaggctagattcgccggccataattttcggaaccccagcgtgctttga

SEQ ID NO: 3392 - RNA, 1395 nt, synthetic construct
  misc_feature 1..1395: note = AAH08489 variant
  source 1..1395: mol_type = other RNA
atggagaccctgagcttccccagatacaacgtggccgaaatcgtcattcacatccggaataagattctcacaggcgctgacgggaaaaacctgacgaagaatgatctttatcctaacccgaaacccgaggttctgcatatgatctacatgcgcgccctccagattgtgtatggaatcagactggaacacttttacatgatgcctgtcaattccgaggtgatgtatccccatcttatggaaggcttcctgcctttttctaacctcgtgacccacctggacagcttcctgcccatctgccgggttaatgattttgagacagcggacattctctgtcctaaggctaaacgcacctccagattcctgtctgggatcattaactttatccatttccgggaggcctgccgcgaaacatacatggagtttctttggcaatataagagctccgccgataagatgcagcagctgaatgctgcccaccaggaagctctcatgaaactggagagacttgactctgtgccggtcgaggaacaagaggagttcaagcagctgagcgatggcattcaggaactccagcaatccctgaaccaggactttcaccagaaaaccatcgtgctgcaggaaggaaatagccaaaagaaatctaacatttccgagaagacaaagcggctcaatgagctgaaacttagcgttgtgtctctgaaggaaatccaggagtccctcaaaaccaagatcgtcgatagccccgaaaaactgaagaactacaaagagaagatgaaggacacggtgcagaaacttaagaatgcccgccaagaagtggtcgagaaatacgagatttatggggattctgttgactgtctgccttcctgccagctcgaagtgcagctgtaccagaagaaaatccaagatctgagcgacaacagagagaagctcgcgtccattctgaaggaatctcttaacctggaggaccagatcgaaagcgatgagtccgagctcaaaaagctgaaaaccgaagagaatagcttcaagcggcttatgattgtgaaaaaggaaaagctggccacagctcagtttaaaatcaacaagaaacatgaggacgtcaagcagtataaacgcaccgtgatcgaggattgtaataaggttcaagaaaagagaggagccgtgtacgagcgggtcacaaccattaaccaggaaatccagaaaattaagctcggcatccagcaactgaaagacgctgccgagcgcgaaaagctgaaatctcaggagattttcctcaatctgaagacggcgcttgagaaatatcacgatggcatcgaaaaggccgctgaggactcctacgccaagatcgatgagaaaacagctgaactgaagagaaaaatgttcaagatgagcacctga

SEQ ID NO: 3393 - RNA, 543 nt, synthetic construct
  misc_feature 1..543: note = AAB49693 variant
  source 1..543: mol_type = other RNA
atgcaggccgagggcagagggaccggaggcagcacaggggacgctgatggacccggcgggcctggaatcccggacggccccggcgggaacgccggaggccctggggaagcgggagctacgggcgggcggggaccccgcggcgccggcgccgctagagcctccgggcctggaggcggggctccccggggacctcacggcggggccgcgtctggactgaatggctgctgtcgctgcggcgccagagggccggagagccggctcctggagttctaccttgctatgccctttgccacccctatggaagctgaactggcccgcagatccctcgcgcaagatgctccccctctgcccgtgccgggagtccttctgaaggagttcacagtttctggcaacattctcaccatccggctgacagccgccgaccatcgccagctgcagctcagcatttcctcttgtctgcagcaacttagcctgctcatgtggatcacccagtgctttctgcctgtgttccttgctcagcccccttccgggcagagacggtga

SEQ ID NO: 3394 - RNA, 1215 nt, synthetic construct
  misc_feature 1..1215: note = CCDS14134.2 variant
  source 1..1215: mol_type = other RNA
atggccagccccagactgggcaccttctgctgtcctacacgggacgctgccacgcagctcgtgctgtcctttcaaccgcgcgcgttccacgctctttgcctggggtctggaggcctcagactggcccttgggctgctccagctgctgcccggacggcgccctgccggccccgggagccctgctacctctccccctgcctccgtcagaatcctccgggctgccgcggcctgtgatctgcttggatgcctgggcatggttattcgcagcacagtgtggctcggctttccgaacttcgtggactccgtctctgatatgaatcataccgagatctggcccgctgccttttgtgtggggagcgctatgtggattcagctgctttactccgcctgcttctggtggctgttttgttatgcggttgacgcctacctcgtgatcagacggagcgctggactgtctacaattctgctctatcacatcatggcctggggcctggctacccttctgtgcgtcgaaggggccgccatgctctactatccttccgtgagccgctgtgagagaggactggatcatgctatcccccactacgttacaatgtatcttcctctgctcctggtgctggtcgcgaaccccattctcttccagaagaccgtgacggccgtggcttctctgcttaaaggccggcaagggatctacaccgaaaatgagcgcagaatgggagccgtcattaagatccggtttttcaaaattatgctggttctcatcatttgctggctgtccaacatcatcaatgaaagccttctgttttacctcgagatgcagacagacattaacggcggctctctgaagccggtgcgcaccgccgctaaaacaacctggttcatcatggggattctgaatcctgcccagggatttctcctgtcccttgcgttctatggctggacggggtgtagcctgggattccagtcccccagaaaggagatccaatgggaatctctcacaaccagcgctgccgagggcgcccatcctagccccctgatgccccacgaaaaccctgcttccgggaaggtgtctcaggtcggaggccagacatccgatgaggccctgagcatgctttctgagggcagcgacgcttccaccattgaaatccacaccgcctctgagagctgcaataaaaacgaaggggatccggcgctccccacacatggagacctgtga

SEQ ID NO: 3395 - RNA, 3141 nt, synthetic construct
  misc_feature 1..3141: note = AAH38180 variant
  source 1..3141: mol_type = other RNA
atggccagctccgtgggcaacgtcgctgactctaccgagcccacaaagagaatgctgagcttccaggggctcgccgaactggcgcaccgggagtaccaagctggagattttgaagccgccgagcgccattgcatgcagctttggagacaggaacctgacaatacgggcgttctgctcctgctttcctctatccacttccagtgtcggcgcctggatagaagcgctcatttttccaccctcgccattaaacaaaacccgctgctggctgaggcctattctaatctcgggaacgtgtacaaggagcggggacagctgcaggaagcgatcgagcactatcgccatgcccttagactgaaacccgacttcattgatggctacatcaatctcgctgccgctctggtggccgcgggggacatggaaggagccgtccaggcttatgtgagcgcccttcaatacaaccctgatctgtattgcgttcggtccgacctcggcaatctgctgaaggctctcggccgcctggaggaggccaaagcctgttaccttaaggctattgaaacacagcccaactttgcggtggcctggagcaatctggggtgcgtcttcaacgctcagggagagatctggctcgccatccaccactttgaaaaggccgtgaccctggatcctaatttccttgacgcttacattaacctgggcaatgttctcaaagaggccagaatctttgatcgggcggtggctgcctatctgcgcgccctgtctctctcccccaaccatgctgtcgtgcacgggaatctggcctgtgtgtactatgaacagggacttattgacctggctatcgatacatacagacgggccattgagctccaacctcatttcccggacgcgtattgcaacctggccaacgctcttaaggagaaaggcagcgtcgccgaagctgaggactgttacaataccgccctgcgcctctgccccacacacgcggattctctgaacaatctggccaacatcaagagagaacaggggaatattgaggaagctgttcggctctatagaaaagccctggaggtgtttcctgagttcgctgccgcccactccaaccttgctagcgtgctgcagcaacagggaaagctccaggaagcgctgatgcattacaaggaggccatccgcatctctcccacctttgctgacgcctactccaatatgggcaacacgctgaaagaaatgcaggatgtccaaggcgcccttcagtgttatacccgggctattcagatcaatcctgccttcgcggacgctcacagcaacctcgcctccattcataaggattctgggaatatccccgaggccattgctagctacagaacagccctgaaactgaagccggacttccctgatgcgtattgcaacctcgctcactgtctgcagatcgtgtgcgactggaccgattacgacgaacgcatgaaaaagctggtttccatcgtggccgatcaacttgagaaaaatcggctccccagcgtccatcctcaccactctatgctgtatcccctgtcccatggatttagaaaggccattgctgagcgccacggcaacctttgcctcgacaagatcaatgtgctgcataaacccccttacgaacacccgaaggacctgaaactcagcgatgggcggctgagagttggatatgtgtctagcgacttcggcaaccaccccacatcccatcttatgcagtctattcctgggatgcacaaccccgataagtttgaggtcttctgttacgccctgagccctgacgatggaaccaattttcgcgtgaaagtcatggctgaagccaaccatttcatcgacctctcccagattccctgcaatggcaaggcggccgatcggatccaccaggacggcatccatattctggtgaacatgaatgggtacacgaagggagctagaaacgagctgtttgcccttcgcccggctcctatccaagccatgtggctcggctatcccgggacaagcggagccctgttcatggattacattatcaccgaccaggagacatctcctgctgaagttgcggagcagtattccgaaaaactggcctacatgccccacacctttttcattggcgatcacgctaatatgtttcctcatctcaagaaaaaggccgtgatcgacttcaaaagcaacgggcacatttatgataatcggatcgtcctgaacggcatcgaccttaaggcctttctggactctctccccgatgtgaagattgttaaaatgaagtgtccggacggaggcgataatgctgactccagcaacaccgccctgaatatgcctgtgatccccatgaacacaattgcggaggctgtcatcgaaatgattaatagagggcagatccaaatcacgattaacggattctccatctctaacggcctggccaccacacagattaataacaaagccgctaccggggaggaggtgccccggacaatcattgtgaccacgcgcagccagtacggacttcctgaagatgccatcgtttattgcaatttcaaccaactctacaagatcgacccgtccacactgcagatgtgggcgaatattctgaaaagagtccccaactctgtgctctggctgcttcggtttcctgctgtgggcgagcccaatatccagcagtacgcccaaaacatggggctgcctcagaatagaattatcttcagccccgtcgcccctaaggaggaacatgtgcgccggggccagctcgctgatgtttgtctggacacacccctgtgcaacggacacaccaccggcatggatgtgctttgggccgggaccccgatggtcacaatgcctggagaaacgctggcttccagagtggccgcgagccagctcacctgtctgggctgcctcgagctgattgccaagaatcgccaagagtatgaagacatcgctgttaaacttgggacagatctggagtacctcaagaaagtgagaggaaaggtctggaaacagcggatctctagccccctgtttaacaccaagcagtatacaatggaactggagcgcctttacctgcagatgtgggaacattatgccgctggcaataaacctgaccacatgattaagcccgtggaggttaccgagtccgcctga

SEQ ID NO: 3396 - RNA, 441 nt, synthetic construct
  misc_feature 1..441: note = BAG57972 variant
  source 1..441: mol_type = other RNA
atggccgctgagaccctgctcagctccctgcttggcctgctcctgcttgggctgctcctgcccgcctctctgacaggaggcgtggggagcctcaacctggaggaactttccgaaatgagatacggaatcgagattctgcctctcccggtcatgggcgggcagtctcaaagctccgacgttgtgatcgtgtctagcaagtataaacagcggtacgaatgccgcctgcccgtcggagcgattcacttccagagagagcgggaggaagagacgcctgcttatcagggccccggcatccctgaacttctgtcccccatgcgcgatgccccttgtctcctgaagaccaaagactggtggacatacgagttttgctatgggagacatattcaacagtaccacatggaggatagcgaaatcaagggactgcaggccgcttcttcctga

SEQ ID NO: 3397 - RNA, 1221 nt, synthetic construct
  misc_feature 1..1221: note = BAG65333 variant
  source 1..1221: mol_type = other RNA
atggccgctgagaccctgctcagctccctgcttggcctgctcctgcttgggctgctcctgcccgcctctctgacaggaggcgtggggagcctcaacctggaagaactttccgaaatgagatacggaatcgagattctgcctctcccggtcatgggcgggcagtctcaaagctccgacgttgtgatcgtgtctagcaagtataaacagcggtacgaatgccgcctgcccgcgggagctattcacttccagagagagcgggaggaagagacgcctgcctatcagggccccggcatccctgaacttctgtcccccatgcgcgatgccccttgtctcctgaagaccaaagactggtggacatacgagttttgctatgggagacatattcaacagtaccacatggaggatagcgcttctggagccccgaatgacttccagaacaatgtccaggtgaaggttatccggtcccccgctgatctgatccgctttattgaggagctcaaaggcgggaccaagaagggaaaacctaacatcggccaagaacagcccgtggacgatgccgcggaggtccctcagagagaacccgagaaggagcgcggggacccggaacggcagagagagatggaagaggaagaggatgaggacgaagatgaggacgaagatgaggacgaacggcaactgcttggagagttcgagaaagaactggagggcattctcctgcctagcgaccgcgatagacttcggtctgaagtgaaggccggcatggagcgcgagctggaaaatatcattcaggagacagaaaaagagctcgaccccgatgggctgaagaaggaatccgagagagaccgggctatgctggccctcaccagcacactgaacaaacttatcaagagactggaggaaaaacagtctcctgagctcgttaagaaacataagaaaaagcgcgtggtccccaagaaaccccctccgagcccccaacctaccggaaagattgaaatcaaaatcgtgcggccctgggctgagggcacggaagagggggccagatggctgaccgatgaggacacacgcaatcttaaggaaatctttttcaacattctggtgcctggagcggaggaagcccagaaagagcggcagagacagaaggaactcgagtccaattatcgccgggtctggggctcccccgggggagagggcaccggcgatctggacgaatttgatttctga

SEQ ID NO: 3398 - RNA, 2223 nt, synthetic construct
  misc_feature 1..2223: note = BAH13933 variant
  source 1..2223: mol_type = other RNA
atggccgtggagaccctgctcagctccctgcttggcctgctcctgcttgggctgctcctgcccgcttctctgacaggaggcgtcgggagcctcaacctggaagaactttccgaaatgagatacggaatcgagattctgcctctcccggttatgggcgggcagtctcaaagctccgacgtggtgatcgtctctagcaagtataaacagcggtacgaatgccgcctgcccgccggagcgattcacttccagagagagcgggaggaagagacgcctgcttatcagggccccggcatccctgaacttctgtcccccatgcgcgatgccccttgtctcctgaagaccaaagactggtggacatacgagttttgctatgggagacatattcaacagtaccacatggaggatagcgaaatcaagggagaggtgctgtatctcggctactaccagtctgccttcgactgggatgacgaaaccgctaaagcctccaagcagcatcggctgaagcgctatcacagccaaacatacgggaatggatctaaatgtgatcttaacggcagaccgcgggaggctgaagttcgctttctgtgcgacgagggggccggaatctccggcgattatattgacagagtggatgagcccctcagctgttcttacgtcctgaccatccggacacctcgcctttgcccccatcctctgctcagacccccgccttccgcggctccccaggccattctgtgtcaccctagcctgcagcccgaagagtatatggcctacgtgcagcggcaagctgactccaagcagtatggcgataaaatcattgaggagctccaggacctggggccccaagtttggtctgaaaccaagagcggagtggcccctcagaaaatggcgggccgcacgcttttccacctgtttagagagatccatttccactttttcccgtcccccgacctcaccgtcctgacagattggtggggagggggcggggtggagaagtaccatggacctagctctcttggcgaccggggcggggaaggaaccccctcctacctgctccctagcgtgtctcccctgctgagcgatcagtccctcccggtcctgtgcacacttggcgcctctcctaccaaggacgatagcaaagactccgatttttggaagatgctgaatgagcccgaagaccaggctcctgggggagaggaagttcccgccgaggagcaagatcctagccccgaagctgccgactctgcctccggcgctccgaacgatttccagaataacgtccaggtgaaagtgattagaagccctgcggacctcatccgctttatcgaggaactgaaagggggcacgaagaagggaaaacccaatattggccaggagcaacccgtggacgatgccgctgaggttcctcagcgggaaccggagaaggaaagaggggaccccgagcgccagcgggaaatggaggaggaagaggatgaagacgaggatgaagacgaggatgaggacgaaagacagctgcttggagagttcgaaaaggagctcgaaggcatcctgctgccttctgatcgcgaccggctcagatccgaggtgaaagccgggatggagcgcgaactggagaacattatccaagaaacagagaaggagcttgatcccgacggactgaaaaaggaaagcgagcgggatagagccatgctcgctctgacctccacactgaataaacttattaagcgcctcgaagagaagcagtctcctgaactggtcaaaaagcacaaaaagaaacgggtggttcccaagaagcctcccccgagccctcagcccaccgaggaggaccctgaacacagagtgcgggtccgcgtgaccaaactgagactcggcgggcccaaccaggacctgacagtccttgagatgaagcgggaaaatccgcaactgaaacagatcgagggcctcgtgaaggaactgctggagagagagggacttacggccgcgggcaaaatcgaaattaagatcgttcgcccttgggctgaggggaccgaagagggagcccggtggctcacagatgaagacaccagaaacctgaaggagattttcttcaatatcctggtgcccggcgccgaggaagctcagaaagagcgccaaagacagaaggaactcgagtccaactatcggcgcgtctgggggtctcctggaggcgaggggacaggcgatctggacgaatttgatttttga

SEQ ID NO: 3399 - RNA, 2004 nt, synthetic construct
  misc_feature 1..2004: note = AAB06495 variant
  source 1..2004: mol_type = other RNA
atggccgctgagaccctgctcagctccctgcttggcctgctcctgcttgggctgctcctgcccgcctctctgacaggaggcgtggggagcctcaacctggaagaactttccgaaatgagatacggaatcgagattctgcctctcccggtcatgggcgggcagtctcaaagctccgacgttgtgatcgtgtctagcaagtataaacagcggtacgaatgccgcctgcccgcgggagctattcacttccagagagagcgggaggaagagacgcctgcctatcagggccccggcatccctgaacttctgtcccccatgcgcgatgccccttgtctcctgaagaccaaagactggtggacatacgagttttgctatgggagacatattcaacagtaccacatggaggatagcgaaatcaagggagaggtcctgtatctcggctactaccagtctgctttcgactgggatgacgaaaccgccaaggcttccaaacagcatcggctgaagcgctatcacagccaaacatacgggaatggatctaaatgtgatcttaacggcagaccgcgggaggccgaagtgcgctttctgtgcgacgagggggcgggaatctccggcgattatattgacagagttgatgagcccctcagctgttcttacgtgctgaccatccggacacctcgcctttgcccccatcctctgctcagacccccgccttccgccgctccccaggccattctgtgtcaccctagcctgcagcccgaagagtatatggcttacgtccagcggcaagccgactccaagcagtatggcgataaaatcattgaagaactccaggacctggggccccaagtgtggtctgaaaccaagagcggagttgcgcctcagaaaatggccggcgcttccccgacgaaggacgatagcaaggactctgatttctggaaaatgcttaatgagcccgaggaccaggcccctgggggagaagaggtgcccgctgaggagcaggatccttcccccgaagccgccgacagcgcttctggcgcgccgaacgattttcaaaataacgtccaggtgaaggtgatccgcagccctgccgacctgattagattcatcgaggagctcaaagggggaaccaagaaaggcaagcccaatatcggccaggaacagcctgtcgatgacgctgccgaggttccccaacgggaacctgagaaagagagaggggatcccgaacgccagcgggagatggaagaggaagaggacgaggacgaagatgaggacgaagatgaggacgaaagacagctgcttggagagtttgagaaggaactggagggcattctcctgccgtccgatcgcgaccggctgagatctgaagtgaaggccgggatggagcgcgaactcgagaacatcattcaggagacagaaaaagagctggatcctgacggacttaagaaagaaagcgagcgggatagagctatgctggccctcacctccacactgaataagctgatcaaacgccttgaggaaaagcaaagccccgagctcgtgaagaaacacaagaaaaagcgggtcgtgcccaaaaagcctccgccctctcctcagcccaccgaagaggaccctgaacatagagttcgcgtgcgggtcacgaagctgagactgggcgggcccaaccaggatctcacagtgctggagatgaaacgggagaatcctcagcttaagcaaattgaaggcctggttaaagagctcctggaacgcgagggactgaccgcggctggcaagatcgaaatcaaaattgtgagaccctgggccgaggggacagaggaaggagcccggtggcttaccgacgaggataccagaaacctcaaggaaatcttctttaatattctggtcccgggcgctgaggaagcccagaaggagcgccagcggcaaaaagagctggaatccaactacagacgcgtgtgggggagccctggaggcgaggggacaggcgacctcgacgagttcgatttttga

SEQ ID NO: 3400 - RNA, 303 nt, synthetic construct
  misc_feature 1..303: note = AAI13433 variant
  source 1..303: mol_type = other RNA
atgagagccctgaccctcctggcccttctggctctcgcggctctgtgcatcgccggccaggccggggctaagcccagcggagccgagtcctctaaaggcgctgccttcgtgagcaagcaagaagggtccgaggtcgttaaacggcctcgcagatacctttatcagtggctgggagcgccggtgccctaccctgaccccctcgaacctcggcgcgaggtgtgtgaactgaaccccgattgcgacgagctggccgatcacattggctttcaggaggcttatagacggttctacgggcctgtctga

SEQ ID NO: 3401 - RNA, 945 nt, synthetic construct
  misc_feature 1..945: note = EAX06008 variant
  source 1..945: mol_type = other RNA
atgagaatcgccgtgatttgcttctgtctgctcggcattacctgcgctatccccgtcaagcaggccgacagcgggtcctctgaggaaaaacaactgtacaacaagtatcctgatgcggttgctacatggcttaatccggaccccagccagaaacagaacctgctcgcccctcagaatgccgtgtcctctgaggaaacgaacgattttaagcaagagaccctgcccagcaaatccaatgaatctcacgaccatatggatgacatggatgacgaggatgacgatgaccacgtggatagccaggactccatcgacagcaacgattctgacgatgtcgacgatacagacgattcccatcagagcgacgagtctcaccattccgatgaaagcgacgagcttgtgaccgatttccctacagacctgcccgctaccgaagtttttacacctgtggtcccgaccgtggacacgtacgatggacggggcgactctgttgtgtatgggctccgctccaagagcaagaaattcagacggcccgatattcagtaccctgacgccaccgatgaggacatcacatcccacatggagtctgaggaactgaatggagcttataaggccatccccgtcgcgcaagatctgaacgcccctagcgactgggattcccgcggcaaagacagctacgaaacctctcagctcgatgaccagtccgctgagacacacagccataagcagtctagactgtataaacggaaggccaatgatgaaagcaacgagcactccgacgtgattgactctcaagagcttagcaaggtgtcccgcgaatttcatagccacgagttccactctcatgaagatatgctggtcgttgaccccaaatccaaggaggaagataaacacctcaagtttagaatcagccatgagctggactctgcttccagcgaggtgaattga

SEQ ID NO: 3402 - RNA, 903 nt, synthetic construct
  misc_feature 1..903: note = EAX06009 variant
  source 1..903: mol_type = other RNA
atgagaatcgccgtgatttgcttctgtctgctcggcattacctgcgctatccccgtcaagcaggccgacagcgggtcctctgaggaaaaacaactgtacaacaagtatcctgatgcggttgctacatggcttaatccggaccccagccagaaacagaacctgctcgcccctcagacgctgccctccaagtctaatgagagccacgatcatatggacgatatggacgatgaagacgatgacgatcacgtggactcccaagattctatcgacagcaacgactccgatgacgtggatgacaccgatgacagccatcagtctgatgagtcccaccatagcgacgaatctgatgagcttgtcacagactttcctaccgatctgcccgccacagaggtgttcacccctgttgtgccgacagtcgacacctacgacggacggggcgattccgtggtttatgggctccgcagcaaatctaagaagtttagacggcccgacattcagtaccctgatgctacggacgaagatatcacctcccacatggagagcgaagaactgaatggagcctataaagctatccccgtggcccaggacctgaacgcgccttccgattgggactctcgcggcaaggatagctacgagacatcccaactcgacgatcagagcgccgaaacccactctcataaacagtccagactgtataagcggaaagctaatgacgagagcaacgaacactctgatgtcattgacagccaggagctttccaaggtgtctcgcgagttccatagccacgagtttcactcccatgaggacatgctggtggtcgatcccaagagcaaagaagaggacaagcacctcaaattcagaatctctcatgaactggattccgccagctctgaggttaattga

SEQ ID NO: 3403 - RNA, 864 nt, synthetic construct
  misc_feature 1..864: note = EAX06010 variant
  source 1..864: mol_type = other RNA
atgagaatcgccgtgatttgcttctgtctgctcggcattacctgcgctatccccgtcaagcaggccgacagcgggtcctctgaggaaaaacaaaacgcggttagctccgaggaaacaaatgattttaagcaggagacgctgccttctaaaagcaacgaatcccacgaccatatggatgacatggatgacgaggatgacgatgaccacgtggattctcaggacagcatcgattccaatgacagcgacgatgtggacgataccgacgattctcatcagtccgacgagagccaccattctgatgaatccgacgagcttgtcacagatttcccgaccgacctgcccgctacagaagtgtttacccctgttgtgcccacagtcgatacctacgacggacggggcgacagcgtggtttatgggctccgctctaagtccaaaaagttcagacggcctgatattcaataccccgacgccacggatgaggacatcaccagccacatggagtccgaggaactgaacggagcctataaggctatccctgtggcccaggatcttaatgctccgtctgactgggatagccgcggcaaagactcctacgaaacaagccagctggatgaccagtctgccgagacccactcccataagcaaagcagactctataaacggaaggcgaacgatgaatctaatgagcacagcgacgtcattgattcccaggagctgtctaaagtgagccgcgaatttcattcccacgagttccacagccatgaagacatgctggtggtcgaccccaagtctaaggaggaagataaacacctcaagtttagaatctcccatgagctggacagcgcctcttccgaggttaactga

SEQ ID NO: 3404 - RNA, 984 nt, synthetic construct
  misc_feature 1..984: note = BAH12087 variant
  source 1..984: mol_type = other RNA
atgggcatcgtgcccagaagcctggacaagaaagcccaccgggtccagttccaactcaaccgcattaaggctaaaatcgagctgccttgggggtcccttcagctggattgcctcatgaagaccctgaaagaactttacaataagtatccggacgccgttgcgacatggctgaaccccgatccttctcagaagcagaatctcctggctccccaaaacgccgtgagctccgaggaaacgaatgactttaaacaggagaccctgccttctaagagcaacgaatcccatgatcacatggacgatatggacgatgaggacgatgacgatcatgtggactctcaggacagcattgattccaatgacagcgatgacgtcgatgacacagatgactctcaccagtccgatgagagccatcactctgacgaatccgatgagctcgtgaccgacttccccacagacctgcctgccaccgaagtttttacaccggtggtccccaccgtggatacgtacgacggaagaggcgatagcgttgtgtatgggcttcggtctaaatccaagaaattccgcagacctgacatccaataccccgatgctaccgacgaggatattacaagccacatggagtccgaggaactgaacggagcctataaggctatccctgtcgcccaggacctcaatgcgccctctgattgggacagccggggcaaggattcctacgaaaccagccagctggacgatcagtctgccgagacacattcccacaaacaaagccgcctttataagagaaaagctaacgacgaatctaatgagcatagcgacgtgatcgattcccaggagctgtctaaggtgagccgggaatttcactcccacgagttccatagccacgaagacatgctcgtcgttgatccgaaatctaaggaggaagacaaacatctgaagtttcgcatttcccacgagctggatagcgcctcttccgaggtgaactga

SEQ ID NO: 3405 - RNA, 879 nt, synthetic construct
  misc_feature 1..879: note = AEA49030 variant
  source 1..879: mol_type = other RNA
atgagaatcgccgtgatttgcttctgtctgctcggcattacctgcgctatccccgtcaagcaggccgacagcgggtcctctgaggaaaaacaactgtacaacaagtatcctgatgcggttgctacatggcttaatccggaccccagccagaaacagaacctgctcgcccctcagaatgccgtgtcctctgaggaaacgaacgattttaagcaagagaccctgcccagcaaatccaatgaatctcacgaccatatggatgacatggatgacgaggatgacgatagccaccagtccgacgagagccatcactctgatgaatccgacgagcttgtgacagacttccctaccgatctgcccgctacagaagtctttacccctgtggttccgacagtggacacctacgatggacggggcgacagcgtcgtgtatgggctccgctctaagtccaagaaattcagacggcccgatatccagtaccctgacgccacggatgaggacattaccagccatatggagtctgaggaactgaacggagcttataaggccatccccgttgcgcaggatctgaatgccccttccgactgggatagccgcggcaaagactcctacgaaacatctcaactcgacgatcagagcgctgagacccactcccacaagcagagcagactgtataaacggaaggccaacgacgaatctaatgagcattccgatgtgatcgacagccaggagctttctaaggtcagccgcgaatttcactcccatgagttccactctcacgaagatatgctggtggtggaccccaaaagcaaggaggaagataaacatctcaagtttagaatttcccacgagctggacagcgcttcttccgaggtcaactga

SEQ ID NO: 3406 - RNA, 945 nt, synthetic construct; identical to SEQ ID NO: 3401
  misc_feature 1..945: note = AAA86886 variant
  source 1..945: mol_type = other RNA

SEQ ID NO: 3407 - RNA, 1182 nt, synthetic construct
  misc_feature 1..1182: note = AAA59988 variant
  source 1..1182: mol_type = other RNA
atggaggaaccccagagcgacccttccgtggagccgcccctgtctcaagaaaccttcagcgatctctggaagctgcttcctgagaacaatgtcctgtctcccctcccttcccaggccatggacgatctgatgcttagccccgacgatatcgaacagtggtttacagaggaccctggcccggatgaggctcccagaatgcctgaagccgcgccccctgttgctcccgccccggccgctcctacgcccgccgctcctgcccccgcgccctcctggcctctgtctagctccgtgccgagccagaaaacctaccaagggtcttatggattccggctcggctttctgcactccgggacagccaagagcgtgacctgcacatactctcccgctctgaacaaaatgttctgtcagctcgccaagacctgccctgtccagctgtgggtggactccacaccccctcccggaacccgcgttagagctatggccatttataaacagagccaacatatgacggaggtggtccggcgctgtccgcaccatgaaagatgctctgattccgacggccttgcgcctccccagcacctgatccgggtggaggggaatctccgcgttgagtacctggatgacagaaacacctttcggcatagcgtggtcgtgccttatgaaccccctgaggtgggatccgattgtacaaccattcactacaattatatgtgcaactctagctgtatgggcggcatgaatcgcagacccatccttacaattatcaccctggaagactccagcgggaacctcctgggacgcaattctttcgaggtccgggtttgcgcctgtccgggcagagaccggcgcacggaagaggagaacctgagaaagaagggggaacctcaccatgagctccctcccggatccacaaaacgggctctgcccaataacaccagctctagcccgcagcccaagaaaaagcctcttgatggcgaatactttacactgcagatcagagggcgcgagcggttcgaaatgtttagagagctcaatgaggccctggaacttaaagacgctcaagccggaaaggagcccggcggctcccgcgcccactctagccatctgaagtccaaaaaggggcagagcacctctcggcacaaaaagctcatgttcaaaaccgaaggacctgattccgactga

SEQ ID NO: 3408 - RNA, 309 nt, synthetic construct
  misc_feature 1..309: note = AAF88037 variant
  source 1..309: mol_type = other RNA
atgagcgccagagtgcggtcccgctctagaggccgcggggacggacaggaggctcccgatgtcgttgccttcgtggcgcctggcgaaagccaacaggaggaaccgcccaccgacaaccaggatatcgagcctgggcaggaacgggagggaacaccccctattgaggaaagaaaggtggagggcgactgccaagaaatggatctggagaaaacgcggtccgagcgcggggacggatctgatgtcaaggagaaaacaccccctaatccgaagcacgctaaaaccaaggaagccggcgacggccagccctga

SEQ ID NO: 3409 - RNA, 1209 nt, synthetic construct
  misc_feature 1..1209: note = AAA60003 variant
  source 1..1209: mol_type = other RNA
atgcagatgagccccgccctgacctgcctcgtgctgggccttgctctggtcttcggggagggatccgccgttcaccatcctccgtcttacgtggcgcacctcgctagcgactttggcgtgagagtcttccaacaggtggcccaggcctccaaggatcggaacgttgtgttttctccctatggggtcgctagcgtgctggccatgcttcagctgacaacgggaggcgaaacccaacagcagatccaggctgccatggggttcaaaattgacgataagggaatggcgcctgccctccgccatctgtacaaagagctgatgggcccctggaataaggacgaaatctccacaaccgatgctatttttgttcaaagagacctcaaactggtgcagggcttcatgcctcactttttccggctttttcgctctacagtcaaacaggtggatttcagcgaggtggaaagagcccggtttatcattaacgactgggtcaagacccatacaaaggggatgatctccaatctgctcggaaagggcgctgttgatcagctgacccgccttgtgctggtgaacgccctctatttcaatgggcaatggaaaacgccctttcctgacagctctacccacagacggctgttccacaagtccgatggaagcacagtctctgtgccgatgatggcgcagaccaacaaattcaattacacagagtttaccacgcccgacggccattattacgatatcctggagctcccttatcacggggacacactgtccatgttcattgccgctccctacgaaaaggaggttcctcttagcgccctgaccaacatcctctctgctcagctgatttcccattggaagggaaatatgacacgccttcccagactgctcgtgctgccgaaatttagcctggaaaccgaggtcgacctccggaagcctctggagaaccttggcatgaccgatatgttccgccaatttcaggccgacttcacatccctgtctgatcaggaacccctccacgtggcccaggctctgcaaaaagttaagatcgaggtgaatgaaagcggcacggtcgcgtccagctctaccgccgtgattgtctccgctagaatggcccctgaggaaatcattatggaccggccctttcttttcgtggttcgccacaaccccacagggaccgtgctgtttatgggacaggtcatggagccttga

SEQ ID NO: 3410 - RNA, 1248 nt, synthetic construct
  misc_feature 1..1248: note = AAA36797 variant
  source 1..1248: mol_type = other RNA
atggaggacctgtgcgtggccaacaccctcttcgctctgaatctttttaagcacctggccaaagcgagccccacacagaacctcttcctgtccccttggtctatcagctccacgatggctatggtctacatgggctctagagggagcaccgaagatcaaatggccaaggttcttcagtttaatgaggtgggagccaacgctgtgacaccgatgacccccgaaaatttcacatcctgtggctttatgcagcagattcaaaaagggtcttatcctgacgccatcctgcaggctcaggccgcggataagattcatagctccttccggagcctctcttccgccatcaacgctagcaccggaaattacctgctggagtctgtcaacaaactctttggcgaaaagtccgccagcttccgcgaggagtatattagactgtgccagaagtactattcttccgaaccccaagctgtggactttcttgagtgtgccgaagaggcgcggaaaaagatcaatagctgggttaaaacacagaccaaggggaaaatccctaacctgctccccgagggatccgtggatggcgacacgcgcatggtcctggtgaatgccgtttacttcaagggcaagtggaaaaccccttttgaaaagaaacttaacgggctgtatccgttcagagtcaattctgctcagcggacacccgtgcagatgatgtacctccgcgagaagctgaacattggatacatcgaagatctgaaagcccaaattctcgagctgccttatgctggcgacgtgagcatgtttcttctgctccccgatgaaatcgccgacgtgtccaccgggctggagcttctggagagcgaaattacatacgataagctcaataaatggacctctaaggacaagatggccgaggatgaagtcgaggtttatatccctcagttcaaactggaggaacactacgagctgagatccattctccggagcatgggaatggaagacgctttcaacaagggccgcgcgaacttttctgggatgagcgagagaaatgacctgttcctttccgaagtgtttcatcaggccatggtggatgtcaacgaggaaggaacggaggctgccgccggcacaggcggggtgatgaccggacggacaggccacgggggaccccaattcgttgctgaccatccgtttctgttcctcatcatgcacaaaatcaccaattgcattctgtttttcggccgcttttctagcccttga

SEQ ID NO: 3411 - RNA, 528 nt, synthetic construct
  misc_feature 1..528: note = AAA60020 variant
  source 1..528: mol_type = other RNA
atgctgccccctatggccctcccgagcgtgtcctggatgctgctttcttgcctgatgctcctgagccaggtccaaggcgaggaaccccagagagagcttccttccgctcggatccgctgtcccaaggggtctaaagcctacggaagccactgctatgcgctgttcctctcccctaagtcttggaccgacgctgatctggcctgtcagaaaagacccagcggcaacctggtttccgtgctcagcggggccgaaggatcttttgtgtccagcctggtcaagtctattggcaattcctacagctatgtgtggatcgggcttcatgaccctacacagggaacggagccgaacggcgaaggctgggagtggtcttccagcgatgttatgaattacttcgcttgggagcggaacccctccaccatttctagccctgggcactgcgcctccctgagccgctctacagcttttctcagatggaaagactataattgtaacgtgcggctgccctacgtctgcaagttcaccgattga

SEQ ID NO: 3412 - RNA, 528 nt, synthetic construct; identical to SEQ ID NO: 3411
  misc_feature 1..528: note = AAT11159 variant
  source 1..528: mol_type = other RNA

SEQ ID NO: 3413 - RNA, 381 nt, synthetic construct
  misc_feature 1..381: note = AAH39863 variant
  source 1..381: mol_type = other RNA
atggacaagagcctgctcctggagcttcccatcctgctctgctgtttcagagccctgtccggctctcttagcatgcggaacgatgctgtgaatgaaattgtcgccgttaaaaacaattttcctgtgatcgagattgtgcagtgccgcatgtgtcatctgcaattcccgggggaaaagtgctccagaggacggggcatctgtaccgcgacaacggaggaggcttgcatggtcgggcgcatgtttaaaagagacggaaacccctggctcaccttcatgggctgtctgaagaattgcgccgatgtgaaagggattcggtggtctgtttacctggtgaactttcgctgttgcagaagccacgacctctgtaatgaagatctgtga

SEQ ID NO: 3414 - RNA, 1440 nt, synthetic construct
  misc_feature 1..1440: note = CCDS42826.1 variant
  source 1..1440: mol_type = other RNA
atgaccacactggccggcgctgtgcccagaatgatgcggcctgggccgggacagaactacccccgcagcggcttccctctcgaggtctccacgcccctggggcaaggaagagttaatcagcttggcggggtgtttatcaacggacggcctctgcccaatcacattcgccataagatcgtggaaatggcccaccatggcattagaccttgcgtcatctctcggcagctccgcgtgagccacggctgtgtttccaaaattctgtgcagatatcaggagaccgggtctatccggccgggagcgatcggcgggagcaagcccaaacaagtgacaacccctgacgtcgaaaagaaaattgaggaatacaagcgcgagaaccccggaatgttctcctgggagatcagagataaacttctgaaggacgctgtgtgtgatcggaatacagttccttctgtgagctccattagccgcatcctcagatctaagtttggcaaaggggaagaggaagaggccgacctggagcggaaggaagccgaggaatccgagaaaaaggctaagcatagcattgatggaatcctgtctgaacgcgcctccgctccccagagcgacgagggctctgatattgactccgagccggatctccctctgaaaagaaagcagcggagaagccgcaccacattcaccgccgaacagcttgaggaactggagcgggcgtttgaaagaacgcactatcccgacatctacacccgcgaggagctcgcccaacgggctaaactgacagaagccagagtccaggtgtggttctccaaccgccgggctagatggcgcaagcaggccggcgcgaatcagcttatggcctttaaccacctgatccctgggggattccctcccaccgctatgcccacactcccgacctatcaactgtctgagacgagctaccagcccacatccattcctcaggccgtgagcgatccctcttccaccgtccatcggcctcaacccctgccgcctagcacagttcaccagtctaccatccccagcaatcctgactcctctagcgcttattgcctcccctccaccagacatggctttagctcttacacagattccttcgtgcctcccagcgggccgtctaaccctatgaatcccacgattggaaacggcctgtcccctcaggtgatggggcttctgaccaatcacggaggcgtcccccaccagccgcaaacagactacgccctcagccccctgaccggcgggcttgaacctacaaccacggtgtccgcctcttgtagccagcgcctggaccatatgaaatccctcgattctctgcccacaagccagtcctattgccctcccacctacagcaccacaggatattctatggaccctgttaccggctaccagtatgggcaatacggacagtccaagccctggacattttga

SEQ ID NO: 3415 - RNA, 1176 nt, synthetic construct
  misc_feature 1..1176: note = AAA58397 variant
  source 1..1176: mol_type = other RNA
atggacctggagaagaactaccccacccctagaacaagccggacgggccacgggggagtgaatcagctcggcggggtcttcgttaacggacgcccgctgcccgatgtggtgagacaacggatcgtcgaacttgcccatcagggcgtgcgcccttgcgacatttccagacagctgcgggtttctcacgggtgtgtgagcaaaatcctcggacgctattacgagaccggctccattaagcccggcgtcatcgggggatctaaacctaaggtggctacacccaaagttgtggaaaagattgccgagtataagagacagaatcctaccatgtttgcgtgggaaatccgggatcgcctgcttgctgagagagtctgcgacaacgatacagtgccgagcgtgtcctctatcaatcggattatccgcaccaaagtccaacagccccctaaccagcccgttcctgccagctcccatagcattgtgtctacaggctccgtgacccaggtcagctctgtgtccacggacagcgccgggtcttcctacagcatctccggcattctgggaatcacctctcccagcgctgatacaaataagagaaaacgggacgaggggattcaagaatccccggttcctaacggacacagcctccccggccgcgatttcctgagaaagcagatgcggggcgacctgtttacccagcagcaactcgaggtgctggatagagtcttcgaacgccagcattattctgacatctttacaaccacggagcctatcaaacccgagcagacaaccgaatactccgccatggctagccttgccgggggactggatgacatgaaggcgaatctcgcctctcccacacccgctgacattggcagctccgtgccggggccccaatcttatcctatcgttaccggacgggatctggccagcaccacacttcccggctaccctccccacgtgccgcctgctgggcagggatcctacagcgcccccacgctgaccggcatggtccctggctctgagttctccgggagcccctattctcaccctcagtactccagctataacgactcctggagatttcccaatccgggactcctgggctctccttactattacagcgcggccgctcgcggggccgctcctcccgccgccgctacagcgtatgatcggcattga

SEQ ID NO: 3416 - RNA, 873 nt, synthetic construct
  misc_feature 1..873: note = AAF25807 variant
  source 1..873: mol_type = other RNA
atgagaatcttcgccgtgtttattttcatgacctactggcacctcctcaacgcttttacagtcacggttcccaaggacctgtatgtggtggagtacggcagcaatatgaccatcgaatgcaaattccctgtcgagaagcagcttgatctggccgcgctcattgtgtattgggaaatggaggacaaaaacatcattcaatttgttcatggggaagaggatctgaaggtgcagcactcctcttaccggcagcgcgctagacttctgaaagaccagctcagcctgggaaatgccgccctgcaaatcacagatgtcaagctccaggacgctggcgtgtatcggtgtatgatctcctacgggggagccgattataagcgcattaccgttaaagtgaacgctccgtacaataagatcaaccagcggattctggtcgtggaccccgtgacatctgagcatgaacttacctgccaggccgagggctaccctaaagcggaagtcatctggacaagctccgatcaccaagttctgtctgggaagaccacgaccacaaatagcaaaagagaggagaagctgttcaacgtgacctccacactgcgcattaataccacgacaaacgaaatcttttattgtaccttcagacggcttgaccccgaggaaaatcatacagccgagctggtgattcctgaactccccctggctcaccctccgaacgagcgcacccacctggtcatcctcggagccatcctgctttgcctgggcgtggctctcacctttattttcagactgcggaagggccgcatgatggatgttaaaaagtgtgggatccaggacacaaatagcaaaaagcagtctgatacgcatcttgaggaaacctga

SEQ ID NO: 3417 - RNA, 867 nt, synthetic construct
  misc_feature 1..867: note = AAH74740 variant
  source 1..867: mol_type = other RNA
atgcagatcccccaagccccttggccggtggtctgggctgttctgcagctcggctggagacccgggtggttcctggacagccctgatcggccctggaaccctcccaccttttcccctgcccttctggtggtgacagagggagacaatgcgacgtttacctgctctttcagcaacacatccgaatctttcgtcctcaattggtaccgcatgagcccgtccaaccagaccgataagctggctgcctttcccgaggacagatctcagcctggccaagattgtcggttccgcgtgacacagcttcccaatgggagagactttcacatgagcgttgtgcgggcccgcagaaacgattccggaacctatctgtgcggcgctattagcctcgcccctaaagctcagatcaaggaatctctgcgggccgagctgcgcgtcacagaaagacgggcggaggtgcccaccgcccatccgtcccctagcccccgccctgctgggcagttccaaacgctcgttgtgggagtcgtgggcggcctgcttgggtctctggtgctcctggtctgggttcttgccgtgatttgttccagagctgcccggggaaccatcggcgcgcgcagaacagggcagcccctgaaagaggaccccagcgccgtgcctgtcttttctgtggattacggagaactcgacttccagtggcgggagaagaccccggaaccccctgttccctgcgtgcctgagcagacagagtatgctaccattgtctttccctccggcatggggacgagctccccggccagacgcggatctgctgatggccctcggagcgcccaacccctgagacctgaagacggccactgttcctggcccctgtga

SEQ ID NO: 3418 - RNA, 1008 nt, synthetic construct
  misc_feature 1..1008: note = AAC95296 variant
  source 1..1008: mol_type = other RNA
atgggcagcgcctcccccgggctgtctagcgtgtccccttctcacctcctgcttccgcccgacaccgtcagcagaacaggactggagaaggctgccgcgggcgctgttgggctcgaacggcgcgattggtccccttctccccctgccacgcccgagcagggactgagcgccttctacctttcctattttgacatgctgtaccctgaagatagctcttgggctgccaaagctccgggcgcctccagcagagaggaaccccctgaggagcccgaacaatgccctgtgatcgactctcaggcgcccgccgggtccctcgatctggtgccgggaggcctgaccctcgaggaacatagcctggagcaggtccagtctatggtggttggcgaggtgcttaaggacattgaaacagcttgtaaactgctcaacatcaccgccgatcctatggactggtcccccagcaatgtccaaaagtggctgctttggacagagcaccagtatcggctgcctcccatggggaaggctttccaggaactcgccggaaaggagctgtgcgcgatgtccgaggaacagtttcgccaaagatctcccctgggcggggatgtgctccatgcccacctggacatttggaaaagcgctgcctggatgaaagagcggacctcccctggagctatccattactgtgccagcacatctgaagagtcctggaccgatagcgaagttgactctagctgctccggccagccgattcacctttggcagttcctgaaggagctcctgcttaaaccccactcttatgggcgctttatcagatggctgaacaaggaaaaaggaatcttcaagattgaggatagcgcccaggtggctcggctctggggcatccgcaagaatagacctgcgatgaactacgacaaactgtcccggagcattcgccaatattacaagaaaggcatcattagaaagcccgacatctctcagcggctggtctaccagtttgtgcatcctatttga

SEQ ID NO: 3419 - RNA, 2217 nt, synthetic construct
  misc_feature 1..2217: note = AAA36429 variant
  source 1..2217: mol_type = other RNA
atgcagcccagatgggcccaaggcgctaccatgtggctgggggtgctcctgacacttctgctctgcagctccctggagggacaggaaaactctttcacgatcaatagcgtcgacatgaagtcccttcctgattggaccgttcagaacggcaaaaatctgacactccagtgttttgccgacgtgtctaccacaagccacgtgaagccgcaacatcagatgctgttctacaaagatgacgtcctgttttataacatttcctctatgaaaagcaccgagtcctacttcatccccgaagtgcggatttatgatagcgggacatacaaatgcaccgttatcgtgaataacaaggagaagacgaccgcggaatatcagctcctggtcgagggagtgccttctccccgcgttacacttgacaaaaaggaggctattcagggcgggatcgtgagagtcaattgttccgtgcctgaagagaaagcccccatccactttaccattgaaaagctggagctcaacgagaaaatggtgaagctgaagcgggaaaagaatagccgcgatcaaaacttcgtcatccttgagtttcctgttgaggagcaggacagagtgctgtctttccggtgccaggcccgcattatctccggcattcatatgcagacaagcgaatctaccaagtccgagctcgtgacggtcacagagagcttttccaccccgaaattccacatctctcccacaggaatgattatggaaggcgctcaactgcatatcaagtgtaccatccaggtgacccacctggcccaggagtttcctgaaattatcattcaaaaagataaggctatcgttgcccacaatagacatgggaacaaagcggtgtacagcgtcatggccatggtggagcactccggaaattatacatgcaaggttgaaagctctcggatttccaaggtgagctctatcgtcgtgaacatcacggaactcttcagcaaacccgagctggaatcctcttttacccatcttgaccagggcgagcgcctgaatctcagctgttccattcctggggctcccccggccaacttcacaatccagaaggaagataccattgtcagccagacacaagacttcaccaaaatcgcttctaagtccgatagcggaacgtacatttgcacagccggcatcgacaaagtggttaagaagtctaacaccgtgcagatcgtcgtgtgtgagatgctgtcccagcctagaattagctacgacgcgcagtttgaagttatcaaagggcaaaccattgaggtgcggtgcgagtccatctctggaacacttcccattagctatcagctgctcaagacctccaaagtcctggaaaattctacaaagaacagcaatgatcctgccgtgttcaaagacaaccccacggaggatgtggaataccagtgtgttgctgacaattgccactcccacgccaagatgctgagcgaggtcctccgcgtgaaggtgatcgctcccgtcgatgaggtgcagatttctatcctgtccagcaaagttgtggaatctggcgaggacatcgtccttcaatgcgccgtgaacgaaggctccgggcctattacctataagttttacagagagaaagaaggaaagccgttctatcagatgacaagcaatgccacccaggctttttggacaaaacagaaggcgtctaaggagcaagagggcgaatactattgtaccgccttcaaccgggctaatcatgccagctccgttccccgcagcaaaatcctgacggtgagagtcattctcgccccttggaagaaagggctgatcgctgtggttattatcggagtgatcattgcccttctgatcattgcggctaagtgctactttctccggaaagccaaggccaaacagatgcccgtcgagatgtctagacctgctgtgcccctgctgaactccaataacgaaaagatgagcgatccgaatatggaggccaactcccactacggccataatgacgatgtgcgcaaccacgctatgaagcctatcaacgacaataaagaacccctcaactctgatgtccagtataccgaggttcaagtgagctccgccgagtctcataaggacctggggaaaaaggacacagaaaccgtgtacagcgaggtccggaaagcggtgcctgatgccgttgaatccagatattctcgcacagagggaagccttgacggcacctga

SEQ ID NO: 3420 - RNA, 2736 nt, synthetic construct
  misc_feature 1..2736: note = AAG23134 variant
  source 1..2736: mol_type = other RNA
atggcccagctgttcctccccctgcttgctgccctggtgctcgcgcaagctcctgccgccctggctgacgtccttgagggcgatagctccgaagacagagcctttcgggttcgcatcgctggggatgccccgctgcagggagtgctcggcggggcgctgaccattccctgccacgtgcattacctgagacctcccccttctcggcgcgccgtcctcggaagccccagagtgaagtggacattcctgtcccggggccgcgaggctgaagttcttgtggccagaggggtccgggtgaaagttaacgaggcttatcgctttagagtggccctgcctgcgtacccggcctctctcacggacgtcagcctggctctttccgaactgcggcccaatgattctggaatctatcgctgtgaggtgcagcacggcattgacgatagctccgacgccgtggaggtcaaggttaaaggcgtggtgttcctctacagagaagggagcgctcggtatgccttttctttctccggagcccaggaggcttgcgcgcgcatcggcgcccatattgctacccctgaacaactgtacgccgcctatctgggcggatacgagcagtgtgatgctggctggctcagcgaccagacagtcagataccccatccagacccctcgggaggcctgctatggggatatggacggatttcccggcgtgagaaactacggcgttgtggatccggacgacctgtatgatgtctactgttatgcggaagaccttaatggggagctgttcctcggagatcctcccgaaaagctgacacttgaggaagctcgcgcctactgccaagagcggggcgccgagatcgctaccacagggcagctgtatgccgcttgggacggaggcctcgatcactgttctcctgggtggctggccgacggatccgtgagataccccattgttacccccagccagcgctgcggcggcgggctgcctggagtgaaaacgctctttctgttcccgaaccagaccggctttcccaataagcattctcggttcaacgtctactgttttagagattccgcgcaacctagcgccatccccgaagcctccaatcctgcctctaaccccgctagcgacgggcttgaggccattgtgacagtcaccgaaacactggaggaactccagctgccgcaggaggcgaccgagtccgaaagccgcggagccatctattctattcctatcatggaggatggcgggggcggatccagcacgcccgaagaccctgctgaggctccccggacacttctggagttcgaaacccaatctatggtgcctcccacaggcttcagcgaggaagaggggaaggctctcgaagaggaggaaaaatacgaggatgaagaggaaaaggaggaggaagaggaagaggaagaggttgaggacgaagccctgtgggcctggccgtccgagctgtctagccctggacccgaggcttccctccccaccgaacctgcggcccaggaagagagcctgtctcaggctccggccagagccgtgcttcagcccggcgcttcccctctgcccgacggggagagcgaagcctctcgccctccccgggtccacggacctcccaccgagacactcccgacgcctagagaacgcaatctggcgtcccccagcccttccaccctggtggaggctcgggaggttggcgaagccacagggggccccgagctttctggagtgccgagaggcgaaagcgaggaaaccgggtcctctgagggagcccctagcctcctgcccgctacacgggcccctgagggcacccgcgaactggaggcgccctccgaagataacagcgggagaacggctcccgccggaacatctgtccaagcccagcctgtgctcccgaccgactccgctagccggggcggggtggccgttgtccccgcttctggcgattgcgtgccttccccctgtcacaatggagggacctgcctggaggaagaggagggggtgagatgcctttgtctgcctggatatggcggggacctctgcgatgtcggactgcgcttttgtaaccccggctgggacgccttccagggggcgtgctacaaacattttagcacacggagatcttgggaagaggccgaaacccagtgtcgcatgtatggcgctcacctggccagcatttccacacctgaggaacaagatttcatcaataacagataccgggagtatcagtggatcggacttaatgaccgcacgattgagggcgattttctctggagcgacggggtgccgctgctgtacgaaaactggaaccccggacagcctgattcttacttcctctccggcgagaattgcgttgtgatggtctggcatgaccaggggcaatggagcgatgtgccctgtaactatcacctgtcctatacctgcaagatgggacttgtttcttgtggccctcccccggaactgcctctcgctcaggtgtttggcagaccccggctgcgctacgaggtcgacacagtgctgagataccggtgccgcgaggggcttgcccagagaaatctccccctgatccggtgtcaggaaaacggacgctgggaggcccctcaaattagctgcgttcccagacggcctgctagagcgctgcacccggaagaggaccccgaaggccgccaggggcggctcctgggaagatggaaagcccttctgatccctccctcctctcctatgcccggcccgtga

SEQ ID NO: 3421 - RNA, 3321 nt, synthetic construct
  misc_feature 1..3321: note = AAA60049 variant
  source 1..3321: mol_type = other RNA
atgagactgcccggcgccatgcctgctctcgccctgaagggggagcttctgctcctgagccttctgctcctgctggaaccgcagatctcccaaggactcgtggtcacaccccctggccccgagctggttcttaacgtgtctagcaccttcgtgctgacgtgctccgggtctgcgcctgtcgtgtgggaacggatgagccaggagccccctcaggaaatggctaaagcccaggacggaaccttttcctctgttctcacactgaccaatcttacaggcctggataccggggagtacttctgtacacacaacgacagccgcggactcgagaccgatgaaagaaagcggctgtatatttttgtgccggaccccacggtcggcttcctgcctaatgatgccgaggaactctttatcttcctgaccgagattacagagatcaccattccctgccgcgtgacagaccctcaacttgttgtgaccctgcatgaaaagaagggcgatgtcgctctccccgtgccgtacgaccaccagagagggttttccggaatcttcgaggatcggagctatatctgtaaaacgacaattggcgaccgcgaagtggattctgacgcctactatgtctacagactgcaggtttccagcatcaacgtgtctgtgaatgctgtccagaccgtggttcggcaaggggagaacattacacttatgtgcatcgtgattggaaatgaagtcgtgaactttgagtggacctatcctcgcaaggagtccggcagactggttgaacccgtgaccgatttcctcctggacatgccttaccatatccggagcattctgcacatcccctctgccgagctcgaagactccgggacatacacgtgtaatgtcaccgagagcgtgaacgatcatcaggacgaaaaggcgatcaatattacagtcgtggagtccggatatgttcgcctgcttggcgaggtgggcaccctgcagtttgccgaactccacagatctcggacactgcaggtcgtgttcgaggcttatccccctccgaccgttctttggtttaaagataaccgcacgctgggggacagctccgccggagaaatcgctctcagcacaagaaatgtgtctgagacccggtacgtctccgaactgaccctggtgagagtgaaggttgccgaggcgggccactacacaatgcgcgccttccatgaggatgctgaagtccaactcagcttccagctgcagattaacgtgcccgtgcgggtccttgagctgtctgaaagccaccctgactccggggagcaaaccgtgagatgccgcggacggggcatgccccagcctaatatcatttggtctgcctgtagagatctcaaacgctgcccccgggagctgccgcctacactgcttgggaacagctccgaagaggaaagccagctcgagacgaacgttacctattgggaagaggagcaggaatttgaggtggtctctacactgagactgcaacatgtggaccgccccctctccgttcggtgtaccctgagaaatgctgtgggacaggatacacaggaagtcatcgtggttcctcacagccttcccttcaaggtggtcgtgatctctgccattctggccctcgtggtcctgaccatcatttccctgatcattcttatcatgctctggcagaaaaagcctcgctacgagatccggtggaaggttattgaaagcgtgtcctctgacggccacgagtatatctacgtggatcccatgcaactgccgtacgacagcacgtgggagctgcctagagaccagctcgtcctgggccggacccttgggtccggagcttttggccaggtggttgaagcgacagcccatgggctgtctcacagccaggctaccatgaaagtggccgtcaagatgctcaaatccacagcccgcagctctgagaagcaagctctgatgtccgaactgaaaattatgagccatcttggaccccacctcaacgtggttaatctgctgggcgcctgcaccaaagggggccccatctatattatcacggagtactgtagatatggagatctcgtggactacctgcatcggaacaaacacacattccttcagcaccattctgataagagacgccctccgtccgcggaactgtatagcaatgctctccccgtcggcctgcctctgccctctcacgtgagccttaccggggagtccgacggaggctacatggatatgagcaaggacgagtctgttgattatgtgcctatgctcgacatgaaaggggatgtcaagtacgccgacattgaatccagcaactacatggccccctatgataattacgtgccttccgctcccgagcggacatgcagagccaccctgatcaacgaatctccggtgctgagctatatggacctcgtcggattttcctaccaggttgctaatggcatggagttcctggcctctaaaaactgcgtgcatcgcgatcttgcggccagaaatgtgctgatctgtgaggggaagctcgtcaaaatttgcgactttggcctggctcgggacatcatgcgcgatagcaactatatttccaagggatctaccttcctgcctcttaagtggatggcccccgaaagcatctttaattccctgtacacaacgctcagcgacgtgtggtctttcggcattctgctctgggagatctttacccttgggggaacaccttatcccgaactgccgatgaacgagcagttctacaatgctatcaaaagaggctaccggatggcccaacctgcgcacgcctccgatgaaatttatgagatcatgcagaagtgttgggaggaaaaatttgagattagaccccctttcagccagctggttctcctgctggaacgccttctgggggagggatacaagaaaaagtatcaacaggtggacgaagagttcctccggtctgatcaccccgctatcctgcgctcccaggccagactccccggctttcatgggctgcggagccctcttgacacctcttccgtcctgtacacagctgtgcagccgaacgagggcgataacgactatattatccccctccctgatcccaagcctgaagttgccgacgagggacccctggaaggcagcccttccctggccagctctacccttaatgaggtgaacacgagctccacaatctcttgcgatagcccgctggaaccccaagacgagcctgagcccgaacctcagctcgagctgcaggtcgaacccgagccggagctcgaacagctgcctgattccgggtgtcccgctccccgcgcggaggccgaagactctttcctttga

SEQ ID NO: 3422 - RNA, 942 nt, synthetic construct
  misc_feature 1..942: note = EAX03935 variant
  source 1..942: mol_type = other RNA
atgctgctcagcaagatcaactccctggcccaccttagagctgccccctgcaatgacctgcatgcgaccaaactcgctcctggcaaggagaaagaaccgctggagtctcagtaccaagtggggccccttctgggaagcggcgggttcggatccgtctattctggcattcgggttagcgataacctccctgtggccatcaagcacgtggaaaaagaccgcatttccgattggggagagctgcccaatggaacaagagtccctatggaagtggttctgctcaagaaggtgtctagcggcttttccggcgtcatccggctgcttgactggttcgagcgccccgatagctttgtgctgattctcgagagacctgaaccggttcaggacctgttcgattttatcacggagcgcggggcccttcaggaggaactggctcggtctttcttttggcaagtgctcgaggccgtcagacattgtcacaactgcggagtgctgcatcgggacatcaaagatgaaaatattctgatcgacctcaaccgcggcgagctgaaacttattgatttcgggtccggagctctgctcaaggacaccgtgtacacagattttgacggcaccagagtctattctccccctgaatggatccggtaccaccgctatcacgggagaagcgccgcggtttggtccctggggattcttctgtacgacatggtgtgtggcgatatccccttcgagcatgacgaagagattatccggggccaggtgtttttccgccagagagtcagctctgagtgccagcacctcatccggtggtgtctggccctgagaccttccgatcgccccacatttgaagagattcagaatcatccgtggatgcaagacgtgctcctgcctcaggaaaccgctgagatccaccttcacagcctgtcccccgggccttctaagtga

SEQ ID NO: 3423 - RNA, 303 nt, synthetic construct
  misc_feature 1..303: note = AAB81333 variant
  source 1..303: mol_type = other RNA
atggccgacgaggaaaagctgccccctggctgggagaaaagaatgagccggccgtccgggcgcggatactatttcaaccacatcaccaatccctctcagtgggaaagacctagcggcaactcctctagcgggggaaagatttggcaaggcgagcccgctcgggtgcgcagatcccatctcctggtcaaacctgttaaggccgcgcttgatctggctgccgggaatcaccccgaccagggaggcggccctggggccgatcagcggctccatccggaagaccagggacgcagagagggcctgtga

SEQ ID NO: 3424 - RNA, 492 nt, synthetic construct
  misc_feature 1..492: note = AAC50492 variant
  source 1..492: mol_type = other RNA
atggccgacgaggaaaagctgccccctggctgggagaaaagaatgagccggtcctctgggcgcgtgtactatttcaaccacatcaccaatgctagccagtgggaaagaccgtccggaaactctagctccggcgggaagaatggacaaggcgagcccgcccgggtccgctgctctcatctcctggttaaacacagccagtccagacggcctagctcttggcgccaggaaaagattacaagaacgaaagaggaggcgcttgaactgatcaacgggtacattcagaagatcaagtccggagaggaagattttgagagcctcgcttctcaattctccgactgtagctctgccaaagcccggggcgatctgggcgctttttcccgcgggcagatgcagaagcccttcgaggacgccagctttgctcttagaaccggagaaatgtccggccctgtgttcacagattctgggattcatatcatcctgcggaccgagtga

SEQ ID NO: 3425 - RNA, 138 nt, synthetic construct
  misc_feature 1..138: note = AAH31971 variant
  source 1..138: mol_type = other RNA
atgcagaagcccttcgaggacgccagctttgctctgagaaccggcgaaatgtccgggcctgtgttcacagattctggaatccacattatcctccggacggagtgctggcgccaaaccagaggcccgaactgtttttga

SEQ ID NO: 3426 - RNA, 639 nt, synthetic construct
  misc_feature 1..639: note = AAG22596 variant
  source 1..639: mol_type = other RNA
atgaaggtgttcaaatttatcggcctgatgattctcctgaccagcgccttctccgctgggtctggacagagccccatgacagtcctttgctccatcgactggtttatggttacggtgcaccctttcatgctgaacaatgatgtgtgtgtccattttcacgagctccatctgggccttgggtgcccgcccaaccacgtgcaacctcatgcctaccagttcacctatagagttacagaatgtggcattcgggcgaaggctgtgtctcaggacatggtcatctacagcaccgagattcactattcctctaaaggaacacccagcaagtttgtgatccctgtttcctgcgccgctccccagaaaagcccttggctgaccaagccgtgttctatgcgcgtggcctccaagagcagagccacagctcaaaaagatgaaaagtgctacgaggtcttctctctctcccagagctctcagcggcccaattgtgactgccctccctgtgtgttttccgaagaggagcacacccaggtgccttgccatcaagccggggcgcaggaagcccagcccctgcagccgagccacttcctggatatctccgaggactggtctctccatacggatgacatgattggaagcatgtga

SEQ ID NO: 3427 - RNA, 1986 nt, synthetic construct
  misc_feature 1..1986: note = AAB00386 variant
  source 1..1986: mol_type = other RNA
atggacctggtgctcaagagatgcctgcttcacctggccgtcatcggcgctctcctggccgttggggcgaccaaagtgccccggaaccaggattggcttggagtgagccgccaactgagaacaaaggcttggaatcggcagctctaccctgagtggacggaagcccagcgcctggactgttggagaggcgggcaggtctccctgaaagtgtctaacgatggaccgaccctcattggcgccaatgctagcttctccatcgccctgaactttcccgggtctcaaaaggttcttcctgacggacaggtgatttgggtcaataacacaatcattaatggcagccaggtgtggggcgggcagcccgtttatcctcaagagaccgatgacgcttgcatcttccccgatggaggcccttgtccgtccgggtcttggagccagaaacggtcctttgtgtacgtctggaagacatggggacagtattggcaagtgctgggcgggcccgtgagcggactctctatcggcaccggccgcgccatgctggggacacataccatggaagtcacggtttaccacagacggggatcccgcagctatgtgcctcttgcgcattcttccagcgccttcaccattacagaccaggtgcccttttctgtctccgtgagccagctgagagctctcgatggcgggaacaagcacttcctgcggaatcagcctctgacctttgccctccaactgcatgacccctccggataccttgctgaggccgatctgtcttatacatgggacttcggcgatagctccgggaccctcatcagccgcgcgctggttgtgacgcacacataccttgaaccgggacctgtcaccgcccaggtggttctgcaggctgccattcccctcacatcttgcggctccagccctgtgcccggcaccaccgacgggcacagacccacagctgaggcccctaacacgaccgccggacaggtcccgacaaccgaggtggtcggcacaacccccgggcaagctcctacggcggaaccctctggaacaaccagcgtgcaggttcctaccacagaggtgatctccaccgcccccgtccagatgccgacagctgaatctacgggcatgacccctgagaaagtgcccgttagcgaggtgatggggacaaccctggccgaaatgtccacacctgaggccaccggcatgacgcccgctgaagtcagcattgtggtgctgtctggaaccacagccgcgcaggttaccacaaccgagtgggtcgaaacgacagctcgggagctccctatccccgagccggaaggccctgacgcctccagcattatgtctaccgagtccatcacagggagcctgggaccccttctggatggcaccgccaccctccgcctggtgaagagacaagtgccccttgactgtgtcctgtaccggtatgggtccttttctgtgacactcgatatcgttcagggaattgaaagcgctgagatcctgcaggccgtgccttccggcgaaggggacgctttcgagctgacggtctcttgccagggcggactcccgaaagaggcctgtatggaaattagctcccccggctgccaacctcccgcgcagagactgtgtcagcctgtgcttcccagccctgcctgccagctggttctccatcaaatcctgaaagggggatctggcacctactgtctgaatgtgtcccttgctgatacaaacagcctcgccgtcgtgtctacccagctgattatgcccgggcaggaggctggactgggccaagttccgctcatcgtggggatcctgcttgtcctgatggccgtggtgctcgcgtccctgatttatcgccggagactgatgaagcaggactttagcgtccctcagcttccccactctagctcccattggctccgcctgcctcggatcttctgcagctgccccattggcgaaaattctccgctgctctccggacagcaagtttga

SEQ ID NO: 3428 - RNA, 2649 nt, synthetic construct
  misc_feature 1..2649: note = CCDS10255.1 variant
  source 1..2649: mol_type = other RNA
atggagcccgcccctgctagaagcccgcggccccagcaagaccctgcccgcccccaggaacctaccatgccccctccggagacaccctccgaaggcagacagccttctcccagcccttcccccacggagcgggcgccggcttctgaagaggagttccagtttctgcgctgccaacagtgtcaggccgaagccaagtgccctaaactcctgccctgtcttcacaccctgtgcagcgggtgtctcgaggcttccggaatgcagtgccctatctgtcaagccccctggcccctgggcgctgatacccctgcccttgacaacgtgttctttgaatctctgcagagacggctcagcgtctaccgccagattgttgatgcgcaggccgtgtgcacaagatgtaaggagtccgctgacttctggtgctttgagtgtgaacaactgctgtgcgccaaatgcttcgaggctcatcagtggtttctcaagcacgaagcccggccgctggcggagcttcgcaatcagagcgtgagagaatttctggatgggacacggaaaaccaacaatatcttttgttctaaccccaatcatcgcacacctaccctcacgtccatttattgcagaggatgtagcaagcccctgtgctgttcttgcgcccttctggactccagccactctgagctcaagtgtgatatctccgctgagattcaacagcggcaggaggagctggacgccatgacccaggctctgcaagaacaggatagcgccttcggcgccgtccatgctcagatgcacgcggccgtggggcagctcggacgcgctagagccgagacagaggaactgatccgggagagagttcgccaagtggtcgcccacgtgcgggctcaggaaagagagcttctggaagccgttgacgcgcgctaccagcgggattatgaggaaatggcttccagactcggccgcctggacgccgtgcttcagcggatcagaaccggctctgccctggtccaacgcatgaaatgctacgctagcgatcaggaggtgctcgacatgcatgggtttctgcggcaggccctgtgtagactccgccaggaggaacctcaatccctgcaggctgccgtgcggacagacggattcgatgagtttaaggtcagacttcaggacctgagctcttgcattacccaaggcaaagatgcggccgtttccaagaaagctagccccgaagccgcttctacgccgcgggaccctatcgatgtggacctccccgaggaggccgaacgcgtgaaggcgcaggtccaggccctggggcttgctgaggcccagcctatggctgtggttcaaagcgtgcccggagcccaccctgtccccgtgtatgccttctccattaagggcccgtcttacggggaagatgttagcaacacaaccacagctcagaaaagaaagtgttcccagacccagtgccctcggaaagtgatcaagatggagagcgaagagggaaaagaggcgagactggcccggtcttcccccgaacaaccccgccctagcacctctaaggctgtctccccgccccatctcgacggccctcccagccctagatcccccgtgattggctctgaggtcttcctgcctaatagcaaccacgtggcctccggggccggagaagctgaggaacgcgttgtggtcatctctagctccgaggatagcgacgccgaaaattcttccagcagagaactggatgactcttccagcgagtctagcgacctccagctggaaggcccctccacacttcgggtgctggatgagaacctcgcggacccgcaggctgaagatcgccctctggttttcttcgacctgaaaattgataatgagacgcagaagatcagccaacttgccgccgtgaacagagagtctaagtttcgggtcgtgatccagcccgaggctttcttttccatttatagcaaagccgtgtccctcgaagttgggctgcagcacttcctgtcttttctcagctccatgcgcagacctatcctggcgtgctacaaactttggggacccggcctgccgaatttctttcgggctctcgaagacattaaccgcctgtgggagttccaagaggccatctctgggtttctggccgcccttcctctcattagagaacgggtccccggagctagctccttcaagctgaagaatctggctcagacctacctcgcccgcaacatgtctgagagaagcgcgatggccgctgtgctggccatgcgggatctttgtagactgctcgaagtgtcccctggcccccagctggctcagcatgtctatccctttagctctctgcaatgcttcgcctcccttcagcctctcgtgcaggccgctgttctgccgcgcgcggaggcccggctgctcgctctgcacaacgtgagcttcatggaacttctgtctgcccatagacgcgaccggcagggcgggctcaaaaagtactccagatatctgagcctgcaaacaaccacacttccccctgcccagcccgcttttaatctccaggccctgggaacctacttcgagggcctgctcgaggggcctgcgctggctcgcgccgaaggagtctctacgccccttgccggccgggggctggctgagagagcctcccagcaaagctga

SEQ ID NO: 3429 - RNA, 3228 nt, synthetic construct
  misc_feature 1..3228: note = CCDS46409.1 variant
  source 1..3228: mol_type = other RNA
atggtggtcgaggttgacagcatgcccgccgcttcctctgtgaagaaacctttcggcctgagaagcaagatggggaaatggtgctgtcggtgctttccgtgttgccgcgaatccggaaagtctaacgtgggcaccagcggggatcacgacgattccgccatgaaaacactcagatctaagatgggaaagtggtgtcggcattgcttcccctgttgccgcggcagcgggaaatccaatgtcggagcgagcggcgaccacgatgactctgctatgaagacgctgagaaacaaaatgggcaagtggtgttgccattgttttccttgctgccgggggtccagcaaatctaaggtgggagcctggggcgattacgacgattccgccttcatggagccccgctatcacgttagaggggaagaccttgataagctgcatcgggctgcctggtggggaaaagtgcctcgcaaggacctcatcgtcatgctgagagataccgacgtgaataaacaggacaagcaaaaacggacagcccttcacctggctagcgcgaacggcaattctgaggttgtgaagctcctgctggatcgcagatgtcagctcaacgtcctggacaataaaaagcggaccgcccttattaaggctgtgcagtgccaggaagatgagtgtgccctgatgctcctggagcacgggacagaccccaacatccctgatgaatacggaaataccacacttcattatgctatttacaacgaggacaaactgatggccaaggcgctcctgctgtatggcgccgatatcgaatccaaaaataagcacggcctcaccccgctgcttctgggggtgcatgagcaaaaacagcaggtcgttaagtttctcattaagaaaaaggctaacctgaatgcccttgaccgctacggaagaacggctctgatcctcgccgtgtgctgtggcagcgcctccatcgtgtctctgctgctcgagcagaacattgatgtcagctcccaagacctgagcgggcagaccgctcgggaatatgcggtgtcttcccaccaccatgttatctgccagcttctgagcgattacaaagagaagcagatgctcaaaatttctagcgaaaattccaaccccgagcaagacctgaaacttacatctgaagaggagagccagagattcaagggatccgaaaacagccagcctgagaagatgtctcaagaacccgagatcaataaggacggcgatcgcgaagtggaggaggaaatgaaaaagcacgagtccaacaatgtcgggctgctcgaaaacctgaccaatggagtgacagccggcaacggcgacaatgggctgattcctcagcggaaaagcagaacccccgagaaccagcagtttccggataatgaatctgaggagtaccatcgcatctgtgaactcctgtccgactataaggagaagcaaatgcctaaatacagctccgaaaactctaatcccgagcaggatcttaagctgacgagcgaggaagagtcccagcggctcaaaggatctgaaaacggccagcctgagaagagaagccaagaacccgagattaataaagacggggatcgcgagctggaaaacttcatggctatcgaggaaatgaagaaacaccggtccacacatgttggatttcccgagaatctgaccaacggcgccacagccgggaacggcgacgatggacttatccctccgagaaagagccgcacccccgaatctcagcagttccctgacaccgagaatgaggaatatcactccgatgagcagaacgacacacaaaagcagttttgcgaggaacagaatacgggcattctccacgatgaaatcctgattcatgaggagaaacagatcgaagtggtcgagaagatgaacagcgaactgtctctctcctgtaaaaaggagaaagacattctgcacgagaatagcacccttcgggaagagatcgctatgctgagactcgaactggacacaatgaagcatcaatctcagctgcgcgagaagaaataccttgaagatatcgagagcgtgaagaaacggaacgacaatctcctgaaggccctgcagctcaacgagctgaccatggatgacgatacagcggtccttgtgattgacaatgggtccggaatgtgcaaagctggcttcgccggggatgacgcccccagagctgtttttcctagcatcgtgggacggccccgccaacagggcatgatgggcgggatgcaccagaaggaatcttatgtcggaaaggaggcccagtccaaaagaggcattctgaccctcaagtacccgatggaacacgggatcattacgaactgggatgacatggagaaaatctggcatcacacattctataatgaactgcgggtggctcctgaggagcatcccgttctgcttaccgaagccaccctcaaccctaaggcgaatagagagaaaatgacacaaatcatgttcgaaacctttaacacacccgccatgtacgtggctattcaggccgtcctgagcctgtacacgtccggacgcaccacaggcatcgtgatggattctggggacggagtgacccacacagttcctatttatgagggcaatgctctcccccatgccaccctgcggcttgatctggcggggagagaactcccggactacctgatgaagatcctgacggagcacggctatcgcttcaccacaatggccgagagagaaattgtccgggacatcaaggagaaactttgttacgtggctctcgattttgaacaggagatggccaccgtggctagctcctctagcctggagaagtcctatgaactgcctgacggacaggtcattacaatcggcaacgagcgcttcagatgccccgaagccctctttcaaccctgcttcctggggatggagtcttgtggaatccacgaaaccacgtttaacagcattatgaaatccgatgtggacatccggaaggatctttacacaaataccgttctgagcggcgggacaaccatgtatcctggaatggcccatcgcatgcagaaagagattgctgcgctcgccccgtctatgatgaagatcagaattatcgctccccctaaacggaagtactccgtgtgggtcggcgggagcatcctggcctctctgtccaccttccagcagatgtggattagcaagcaagagtacgacgaatctggcccctccatcgtgcaccgcaaatgcctttga

SEQ ID NO: 3430 - RNA, 1755 nt, synthetic construct
  misc_feature 1..1755: note = CCDS13562.1 variant
  source 1..1755: mol_type = other RNA
atggtggccgaggtctgcagcatgcccaccgcttccacagttaagaaacctttcgacctgagatctaagatgggcaaatggtgtcaccatcggtttccgtgctgtcgcgggagcggaaagtccaacatgggcacgtctggggatcacgacgatagcttcatgaaaatgctcagatccaagatgggaaagtgctgtcggcattgctttccctgttgccgcggctctgggaccagcaatgtgggaacatccggcgaccacgaaaacagcttcatgaaaatgctgagatctaagatgggcaaatggtgttgccattgttttccttgctgccgggggtccggaaagagcaatgtgggcgcctggggagattacgaccactctgcgttcatggagccccgctatcacatcagacgggaagatcttgacaaactgcatcgcgctgcctggtgggggaaggtccctagaaaggatctcattgtgatgctgcgggacaccgatatgaacaaacgcgacaaggagaaaagaacagcccttcacctggcttccgccaatggcaacagcgaagttgtgcagctcctgctggatcggcgctgtcaactcaatgtcctggacaacaagaaaagaaccgctcttatcaaggccattcagtgccaggaggacgagtgtgtgctgatgctcctggaacatggggcggatcggaatatccccgacgagtacggaaacacagcccttcactatgctatttacaatgaagataaactgatggccaaggctctcctgctgtatggcgccgacatcgagtctaagaacaaatgcggcctcacccctctgcttctgggggttcacgagcagaagcaacaggtggtcaaatttctcatcaagaaaaaggcgaatctgaacgtgcttgatagatacggacgcacggccctgattctcgctgtgtgttgcggctccgccagcatcgtcaatctgctgctcgaacagaacgttgacgtgtcctctcaggatctgagcgggcaaaccgctcgggagtatgccgtgtccagccatcaccatgtcatttgtgaacttctgtctgactacaaggagaaacagatgctcaagatctccagcgaaaactctaatccggagcaggatctgaaacttacaagcgaggaagagtcccagagactgaaggtgtctgaaaacagccaacccgagaaaatgtcccaggaacctgagattaataaggactgcgatcgcgaggttgaagaggaaatcaagaaacacggaagcaaccccgtgggcctccctgagaatctgaccaacggggcctctgctggaaatggcgacgacggcctgattccccagcggagatcccgcaagccggaaaaccaacagttccctgatacagagaatgaggaataccatagcgacgagcagaacgatacccggaaacagctctctgaagaacaaaatacggggatctcccaggacgagatcctgacaaacaagcagaaacagattgaagtcgcggagcaaaagatgaatagcgaactttccctgtctcacaagaaagaggaagatctcctgagagagaacagcgtgctgcaggaggaaatcgccatgcttcgcctcgagctggacgaaaccaagcaccagaatcagctgcgggagaacaaaattctcgaagagatcgagtccgttaaggagaaaacagataagctgcttagagctatgcaactgaacgaggaagccctcaccaaaaccaatatttga

SEQ ID NO: 3431 - RNA, 1530 nt, synthetic construct
  misc_feature 1..1530: note = EAW59519 variant
  source 1..1530: mol_type = other RNA
atggagagacggcgcctgtggggcagcatccagtccagatacatttctatgagcgtgtggacctctccccggcgcctcgtcgaactggccgggcaatcccttctgaaggacgaggctctcgccatcgcggctctggaacttctgcctagagagcttttcccgcccctgtttatggccgccttcgatggacggcacagccagacactgaaagctatggttcaggcctggccttttacgtgcctccccctgggcgtgcttatgaaggggcagcatctgcacctcgaaaccttcaaagctgtgctggacggacttgatgtcctgctcgcccaagaggtgcgccctagacggtggaagctgcaggttctggacctccgcaaaaactcccatcaggatttttggacagtgtggtctggcaatagagcgagcctgtattccttccccgagcctgaagccgctcagccgatgaccaagaagcggaaagtcgacgggcttagcacagaggccgaacaaccctttattcctgtggaggttctggtggatctcttcctgaaggagggagcttgtgacgaactcttttcttacctgatcgagaaagtcaagcgcaaaaagaacgtgctcagactgtgctgtaagaaactgaagattttcgccatgcccatgcaggatatcaaaatgatcctcaagatggtgcagctggactccattgaagatcttgaggttacctgcacatggaaactgcctaccctcgcgaagtttagcccctatctgggccagatgatcaatcttcggcgcctgctcctgtctcacattcatgcctccagctacatctctccggaaaaagaggagcaatatattgctcagttcacgtcccagtttctgagcctccaatgtctgcaggccctttacgtcgactccctgttcttcctcagaggccggctggatcagctgcttagacacgtgatgaaccctctcgaaaccctgtctatcacaaattgccgcctgagcgagggggacgtgatgcacctctcccagagcccctctgtctcccaactgagcgtgctttctctgagcggagttatgctcaccgacgtgtcccctgaacccctgcaggctctgcttgagcgggcctctgccacactccaggatctggtctttgacgaatgtggcattaccgatgaccagctgctcgctctgcttcccagcctgtcccattgcagccaactcacgacactgtctttctatgggaactccatcagcatctctgcgctgcagtcccttctccagcacctgattggactgagcaatctcacccatgtgctgtaccctgttccgcttgagtcctacgaggatatccacggcacactgcacctcgaaagactggcctatctgcatgctcgccttcgggagctcctgtgtgaactggggagaccctctatggtgtggctcagcgccaacccttgcccccactgtggagaccgcaccttttacgatcctgagcccattctgtgcccgtgcttcatgcctaattga

SEQ ID NO: 3432 - RNA, 1530 nt, synthetic construct; identical to SEQ ID NO: 3431
  misc_feature 1..1530: note = AAC51160 variant
  source 1..1530: mol_type = other RNA

SEQ ID NO: 3433 - RNA, 645 nt, synthetic construct
  misc_feature 1..645: note = CCDS8069.1 variant
  source 1..645: mol_type = other RNA
atgggcctggccggggtgtgcgctctcagacggagcgccggatacatcctggtcggcggggcgggaggccagtccgctgccgccgctgcccgcagatattctgagggggaatgggctagcggaggcgttcggtccttctctcgcgccgcggccgctatggcccccattaaggtgggcgacgctatccctgccgtggaggtctttgaaggggagccgggaaacaaagtgaatcttgcggaactgttcaagggcaaaaagggggttctctttggagtgcccggcgccttcacccctgggtgtagcaaaacacatctgcccggatttgtcgagcaagctgaggcccttaaggctaagggcgtgcaggttgtggcctgcctgtccgtcaacgatgccttcgtgacgggcgaatgggggagagctcacaaagcggagggaaaggtgcggctcctggccgaccctaccggcgcttttgggaaagaaacagatctgctcctggacgattctcttgtcagcattttcggaaatcgcagactgaagcggttttccatggttgtgcaggacggcatcgtgaaagccctcaacgtcgagcccgatgggaccggactgacatgtagccttgcccctaatattatctctcagctgtga

SEQ ID NO: 3434 - RNA, 309 nt, synthetic construct
  misc_feature 1..309: note = AAA63250 variant
  source 1..309: mol_type = other RNA
atggtgagataccgggtccgcagcctgtccgagagatctcacgaagtttatcggcagcaactccatggccaggagcaggggcaccatggacaggaggaacaaggcctgagccccgaacacgtggaggtgtacgagcgcacccatgggcagtcccactatagacggcgccactgctctagacggcgccttcatagaatccaccggcgccagcatagaagctgtcggcgcagaaagcggagatcctgccgccaccggagacgccaccggagaggatgtcgcacacggaaaagaacgtgccgccggcattga

SEQ ID NO: 3435 - RNA, 1662 nt, synthetic construct
  misc_feature 1..1662: note = AAH50416 variant
  source 1..1662: mol_type = other RNA
atggtgcagagactgtgggtcagccggctcctgcgccacagaaaggcccaacttctgctcgttaacctgcttaccttcggcctggaggtgtgcctcgctgccgggatcacatacgtgccccctctgctgctcgaagtcggagtggaggaaaaatttatgacgatggttctgggcattgggccggtgcttggactggtctgtgtgcccctcctgggctccgcgtctgaccattggcgggggcgctatggaagacggcgccctttcatctgggctcttagcctgggcattctcctgtccctgtttctcatccccagagccggctggctggccgggcttctgtgccctgatccccggcctctcgagctggcccttctgattctcggagttggcctgctggacttctgtggacaggtgtgctttaccccgctcgaagctctgctttctgatctgttccgcgaccccgatcactgtagacaggcttacagcgtctatgcctttatgatctccctcgggggctgcctggggtaccttctgcctgcgatcgactgggatacatctgccctcgctccctatctgggaacccaggaggagtgtctgttcggcctcctgacacttatttttctgacctgcgtggccgctacactcctggtggccgaagaggcggccctgggccctaccgaacccgctgaggggcttagcgccccgtccctcagccctcattgttgcccctgtcgggctcgcctggccttcagaaatctgggagccctcctgcctcggcttcaccaactgtgctgccgcatgcccagaacgctccggagactgtttgtcgctgagctgtgttcttggatggcgcttatgaccttcacactcttttacaccgacttcgttggcgaagggctgtatcagggagtgccccgcgccgagcctggcacagaagctcggagacattacgatgagggggtgcgcatgggatccctgggcctcttcctgcagtgcgccatcagccttgtcttttctctggtgatggaccggctcgttcagagattcggcacccgcgccgtgtacctggcttccgtcgccgcgtttccggtggctgccggggccacgtgtctgagccactctgttgctgtggtcacagcctccgctgcccttaccggattcacatttagcgcgctccaaattctgccctataccctggcctccctctaccaccgggaaaaacaggtgttcctgcctaagtatagaggcgataccgggggagcttctagcgaggactcccttatgacgagctttctgcccggccctaagcccggggccccgttccctaacggccatgtcggagctggcgggtctggactcctgccccctccccctgccctgtgcggcgcgtccgcctgtgatgtgagcgttcgcgtggtcgtgggggagcccacagaagctcgggttgtgccgggaagaggcatctgccttgacctcgccattctggactctgcttttctgctcagccaggtcgccccttccctgttcatggggtctatcgtgcagcttagccaatccgtgaccgcctacatggttagcgctgcgggcctgggactcgtcgccatttattttgctacacaggtggtgttcgataaatctgacctggccaagtactccgcctga

SEQ ID NO: 3436 - RNA, 648 nt, synthetic construct
  misc_feature 1..648: note = CBI83574 variant
  source 1..648: mol_type = other RNA
atggccagcctgcagatgagaggcaaccccgggtcccacttctgcggaggcaccctcatccatccttcttttgtgctgacagctgcccactgtcttcgggacattccgcaacgcctggtcaatgttgtgctcggggcgcataacgtgagaacgcaggagcccacccagcagcacttcagcgtcgctcaagtgtttctgaataactacgatgccgaaaataaacttaacgacatcctgctcattcagctgtcctctcctgccaatctgagcgcttccgttgccacagtgcagctcccccagcaagatcagcctgtcccccatggaacccagtgcctggctatgggctgggggcgggtgggagcccacgaccctccggcgcaggttcttcaagagctgaacgtgacagtcgtgaccttcttttgtcgcccccacaatatctgcacattcgtgcctagacggaaggccggcatttgttttggcgattctgggggacccctcatctgcgacggcatcattcaggggatcgatagcttcgtcatttggggatgtgctacccgcctgtttcctgacttctttacgagagttgccctttatgtggattggatccggtccaccctgcgcagagtggaagctaagggccggccctga

SEQ ID NO: 3437 - RNA, 771 nt, synthetic construct
  misc_feature 1..771: note = AAH96183 variant
  source 1..771: mol_type = other RNA
atggcccacagaccccctagcccggctctggcctccgtgctcctggcgcttctgctctctggcgctgcccgggccgctgagatcgtcgggggacatgaagcccagccccacagccgcccttacatggcttccctgcaaatgagaggcaaccccgggtctcatttctgcggaggcacccttattcaccctagctttgttctgacagccgcgcattgtctccgggacatcccccagcgcctggtgaatgtggtcctgggggcccacaacgtgagaacgcaggagcctacccagcaacacttctccgttgctcaggtgtttctcaataactatgatgccgaaaataagctgaacgacgtccttctgattcagctctctagcccggctaatctgtccgccagcgtggcgacagttcagcttccccaacaggatcagcctgtgccccatggaacccagtgcctggccatgggctggggccgggtcggggctcacgaccctcccgcccaagtgctccaggagctgaacgtgacagtcgttaccttcttttgtcgcccgcataatatctgcacattcgtgcctagacggaaagctggaatttgttttggcgattctgggggacccctgatctgcgacggcatcattcaggggatcgattccttcgtgatttggggatgtgccacccgcctctttcctgacttctttacgagagtcgccctgtacgtggattggatccggagcacccttcgcagagttgaagctaagggccggccctga

SEQ ID NO: 3438 - RNA, 2760 nt, synthetic construct
  misc_feature 1..2760: note = CCDS45721.1 variant
  source 1..2760: mol_type = other RNA
atgtggctggccgctgccgcgcccagcctcgctagacggctgcttttcctgggccctccgccccctcccctcctgcttctggtgttttcccgctctagcagacggcgcctccactccctggggctggccgccatgcctgagaagagacccttcgaacggctccctgctgacgtctctccgatcaactacagcctgtgccttaaacccgatctgctcgactttaccttcgagggaaagctggaagccgctgcccaggttcgccaagcgacaaatcagattgtgatgaactgtgccgatatcgacattatcacggcttcctatgcccctgagggcgatgaagagattcatgctaccgggtttaattaccagaacgaggacgaaaaagtgacactttctttccccagcaccctgcagacaggaaccggcacactcaagatcgattttgtcggggagctgaatgacaaaatgaagggattctatagatccaagtacaccacgcctagcggcgaagtgcggtatgccgcggttacccaatttgaggccacagatgctcgcagagccttcccctgctgggacgagccggctatcaaagccacctttgatatttctctggtggtccctaaggaccgggtggccctctccaacatgaatgttatcgatcgcaaaccctaccctgacgacgaaaacctggtggaggtcaagttcgctagaacacccgtgatgagcacctatcttgtggcgtttgtcgttggcgaatacgatttcgtggagacgcggtctaaagacggggtgtgtgtccgcgtgtacacacccgttggaaaggccgaacagggcaagttcgctctggaggtggccgccaaaaccctccctttttataaggattacttcaatgtcccgtatcccctgcctaaaattgaccttatcgctattgccgattttgcggctggggccatggagaactggggactggtgacatacagagaaaccgccctcctgatcgaccccaagaatagctgctcctcttcccggcagtgggttgctctggtggtcggccacgagctcgcccatcagtggttcgggaacctggtgaccatggaatggtggacacacctttggctgaatgagggatttgctagctggattgaatatctctgtgtcgatcattgcttccctgagtacgacatctggacgcaatttgtgtccgccgattataccagagcgcaggagctggacgcccttgataactctcaccccatcgaagttagcgtgggccacccgtccgaggtcgacgaaattttcgacgctatcagctactctaaaggcgcctccgtgattcgcatgctgcatgattacatcggggacaaggattttaaaaagggaatgaatatgtatctcacaaagttccagcagaaaaacgctgccaccgaggacctgtgggaaagcctggagaacgcgtctggcaagcctattgccgctgttatgaatacatggaccaaacaaatggggtttcccctcatctacgtggaggccgaacaggtcgaggatgaccggctgcttagactgagccagaagaaattctgtgctggaggctcctatgtgggggaagattgccctcaatggatggtgcccatcacgatttctacaagcgaggaccctaaccaggccaagctcaagatcctgatggataaacccgagatgaatgttgtcctgaagaacgtgaaaccggaccagtgggtgaaacttaatctcggaaccgtcggcttttaccgcacccagtattccagcgccatgctggaatctctgctccctggcattcgggatctgtcccttcctcccgtggacagactggggctccaaaacgatctgttcagcctggctcgcgcgggaatcatttctacagttgaggtgcttaaggtcatggaagccttcgtgaatgagcccaactacaccgtttggtccgacctcagctgtaatctgggcatcctgtccacactcctgtctcacacggacttttatgaagagatccaggagttcgtgaaggatgtctttagcccgattggggaacggcttggatgggaccccaagcctggcgaggggcatctggatgctctcctgagaggcctggtgcttggaaaactcggcaaggccgggcacaaagccaccctggaagaggctcgccggagattcaaggaccacgttgaaggaaaacagatcctgtccgccgatctccgctctcccgtgtacctgacagtccttaagcatggcgacgggaccacactggatattatgctcaagctgcacaaacaggcggacatgcaagaggagaagaaccggatcgaaagagtgctgggagctacccttctccctgatctgattcagaaagtgctgacgtttgccctcagcgaggaagtccggccccaggacaccgtttccgtgatcggcggggtggccggcggaagcaagcatggccgcaaagctgcctggaagttcattaaagataattgggaggaactgtacaacagatatcaagggggatttcttatctctcggctgatcaagctctccgtcgagggcttcgcggtggacaagatggctggggaggttaaagcctttttcgaaagccaccctgccccctctgctgagagaacaattcagcagtgctgtgaaaatatcctgctgaacgccgcttggcttaagcgcgatgccgagtccattcatcagtacctgctccagcggaaagcgagcccgcctaccgtgtga

SEQ ID NO: 3439 - RNA, 660 nt, synthetic construct
  misc_feature 1..660: note = AAH65513 variant
  source 1..660: mol_type = other RNA
atgctgagagccggcgctcccaccggggacctccctcgggccggagaggtgcacacaggcacgaccatcatggcggtcgagttcgatgggggagttgtgatgggcagcgactcccgcgtgtctgctggggaggccgtcgtgaacagagtttttgataagctgagcccgcttcatgaacggatttactgcgccctgtccggatctgctgccgacgctcaggccgtggcggatatggccgcttatcaactcgagctgcacggcatcgaacttgaggagccccctctggtcctcgccgctgccaatgtggttcgcaacattagctacaaatatagagaagacctgtccgcgcatctgatggtggccggctgggatcagcgggaagggggacaggtctacggcacactcgggggaatgctgacccgccagcccttcgctatcggcgggtctggaagcacatttatttatggctacgtggacgccgcttataagcctggcatgtcccccgaagagtgtagacggttcaccacagatgccatcgcccttgctatgagccgcgacgggtcttccggaggcgtgatctacctggtcaccattacggcggccggggttgatcacagagtgatcctcggaaatgagctgcctaaattttacgacgaatga

SEQ ID NO: 3440 - RNA, 345 nt, synthetic construct
  misc_feature 1..345: note = EAW82312 variant
  source 1..345: mol_type = other RNA
atggccggcctggctctccagcccgggaccgccctgctttgctacagctgtaaggcgcaagtgtccaacgaggactgcctgcaggtcgaaaattgtacacagctcggagagcagtgctggacggctagaatccgggccgttggcctgcttaccgtgatttctaaagggtgtagcctgaactgcgtggatgactcccaagattattacgtcggaaagaaaaatatcacatgttgcgacaccgatctctgtaacgcctctggcgctcacgccctgcagcctgctgccgcgattctggccctcctgccggctcttgggctgctcctgtggggacccggccagctttga

SEQ ID NO: 3441 - RNA, 372 nt, synthetic construct
  misc_feature 1..372: note = AAC39607 variant
  source 1..372: mol_type = other RNA
atgaaggccgtgctgctcgctctgcttatggccggcctggcgctccagcccgggaccgctctgctttgctacagctgtaaagcccaagtctccaacgaggactgcctgcaggttgaaaattgtacacagctcggagagcagtgctggacggccagaatccgggctgtgggcctgctgaccgtgatttctaaggggtgtagcctcaactgcgtcgatgactcccaagattattacgtgggcaaaaagaatatcacatgttgcgacaccgatctgtgtaacgcctctggagctcacgcccttcagcctgcggccgctattctggccctcctgccggctcttgggctgctcctgtggggacccggccagctgtga

SEQ ID NO: 3442 - RNA, 963 nt, synthetic construct
  misc_feature 1..963: note = AAG40776 variant
  source 1..963: mol_type = other RNA
atgagctcctgcaacttcacccacgccacatttgtgctgatcggcattcccgggctcgagaaggctcatttctgggtgggatttcctctgctttctatgtacgttgtggccatgttcggcaattgtatcgtggtctttattgtgagaacggaacggagcctgcacgcgccgatgtatctcttcctgtgcatgcttgctgccatcgacctggccctctccacctctacaatgcccaaaattctggctctgttttggttcgatagccgcgagatctcctttgaagcctgtctcacccagatgttctttatccatgctctgtctgccattgagagcacaatccttctggcgatggccttcgacagatacgttgctatttgccaccctctccggcatgccgctgtgctgaacaataccgtcacagcccaaatcgggattgtggcggttgtgcgcggatccctgtttttcttcccccttcctctcctgatcaagagactggccttttgtcacagcaacgtcctctctcactcctattgcgtgcatcaggatgtgatgaaactggcttacgccgacacccttcccaatgtcgtttatggcctgacggctattctcctggtgatgggggtggatgtcatgttcatcagcctttcttactttctgatcattcggaccgtgctccagctgccttccaagagcgaacgcgccaaagccttcggaacatgtgtttctcacatcggcgtggtcctggctttttatgtgccgctcattggcctgtccgttgtgcatagattcgggaacagccttcaccccatcgtccgggtggtcatgggagacatttacctgctcctgcctcccgtgatcaatcctatcatttacggcgcgaagaccaagcagatccgcacaagagttcttgccatgtttaaaatttcctgcgataaggacctgcaagctgtcgggggaaaatga

SEQ ID NO: 3443 - RNA, 2253 nt, synthetic construct
  misc_feature 1..2253: note = AAA60209 variant
  source 1..2253: mol_type = other RNA
atgtggaacctgctccacgagaccgacagcgccgtggctacagccagacggccccgctggctgtgcgcgggcgctcttgtcctggccgggggattctttctcctgggcttcctttttgggtggttcatcaagtcctctaatgaagccacgaacattacccctaaacataatatgaaggcttttctggatgagctcaaagccgaaaacatcaagaaattcctgtacaattttacacagattccgcacctggctggaaccgagcaaaacttccagctcgccaagcagatccagagccaatggaaggaatttggcctggactccgttgagcttgcgcattatgatgtgctgctctcttaccccaataaaacacaccctaactatattagcatcatcaatgaggacgggaacgaaattttcaatacctccctgtttgagccccctccccctggatacgaaaacgtgtctgatatcgtcccgcccttcagcgccttttcccctcagggcatgcccgagggcgaccttgtgtatgttaattacgctagaacagaggatttcttcaagctggaacgggacatgaaaattaactgtagcgggaagatcgtgattgcccgctatggaaaagtctttagaggcaataaggtgaagaacgctcagctcgccggggcgaaaggagttatcctgtactctgatcctgccgactacttcgctcccggcgtgaagtcctatccggatgggtggaacctgcctggaggcggcgtccagcgggggaatattctcaacctgaatggagccggcgacccccttacccctgggtaccccgctaacgagtatgcctaccgcagaggaatcgccgaagctgtgggcctgcccagcatccctgtgcatccgattgggtattacgatgcgcaaaaactcctggagaagatgggaggctctgctccccctgactccagctggcggggctctcttaaagtcccctataatgttgggcctggatttacgggcaacttctccacccagaaggtgaaaatgcacatccacagcacaaatgaagtgacccgcatttacaacgtcatcgggacactgagaggagccgtggagcccgaccggtacgttattctcggcgggcatcgcgattcctgggtgtttggcggaatcgacccgcagtctggcgccgccgtcgtgcacgagatcgttcggagcttcgggaccctgaagaaggaaggatggagacctcgcagaacgattctgtttgcttcctgggatgccgaggagttcggcctcctggggagcacagagtgggcggaagaaaattctcggcttctgcaggagagaggagtggcttatatcaacgccgactccagcattgaaggcaattacaccctccgcgtcgattgcacacccctgatgtattctcttgtgcataacctgaccaaagagctcaagagccctgacgaagggtttgagggcaaatccctgtacgaatcttggaccaagaaaagcccctcccctgagttcagcggaatgccccggatctctaagctgggctccgggaatgattttgaggtcttctttcaaagactcggaattgccagcggccgcgctcggtatacaaagaactgggaaacgaataaattctctgggtacccgctgtatcactccgtgtacgagacctacgaacttgttgagaagttctatgaccctatgtttaaataccacctgacagtggcccaggtcagaggaggcatggtgttcgagctcgctaacagcatcgttctgccctttgattgtcgcgactatgccgtggtcctgcggaagtacgcggataaaatctattccatttctatgaagcatccccaggaaatgaagacctacagcgtgtccttcgactctctttttagcgccgtgaaaaacttcacagagatcgcttccaagtttagcgaaagactccaagacttcgataaatctaatcctattgttctgcgcatgatgaacgaccagctgatgtttctcgagcgggccttcatcgatccgctggggcttcccgacagacctttttatcgccacgtcatttacgctccctccagccataataagtacgccggcgaatctttccctggaatctatgatgcgctgtttgacattgagtccaaagtggatcccagcaaggcctggggcgaggtgaagcggcagatctacgtcgctgccttcaccgtgcaggctgccgccgaaacgctctctgaggttgcttga

SEQ ID NO: 3444 - RNA, 3921 nt, synthetic construct
  misc_feature 1..3921: note = CCDS1397.2 variant
  source 1..3921: mol_type = other RNA
atgaccatgtacctgtggctcaagctgcttgccttcggctttgctttcctggacacagaggtgtttgtcacggggcagagccccaccccttccccgacaggactcaccacagccaaaatgccctctgttcctctgagctccgatccccttcctacccacacaaccgcgttctctcccgctagcacgtttgaaagagagaacgacttctccgaaaccacaacctctctgagccctgataatacatccacccaagtgagcccggactctctcgataacgcctccgcctttaatacgacaggcgtgagctctgtccagacaccccatctgcctacccacgctgactcccagacccccagcgccgggaccgatacacagacgttctctggatccgctgccaacgcgaagctgaatcctacccccggcagcaacgccatctccgacgtgccgggggagcggtctacagctagcacctttcctacagatcccgtttcccctctcaccacgacactgagccttgcccatcactcttccgctgccctgcccgcgcgcaccagcaataccacaattaccgccaacacatctgacgcttatctcaatgccagcgaaacgaccacactgtccccctctggaagcgctgtgatctccaccacaaccattgccacgacccctagcaaaccgacatgcgatgagaagtacgccaacatcaccgtcgactatctttacaataaagagacaaagctgttcaccgctaagctcaacgtgaatgaaaacgttgagtgtggcaataacacgtgcacaaacaatgaagtgcataacctgaccgagtgtaaaaatgcgtctgtctccattagccacaactcttgcacagcccccgataagaccctgatcctcgacgtgcctcccggcgtggagaaatttcaactgcacgactgtacccaggtcgaaaaggctgatacaacgatctgccttaaatggaagaatattgagaccttcacatgtgacacccagaacatcacatatagatttcagtgcgggaatatgattttcgataacaaggaaatcaaactggagaatctcgaacctgagcatgagtacaagtgtgactccgaaattctgtataacaatcacaaattcaccaacgccagcaagatcattaaaacggattttggatcccccggcgagccgcaaatcatcttctgccggtctgaagccgctcatcagggggttattacatggaatcctccccagcgcagctttcacaacttcaccctttgttacatcaaggagaccgaaaaagactgcctgaatctcgataagaacctgattaagtacgacctgcagaacctcaaaccttatacaaagtacgtgctgtcccttcacgcctatatcattgcgaaagtgcaaagaaatggatctgctgccatgtgccattttaccacaaagagcgctcccccttcccaggtctggaacatgacggtgagcatgacctctgataattccatgcacgttaaatgtcggcccccgcgcgacagaaacggccctcatgagcggtaccacctggaggtggaagccgggaatacactcgtccgcaacgagagccataagaattgcgatttcagagtgaaggacctgcagtattctaccgactacacatttaaagcctatttccacaacggagattaccccggcgaaccctttatccttcaccattccaccagctacaattctaaggctctgatcgccttcctcgcgtttctgattatcgttacgagcattgccctgctcgtggtcctgtataaaatctacgaccttcacaagaaacggtcctgtaacctggatgagcaacaggaactcgtggagcgcgacgatgagaagcagctgatgaatgtcgaacctattcatgctgacatcctgcttgagacctataagagaaaaatcgccgatgaaggccgcctcttcctggctgagtttcagagcattccgcgggtgttctctaagttccccatcaaagaggccagaaagccttttaaccaaaataaaaaccggtacgttgacattctgccctatgattacaatagagtggaactctccgagatcaacggggacgcgggaagcaactatattaatgcctcctacatcgatggcttcaaggaacctcgcaagtacattgctgcccaggggccccgggacgagacagtcgatgacttttggagaatgatctgggaacagaaagctaccgtgatcgttatggtgacacgctgcgaggagggaaaccggaataagtgtgccgaatattggccttctatggaggaaggcaccagagccttcggggacgtcgtggtgaaaattaaccagcacaagcgctgccccgattacatcattcaaaaactgaatatcgttaacaagaaagagaaggctacaggacgggaagtcacccacattcagtttacgagctggccggaccatggcgtgcctgaggatccccaccttctgctcaagctgagacgccgggtgaatgcgttctccaactttttctctggccctatcgtcgtgcattgtagcgccggggttggaagaacaggcacctatatcgggattgacgctatgctggagggacttgaagccgagaataaagtggatgtctacggctatgtggttaagctccgccggcagagatgcctgatggtgcaggtcgaagcccaatacatcctgattcaccaggctctcgtggagtataaccagtttggggaaaccgaggttaatctgtccgagcttcatccctacctgcacaacatgaaaaagcgggacccgccttctgaacccagccctctcgaggccgagttccagcgcctgccctcctacagaagctggcggacacaacacatcggcaatcaggaagagaacaaatctaagaatagaaactccaacgtgattccctatgattacaatcgcgtccctctgaagcatgaacttgagatgagcaaagaatctgagcacgactccgatgaaagctctgacgatgactccgatagcgaggagccgtccaagtatatcaacgcgagctttatcatgtcttactggaaacccgaagtgatgattgctgcccagggacctctcaaggagaccatcggcgacttctggcaaatgatttttcagcggaaagtgaaggtcatcgttatgctgacggaactgaagcatggggaccaggagatttgtgcccagtattggggagaaggcaaacaaacatacggggatatcgaggtggacctcaaggataccgacaaaagctccacatataccctgagagtgttcgagcttcgccactctaagagaaaagatagccggacagtctaccagtaccagtataccaattggtccgtggaacagctgcccgctgagcctaaggaactcatctctatgattcaagttgtgaagcagaaactgccccagaagaacagctccgagggaaataaacatcacaagtctacgcctctgcttatccactgccgcgacggcagccagcaaaccgggattttctgtgccctcctgaacctgctcgaatccgcggagacagaggaagtcgtggatatctttcaggttgtgaaagctctgagaaaggcccggccgggcatggtcagcaccttcgagcagtaccaatttctttatgacgtgattgcctctacataccccgctcagaatggacaggttaaaaagaacaatcatcaggaagataagatcgagttcgacaacgaggtggataaagtcaagcaagacgccaattgcgtgaaccctctgggcgctcccgaaaaactccctgaggccaaggaacaggcggaggggtccgaacccaccagcggaacggagggcccggagcactctgtgaatgggcctgcctcccccgctctgaaccagggaagctga

SEQ ID NO: 3445 - RNA, 624 nt, synthetic construct
  misc_feature 1..624: note = AAH02977 variant
  source 1..624: mol_type = other RNA
atggccaagacctacgactatctgttcaaactcctgcttatcggcgatagcggggtgggaaagacatgcgtcctgtttagattctccgaggacgcttttaactctacgttcattagcaccatcggcattgattttaaaatccggacaattgaactcgacgggaagcgcatcaaactgcagatctgggataccgccggacaagagagattccggacaattaccacagcgtactatcgcggcgctatggggatcatgcttgtttacgacattaccaatgaaaagtcctttgataacatcagaaattggattcggaacatcgaggaacacgcctctgccgacgtggagaagatgattctgggaaataaatgtgatgtgaacgacaagcgccaggtcagcaaagagagaggcgaaaagctcgctctggattatggcatcaaattcatggagacgtccgccaaggctaatatcaacgtggaaaatgcctttttcaccctggcgcgggacattaaggccaaaatggataagaaactcgaggggaactctccccagggaagcaatcagggcgttaagatcacacctgaccaacagaaacgctccagctttttcagatgcgtgctgctttga

SEQ ID NO: 3446 - RNA, 1260 nt, synthetic construct
  misc_feature 1..1260: note = BAA81688 variant
  source 1..1260: mol_type = other RNA
atgaagaactacaaagccatcggcaagattggggagggaaccttcagcgaagtgatgaaaatgcagtccctgagagacggcaattattacgcttgcaagcaaatgaaacagcggtttgagtctatcgaacaggtcaacaatctccgcgagattcaggccctgagacggcttaacccccaccctaatatcctgatgctccatgaagttgtgttcgatcgcaagagcgggtccctggcgcttatttgtgagctgatggacatgaacatctatgagctcatcagaggacggcgctacccgctgtctgaaaagaaaattatgcactatatgtaccaactgtgcaagagcctcgatcatatccacagaaatggcatttttcatcgggacgtgaaacccgagaacatcctgattaagcaggatgtccttaaactgggggacttcggatcctgtcgctctgtgtatagcaagcagccttacacagaatacatctccacgagatggtatcgggctcccgagtgcctcctgaccgatggcttttacacatataagatggacctttggagcgccggctgtgttttctacgagattgcctctctgcagcctctctttcccggggtgaatgaactggatcaaatctccaaaatccacgacgtcattggaacccctgctcagaagatcctgacaaaattcaagcagagccgcgccatgaactttgatttcccgtttaaaaagggctctgggattcccctcctgaccacaaatctttcccctcagtgcctgagcctcctgcacgctatggtggcctatgaccccgatgagagaatcgcggcccatcaagcccttcagcacccttacttccaggaacaacggaaaaccgagaagcgcgctctgggatctcatagaaaggctggctttcccgaacacccggttgcccctgagcccctctccaacagctgtcagatttccaaagaggggcggaagcagaaacagtctctgaagcaagaagaggacagacctaaacgccggggacccgcgtatgtgatggaactgcccaagctcaagctgagcggcgtcgtgagactttccagctactcttcccctacgctgcagagcgtgctcggctctgggaccaatggacgcgtcccggttctgcggccccttaaatgcatccctgccagcaagaaaacagacccccagaaggatctgaaacctgctccccagcaatgtagactcccgaccatcgtgcgcaagggcgggcggtga

SEQ ID NO: 3447 - RNA, 1389 nt, synthetic construct
  misc_feature 1..1389: note = AAH08727 variant
  source 1..1389: mol_type = other RNA
atggccagcaactcctctagctgccccacccctggcgggggacacctgaatggctacccggtgcccccttatgctttctttttccctcccatgctcgggggactgtctccccctggcgcccttacaacgctgcagcatcaactcccggtctccgggtacagcaccccctcccctgcgacaatcgagacccagtctagctccagcgaagagattgttccctctcctccctccccgcctcccctgcctagaatctataagccctgttttgtgtgccaggacaaaagctctggataccactatggcgtgtccgcttgtgaaggctgcaaggggttctttcggcgcagcattcagaaaaacatggtctacacatgtcatagagataagaattgcatcattaacaaagtgacccggaatcgctgtcaatattgcagacttcagaagtgtttcgaggttggaatgtctaaggaatccgtgcggaacgaccgcaataaaaagaaaaaggaggtccccaaacctgagtgcagcgaatcctacacactgaccccggaggtgggcgaactcatcgagaaggttagaaaggcccaccaggagacgtttcccgccctgtgtcagctggggaaatacaccacaaacaattctagcgaacaacgggtgtccctcgatatcgacctgtgggataagttcagcgagctttctaccaaatgcattatcaagacagtcgaatttgctaaacagctgcctggattcaccacgctcacaattgccgaccagatcaccctgcttaaggctgcctgcctggatattctcatcctgcgcatttgtacaagatatacccccgagcaggacaccatgacattttccgatggcctgacgctcaaccggacccaaatgcataatgcggggttcggacctctgacagaccttgtgtttgccttcgctaaccagctgctccccctggaaatggatgacgccgagaccggccttctgagcgctatctgcctcatctgtggcgatcgccaggacctggagcaaccggacagagtggatatgctgcaggaacctctcctggaggcccttaaagtctacgttcggaagcgcagaccctctcggcctcacatgttccccaagatgctgatgaaaattacagacctcagaagcatctccgcgaagggggccgaacgcgtgattaccctgaaaatggagatccctggatctatgcccccgcttattcaggaaatgctggagaatagcgagggcctcgatacgctgtccgggcagcctggaggcgggggacgggacggcggcgggctggctccccctcccggaagctgctctccgtccctcagcccctcttccaacagaagctcccctgccacacactctccctga

SEQ ID NO: 3448 - RNA, 570 nt, synthetic construct
  misc_feature 1..570: note = AAB02605 variant
  source 1..570: mol_type = other RNA
atgaccgagtacaagctggtggtcgttggcgccgggggagtgggcaaaagcgctctcacaatccagctgattcaaaaccacttcgtggacgaatatgatcccacgatcgaggactcctacagaaagcaggtcgtgattgatggggaaacctgccttctggacatcctcgatacagccggacaggaggaatattctgcgatgcgggaccagtacatgcgcaccggcgaggggtttctgtgtgttttcgctattaacaacacaaagagctttgaggatatccatcaatatagagaacagatcaaacgggtgaaagactccgatgacgtccctatggtgcttgttggaaataagtgcgatctggccgcccgcaccgtggagtctagacaggctcaggacctcgcccggagctacggcattccgtatatcgaaacatccgctaagacccgccaaggcgtcgaggatgccttctacacgctggtgagagagattcggcagcacaaactgcgcaagctcaatccccctgacgaatctgggcccggatgtatgagctgcaaatgtgtgctgtcctga

SEQ ID NO: 3449 - RNA, 570 nt, synthetic construct
  misc_feature 1..570: note = AAB59445 variant
  source 1..570: mol_type = other RNA
atgaccgagtacaagctggtggtcgttggcgccgggggagtgggcaaaagcgctctcacaatccagctgattcaaaaccacttcgtggacgaatatgatcccacgatcgaggactcctacagaaagcaggtcgtgattgatggggaaacctgccttctggacatcctcgatacagccggacaggaggaatattctgcgatgcgggaccagtacatgcgcaccggcgaggggtttctgtgtgttttcgctattaataacacaaagagctttgaggatatccatcactatagagaacaaatcaaacgggtgaaagactccgaggatgtccctatggtgcttgttggaaataagtgcgacctgccgtctcgcaccgtggatacaaagcaggcccaggacctcgccagaagctacggcattcccttcatcgaaacctccgctaaaacgcggcagcgcgtcgaggatgccttttataccctggtgagagagattcggcaataccgcctgaagaaaatctctaaggaagagaaaacacctggctgtgtgaagattaagaaatgcatcattatgtga

SEQ ID NO: 3450 - RNA, 570 nt, synthetic construct
  misc_feature 1..570: note = AAA60255 variant
  source 1..570: mol_type = other RNA
atgaccgagtacaagctggtggtcgttggcgccgggggagtgggcaaaagcgctctcacaatccagctgattcaaaaccacttcgtggacgaatatgatcccacgatcgaggactcctacagaaagcaggtcgtgattgatggggaaacctgccttctggacatcctcgatacagccggacaggaggaatattctgcgatgcgggaccagtacatgcgcaccggcgaggggtttctgtgtgttttcgctattaataacagcaaatcctttgccgatatcaatctttatagagagcaaatcaagcgggtgaaagactctgatgacgtccctatggtgctggttggaaacaagtgcgatctcccgacacgcaccgtggacacaaagcaggcccatgaactggctaaaagctacggcattcccttcatcgagacctccgccaagacgagacagggcgtcgaagatgctttttataccctggtgcgggagattcgccagtacagaatgaaaaagctcaattctagcgacgacgggacacaaggatgtatgggcctgccttgcgtggtcatgtga

SEQ ID NO: 3451 - RNA, 546 nt, synthetic construct
  misc_feature 1..546: note = AAB84001 variant
  source 1..546: mol_type = other RNA
atgtgcaagggcctggccgctctcccccacagctgtctggagagagccaaagaaatcaagattaaacttgggatcctgctccagaagcctgactccgtgggagatctggtcattccgtacaacgagaaacccgaaaagcctgcgaagacccaaaagacatctcttgacgaggctctgcagtggcgggatagcctcgacaagctgctgcagaataactatggcctcgcctccttcaaatcttttctgaaaagcgagttctccgaagagaatcttgaattttggatcgcctgcgaggattacaaaaagattaagtctcccgctaaaatggccgaaaaggctaaacagatctatgaggagttcatccaaacggaagcccctaaggaggttaacattgaccattttaccaaagatatcacaatgaagaatctggtggaacccagcctctccagcttcgacatggcgcagaaacgcattcacgccctgatggagaaggattctcttcctagatttgtgcggtccgagttctaccaggaactgatcaagtga

SEQ ID NO: 3452 - RNA, 2175 nt, synthetic construct
  misc_feature 1..2175: note = CCDS4362.1 variant
  source 1..2175: mol_type = other RNA
atgagcttccccaaggcccctctgaaaagatttaacgacccgtccggctgcgctccctctcctggggcctacgatgtgaagaccctcgaggtcctgaaaggacccgttagcttccagaagtcccaacggtttaaacagcagaaggaatctaagcagaatcttaacgtggacaaagatacaacgctgcctgcgagcgctcgcaaggtgaaatcctctgagagcaaggaatcccaaaagaatgacaaggatctcaagatcctggagaaagaaattagagtccttctgcaggagcggggcgcccaggaccgcagaatccaggatctcgagaccgaactggagaagatggaagcccggctgaacgctgccctccgcgagaaaacaagcctgtctgctaataacgccacccttgagaagcaactgattgaactcacaagaaccaatgagctgcttaaatccaagttcagcgaaaacgggaatcagaaaaacctgcggatcctctctctggagctgatgaagctccgcaataagagagaaacaaaaatgcggggaatgatggcgaagcaggagggcatggagatgaaacttcaggtgacccaacgctccctggaagagagccaggggaagattgcccagctggaaggaaaactcgtttctatcgagaaggaaaagatcgacgagaaatccgagacggaaaagctgcttgagtatattgaagagatcagctgtgcttccgatcaagtggaaaaatacaagctggacattgcccagctcgaggagaacctgaaagaaaagaatgatgagatcctgtctctcaagcagagcctggaagagaacattgtcatcctttccaaacaggtggaggacctgaatgttaagtgccaactcctggaaaaagagaaggaagatcacgtgaacagaaaccgggagcataatgaaaaccttaatgctgagatgcagaacctgaaacagaagtttattctcgagcagcaagaacgcgagaagctgcagcagaaagaactgcagatcgacagcctcctgcaacaggagaaggaactttcttccagcctgcaccagaaactctgttctttccaggaggagatggtcaaggaaaagaatctgtttgaggaggaactgaagcaaacccttgacgaactcgataaactgcagcagaaggaggagcaagccgaaagactggtgaagcagctcgaggaagaggcgaaaagccgggccgaggaactgaaacttctggaggaaaaactcaagggcaaagaggctgaactggagaagtcctctgccgctcatacacaggccaccctgcttctccaggagaagtatgacagcatggtgcaatccctggaagatgtcacagcccagttcgagagctacaaagctctgaccgcgtctgaaatcgaggacctcaagctggaaaactccagccttcaggagaaagccgctaaggccggcaaaaatgccgaggatgttcagcaccaaattctggctacggaatcttccaaccaggagtatgtgagaatgctcctggacctgcagacaaagagcgcccttaaggaaaccgagatcaaagaaattacagtgtcctttctccagaagatcaccgatctgcaaaatcagctgaaacagcaagaggaggacttccgcaagcagctcgaagatgaggaagggcggaaagcggagaaggagaacaccacagctgaactgacggaggaaattaataagtggagacttctgtacgaggaactctataacaaaaccaagccctttcagctgcagctggacgccttcgaggtcgagaaacaagcccttctcaatgaacatggagctgcccaggagcagctgaacaagatccgcgattcttacgctaaactgctcggccaccagaatctgaagcagaaaatcaagcacgtggttaaacttaaagacgaaaacagccaactgaagtccgaggtgtctaaactccggtgccagctggccaagaaaaagcagagcgaaacaaagctgcaagaggagcttaacaaagtcctggggattaagcattttgacccttccaaagcgttccaccatgaaagcaaggagaatttcgccctcaaaaccccgctgaaggaaggaaacacaaattgttacagagctcccatggagtgccaggaatcttggaagtga

SEQ ID NO: 3453 - RNA, 582 nt, synthetic construct
  misc_feature 1..582: note = AAC33179 variant
  source 1..582: mol_type = other RNA
atggccgctatcagaaagaaactggtgattgtcggcgacggggcctgcggaaagacctgtctcctgatcgttttcagcaaagatcagtttcccgaggtgtacgtgcctacagtcttcgaaaactatattgcggacatcgaggtggatggcaagcaagttgaacttgctctgtgggacacggccgggcaggaggattacgaccggctccgcccgctgtcctatcccgataccgacgtgattcttatgtgcttttctatcgatagccctgactccctggaaaatatccccgagaaatggacacctgaggtcaagcacttctgtcccaacgtgcctattatcctcgttggaaataagaaagatctgagacaggacgaacatacccggcgcgagctggccaagatgaaacaggaaccggtgagatctgaggagggccgggatatggctaaccgcattagcgcctttgggtacctcgaatgctccgctaagacaaaagagggagtcagagaagtgttcgagatggccacccgggcgggcctgcaagtgcgcaagaataagagacggcgcggctgtcccatcctttga

SEQ ID NO: 3454 - RNA, 888 nt, synthetic construct
  misc_feature 1..888: note = AAA36161 variant
  source 1..888: mol_type = other RNA
atgagcggcgccctggacgtgctccagatgaaggaggaagatgtcctgaaattccttgctgccgggacccacctgggaggcacaaacctcgactttcaaatggagcagtacatctataagagaaaatccgatgggatttacatcattaatctgaagcggacgtgggaaaaacttctgctcgcggctcgcgccatcgttgccattgagaaccccgctgacgtgtctgtgatcagctccagaaataccggacagcgggccgtcctgaagttcgctgccgcgacaggcgccacccctatcgctgggcgctttacaccgggaaccttcacaaaccagattcaagccgcttttagagaaccccggctgctcgtggttaccgatcctcgcgccgaccatcagcccctgacggaggcgtcttatgtgaatcttcctaccatcgccctgtgcaacacagatagccccctcagatacgtcgacattgctatcccttgtaataacaagggcgcccactccgtgggcctgatgtggtggatgcttgctcgggaggttctgcgcatgagagggaccatttctcgggaacatccgtgggaggtgatgcccgatctctatttctaccgcgaccctgaagagatcgagaaagaggaacaggccgccgctgaaaaggcggtcacaaaagaggaatttcagggagagtggaccgcccccgctcctgagttcacggccacacaacccgaagtggccgattggagcgagggcgtgcaggtcccgtccgttcctattcagcagtttcccaccgaagactggagcgctcaacctgccacagaggattggtctgcggctcccaccgcccaggccaccgaatgggtgggggctacaacggactggtcctga

SEQ ID NO: 3455 - RNA, 2601 nt, synthetic construct
  misc_feature 1..2601: note = AAH14614 variant
  source 1..2601: mol_type = other RNA
atgaacggcgagcagcaactggacgccgatgctgggagcggaatggaagaggtggaactctcctgggaggactacctggaagagaccggctctacagccgtcccctatgggagcttcaagcacgttgatacgagacttcagaatggatttgcgcctggcatgaaactggaggtggctgtgcggaccgacccggaaacatactgggtcgccaccgtgatcacaacctgcgagcagctcctgcttctgcgctatgatgggtacggagaagacagacgggccgatttctggtgtgacattcgcaaggctgatctctatcccatcggctggtgcgagcagaacaaaaagacactggaggcccctgaaggcattagagacaaagtttccgattgggacgagtttctgcggcaaaccctcatcggggcttgttctccccctgtgcccctgcttgaaggactgcgcaatggcagaaaccctctcgatctgattgccccggggagccggcttgagtgccaggcgttccaggactccctgtctacgtggatcgtcaccgtggttgaaaatatcggaggccgcctcaagctgagatacgaggggctggagagctccgacaactatgaacattggctctactacctggatccctttcttcaccatgtgggatgggccgctcagcaaggctatgagctgcagcctcccagcgccattcggcacctcaagaatgaagctgagtggcaggaaatcctggccaaagtcaaggaggaggaagaggaacctcttccctcttacctgttcaaagacaaacaggtgattggcatccatacattttccgtgaacatgaagctcgaggcggtcgatccgtggagccctttcgggatttctcccgccaccgttgtgaaggtgtttgacgaaaagtatttcctggtcgagatggatgacctgcgccctgagaatcacgctagacggtcctttgtgtgtcacgccgatagccccggaatcttccccgttcaatggtctctcaaaaacggcctgcatatttcccctccgcccgggtaccctagccaggactttgattgggctgactatcttaagcagtgcggagccgaagccgctccccaacgctgtttccctcccctgatctccgagcacgagttcaaagaaaatatgaagctcgaggcggtgaacccgatcctgcctgaagaggtctgcgtggccacaattaccgctgttagaggctcttacctttggctgcagctcgaagggagcaaaaagcccatccctgagtgtattgtgtccgtcgaaagcatggatatctttcccctgggatggtgcgagacgaatggccatcctctgtctacaccccggagagcccgcgtgtataaacagcggaagattgccgtcgtgcagccggagaagcaagttccttccagcagaaccgtgcacgaaggcctccgcaaccaggagcttaattctacagaaagcgtcatgatcaacgggaaatactgttgccccaagatctacttcaaccaccggtgcttttccggaccctatcttaataaaggcagaattgctgagctgcctcagtgtgtggggccgggaaactgcgttctcgtgctgcgcgaagtcctgacccttctcatcaatgccgcgtacaagccctctcgggtgctgagagagctgcagctcgacaaagacagcgtgtggcatggctgtggggaggttctgaaggctaagtataaaggcaagtcctaccgcgccaccgtcgaaattgtgaaaacagccgatcgggtgacggagttctgcagacaaacctgtatcaagctggaatgctgtcctaacctgtttggaccccgcatggtcctcgacaaatgcagcgagaattgttctgtgctgacaaagaccaagtatacacactactatggcaaaaagaaaaacaagcggattgggagacctcccggaggccattccaatctggcttgcgcccttaaaaaggctagcaagcggcgcaaaagacggaagaacgttttcgtgcacaaaaagaaaagatcttccgccagcgtcgataatacccctgcggggtctccccagggatccggcggggaagacgaggatgacccggatgagggcgacgatgacagcctctccgaaggatctacgagcgagcagcaggatgaactgcaagaggagtccgaaatgagcgagaagaaatcttgttccagctctcctacacagtccgaaatcagcacctctctgccccctgaccgccagcggagaaagcgcgagctcagaacctttagcttctccgatgacgaaaacaagcccccgagccctaaagagatccggattgaggtggccgaacgcctgcatcttgactctaatcccctgaagtggtccgttgctgatgtggtcagatttatccggagcacagactgcgcccctctcgctcgcattttcctggatcaggagatcgacggccaagccctgcttctcctgaccctgcccacagtgcaggaatgcatggatctcaaactggggcccgcgattaaactttgtcaccacatcgagagaattaagtttgccttctacgaacagtttgctaactga

SEQ ID NO: 3456 - RNA, 1431 nt, synthetic construct
  misc_feature 1..1431: note = CCDS4550.1 variant
  source 1..1431: mol_type = other RNA
atgagcggctcctctgccagaagctcccacctgtctcagcccgtggtcaagagcgttctcgtgtaccggaacggggaccctttctatgctggacgcagagtggtcatccatgagaaaaaggtgtcctcttttgaagttttcctgaaagaggtgaccggcggggtccaagccccgtttggagcggtgcggaatatttacacaccccgcacgggccacagaatccggaaacttgatcagattcagagcgggggaaactatgttgctggcggccaggaagccttcaaaaagctgaattacctcgacatcggggagattaagaaacgccctatggaagtggtcaacaccgaggtgaagcccgtgatccattccagaatcaatgtcagcgcccggtttcgcaaacctctgcaagagccctgcacaattttccttatcgctaacggagatctgattaatcctgcctctagactcctgatcccgcggaagaccctgaaccagtgggaccacgttctccagatggtgacagaaaagattaccctgcgctccggcgctgtgcatagactttatacactggaggggaagctcgtcgaaagcggagccgagctggagaatggccagttttacgtggcggttgggcgggataagttcaaaaagctgccctattctgaacttctctttgacaaatccaccatgcgcagacctttcggacaaaaggccagctctctgccccctatcgtgggctcccggaaaagcaagggctccgggaacgatagacactctaaaagcacggtcggatccagcgacaattctagcccccagccgctgaagcgcaagggcaaaaaggaggatgtgaactccgaaaaactcaccaagctgaaacagaatgttaaacttaagaactctcaggagacaattcctaatagcgacgaagggatctttaaggctggagccgagcggtccgagaccagaggcgctgccgaagtgcaagaggatgaagacacacaggtcgaggtgcccgtcgatcagcgccctgcggaaatcgtggacgaggaggaagacggggagaaggccaacaaagatgctgaacaaaaggaggacttctctggaatgaacggcgatctggaagaggagggcgggcgggaagccaccgacgctcccgagcaggttgaagagattctcgatcacagcgagcagcaggccagacccgcccgcgtgaatggaggcacggacgaagagaacggggaggaactgcaacaggtcaataacgaacttcagctggtgctcgataaagagcggaagtcccagggagctggcagcgggcaagacgaggcggatgttgaccctcagagaccgccccgccctgaagtgaagatcacatctcccgaggaaaatgagaacaatcagcagaacaaagattacgccgctgtcgcctga

SEQ ID NO: 3457 - RNA, 1362 nt, synthetic construct
  misc_feature 1..1362: note = BAA07903 variant
  source 1..1362: mol_type = other RNA
atgagaatccccgtggacgccagcacctcccggcgcttcacacctccgtctacggctctgagccccggcaagatgtccgaggccctccctctgggggcgcccgatgctggagccgcccttgctggcaaactgagatctggggaccggagcatggtcgaagttctcgccgatcaccctggagagctggtgcgcaccgactcccccaactttctttgctctgtgctgcctacacattggagatgtaataagaccctcccgattgctttcaaagtcgtggccctgggcgatgttcccgacgggacactggtgaccgtcatggcgggaaacgatgaaaattacagcgccgagctccggaacgctacagccgctatgaagaatcaggtggcccgctttaacgacctgagattcgttggccggtccggccgcgggaaatcttttacccttacgatcaccgtgttcacaaatcctccccaagtcgcgacctatcacagagccattaagatcacagtggatggacctcgggaaccccgcagacatcggcagaagctggacgatcagaccaaaccgggcagcctctcctttagcgagcgcctgtctgagcttgaacagctgagacggacggctatgagagtgtcccctcaccatcccgcccctacacccaacccccgcgctagcctcaatcactctaccgccttcaaccctcaaccgcagtcccagatgcaggacacacggcaaattcagcccagccctccctggtcctacgatcagtcttatcagtacctggggagcatcgcctcccctagcgtccaccccgctaccccgatctctcctgggagagcgtccggcatgaccacactgagcgccgagctctctagccgcctgtccacggctcccgaccttaccgccttttctgaccctcggcaattccccgccctgcctagcatttccgatcccagaatgcattatccgggggcttttacatacagccctacccccgttacatctggaatcggcattggcatgtccgccatggggagcgcgacccgctatcacacgtacctgccccctccgtaccccggatcttcccaggctcagggcgggcctttccaagccagctccccctcttatcatctctactatggagccagcgctggctcctaccagttttctatggtgggaggagaacggagccctcccagaatccttcctccctgcacaaatgcctccaccggcagcgctctgctcaacccgtctctgcctaatcagtccgacgtggtcgaggccgagggcagccactctaactcccccaccaatatggcgcctagcgcccgcctggaagaggctgtgtggcggccctattga

SEQ ID NO: 3458 - RNA, 1080 nt, synthetic construct
  misc_feature 1..1080: note = ACI46041 variant
  source 1..1080: mol_type = other RNA
atgcccctggagctcgaactgtgccctggcagatgggtgggaggacagcacccgtgtttcatcattgccgagatcggccaaaaccatcagggggaccttgatgtcgctaagcggatgattcgcatggccaaagaatgcggagcggactgtgctaagtttcagaaaagcgagctggagttcaagtttaatagaaaagccctcgagcggccctacacctccaagcactcttggggcaagacatatggggagcataaacgccacctggagttcagccatgatcagtacagagaacttcaacggtatgccgaagaggttggaatctttttcacggcttccggcatggacgagatggccgtggaatttctgcacgagctcaacgtgcctttctttaaggtcggctctggggataccaataacttcccctacctggagaaaacagctaagaaaggacgccctatggtgattagctccggcatgcagtctatggacaccatgaagcaggtttatcagatcgtgaagcccctgaatcctaacttttgcttcctccaatgtacaagcgcctacccgctgcagcccgaagatgtcaatcttagagtgatctccgaatatcagaaactgtttcctgacattcccatcgggtacagcggacacgagaccggcattgcgatctctgttgccgctgtggccctcggggctaaggtcctggagcggcatattacacttgataaaacctggaagggatccgaccacagcgcctctctggaacctggcgagctcgcggaactggtgcgctccgtgagactggtcgagcgggccctcggcagccccacgaaacagctgcttccgtgcgaaatggcttgtaacgagaagctggggaaatctgttgtggccaaggtgaagatccctgagggaaccattctcacaatggatatgctgaccgtcaaagtgggcgaacccaaggcttaccctcccgaggacatcttcaatcttgttgggaaaaaggtgctggtcacagtggaagaggatgacaccatcatggaagaactcgttgacaaccatgggaaaaagattaagtcctga

SEQ ID NO: 3459 - RNA, 2715 nt, synthetic construct
  misc_feature 1..2715: note = CCDS14652.1 variant
  source 1..2715: mol_type = other RNA
atgcaggccagccccctgcaaacctcccagcctacaccgcccgaggaactccacgctgccgcgtacgtgttcacgaacgacggccagcagatgagatctgatgaggtcaatctggttgctaccgggcaccaaagcaagaaaaagcactcccggaaatctaagcgccatagctcctctaaaagacggaaaagcatgtccagctggcttgacaagcaggaagatgccgccgtgacacactctatctgcgaggaacgcattaacaatggacagcctgtggctgacaacgtcctgtccaccgctcccccttggcccgatgccacaatcgcccataatattagagaggagcggatggaaaacggccagagccgcaccgacaaagtgctctctacagcgcctccgcaactggttcacatggccgctgccgggatcccctccatgagcaccagagatcttcactctacggtgacccataatattcgggaggaacgcatggagaacggacagcctcagcccgacaatgtcctgtccacaggccctaccgggctcatcaacatggctgccacacccatcccggcgatgagcgccagagatctgtatgctaccgtgacgcacaatgtttgtgagcagaagatggaaaacgtgcaacctgcccccgacaatgtcctgctcacactgcggcctcgcagaattaacatgaccgatacaggaatctcccccatgtctacccgggacccctacgctaccattacatataatgtgcctgaggaaaagatggagaagggccagccgcagcccgataacatccttagcacggcctccaccggcctgattaacgtggccggggctggaacccctgcgatcagcaccaatggcctctactctacagtcccccataacgtttgcgaagagaaaatggagaatgaccaacctcagcccaacaatgtgctgtccaccgtgcagccggtcattatctatcttacggccacagggatccctggaatgaacacccgcgaccagtacgctaccattacacacaatgtgtgtgaagagagagttgtgaacaatcaacccctgcctagcaacgccctctctaccgtcctgcccggcctggcctatctcgctacagccgatatgcctgcgatgagcacgcgggaccagcacgctaccatcattcataatctgagagaagagaagaaggataactcccagcccacaccggacaatgtgctttctgccgttacccctgaactgatcaacctcgccggggctggcattcctcccatgagcacacgcgatcagtacgccaccgtgaatcaccatgtccacgaggctcggatggagaacggacaaagaaaacaggacaacgtgctgtccaatgtccttagcggcctgatcaacatggccggggcgtctatccccgccatgtccagccgcgatctctacgctacgattacccattctgtgcgggaagagaagatggaatccggaaaaccgcagacagacaaggttatcagcaatgatgctccccagctgggccacatggccgccgggggcattccttccatgtctaccaaagacctgtatgcgacagtgacccaaaacgtccacgaggaaagaatggagaataaccagccccagcctagctacgatctctccacggtgctgcccggacttacatatctgaccgttgccgggatccctgctatgtctacacgcgaccagtacgccaccgtgacccataatgtccacgaggaaaagattaaaaacggacaagctgccagcgacaatgtgttttccacagtgcccccggccttcatcaacatggctgcgacgggcgttagctctatgtccacccgggatcagtatgccgctgtcacacataatatcagagaggaaaagattaacaatagccagcctgcccccggcaacatcctctctaccgcccctccctggctgcgccacatggctgccgcggggatttccagcacaatcacccgggacctttacgtgacggctacacactctgtgcatgaggagaagatgaccaatggacaacaggccccggataacagcctgtccaccgtccctcccggctgcattaacctcagcggggccggaatctcttgtagatccacacgcgacctgtatgctaccgtgattcacgatatccaggaagaggaaatggagaatgaccagacacctcccgatggctttctgagcaactccgactctcccgaactcatcaatatgacggggcattgcatgcctccgaacgccctggatagcttctcccacgactttacctctcttagcaaagatgagctgctctacaagcccgactccaatgagttcgcggttggcaccaaaaactactctgtgagcgctggagatcctcccgtcacagtgatgtccctggttgaaacagtgcctaatacaccccaaattagccctgccatggccaagaaaatcaacgacgacattaagtatcagctgatgaaggaggtccggagatttggccagaattacgaacggatcttcattcttctcgaggaagtgcaggggtctatgaaagttaagcgccaatttgtggagttcacgatcaaagaggctgccagatttaagaaagtcgtgctgatccagcagctggaaaaggctctcaaggagattgattcccattgtcatctgcggaaagtgaagcacatgagaaaacgctga

SEQ ID NO: 3460 - RNA, 2403 nt, synthetic construct
  misc_feature 1..2403: note = AAH01058 variant
  source 1..2403: mol_type = other RNA
atgggcagctccaagaaacacagaggggagaaggaagccgctggaaccacagccgcggctggcaccgggggagccacggagcagccccctcggcatcgcgaacacaaaaagcataaacacagatctggcgggagcggaggctccggcggggagcggcgcaagagatctcgggaacgcggaggcgagagagggagcggacggcgcggcgccgaggctgaagccagatcctctacacatgggcgggagcgcagccaagctgaaccgtccgagagacgggtgaagcgcgagaaaagagacgatggatacgaagccgcggccagctctaagacctccagcggcgacgcttcttccctgagcatcgaggaaacaaacaaactccgggccaagctgggccttaaacccctggaggtcaatgctattaagaaggaagccgggaccaaagaggagcctgttacagcggatgtgatcaaccccatggccctcagacagcgcgaagaactgcgggaaaaacttgctgccgctaaagagaagagactgctcaatcagaaactgggaaagattaaaaccctgggcgaagacgatccttggctcgacgatacggccgcctggatcgagcgctctcggcagctgcaaaaggagaaggaccttgctgaaaagagagcgaagctgctcgaggaaatggatcaggagttcggggtgtccaccctggtcgaagaggagtttggacagcgccggcaggacctttatagcgccagagatctgcaaggcctcacagtggaacacgctattgactccttccgcgagggggaaaccatgatcctgacactgaaagataagggagttctccaggaggaggaagacgtgctggtcaacgtgaatcttgttgacaaagagcgggccgaaaagaacgtggagctgagaaagaaaaagcccgattacctcccttatgccgaagacgagtctgtcgatgacctggctcagcagaaaccgcgcagcatcctttccaagtacgatgaggaactggagggcgaacggccccacagctttagactcgagcaaggcgggaccgccgacggactgcgggaacgcgagctggaggaaattagagcgaaactccggctgcaggctcagtctctttccacggtgggccctagactggccagcgagtatctcacacccgaagagatggtgaccttcaagaagacaaaacgccgggtcaagaaaatcagaaagaaagaaaaggaggttgtggtgcgcgccgatgacctgcttcctctgggggatcaaacccaggacggagattttggctctagactccgggggcgcggcagacggcgcgtcagcgaggtggaagaggaaaaggagcccgttccgcagcctctgccctccgacgacaccagagtggagaatatggatatttctgacgaagaggaaggaggcgctcctcctcccgggagcccccaggtcctggaggaagatgaggccgagctcgaactgcaaaaacagcttgagaagggacggcgcctgagacagctccagcaactgcagcagctgcgggactccggcgaaaaagtggttgagatcgtgaagaaacttgaaagccgccagagagggtgggaggaggatgaagacccggagcggaagggagctattgtcttcaacgccacatctgaattttgcagaacgctcggcgagatccccacctacgggctggcgggcaatcgcgaggagcaagaggaactgatggatttcgagcgggacgaagagagatccgccaacggaggcagcgagtctgatggggaagagaatattggatggtccacagtgaacctcgacgaagagaaacagcagcaggattttagcgcttcctctaccacaatcctggacgaggaacctatcgtcaatcgcggccttgccgctgccctgctcctgtgtcaaaacaaggggctgcttgagaccacggtgcagaaggttgcgcgggtgaaagcccccaataagagcctcccttccgctgtctattgcattgaagataaaatggccatcgacgacaagtactctagacgcgaggaataccggggattcacacaggattttaaagagaaggacggctataagcccgatgtgaaaattgaatacgttgacgagaccgggagaaagctgaccccgaaagaggctttccgccaactgagccatcggtttcacggcaagggatccggcaaaatgaagacagaaagacggatgaagaaactcgatgaggaagccctgcttaagaaaatgtctagctccgacacccctctggggacagtggccctcctgcaggagaagcagaaagctcagaagacgccctatatcgtcctgagcggatctggcaagtccatgaacgcgaacaccattacaaaatga

SEQ ID NO: 3461 - RNA, 2877 nt, synthetic construct
  misc_feature 1..2877: note = AAF00087 variant
  source 1..2877: mol_type = other RNA
atgagaacccacacacggggcgcccccagcgtgttctttatctacctgctctgcttcgtctccgcttatattacggacgagaaccctgaagttatgatcccgtttaccaatgccaactacgattctcatcccatgctgtatttcagccgcgcggaggtggctgaacttcagctgagagccgcctcctctcacgagcatattgctgcccggctcacagaagctgtgcacaccatgctgagctcccctcttgagtacctgcccccttgggaccccaaggattattctgcccgctggaatgagatctttgggaacaatctcggagcgctggccatgttctgtgtcctgtaccctgaaaacattgaggctagagacatggccaaagattatatggaacggatggctgcccaaccgagctggctcgtgaaggacgcgccctgggatgaggttcctctggcccattcccttgtgggctttgctacagcctacgacttcctgtacaattatctcagcaaaacccagcaggagaagtttctggaagtcatcgctaacgcctctgggtacatgtatgagacatcctaccgcagaggatggggcttccagtatcttcacaatcaccaacccaccaactgcatggccctgctcacggggagcctggtgctgatgaatcagggatacctccaggaggcttatctgtggaccaaacaggttcttacaatcatggaaaagtctctggtgctcctgcgggaagtcaccgatggctccctttacgagggcgtggcgtacgggagctatacaacccgctctctgtttcaatacatgttcctcgtgcagagacattttaacattaatcacttcggacatccttggctgaagcagcacttcgcctttatgtatcggacgatcctgcccggcttccagcgcacagtcgctattgccgactccaactacaattggttttatgggccggagagccaactcgttttcctggataaatttgtgatgagaaacggatccggcaactggcttgccgaccagatccggcgcaatagagtggtcgaagggcctggaaccccctctaagggccagcggtggtgtacactgcacaccgagttcctctggtacgatggcagcctgaaatccgtgcctcctcccgactttgggacccccacacttcattatttcgaagactggggagttgtgacgtacggcagcgctctgccggccgagattaacagatcttttctctccttcaagagcgggaaactgggaggccgcgcgatctacgatattgtccaccggaataagtataaggactggatcaaagggtggagaaactttaatgctggacatgaacaccccgatcaaaactctttcacctttgcccctaatggcgtgcccttcatcacagaggccctgtacggccctaagtataccttctttaacaatgttctcatgttcagccccgctgtgtccaaatcttgctttagcccgtgggtcggacaggtgacagaggactgttccagcaagtggtctaaatacaagcatgatctggccgcttcctgccaggggcgcgtcgtggccgcggaagagaaaaacggcgttgtgttcattagaggggaaggagtcggcgcctataatcctcagcttaacctgaagaatgtgcaacggaacctcatcctgctgcacccccagcttctcctgctggttgaccagattcacctcggggaggaaagccctctggagaccgctgccagctttttccataatgtggatgtcccctttgaggaaacggtggtggacggcgttcacggagctttcatccgccagcgggatggcctttacaagatgtattggatggacgatacagggtactccgagaaagccacctttgcgagcgtcacctaccctagaggatatccctacaacggcacaaactatgtgaatgtgaccatgcatctgcgctccccgattacacgggccgcttacctcttcatcgggccttctatcgacgtccaatcttttacggtgcacggagactcccagcagctggatgttttcattgccacctctaagcacgcttatgccacatacctgtggaccggcgaagccacagggcagagcgcttttgcgcaagtgatcgccgacagacataaaattcttttcgatcgcaactccgctatcaagagctctattgtccccgaggtgaaagactatgccgccatcgttgagcagaatctccagcacttcaagcccgtgtttcagctgctggaaaagcaaatcctctcccgggtcagaaacaccgctagcttccggaaaacggccgagcgcctgcttagattttctgataagcggcagaccgaagaggcgattgacagaatcttcgctatttcccagcaacagcagcagcaaagcaaatctaagaaaaatcgccgggccggcaagagatacaagtttgtggatgccgttcctgacatcttcgctcagattgaagtgaacgagaaaaagatccgccagaaagcccagattctggcgcaaaaggagctcccgatcgatgaagacgaggaaatgaaagatctgctggactttgctgatgtcacatacgagaagcataagaatggaggccttatcaaagggagattcggacaggcccggatggtgaccacaacccacagccgcgccccctccctcagcgcttcttatacgagactgtttctgattctcaacatcgccattttctttgtgatgctggctatgcagcttacatacttccagcgggcccaatccctgcatggccagcgctgtctctatgcggtcctgctgatcgacagctgcattcttctctggctgtactcctcttgtagccagtcccaatgctga

SEQ ID NO: 3462 - RNA, 2892 nt, synthetic construct
  misc_feature 1..2892: note = AAH93784 variant
  source 1..2892: mol_type = other RNA
atggccaccgctgccgagacaagcgcgtccgaacccgaggctgaatctaaggccggccctaaagccgacggggaggaagatgaggtgaaggctgccagaacgcggcgcaaagtcctgagcagagctgttgccgcggccacctacaagacaatgggaccggcttgggaccagcaagaggaaggcgtgtccgagtctgatggggacgaatatgccatggctagctccgccgagtctagccccggagagtacgaatgggagtatgatgaagaggaagagaaaaaccagctcgagatcgaacggctggaggaacagctttccattaatgtgtacgactataactgccacgtcgatctgatccgcctcctgagacttgagggcgaactgaccaaggtgcggatggcgcgccagaagatgagcgagattttccctctcacagaggaactgtggctggagtggctccatgacgaaatctctatggcccaagatgggctggacagagagcacgtttacgatctttttgaaaaagctgtgaaggactatatttgtcccaatatctggctggagtacggacagtactccgtcggcggcatcgggcagaaaggaggcctcgagaaggtgcggagcgttttcgaacgcgccctgtcttccgtggggcttcatatgaccaaaggactggctctctgggaggcctatagagaatttgagagcgccattgtcgaggctgcgcggctggaaaaggtgcactctctgttccgcagacagctcgccatccctctgtacgatatggaggctacatttgccgaatatgaggaatggtccgaggaccccattcctgagagcgtgatccaaaactacaataaggcccttcagcagctggaaaaatataagccgtacgaggaagctctcctgcaggccgaggcgccccggcttgctgaatatcaagcctacattgacttcgagatgaaaatcggcgatcctgcccgcattcagctgatctttgagagagctctcgtcgaaaactgcctggttcccgacctgtggatccggtactcccagtatctcgatagacaactgaaggtgaaagaccttgtgctgtctgtccataatcgcgccattcggaactgtccttggaccgtggctctctggagcagatacctgcttgccatggagcgccacggggttgatcaccaggtgatctccgtcacgttcgaaaaggcgctgaatgccggatttattcaggctaccgactatgtggagatctggcaggcctacctcgattatctgcggagacgcgttgacttcaaacaagatagctctaaggaactggaggagctccgggctgcctttacaagagcgctggaataccttaagcaggaggtggaagaacgcttcaacgagtccggcgaccccagctgcgtcattatgcagaattgggcccggatcgaagctagactgtgtaacaatatgcagaaagcccgcgagctctgggattctatcatgacccggggcaacgctaagtatgccaatatgtggctggaatactacaacctggagagagcccatggggacacacaacactgccggaaagcccttcatcgcgcggtgcagtgtaccagcgactatccggaacacgtctgcgaggtgctcctgacgatggagagaacagaaggatccctggaggattgggacattgccgttcagaagaccgaaacacggctcgctagagtgaacgagcagcgcatgaaagccgccgaaaaggaggctgccctggtccaacaggaggaagagaaggcggaacagcggaaaagagctcgcgccgagaagaaagcccttaagaaaaagaagaaaatcagaggccctgaaaagcgcggggctgatgaggacgatgagaaagaatggggagacgatgaggaggagcagccctctaagcggagacgggtggagaatagcattcctgccgcgggcgaaacccaaaacgttgaggtggctgccgggcccgccggaaaatgtgctgccgtcgacgtggaacccccttccaagcagaaggagaaagctgccagcctgaagcgcgatatgccgaaagtgctccacgactcttccaaggatagcatcaccgtttttgtctctaatctgccctactccatgcaggaacctgacacaaaactgagaccccttttcgaggcgtgcggcgaggtggtgcaaattcggcctatcttcagcaaccgcggcgattttagagggtattgttacgtcgagttcaaggaagaaaaatccgccctccaggctctggagatggaccggaagtctgtggaaggacgccccatgtttgttagcccgtgcgtggacaagtccaaaaatcctgatttcaaggtctttagatattctacgagcctggagaaacataaactcttcatctccggcctgccctttagctgcaccaaggaggaacttgaggaaatttgtaaggcccacgggacagtgaaggacctgcggctcgttaccaacagagctggaaaacctaagggcctggcctacgtggagtatgaaaatgagtctcaggcctcccaggctgtcatgaaaatggatgggatgacaatcaaggagaacattatcaaagtggcgattagcaatccccctcaacgcaaggttcccgaaaagccggagacccggaaagcccctggcggacccatgctgcttccccagacgtacggcgctagagggaagggacgcacacagctctctctgctgcctcgggccctccagagaccgtccgccgctgctccccaagcggaaaacggccctgctgccgcccccgctgtggccgcgcctgctgccaccgaggcccccaaaatgagcaatgctgacttcgccaagctgtttcttcgcaaatga

SEQ ID NO: 3463 - RNA, 2283 nt, synthetic construct
  misc_feature 1..2283: note = AAC51668 variant
  source 1..2283: mol_type = other RNA
atgaagacctgggtgaaaatcgtcttcggcgttgccacaagcgctgtgctggccctcctggtgatgtgcattgtccttagaccctcccgggtgcacaactctgaggaaaatacgatgcgcgcgctgaccctcaaggacatcctgaacgggacatttagctacaaaaccttctttcctaattggatttccggacaggagtatcttcatcaatctgctgataacaatatcgttctgtacaacattgaaacaggccagagctataccatcctctccaatagaacaatgaagtctgtgaacgccagcaattacgggctgtccccggaccggcagttcgtctatctggagagcgattactctaaactctggcgctattcctacaccgccacgtactatatctacgacctgagcaacggagaatttgtgagaggcaatgagcttccccggcctattcagtatctgtgttggtctcccgttgggtccaagctcgcttacgtgtatcaaaacaatatctacctgaagcagcgccctggagatccccctttccagattacctttaacggcagagagaataaaatcttcaacggcattccggactgggtctatgaagaggaaatgcttgccacaaagtacgctctgtggtggagccccaacgggaaatttctcgcctacgcggagttcaatgataccgacatccctgtgattgcctattcttactatggagatgagcagtacccccggacaatcaacatcccttatcccaaggctggcgccaaaaatccggtggtccgcatttttatcattgacaccacgtaccctgcttatgttgggccccaagaagtgcctgtgcccgccatgatcgcgtccagcgattactacttctcctggctgacatgggtcaccgacgagagagtgtgcctgcagtggctcaagcgggttcagaacgtgtctgtcctgagcatttgtgattttcgcgaagactggcagacatgggactgccccaagacccaagagcacatcgaagagtccagaaccggatgggccggcgggttcttcgtgagcacacctgtgttttcttatgatgctatctcctactataaaattttcagcgacaaggatggatacaaacatatccactatattaaggacacggttgagaatgccatccagattacctctggcaaatgggaagctatcaacatctttcgggtcacacaggatagccttttctactcctctaatgagtttgaagagtatccgggccgcagaaacatttaccggatcagcattgggtcctatccccctagcaagaaatgtgtgacctgccatctgagaaaggaacgctgtcaatactacacagcctctttctccgactatgccaagtactatgctctcgtctgctacggacccggcatccctattagcaccctgcacgatgggcggacggaccaggagatcaaaattcttgaggaaaataaggagctggaaaacgcgctcaaaaatatccagctgcccaaggaggaaatcaaaaagctggaggtggatgagattacactctggtataagatgatcctgccgcctcagtttgacagatctaaaaagtacccccttctgattcaagtttacggaggcccttgttcccagagcgtgcgctccgtcttcgccgtgaactggatctcttatctcgctagcaaagaagggatggttattgccctggtggatggacggggcaccgcctttcagggcgacaagctcctgtacgctgtctatagaaaactcggggtgtacgaggtggaagaccagatcaccgccgttcgcaagttcatcgagatgggatttattgatgagaagcggatcgcgatttggggctggtcctatgggggatacgtctctagcctggctctggcctccggcacagggcttttcaaatgcggcatcgccgtggctcccgtgagctcttgggaatattacgcctccgtctacaccgagagatttatgggactgcctacaaaggacgataatcttgaacactataaaaacagcacggtgatggctcgcgccgagtacttccggaatgttgactatctgctcattcatggcaccgcggatgacaacgtgcacttccaaaactctgcccagatcgctaaggccctggtcaatgctcaggtggattttcaggccatgtggtactccgaccaaaaccatgggctgagcggactttctacaaatcacctctatacccacatgacacatttcctgaaacagtgttttagcctgtccgattga

SEQ ID NO: 3464 - RNA, 1128 nt, synthetic construct
  misc_feature 1..1128: note = CCDS32839.1 variant
  source 1..1128: mol_type = other RNA
atggacgccctgcagctcgctaacagcgccttcgcggtggatctgtttaagcaactttgcgagaaagaacccctgggcaatgtcctcttctcccctatctgtctgtctaccagcctttccctggctcaggttggggccaagggagacacagccaacgagattggccaggtgctccactttgaaaatgtgaaagatgtcccgttcgggtttcagacggtgacctctgacgttaacaagctgagctccttctactctctgaaactcatcaagagactgtatgtggataagagccttaatctgtccacagagtttattagctctaccaaacggccctacgctaaggaactcgagacagtcgacttcaaagataagctggaggaaaccaaaggacaaatcaacaattccattaaggaccttacagatggccattttgagaacatcctggccgacaatagcgtgaacgatcagaccaagatcctcgttgtgaatgctgcctatttcgtcgggaaatggatgaagaaattttctgaatccgagacgaaggagtgccctttccgcgtgaacaaaaccgacacaaagcccgtgcagatgatgaatatggaagcgaccttttgtatgggaaacattgatagcatcaattgcaaaattatcgagctgcctttccagaacaagcacctgtctatgttcattctcctgcccaaggacgtcgaagacgagtccacaggccttgagaaaatcgaaaagcaactgaacagcgagtccctctctcagtggaccaatcctagcacgatggccaacgctaaagttaagctgtccattccgaaatttaaggtggaaaagatgatcgatcccaaagcctgtcttgagaatctgggcctcaagcatatcttcagcgaagacacatctgatttttccgggatgagcgagaccaaaggagtggctctgtctaacgtcattcacaaggtgtgcctggaaatcacagaggacggcggggatagcattgaggttcctggagccagaatcctccagcataaagacgaactgaatgcggatcaccccttcatttacatcatccggcacaacaagacccgcaatattatctttttcggcaagttttgttccccttga

SEQ ID NO: 3465 - RNA, 1002 nt, synthetic construct
  misc_feature 1..1002: note = AAH06564 variant
  source 1..1002: mol_type = other RNA
atggcctgcagcagacccccttcccagtgtgagccgacctctctgccccctgggccccctgctggccggcgccacctccccctgagcagacggcgcagagaaatgtcctctaacaaggagcaacggagcgccgtgttcgtcatcctttttgcgctgattacaatcctcattctgtactcctctaatagcgctaacgaagttttccattatggatcccttcgcggcagaagccggcgccctgtgaatctgaaaaagtggtctatcacggacgggtacgtgccgattctcggaaacaaaaccctgccctccagatgccaccagtgtgtcatcgtgtctagctccagccatctgctcggcacaaagctggggcctgagatcgaacgggccgagtgcaccattcgcatgaatgatgcccccacaaccggatattctgctgacgttggcaacaaaacaacctacagagtggtcgcccactccagcgtgtttcgggttcttcgcagacctcaggagttcgtgaatcggacgcccgaaaccgtctttatcttctggggcccgccttccaagatgcagaagccccaagggtctctggtgagagtgattcagcgcgctggactcgtctttcctaacatggaggcctatgcggttagccccggccggatgagacagttcgatgacctgtttcgcggggaaacaggaaaagatcgggagaagtcccatagctggctttctaccggctggttcacaatggtgatcgccgtggagctgtgtgaccacgtccacgtgtacgggatggttccccctaattattgctcccagagaccgcgcctccaacggatgccctaccattactatgaacctaaaggacccgatgagtgtgtgacctacattcagaacgaacacagcagaaagggcaatcatcaccgctttatcacggagaaacgggtcttctctagctgggctcagctgtatggcattacattttcccacccttcttggacctga

SEQ ID NO: 3466 - RNA, 1071 nt, synthetic construct
  misc_feature 1..1071: note = AAC37586 variant
  source 1..1071: mol_type = other RNA
atgagcccctgcggcagagcccggcgccagacctccagaggggctatggccgtgctggcgtggaagttccctcggacacgcctcccgatgggagcttctgccctgtgtgtcgttgtgctttgctggctgtacatctttcccgtgtatagactccctaacgagaaagaaattgtccaaggcgtgctgcagcaggggacggcctggcggcgcaatcagaccgctgccagagctttccggaagcaaatggaggactgttgcgatcccgcccacctttttgcgatgacaaaaatgaacagccctatgggaaagtccatgtggtacgacggcgagttcctgtattcttttaccatcgataatagcacatactccctcttcccccaggccaccccttttcagctgccgctgaaaaagtgtgctgttgtggggaacggaggcattctcaagaaatctggctgcgggcgccagatcgacgaagccaatttcgtcatgagatgtaacctgccccctcttagctccgaatatacaaaggatgtgggaagcaaatctcaactggttaccgctaatccctccattatccggcagcgctttcagaacctcctgtggagcagaaagacgttcgtggacaatatgaaaatctacaaccattcttatatttacatgcctgccttttccatgaagaccggcacagagcccagccttcgggtctactataccctgtctgatgtgggggcgaatcagacagtcctcttcgccaacccgaattttctgcgctccatcggaaagttctggaaaagcagaggcattcacgctaagcggctgtccaccggactcttcctggtgtctgccgctcttgggctgtgcgaggaagttgccatctacggcttttggcctttcagcgtgaacatgcatgagcaacccatttcccaccattattacgacaatgtgctcccttttagcggcttccacgccatgcccgaagagtttctgcagctttggtatctgcacaaaatcggggctctcagaatgcagctggatccctgtgaggacacgtctctgcaacctacatcctga

SEQ ID NO: 3467 - RNA, 1257 nt, synthetic construct
  misc_feature 1..1257: note = BAG50894 variant
  source 1..1257: mol_type = other RNA
atgagaaccaaggccgctggctgcgccgaacggcgccccctgcagcctagaacagaagcggctgccgccccggctgggcgggccatgcccagcgagtacacgtatgtgaaactccgctccgactgttctagacctagcctgcaatggtacacccgggctcagtccaagatgcgcagaccctctcttctgctcaaagatatcctgaagtgcacacttctggtcttcggagtttggattctctatatcctgaaactgaactacaccacagaagagtgtgacatgaagaagatgcactatgtggatcctgaccatgtgaaacgggcccagaagtacgcgcagcaagtcctccagaaagaatgccgccccaagtttgccaaaaccagcatggctctgcttttcgagcacagatattccgtggatctgctcccttttgttcagaaggccccgaaggactctgaggctgaaagcaaatacgatccccctttcggctttcggaagttctccagcaaagtgcagacactgcttgagctgctccccgaacatgacctgcctgagcacctgaaggccaaaacctgtcgcagatgcgtcgtgattgggtctggaggcatcctccatgggctggagcttggacacacgctgaatcaatttgatgttgtgattcggctcaactccgcgcccgtcgaaggctacagcgagcacgtgggcaataagaccacaatccgcatgacctatccggaaggggcccctctgtctgaccttgagtactattccaacgatctgttcgtggctgtcctctttaaaagcgttgacttcaattggctgcaggccatggtgaagaaggaaacactgcccttttgggtgagactcttcttttggaaacaggtcgctgagaagatccctctgcagcccaaacatttccggattcttaaccccgtgatcattaaggagaccgccttcgatatcctgcaatactctgaacctcagtccagattttggggacgcgacaaaaatgttccgacgattggcgtgatcgccgtcgtgctcgctacacacctgtgtgacgaggttagccttgcggggttcggatatgatctgaaccagccccggacccctctccattactttgactcccaatgcatggccgctatgaatttccagacaatgcacaacgtgaccaccgaaacaaagtttctgctgaagctcgtcaaagagggcgtggtcaaggatctgtctgggggaattgacagagagttctga

SEQ ID NO: 3468 - RNA, 1059 nt, synthetic construct
  misc_feature 1..1059: note = EAW56837 variant
  source 1..1059: mol_type = other RNA
atggacttcctgagaaacctctttagccagaccctgtcccttggctctcaaaaggagcggctgctcgatgaactgacacttgagggggtggcccgctacatgcagagcgaaagatgccggcgcgtcatctgtctggttggagctggcatttccacgtctgccgggatccccgacttcagaagcccttccaccggactctatgataatctggagaaataccatctgccgtatcccgaagcgatttttgagatctcttacttcaagaaacaccctgagccctttttcgctctcgccaaggaactgtatcctggccagtttaaacccacaatttgccactacttcatgcggcttctgaaggacaaggggctcctgcttcgctgttatacccagaacatcgatacactggagagaatcgccggactcgaacaagaggacctggtggaggctcatggcaccttttacacaagccactgcgtgtccgccagctgtcggcatgaataccctctgtcttggatgaaagagaagattttctccgaagtcaccccgaaatgcgaggattgtcagagcctcgtgaagcccgacatcgtgtttttcggcgaatctctgcctgctcgctttttctcctgcatgcagagcgatttccttaaagttgacctgctcctggtcatggggacgtctcttcaggtgcaaccctttgcctccctgattagcaaggcgcctctctccacccccagactgctgatcaataaggagaaagccggacagtctgatccgttcctcggcatgattatggggctgggaggcgggatggactttgatagcaagaaagcctatcgggacgttgcttggcttggagagtgtgaccagggctgcctggctctcgccgaactgcttggctggaagaaagagctggaagatctcgtgcgcagagagcacgcgtccatcgacgcccagagcggggctggagtccctaacccctctacatccgccagccctaagaaatctccccctcccgctaaggatgaagcccggaccacagagcgcgagaagccgcaatga

SEQ ID NO: 3469 - RNA, 1170 nt, synthetic construct
  misc_feature 1..1170: note = AAD40850 variant
  source 1..1170: mol_type = other RNA
atggccgagcccgaccctagccacccgctggaaacccaggctggcaaggtgcaagaggcccaggattccgactctgatagcgaagggggagcggctggcggggaggccgacatggatttcctcagaaacctgttttcccagacactttctctgggaagccagaaagaacggctcctggacgagcttacgctggagggcgtcgcccgctacatgcaatccgaaagatgccggcgcgttatctgtctcgtgggggctggaatttctaccagcgccggcatccccgatttcagatcccctagcacaggcctgtatgacaatctggagaagtaccatctcccctatcctgaagctatttttgagatctcttacttcaaaaagcaccccgagccgtttttcgccctggcgaaagaactttatcctgggcagtttaagcccaccatttgccattacttcatgcggctgctcaaggataaaggactgcttctgcgctgttatacacagaacatcgacaccctcgagagaatcgccggcctggaacaggaggatctggtggaagctcacgggacattttacacctcccattgcgtcagcgcctcttgtcggcacgagtaccctctctcctggatgaaggagaaaattttcagcgaagtgacgcccaagtgcgaggactgtcaatctctggttaaacctgatatcgtgtttttcggagaatcccttcccgctcgctttttcagctgcatgcagtccgacttcctgaaggtcgacctcctgcttgtgatgggcacctctctgcaggttcagccgtttgccagcctcatttccaaggcgcctctgagcacacccagactgctcatcaataaagagaaggccgggcaatctgatcctttcctgggaatgattatgggccttggcgggggaatggactttgattccaaaaaggcttatcgggacgtggcctggctgggcgaatgtgatcaggggtgcctcgctctggccgagcttctgggatggaaaaaggagctcgaagacctggtccgcagagagcacgccagcatcgatgctcagtctggcgcgggggtgcccaaccccagcacctccgcctctcctaaaaagagcccgccccctgctaaggacgaagcccggacaaccgagcgcgaaaaaccccaatga

SEQ ID NO: 3470 - RNA, 1401 nt, synthetic construct
  misc_feature 1..1401: note = AAH02824 variant
  source 1..1401: mol_type = other RNA
atggccgaggaacaggacctgagcgaggtggaactctcccccgtcggctctgaggaacctagatgcctgagcccggggtccgctccctctcttggacctgatggcgggggaggcgggagcggactgcgggcctcccccggccctggcgagctcgggaaggttaaaaaggagcaacaggacggagaagcggatgacgataaattccccgtgtgtatccgcgaggctgtgtctcaggtcctgagcggctacgactggacccttgtgcctatgccggttagagtgaacggggcctccaagagcaaaccccacgtcaagcggcctatgaatgcctttatggtgtgggctcaggccgctcgcagaaagctggccgatcaatatccccatctccacaacgcggaactgtctaaaacactgggaaagctctggcggctgcttaatgagtccgacaaacgccctttcattgaggaagccgagagactgcggatgcagcataagaaagatcaccccgactacaagtatcagccgcgcagacggaagaacggcaaagctgcccagggggaagctgagtgccctggaggcgaagccgagcaaggcgggacggcggccatccaggctcattacaagagcgcccacctcgatcaccgccatcccggagagggctctcctatgtccgacgggaatcccgaacaccccagcggacagtctcatggccctccgacaccccctaccacccccaaaacagagctgcagtccgggaaggctgatcctaaaagagacggacggagcatgggcgaaggcgggaagccccacattgactttggaaacgttgatatcggcgagatttcccacgaagtgatgtctaatatggagaccttcgacgtcgccgagcttgatcaatatctgccgcctaacgggcatcccggacacgtgagctcctacagcgccgctggctatgggctcggctctgcgctggccgtggcttccggacatagcgcctggatctctaaacctcccggcgtcgccctgcctacagttagcccgcccggggtggacgctaaggcccaggtgaagaccgaaacggcgggacctcagggccctccccactacaccgatcaaccctccacatctcagatcgcttacaccagcctctccctgccgcattatgggagcgcctttccctctatttcccgccctcagttcgactacagcgatcaccagccctctggaccttattacggccactccgggcaagccagcggcctttattccgctttttcttacatgggacccagccagagacctctgtatacagccatctccgacccctctccgagcggccctcagtcccatagccccacccactgggagcagcctgtctacacgacactctctcggccctga

SEQ ID NO: 3471 - RNA, 456 nt, synthetic construct
  misc_feature 1..456: note = AAH32457 variant
  source 1..456: mol_type = other RNA
atgagcatccccttctccaacacccactaccggattcctcagggctttgggaatctgctcgagggactgacaagagaaatccttcgcgagcaaccggacaacattcccgccttcgctgccgcgtattttgaatctctgctcgagaagagagagaaaacgaatttcgatcctgctgagtggggcagcaaggtggaggaccggttttacaacaatcatgccttcgaagaacaggaaccccctgagaaatccgatcccaagcaggaggaatctcagatcagcgggaaagaggaagagacctccgtcacaattctggactctagcgaagaggataaggagaaggaagaggttgccgctgtgaaaatccaagccgcttttcgcggacacatcgccagagaagaggcgaagaaaatgaagaccaactcccttcagaatgaagagaaagaggaaaacaagtga

SEQ ID NO: 3472 - RNA, 294 nt, synthetic construct
  misc_feature 1..294: note = AAF28420 variant
  source 1..294: mol_type = other RNA
atggacaagcagagctccgccggcggggtgaaaagatctgtcccctgcgatagcaacgaggctaatgaaatgatgcctgagaccccgacaggagactccgatccccaacctgcccccaagaaaatgaagacgtctgaaagctccaccatcctggttgtgcggtaccgcagaaacttcaaacggacatctcctgaggaactcctgaatgaccacgcgcgcgagaacagaattaatccccttcagatggaggaagaggaatttatggagatcatggtggagattcctgctaagtga

SEQ ID NO: 3473 - RNA, 426 nt, synthetic construct
  misc_feature 1..426: note = AAH62750 variant
  source 1..426: mol_type = other RNA
atggagcagcccaccagctccacaaacggcgaaaagacgaaatctccttgcgagagcaataacaagaaaaatgacgaaatgcaagaggtgccgaacagagtcctggcccccgaacagtccctcaagaaaaccaagacatctgagtaccctatcattttcgtttattacctgcggaaggggaaaaagatcaatagcaaccagcttgagaatgaacagtcccaagagaactctattaatcccatccagaaagaagaggatgagggagtggacctgagcgaaggctccagcaacgaggatgaagacctcgggccttgtgagggaccctctaaggaagataaagacctggattccagcgaggggtcttcccaggaggacgaagatcttggcctgagcgagggatcttcccaggacagcggcgaagattga

SEQ ID NO: 3474 - RNA, 567 nt, synthetic construct
  misc_feature 1..567: note = AAH01003 variant
  source 1..567: mol_type = other RNA
atgaacggcgacgataccttcgccaagagaccccgggacgatgctaaagccagcgagaagcgctccaaagcgtttgacgatatcgctacatacttctctaagaaagaatggaagaagatgaaatatagcgagaagatttcctacgtgtatatgaaaagaaattacaaggccatgacgaaactggggtttaaggtcaccctccctccgttcatgtgcaacaagcaggccacagactttcaaggaaatgatttcgacaacgatcacaatcggcgcatccaggttgaacatccccagatgacctttggcagactgcaccggattatccctaaaattatgcccaagaaacctgctgaggacgaaaacgattctaagggggtgagcgaggcctccggaccccagaatgacggcaaacaacttcatcctccggggaaggctaacatctctgagaaaatcaataagcgcagcggacccaagagaggcaaacacgcctggacacatcggctgcgcgaaagaaagcagctcgtgatttatgaggaaatctccgatcctgaggaggacgacgaatga

SEQ ID NO: 3475 - RNA, 567 nt, synthetic construct
  misc_feature 1..567: note = AAH16957 variant
  source 1..567: mol_type = other RNA
atgaacggcgacgatgccttcgctagacggcccaccgtgggggcccagatccctgagaagattcaaaaagcgtttgacgatatcgctaagtacttcagcaaagaagagtgggaaaagatgaaagcctccgagaagatcttttatgtctacatgaagcgcaaatatgaagccatgacaaagctgggattcaaagctacgctcccgccctttatgtgcaataagagagccgaggacttccagggcaacgatctggacaatgatcctaaccgggggaatcaggttgagcgcccccagatgacctttggaagacttcaaggcatttctcctaaaattatgcccaagaagcctgctgaagaggggaacgacagcgaagaggtgccggaggcctccggaccccagaatgatggcaaagaactgtgtcctcccggcaagcctacaacctctgagaaaatccacgaacggagcgggcccaagcgcggagagcatgcgtggacacacagactccgggaacgcaaacagctggtgatctacgaggagatttccgacccggaagaggatgacgaatga

SEQ ID NO: 3476 - RNA, 567 nt, synthetic construct
  misc_feature 1..567: note = AAC05819 variant
  source 1..567: mol_type = other RNA
atgaacggcgacgataccttcgccagacggcccacagtgggggctcagatccctgagaagattcaaaaagcctttgacgatatcgcgaagtacttcagcaaagaagagtgggaaaagatgaaagtctccgagaagattgtttatgtgtacatgaagcgcaaatatgaagctatgacgaagctgggatttaaagccatcctcccgtctttcatgagaaataagcgggtgaccgactttcagggcaacgatttcgacaatgatcccaaccgcgggaatcaggtccagagacctcaaatgacatttggacggctgcagggcattttccccaaaatcatgcctaagaagcccgccgaggaggggaacgtgagcaaagaagttcctgaggcttccggaccgcagaatgacggcaagcagctttgccctcccggcaaacccaccacatctgaaaagatcaacatgattagcgggcctaaacgcggagagcacgcctggacccatagactgcgggagcgcaagcaactcgtgatctacgaagagatttccgatcccgaagaggacgatgaatga

SEQ ID NO: 3477 - RNA, 567 nt, synthetic construct
  misc_feature 1..567: note = AAC05820 variant
  source 1..567: mol_type = other RNA
atgaacggcgacgatgccttcgctagacggccccgcgacgatgcccagatcagcgagaagctgagaaaagcgtttgacgatattgctaagtacttctccaaaaaggaatgggagaaaatgaagtctagcgaaaagatcgtgtatgtctacatgaaactcaattatgaggttatgaccaagctggggtttaaagtgacacttcctccgttcatgcggtccaagcgcgccgccgactttcacggaaacgatttcggcaatgacagaaaccatcggaatcaagtggaacgcccccagatgacgtttgggtctctgcagagaattttccctaaaatcatgcccaagaagcctgctgaggaggaaaacggactcaaagaggtccccgaagccagcggccctcagaatgatgggaagcaactgtgcccgcccggaaacccttccacccttgagaaaattaataagacatctggccccaaacggggcaagcacgcttggacccatcgcctgagagagcggaaacagctcgtggtttacgaagagatcagcgaccctgaagaggatgacgaatga

SEQ ID NO: 3478 - RNA, 888 nt, synthetic construct
  misc_feature 1..888: note = CCDS32420.1 variant
  source 1..888: mol_type = other RNA
atggagctgatccaggacaccagcagaccccctctcgaatacgtgaagggcgtcccgctgattaaatatttcgccgaggctcttgggcccctgcaatcctttcaggcccggcctgatgacctcctgatctctacataccccaagagcggaacgacctgggtttcccagattcttgatatgatctatcagggcggggacctggaaaaatgccaccgcgcgcctattttcatgagagtgccctttctcgagttcaaggctcctggaatcccgtctggcatggaaacactgaaagatacccccgcccctcggctgctcaagacacatctgccccttgccctgctccctcaaaccctgcttgaccagaaggtgaaagtcgtgtacgttgctcgcaacgccaaggatgtggctgtcagctattaccacttttatcatatggccaaagtgcaccccgagccggggacatgggactccttcctggagaagtttatggttggagaagtgtcttacggcagctggtaccagcatgtccaggagtggtgggaactctccagaacccaccctgtgctgtatctgttctacgaggatatgaaagagaatcccaagcgggaaatccaaaagattctcgagtttgtgggccgcagcctgcctgaagagacggtcgacttcgttgtgcagcacacctcttttaaagaaatgaagaaaaaccccatgacaaattataccacagtgccccaggagttcatggatcattccatcagcccttttatgagaaaggggatggcgggagactggaaaaccacgttcacagtcgcccagaacgagcggttcgatgctgactacgccgaaaagatggctggctgttctctttcctttcgcagcgagctgtga

SEQ ID NO: 3479 - RNA, 3807 nt, synthetic construct
  misc_feature 1..3807: note = CCDS43990.1 variant
  source 1..3807: mol_type = other RNA
atgatcgccgctcccgagattcctaccgacttcaacctgctccaggaaagcgagacacacttttcctctgatacggacttcgaagatatcgagggcaagaatcaaaaacaggggaagggaaaaacctgcaagaaaggcaagaaggggccggccgaaaaaggaaagggcgggaacggaggcggcaaaccccctagcgggcccaatagaatgaacggacatcaccagcagaatggcgtggagaacatgatgctgtttgaggtcgttaagatggggaaatccgcgatgcaatctgtggtggacgattggattgaaagctacaagcatgaccgggatatcgcccttctggacctcattaatttctttatccagtgttccggatgcaagggcgtcgtgacagctgagatgttccgccacatgcagaactctgaaatcattagaaaaatgaccgaggagtttgatgaagacagcggggattatcctctgacaatggccggaccccagtggaagaaattcaagtccagcttttgtgagttcatcggcgttcttgtgcggcaatgccagtactctattatctatgacgaatacatgatggataccgtcatttccctgctcacaggcctgagcgactctcaggtgcgcgcttttagacatacctccacgctggccgctatgaaactcatgaccgccctggttaatgtggcgcttaacctgagcatcaatatggacaacacacagcggcaatatgaggccgaacgcaataagatgattgggaaaagagctaacgagcggctcgagctgcttctgcagaagcgcaaggaactccaggagaatcaagatgaaatcgagaacatgatgaacgccatcttcaaaggagtctttgtgcacagataccgggacgctattgccgaaatccgcgcgatttgtatcgaggagattggcatctggatgaagatgtattctgatgccttcctgaatgactcctacctgaaatacgtggggtggaccatgcacgataagcagggagaagtcagactcaaatgcctgacagcccttcagggcctgtattacaacaaggagctcaatagcaagctggaacttttcacctcccggtttaaagaccgcatcgtttctatgacgctggataaggagtatgacgtggctgtgcaggctattaaactcctgacactggtcctccaaagctccgaagaggtgctgaccgccgaggattgtgaaaacgtttaccatcttgtgtatagcgcccacagacctgtcgctgtggcggccggggagttcctgtacaagaaactcttttctcggagagacccggaagaggatggaatgatgaagcgccggggcagacagggccccaatgctaacctggttaagacacttgtgttctttttcctggagtccgaactccatgagcacgccgcctatctggtcgacagcatgtgggactgcgctaccgaactgctcaaagattgggagtgtatgaatagcctgcttctggaagaacctctcagcggggaggaagccctgaccgaccgccaggagtccgcgctgatcgaaattatgctttgcacaatccggcaggctgccgagtgtcatccccctgtgggaagaggcacggggaagcgcgtcctcaccgccaaagaaaagaaaacacaactggatgaccggaccaagattacagagctgtttgctgtggccctcccccagctgcttgctaagtactctgttgatgccgagaaagtgaccaacctgctccagctgccgcagtacttcgacctggaaatctatacgacaggaagacttgagaagcacctcgatgcgctgctgcgccaaatccggaatattgtcgaaaaacacaccgacaccgatgtgctcgaggcctgcagcaagacataccatgctctgtgcaacgaagagtttaccatcttcaatagagttgacatttcccgcagccagcttatcgatgagctggccgacaaatttaaccggctcctggaagatttcctgcaggagggcgaggagcctgacgaggacgatgcttatcaggtgctttctacactcaagagaattacggcctttcacaatgcgcatgacctgtccaaatgggatctgttcgcctgtaactacaagctcctgaagaccgggatcgaaaatggcgacatgcccgagcaaattgtcatccacgcccttcagtgcacacactatgtgatcctgtggcagctcgctaaaattaccgaatcttcttccacaaaggaggatctgctgcggcttaaaaagcaaatgcgcgtgttctgtcagatctgccagcattacctcaccaacgttaacacgaccgtcaaagaacaggcttttacaattctgtgtgacatcctgatgattttcagccaccaaatcatgtccggaggcagagatatgctcgagcctctggtgtatacccccgactctagccttcagtccgagctgctctcttttatcctggatcatgtgttcattgaacaggacgatgacaataacagcgccgatgggcagcaagaggacgaagcctccaagatcgaggctctgcacaagcggagaaatcttctggcggccttttgcaaactcattgtctacacagtggttgaaatgaacaccgctgccgacatcttcaagcagtacatgaaatattacaatgattatggagacattatcaaggagacgatgagcaaaacacgccagatcgataagattcagtgtgccaagaccctgatcctctctctgcaacagctttttaacgagatgattcaggaaaatggctacaacttcgaccggtccagctctacattttccgggatcaaagagctggctagacgcttcgccctcacctttggactggatcaactgaagaccagagaagcgattgctatgcttcacaaagacggcatcgagttcgcctttaaggaacccaatcctcagggggagagccatccgcccctgaacctcgccttcctggatatcctctctgagttcagctccaaactgcttcggcaggacaagcgcacagtgtatgtctacctggaaaagtttatgacgttccagatgagcctcagacgggaggatgtgtggctgcctctgatgtcttatcgcaattcccttctggctggcggagacgatgacaccatgagcgttatttccggcatctctagcagagggtccacagtgcggtctaaaaagagcaaaccctccaccggaaagcgcaaagtcgtggaaggcatgcaactctctctgacagaggagagctccagctctgactccatgtggctcagcagagaacagaccctgcacacgcctgttatgatgcagacaccccagcttacctctaccattatgcgggagccgaagcgcctgagacctgaagattcctttatgagcgtgtaccccatgcaaacagagcatcaccagacccctctggactacaacacacaggtcacgtggatgctcgcccagcggcaacaggaagaggcgagacagcagcaagagcgcgctgccatgtcttatgtgaaactgcggaccaatcttcagcatgccatcagacgcgggacatccctgatggaagatgacgaggaacccattgtggaggatgtcatgatgagctccgaaggacggatcgaggacctcaacgagggcatggatttcgacaccatggatattgacctgcctcccagcaagaatagacgcgaacggacagagctcaagccggactttttcgatcctgcttctatcatggatgaaagcgttctgggggtgtccatgttttga

SEQ ID NO: 3480 - RNA, 1473 nt, synthetic construct
  misc_feature 1..1473: note = CCDS5615.1 variant
  source 1..1473: mol_type = other RNA
atggagagcatctccatgatgggctctcccaagagcctgtccgaaaccttcctccctaacgggattaatggaatcaaagacgccagaaaggtgacagtcggcgttattgggtctggagattttgctaaaagcctgacgatccggcttattcgctgcggctaccacgtggtgatcgggtccagaaacccgaagttcgcctctgagtttttcccccatgtcgtggacgttacccaccatgaagatgcgctgacaaaaaccaatatcatttttgtggctatccaccgggagcattatacaagcctctgggacctgcgccaccttctggtcggaaagattctcatcgatgtgtccaacaatatgagaattaaccagtaccctgaaagcaatgccgagtatctggcctctctgttccccgactccctcatcgttaagggctttaacgtggtcagcgcttgggccctgcaacttggccctaaagatgcttctcgccaggtgtacatttgttccaataacatccaggcccggcagcaagtgatcgagctggcgagacagctcaatttcattcccatcgacctggggagcctttcttccgcccgggaaattgagaacctgcctctccgcctgtttaccctgtggagaggaccggtcgttgtggctatcagcctcgccacattctttttcctgtattcctttgtgcgggatgtcattcacccctacgctcgcaatcagcagtctgacttctataagatccctatcgaaattgtgaacaaaacccttcccatcgttgccattacgctgctcagcctggtgtaccttgcgggcctgctcgccgctgcctaccaactgtattacgggaccaagtatagacggttccctccctggctggagacatggctccagtgccgcaaacagctgggacttctgtcctttttctttgctatggtccatgtggcctacagcctctgtctgccgatgagacggtctgagagatatcttttcctgaatatggcctaccagcaagttcacgctaacatcgaaaactcctggaatgaggaagaggtgtggcgcattgaaatgtatatcagctttggcatcatgtctctcgggctgctgagcctcctggcggtcacctccattccttctgtgagcaacgcccttaattggcgggagttctcctttatccagagcacactgggatacgtcgctctcctgatttctaccttccatgtgctgatctacggctggaagagagcctttgaggaagagtattaccgcttctatacgccccctaactttgttcttgccctcgtgctgccctccattgtcatcctgggcaagattatcctcttcctgccctgcatcagccggaaacttaagagaattaaaaaggggtgggaaaaatctcagtttctggaggaaggaatgggcgggacaatccctcacgtgtccccggagcgcgttaccgtgatgtga

SEQ ID NO: 3481 - RNA, 777 nt, synthetic construct
  misc_feature 1..777: note = EAW93749 variant
  source 1..777: mol_type = other RNA
atggagagcagaaaggacatcaccaaccaggaagagatttggaaaatgaagccccggcgcaatctggaagataacgactacctccacaaagatacaggcgagacgtccatgctgaagagacctgtgcttctgcatctccaacagaccgcccacgctgacgagttcgattgcccgtctgaactgcagcatgcccaggagctttttccccaatggcatctgcctatcaaaattgcggctgtcatggccagcctcacattcctgtataccctgctccgggaagttatccaccccctggccacatcccaccagcagtacttttataagattcctatccttgtgatcaataaggtgctgcccatggtctctattaccctcctggctcttgtgtacctgcctggggttatcgccgctattgtgcaggtccacaacggaacaaaatataagaaattcccgcattggctcgacaagtggatgctgacccgcaaacaatttggcctgctcagcctgttctttgccgtgcttcacgcgatctacacgctgtcctatgccatgagacggtcttaccgctacaagctcctgaattgggcttatcagcaggttcagcaaaacaaggaggatgcctggattgaacatgacgtgtggagaatggagatctacgtcagccttgggattgtgggactggctatcctcgccctgctggcggtgacctccatccccagcgtctctgattccctcacatggcgggagttccactatattcaggttaataacatctga

SEQ ID NO: 3482 - RNA, 1020 nt, synthetic construct
  misc_feature 1..1020: note = AAD15620 variant
  source 1..1020: mol_type = other RNA
atggagagcagaaaggacatcaccaaccaggaggaactgtggaaaatgaagccccggcgcaatctcgaagaggatgactacctgcacaaagatacaggcgaaacgtccatgcttaagagacctgtgctgctccatctgcaccaaaccgcccatgctgacgagttcgattgcccgtctgagcttcagcacacacaggaactgtttccccagtggcatctccctattaaaatcgccgcgattatcgctagcctgaccttcctgtatacactcctgcgggaggtcattcacccccttgccacctcccaccaacagtacttttataagatccctatcctggttattaacaaggtgctccccatggtgtctatcacactgcttgccctggtctacctccctggggtgattgctgccatcgttcagctgcataatggaaccaaatataagaaattcccgcactggctggacaagtggatgctcacgcgcaaacagtttggcctgcttagcttctttttcgctgtgctgcatgccatttactccctctcttatcccatgagacggagctaccgctacaagctgcttaactgggcgtatcaacaggtccagcagaataaggaagatgcctggatcgagcacgacgtgtggagaatggagatttacgtttccctggggatcgtgggactcgctatcctggccctgctcgctgtcaccagcattccttctgtgtccgatagcctgacatggcgggaatttcactatatccaatctaaacttggcattgtgtccctgctcctggggaccatccatgcccttattttcgcgtggaacaagtggatcgacatcaaacagtttgtctggtacacaccccctaccttcatgattgccgtttttctgcccatcgtggtgctcattttcaagagcatcctgttcctgccgtgtctccgcaaaaagattctgaaaatcagacacggatgggaggatgtcacgaagatcaataagacagaaatttgctctcagctttga

SEQ ID NO: 3483 - RNA, 498 nt, synthetic construct
  misc_feature 1..498: note = CCDS32752.1 variant
  source 1..498: mol_type = other RNA
atgggcgcccccaccctgcctccggcttggcagcccttcctcaaggaccacagaatcagcacatttaaaaactggcctttcctggaggggtgcgcctgtacgcccgaacggatggcggaggctggatttattcattgccctaccgaaaatgagcccgatcttgcccaatgtttcttttgcttcaaggaactggagggctgggagcctgacgatgacccgatcgggcccggaacagtggcctacgcttgtaacacctccacactcggcgggcgcggaggcagaattacccgggaagaacacaaaaagcattctagcggctgcgcctttctgtccgtcaaaaagcagttcgaggagcttacactgggggagtttctcaagctggatcgcgaaagagctaaaaataagatcgccaaagagaccaacaataagaaaaaggagttcgaagaaacggcggagaaggttcggcgcgccattgagcagctggctgccatggactga

SEQ ID NO: 3484 - RNA, 429 nt, synthetic construct
  misc_feature 1..429: note = AAC51660 variant
  source 1..429: mol_type = other RNA
atgggcgcccccaccctgcctccggcttggcagcccttcctcaaggaccacagaatcagcacatttaaaaactggcctttcctggaggggtgcgcctgtacgcccgaacggatggcggaggctggatttattcattgccctaccgaaaatgagcccgatcttgcccaatgtttcttttgcttcaaggaactggagggctgggagcctgacgatgacccgatcgaagaacacaaaaagcattcctctgggtgtgcctttctcagcgtgaaaaagcagttcgaggagctgacacttggagagtttctgaagctcgatcgcgaaagagctaaaaacaagattgccaaagagaccaataacaagaaaaaggagttcgaagaaacagctaagaaagtccggcgcgccatcgagcagctggcggccatggactga

SEQ ID NO: 3485 - RNA, 2931 nt, synthetic construct
  misc_feature 1..2931: note = EAW56623 variant
  source 1..2931: mol_type = other RNA
atggagaagcagaaacccttcgccctgtttgtgcctccgagaagctcctctagccaagtctccgctgttaagccccagaccctcggcggggactctacattctttaagagcttcaacaagtgcacggaagatgactttgagttcccttttgccaaaaccaatctgtccaagaacggagaaaatatcgattctgaccccgcgcttcagaaggtgaacttcctgcctgtgctcgagcaggtcggcaatagcgattgtcactaccaagaagggctgaaagactccgatcttgagaacagcgagggactgtctcgggtgtattccaagctctacaaagaagctgagaagattaaaaagtggaaggttagcacagaagccgagctgcgccagaaagagtctaagctgcaggaaaatagaaaaatcattgaggcccagcggaaggctatccaagaactccagtttggcaacgagaaagtgtccctgaaacttgaagaggggattcaggagaataaagacctgatcaaggaaaacaatgccacccgccatctctgcaacctgcttaaggagacatgtgctagaagcgccgaaaagaccaagaaatatgagtacgaacgggaggagacacgccaggtctatatggatctgaataacaatatcgaaaagatgattaccgcgttcgaggaactcagagtgcaagccgagaactctcggctggaaatgcactttaaactgaaggaggactacgagaagatccagcatctcgaacaggagtataaaaaggaaattaacgataaagagaagcaagtttccctgcttctgatccagattacggagaaagaaaataagatgaaggacctcaccttcctgcttgaggaaagccgcgataaagtgaaccagctggaggaaaagacaaaactccagtccgagaatctgaagcaatctatcgagaaacagcaccatctgaccaaggaactcgaggacattaaggtcagcctgcagagatccgtgagcacacagaaagctcttgaagaggacctgcaaatcgccaccaagacgatctgccagctcacagaagagaaagagacccagatggaagagtctaacaaggctcgggccgcgcactcctttgtggtcacagagttcgaaaccaccgtttgtagcctggaggaacttctgcgcacagagcagcaaagactcgaaaagaatgaggatcagctgaagattctgacgatggaactccagaaaaagtctagcgagctggaggaaatgaccaaacttacaaacaataaagaggtggaactggaggaactcaagaaagtgctgggagagaaggagaccctgctttacgaaaacaaacagttcgagaagatcgccgaggaactcaagggcacagaacaagagctgattggcctgctccaggctcgggagaaagaagtccacgacctggagatccagcttaccgccattacgacatccgaacaatactattctaaggaggtgaaagatctgaagaccgaactcgagaatgagaaactgaagaacaccgaactgacaagccattgcaataaactttccctcgagaacaaagaactgacccaggagacaagcgacatgacgctggagctcaagaatcagcaggaagatatcaacaataacaaaaagcaagaggaacgcatgctgaaacagatcgagaaccttcaggaaaccgagacacagctgagaaatgagctcgaatacgttcgggaggaactgaagcaaaagagagacgaggtgaaatgtaagctggataaatctgaagagaactgcaataaccttcgcaagcaggtcgagaataaaaacaagtatattgaggaactccagcaggaaaataaagctctgaagaagaaagggaccgccgagtccaagcaactgaacgtgtacgaaatcaaagttaataagctcgagctggagcttgaaagcgccaaacagaagtttggagagattacagacacctatcagaaggaaatcgaggataaaaagatttctgaggaaaacctgctcgaggaagtggagaaagctaaggtcatcgcggacgaagccgtgaaactgcaaaaggagatcgataagcggtgtcagcacaaaattgctgagatggtcgccctgatggaaaagcataaacaccagtacgacaagatcattgaggaaagagactccgagcttggcctctataaaagcaaggaacaggagcaatcctctctgcgcgccagcctggagatcgaactctccaatctgaaggctgagcttctgtctgtgaaaaagcagctcgaaattgagcgggaagagaaagagaagctgaaaagagaagccaaggagaacacggcgaccctgaaggaaaagaaggataaaaagacacagaccttccttctggagacacccgagatctactggaaactcgacagcaaggctgttccttcccagaccgtgagccgcaattttacgtctgtcgatcacgggatttccaaagacaagcgggattacctgtggacaagcgccaagaacaccctctctacaccgctgcccaaagcctataccgtgaagacccctacaaaacccaaacttcaacagagagaaaatctgaacatccctatcgaggaatccaaaaagaagcgcaaaatggctttcgagtttgacattaacagcgattctagcgaaacgaccgacctcctgtccatggttagcgaggaggaaacactgaagaccctttaccggaataacaatcccccggcctctcatctgtgcgtgaaaacacctaagaaagctccctccagcctcaccacgcctggatccacactgaagttcggcgccatcagaaagatgcgcgaggatcggtgggcggtcattgccaaaatggacagaaagaaaaagctcaaagaagctgagaagctgtttgtgtga

SEQ ID NO: 3486 - RNA, 2931 nt, synthetic construct
  misc_feature 1..2931: note = AAI44020 variant
  source 1..2931: mol_type = other RNA
atggagaagcagaaacccttcgccctgtttgtgcctccgagaagctcctctagccaagtctccgctgttaagccccagaccctcggcggggactctacattctttaagagcttcaacaagtgcacggaagatgactttgagttcccttttgccaaaaccaacctgtccaagaacggagaaaatatcgattctgaccccgcgcttcagaaggtgaacttcctgcctgtgtttgagcaggtcggcaatagcgattgtcactaccaagaagggctcaaagactccgatctggagaacagcgagggactttctcgggtgtattccaagctgtacaaagaagctgagaagattaaaaagtggaaggttagcacagaagccgagctccgccagaaagagtctaagctgcaggaaaatagaaaaatcattgaggcccagcggaaggctatccaagaactgcagttcggcaacgagaaagtgtccctcaagctggaagaggggattcaggagaataaagaccttatcaaggaaaacaatgccacccgccatctgtgcaacctcctgaaggagacatgtgctagaagcgccgagaaaaccaagaaatatgagtacgaacgggaggagacacgccaggtctatatggatcttaattctaacatcgaaaagatgattaccgcgtttgaggaactgagagtgcaagccgaaaattcccggctcgaaatgcacttcaaactgaaggaggactacgagaagatccagcatctggaacaggagtataaaaaggaaattaacgataaagagaagcaagttagcctcctgcttatccagattacggagaaagaaaacaagatgaaggacctgacctttctcctggaggaatcccgcgataaagtgaatcagcttgaggaaaagacaaaactgcagtctgagaacctcaagcaaagcatcgagaaacagcaccatctgaccaaggaactggaggacattaaggtctccctccagagaagcgtgtctacacagaaagctctggaagaggaccttcaaatcgccaccaagacgatctgccagctgacagaagagaaagagacccagatggaagagtccaataaggctcgggccgcgcacagcttcgtggtcacagagttcgaaaccaccgtttgttctctcgaggaactgcttcgcacagagcagcaaagactggagaaaaacgaagatcagctcaagattctgacgatggaactgcagaaaaagagctccgagctcgaggaaatgaccaagctgacaaataacaaagaggtggaacttgaggaactgaagaaagtgctcggagagaaggagaccctgctgtacgaaaataaacagtttgagaagatcgccgaggaacttaagggcacagaacaagagctcattggcctgctgcaggctcgggagaaagaagtccacgacctcgagatccagctgaccgccattacgacatctgaacaatactatagcaaggaggtgaaagatcttaagaccgaactggagaacgagaaactcaagaataccgaactgacatcccattgcaacaagctgagccttgagaataaagaactcacccaggagacatctgacatgacgctggagctgaagaaccagcaggaagatatcaataacaataaaaagcaagaggaacgcatgctcaaacagatcgagaacctgcaggaaaccgagacacagcttagaaacgagctggaatacgttcgggaggaactcaagcaaaagagagacgaggtgaaatgtaagctggataaatccgaagagaattgcaacaatctgcgcaagcaggtcgagaacaaaaataagtatattgaggaacttcagcaggaaaacaaagctctcaagaagaaagggaccgccgagagcaagcaactgaatgtgtacgaaatcaaagttaacaagctggagctcgagctggaatctgccaaacagaagttcggagagattacagacacctatcagaaggaaatcgaggataaaaagatttccgaggaaaatcttctggaggaagtggagaaagctaaggtcatcgcggacgaagccgtgaaactccaaaaggagatcgataagcggtgtcagcacaaaattgctgagatggtcgccctgatggaaaagcataaacaccagtacgacaagatcattgaggaaagagacagcgagctgggcctttataaatccaaggaacaggagcaatctagcctccgcgcctccctggagatcgaactgtctaacctcaaggctgagctgcttagcgtgaaaaagcagctggaaattgagcgggaagagaaagagaagctcaaaagagaagccaaggagaatacggcgaccctgaaggagaaaaaggataaaaagacacagacctttctgcttgaaacacccgagatctactggaaactggactccaaggctgttcctagccagaccgtgtctcgcaacttcacgtccgtcgatcacgggattagcaaagacaagcgggattacctctggacatctgccaagaataccctgtccacaccgctccccaaagcctataccgtgaagacccctacaaaacccaagctgcaacagagagaaaaccttaatatccctatcgaggaaagcaaaaagaagcgcaaaatggcttttgagttcgacattaactctgatagctccgaaacgaccgacctgctcagcatggtttctgaggaggaaacactgaagaccctgtaccggaacaataatcccccggcctcccatctttgcgtgaaaacacctaagaaagctcccagctccctgaccacgcctggatctacactcaagtttggcgccatcagaaagatgcgcgaggatcggtgggcggtcattgccaaaatggacagaaagaaaaagctgaaagaagctgagaaactcttcgtgtga

SEQ ID NO: 3487 - RNA, 2931 nt, synthetic construct; identical to SEQ ID NO: 3485
  misc_feature 1..2931: note = AAI26267 variant
  source 1..2931: mol_type = other RNA

SEQ ID NO: 3488 - RNA, 330 nt, synthetic construct
  misc_feature 1..330: note = AAI05300 variant
  source 1..330: mol_type = other RNA
atggagaagcagaaacccttcgccctgtttgtgcctccgagaagctcctctagccaagtctccgctgttaagccccagaccctcggcggggactctacattctttaagagcttcaacaaatgcacggaagatgactttgagttcccttttgccaaaaccaatctgtccaagaacggagaaaatatcgattctgaccccgcgcttcagaacgtgaatttcctgcctgtgctcgagcaggtcggcaacagcgattgtcactaccaagaagggctgaaggactccgatcttgagaatagcgagggactgtctcgggtgtattccaaactctga

SEQ ID NO: 3489 - RNA, 1467 nt, synthetic construct
  misc_feature 1..1467: note = BAF56181 variant
  source 1..1467: mol_type = other RNA
atgagcgtggccttcgctgcccccagacagcggggcaagggggagatcacccctgcggctattcagaaaatgctggacgataacaatcacctcatccaatgcattatggactcccagaacaagggaaaaacatctgaatgtagccagtaccaacagatgctgcatacgaatcttgtctatctggccaccatcgccgattccaaccagaatatgcagtctctcctgccggctccccctacacaaaacatgcccatgggccctgggggaatgaatcagagcgggccccctccgccccctcgctcccacaacatgccctctgacgggatggttggaggcggccctcccgccccgcatatgcagaatcagatgaacgggcaaatgcctggacccaatcacatgcctatgcagggccccgggcccaaccagcttaatatgaccaacagctccatgaatatgccttctagctcccatggaagcatgggcgggtacaaccactctgtgccgtccagccaatctatgcccgtgcagaaccagatgacaatgtcccagggacaacctatgggcaattatggccccagacctaacatgagcatgcagcccaatcaggggccgatgatgcaccagcaacctccctcccagcagtacaacatgcctcagggaggcgggcaacattatcagggacagcagccccctatgggcatgatggggcaagtcaatcagggaaaccacatgatgggccagcggcaaattcccccgtaccgccctccccagcaggggccccctcagcaatattctggccaggaggattactacggagaccagtatagccatggcgggcagggaccgcccgaaggcatgaatcaacagtactatcctgatgggcacaacgactacggctatcagcagccctcctaccctgagcaaggatatgatagaccctacgaagacagctctcagcactactatgagggcggcaattcccagtacggacaacagcaggatgcttatcagggccctcccccgcaacaggggtaccctccccagcagcaacagtatcctggacagcagggctaccccgggcaacagcagggctatggaccgagccagggcgggcctggaccccaataccctaactacccccagggccaggggcaacagtatggaggctaccggcccacccagcctgggccgccccagcctccccaacagcgcccttatggctacgaccagatcatgcccaagaaacctgccgaggatgaaaatgactctaagggagtgagcgaggcgtccggcccgcagaacgacgggaagcaactgcatccccctggaaaagccaatatctctgaaaagattaacaaaagaagcggccccaagcgggggaaacacgcttggacacatcgcctcagagagcggaagcagctggttatctatgaggaaatttccgatcctgaggaagacgatgagtga

SEQ ID NO: 3490 - RNA, 1374 nt, synthetic construct
  misc_feature 1..1374: note = BAF56182 variant
  source 1..1374: mol_type = other RNA
atgagcgtggccttcgctgcccccagacagcggggcaagggggagatcacccctgcggctattcagaaaatgctggacgataacaatcacctcatccaatgcattatggactcccagaacaagggaaaaacatctgaatgtagccagtaccaacagatgctgcatacgaatcttgtctatctggccaccatcgccgattccaaccagaatatgcagtctctcctgccggctccccctacacaaaacatgcccatgggccctgggggaatgaatcagagcgggccccctccgccccctcgctcccacaacatgccctctgacggcatggttggaggcggccctcccgccccgcatatgcagaatcagatgaacgggcaaatgcctggacccaatcacatgcctatgcagggccccgggcccaaccagcttaatatgaccaacagctccatgaatatgccttctagctcccatggaagcatgggcgggtacaaccactctgtgccgtccagccaatctatgcccgtgcagaaccagatgacaatgtcccagggacaacctatgggcaattatggccccagacctaacatgagcatgcagcccaatcaggggccgatgatgcaccagcaacctccctcccagcagtacaacatgcctcagggaggcgggcaacattatcagggacagcagccccctatgggcatgatggggcaagtcaatcagggaaaccacatgatgggccagcggcaaattcccccgtaccgccctccccagcaggggccccctcagcaatattctggccaggaggattactacggagaccagtatagccatggcgggcagggaccgcccgaaggcatgaatcaacagtactatcctgatgggaactcccagtacggccagcaacaggacgcttatcagggaccccctccccaacagggctaccctccccagcagcaacagtatccggggcagcagggataccctggccaacagcaggggtacggacccagccagggcgggcctggcccccaatatccgaattaccctcagggacagggccagcaatatgggggatacagacccacccagcctggccctccccagcccccgcaacagcggccctatgggtacgatcagatcatgcctaagaaacccgccgaggacgaaaacgattctaagggagtgtccgaggcgagcggccctcagaatgacgggaagcaactgcatccccctggcaaagccaacatctctgagaagattaataaacgcagcggaccgaagagaggcaaacacgcttggacacaccggctccgcgaaagaaagcagctggttatctatgaggaaatttccgatcccgaggaggacgacgaatga

SEQ ID NO: 3491 - RNA, 1467 nt, synthetic construct
  misc_feature 1..1467: note = BAF56183 variant
  source 1..1467: mol_type = other RNA
atgagcgtggccttcgctgcccccagacagcggggcaagggggagatcacccctgcggctattcagaaaatgctggacgataacaatcacctcatccaatgcattatggactcccagaacaagggaaaaacatctgaatgtagccagtaccaacagatgctgcatacgaatcttgtctatctggccaccatcgccgattccaaccagaatatgcagtctctcctgccggctccccctacacaaaacatgcccatgggccctgggggaatgaatcagagcgggccccctccgccccctcgctcccacaacatgccctctgacgggatggttggaggcggccctcccgccccgcatatgcagaatcagatgaacgggcaaatgcctggacccaatcacatgcctatgcagggccccgggcccaaccagcttaatatgaccaacagctccatgaatatgccttctagctcccatggaagcatgggcgggtacaaccactctgtgccgtccagccaatctatgcccgtgcagaaccagatgacaatgtcccagggacaacctatgggcaattatggccccagacctaacatgagcatgcagcccaatcaggggccgatgatgcaccagcaacctccctcccagcagtacaacatgcctcagggaggcgggcaacattatcagggacagcagccccctatgggcatgatggggcaagtcaatcagggaaaccacatgatgggccagcggcaaattcccccgtaccgccctccccagcaggggccccctcagcaatattctgggcaggaggattactacggagaccagtatagccatggcgggcagggaccgcccgaaggcatgaatcaacagtactatcctgatgggcacaacgactacggctatcagcagccctcctaccctgagcaaggatatgatagaccctacgaagacagctctcagcactactatgagggcggcaattcccagtacggacaacagcaggatgcttatcagggccctcccccgcaacaggggtaccctccccagcagcaacagtatcctggacagcagggctaccccgggcaacagcagggctatggaccgagccagggcgggcctggaccccaataccctaactacccccagggccaggggcaacagtatggaggctaccggcccacccagcctgggccgccccagcctccccaacagcgcccttatggctacgaccagatcatgcccaagaaacctgccgaggaaggaaatgattctgaggaagtgccggaggcgagcggcccccagaacgacgggaaggagctgtgccctcccggaaagcctacaacctccgagaaaatccatgaaagatctggccccaagcggggcgaacacgcctggacgcatcgcctcagagagcggaaacaactggttatttatgaagagatcagcgacccggaggaagatgacgagtga

SEQ ID NO: 3492 - RNA, 1374 nt, synthetic construct
  misc_feature 1..1374: note = BAF56184 variant
  source 1..1374: mol_type = other RNA
atgagcgtggccttcgctgcccccagacagcggggcaagggggagatcacccctgcggctattcagaaaatgctggacgataacaatcacctcatccaatgcattatggactcccagaacaagggaaaaacatctgaatgtagccagtaccaacagatgctgcatacgaatcttgtctatctggccaccatcgccgattccaaccagaatatgcagtctctcctgccggctccccctacacaaaacatgcccatgggccctgggggaatgaatcagagcgggccccctccgccccctcgctcccacaacatgccctctgacggcatggttggaggcggccctcccgccccgcatatgcagaatcagatgaacgggcaaatgcctggacccaatcacatgcctatgcagggccccgggcccaaccagcttaatatgaccaacagctccatgaatatgccttctagctcccatggaagcatgggcgggtacaaccactctgtgccgtccagccaatctatgcccgtgcagaaccagatgacaatgtcccagggacaacctatgggcaattatggccccagacctaacatgagcatgcagcccaatcaggggccgatgatgcaccagcaacctccctcccagcagtacaacatgcctcagggaggcgggcaacattatcagggacagcagccccctatgggcatgatggggcaagtcaatcagggaaaccacatgatgggccagcggcaaattcccccgtaccgccctccccagcaggggccccctcagcaatattctggccaggaggattactacggagaccagtatagccatggcgggcagggaccgcccgaaggcatgaatcaacagtactatcctgatgggaactcccagtacggccagcaacaggacgcttatcagggaccccctccccaacagggctaccctccccagcagcaacagtatccggggcagcagggataccctggccaacagcaggggtacggacccagccagggcgggcctggcccccaatatccgaattaccctcagggacagggccagcaatatgggggatacagacccacccagcctggccctccccagcccccgcaacagcggccctatgggtacgatcagatcatgcctaagaaacccgccgaggaaggaaacgactctgaggaggtgcctgaagcgtccggcccccagaatgatgggaaggagctgtgccctccgggcaagcccacaaccagcgagaaaatccacgaacgctctggacctaagagaggcgagcacgcctggacgcatcggctccgcgaaagaaaacaactggttatttatgaggaaatcagcgaccccgaggaagatgacgagtga

SEQ ID NO: 3493 - RNA, 336 nt, synthetic construct
  misc_feature 1..336: note = AAI05590 variant
  source 1..336: mol_type = other RNA
atgaagaccaacgacacatacatgaaattcagctggctgacggtgcccgagaagtccctcgataaagaacacagatgcatcgtccggcatgagaataacaagaatggcgttgaccaggaaattatctttcctccgattaaaaccgatgtgatcacaatggaccccaaggataactgttctaaggacgccaatgataccctgcttctgcaactcacaaacaccagcgcttattacatgtatctgcttctgctcctgaaatccgtggtctacttcgccattatcacatgctgtctgctccgcagaaccgcgttttgctgtaatggggagaagtcttga

SEQ ID NO: 3494 - RNA, 177 nt, synthetic construct
  misc_feature 1..177: note = AAG29337 variant
  source 1..177: mol_type = other RNA
atgcagatgtttccccctagcccgctgttcttctttctccaactgcttaagcagtcctctagacggctggagcacaccttcgtgtttctccgcaacttcagcctgatgcttctgagatacatcggcaaaaagcggcgcgccacaagattttgggacccccggcgcgggacgccttga

SEQ ID NO: 3495 - RNA, 1131 nt, synthetic construct
  misc_feature 1..1131: note = AAF26776 variant
  source 1..1131: mol_type = other RNA
atggccaacagcgctaataccaacacagtgcccaagctgtacagatccgtcatcgaggacgttattaatgatgtgcgggacatcttcctcgatgacggcgtggatgaacaggtcctgatggagcttaaaacgctgtgggaaaacaagctcatgcaatctcgcgccgtggacgggtttcacagcgaggaacagcagctgcttctgcaggttcaacagcagcatcagcctcaacagcagcagcaccatcaccatcaccaccatcaacaggcgcagccgcaacagaccgtgccccagcaggctcaaacacagcaggtcctcattcctgcctcccagcaagccaccgctccccaggtgatcgttcctgattctaaactgattcagcacatgaatgccagcaacatgtccgctgccgcgacagccgctaccctggccctccccgctggagtgacacctgtccagcaaatcctgaccaattctggccagcttctccaggtggtgagagccgcgaacggggcccagtatatcttccaaccgcagcagagcgtcgttctccaacaacaggtgattccccagatgcagcctggaggcgtgcaggctcccgtcatccaacaggtgctggcccctcttcccgggggaatttccccgcagacgggcgttatcattcagcctcagcagatcctgtttaccggcaataagacacaagtgattcccaccacagtcgctgcccctacccccgcccaggctcagatcacggcgacagggcaacagcagccccaggcccaacctgctcagacccaggccccgctcgtgctgcaggttgacggaacaggcgataccagctctgaggaggacgaagatgaggaagaggactacgatgacgacgaggaagaggataaagaaaaggacggggccgaggatggacaagtggaagaggagcccctgaactccgaagacgatgtcagcgacgaggaaggccaggagctgttcgataccgaaaatgtggtcgtgtgccagtatgacaagatccatcggtctaaaaacaagtggaaatttcacctgaaggatgggattatgaatcttaacggacgcgactacatcttctccaaagctattggcgatgccgagtggtga

SEQ ID NO: 3496 - RNA, 1173 nt, synthetic construct
  misc_feature 1..1173: note = AAH00125 variant
  source 1..1173: mol_type = other RNA
atgccccctagcggcctgagactcctgcttctgctcctgccgcttctgtggctcctggtgctgacccccgggcggcctgccgctggactctccacatgcaagacgatcgacatggagctggtcaaacgcaagagaattgaagccatccggggccagattctttctaaactgcgcctcgcgagccctccctcccaaggggaggttccccctggaccgctgcccgaagctgtgcttgccctgtacaactctaccagagatcgggtggccggcgagagcgctgaacctgagcccgagcctgaagccgactattacgctaaggaggtcacacgcgtgctcatggttgaaacccacaatgagatctatgataaattcaagcagtccacacattctatttacatgtttttcaacaccagcgagctgagagaagccgtgcccgagccggtcctgctctcccgggcggaactgcgccttctgagactcaagctgaaagtggagcagcacgttgaactttatcagaagtacagcaataactcttggcggtatctgtccaatcgcctcctggcccctagcgactctcccgagtggctgtcctttgatgtgacaggggtcgtgagacaatggctcagccggggaggcgagatcgaaggcttccgcctgtctgctcattgttcctgcgacagcagagataacacccttcaggtggacatcaatgggtttacgaccggacggagaggcgatctggccacaattcacgggatgaaccgccctttcctcctgcttatggctacacccctggagcgggcccagcatctccagtcctctagacaccgccgggcgctggacaccaattactgttttagctccaccgagaaaaactgctgtgtcagacaactgtacatcgatttccgcaaggacctcggatggaaatggattcacgaacccaagggctatcatgccaatttttgcctggggccttgtccgtacatctggagccttgatacgcagtattctaaggttctggctctctacaaccagcacaatcccggagcctccgctgccccttgctgtgtgccccaggccctggaacctctgcccattgtgtattacgtcggccggaaaccgaaggtggagcaacttagcaacatgatcgttagatcttgcaaatgtagctga

SEQ ID NO: 3497 - RNA, 1704 nt, synthetic construct
  misc_feature 1..1704: note = AAT70724 variant
  source 1..1704: mol_type = other RNA
atgggcagagggctgctccggggactgtggccccttcacatcgtgctgtggacccgcattgccagcacaatccctccgcatgtccagaagtccgttaacaatgacatgattgtgacggataacaatggcgctgtgaaattcccccaactctgcaagttttgtgacgtcagattctctacctgcgataaccagaaaagctgtatgtccaattgctctatcacaagcatttgtgagaagcctcaggaagtgtgcgttgccgtgtggcggaaaaacgacgagaatatcaccctggaaacagtctgtcacgatcccaagctgccttaccatgactttatcctggaggatgcggcttcccccaagtgcattatgaaagaaaagaaaaagcctggggagaccttctttatgtgttcttgcagctccgacgagtgtaacgataatatcattttcagcgaagagtataacacatctaatccggacctcctgctggtgatctttcaggttaccggaatttccctcctgccccctcttggcgtggccatcagcgtcattatcatcttctactgctatcgcgtgaacagacaacagaaactgtcttccacgtgggaaaccgggaagacacggaagctcatggagtttagcgagcactgcgccattatcctggaagatgaccgctctgatatttccagcacctgtgctaataacatcaatcataacacagagcttctgcccattgaactcgacaccctggtgggaaaaggcagattcgccgaggtctacaaggctaaactgaagcagaacacgtccgaacagtttgagacagttgccgtgaaaatcttcccttatgaggaatacgcgtcttggaagaccgagaaagacatctttagcgatattaatctcaagcacgaaaacatcctgcaattccttacagccgaggaacggaagaccgagctgggcaaacagtattggctcattaccgctttccacgccaaggggaatctgcaggagtaccttacacgccatgtgatctcctgggaagacctgagaaaactcggaagctctctggctcggggcattgcccaccttcattccgatcacacgccctgcgggcgcccgaagatgcctatcgtccacagagacctcaaaagctctaacatcctggtgaagaatgatcttacctgttgcctgtgtgactttggactcagcctgcggcttgatcccacactgtccgttgacgatctcgcgaactctggccaggtggggaccgcccgctacatggctcctgaggtcctggaaagcagaatgaatctggagaacgtggaatccttcaagcaaacagacgtttatagcatggccctcgtgctgtgggagatgacctctcggtgcaatgctgtcggagaggtgaaagattacgaacctccctttggctccaaggtcagagagcatccctgtgtggaaagcatgaaagacaacgttcttcgcgaccggggcagaccggagattccctctttctggctgaatcaccaggggatccagatggtgtgcgagacgctcacagaatgttgggatcatgaccctgaggcccgcctgaccgcccaatgcgtcgctgaacggttttccgagctggaacaccttgatagactcagcggacgctcctgttctgaggagaagattcccgaagacggcagcctgaacaccacaaaatga

SEQ ID NO: 3498 - RNA, 2055 nt, synthetic construct
  misc_feature 1..2055: note = BAG35778 variant
  source 1..2055: mol_type = other RNA
atgatggacgccagcaaggagctccaggtgctgcacatcgatttcctgaaccaagacaatgctgtctcccatcacacctgggaatttcagacatctagccccgttttcagacggggccaggtgtttcatcttcgcctggtgctcaaccagcctccgcaatcctaccaccagctgaaacttgagttctctacggggcccaatcctagcattgccaagcataccctggtcgtgctcgatcccagaacaccttccgaccactataactggcaggcgaccctgcagaatgaatctggaaaagaggttacagtggctgtcaccagctcccccaacgccatcctgggcaagtaccaactcaatgtgaaaacagggaaccacattctgaaaagcgaagagaatatcctttatctgctctttaacccttggtgcaaggaggatatggttttcatgccggacgaagatgagcggaaagaatacattctgaatgacaccggatgtcattatgtgggcgccgctcgctctatcaagtgcaaaccctggaactttgggcagttcgagaagaatgtccttgattgttgcatctccctgctcacggagagctctctgaaacctaccgacagacgggatcccgtgctggtgtgtcgcgccatgtgcgctatgatgtcctttgaaaagggacagggcgtcctcattggcaactggacaggggactacgagggaggcaccgccccttataagtggacagggagcgcgcccatcctgcagcaatactacaataccaaacaggccgtttgtttcggacagtgctgggtgtttgctggcattcttacgacagtgctgagagccctcgggatcccggctcggtctgtcaccggattcgattccgcccacgacacagaacgcaacctgaccgtggacacctatgttaacgagaatggcgaaaagattacaagcatgacgcatgattccgtgtggaactttcacgtctggaccgacgcgtggatgaaaagacctgatcttcccaagggctacgacgggtggcaagccgtggatgctacacctcaggagcggtctcagggagttttctgttgcggccccagccccctgaccgccatccgcaaaggggacattttcatcgtgtatgatacaagatttgtcttctccgaggtgaatggagaccggctcatctggctggtcaagatggtgaacggccaggaggaactgcacgttattagcatggaaaccacgtctatcgggaaaaatatttccacaaaggctgtgggacaagatcgcagacgggacatcacctacgagtataagtaccctgaaggcagctctgaggagagacaggtcatggatcatgcctttctcctgcttagctccgaacgcgagcaccggagaccggtgaaagaaaacttcctgcatatgtctgttcagagcgacgacgtgctcctgggcaattccgtcaactttaccgtgattcttaagcgcaaaacagccgctctgcagaatgtgaacatcctcgggagcttcgagctgcaactgtataccggaaagaaaatggcgaagctctgtgatctgaataagacatctcagatccagggccaggtttccgaagtcacgcttaccctggacagcaaaacatacattaactctctcgccatcctggatgacgagcccgtgattcgggggtttatcattgctgagatcgtggaatccaaggagatcatggccagcgaagtcttcacctcctttcaataccctgagttctctattgagctgcccaatacaggaagaatcggccagcttctcgtgtgcaactgcatttttaaaaataccctggccatccctctgacggatgttaagttcagcctcgaatccctggggatttctagccttcagacctccgaccacggcacagtgcagcccggagagaccatccaaagccagattaaatgtacaccgatcaagaccggccctaagaaatttatcgtcaagctgtcttccaaacaggtgaaggaaattaacgctcaaaagatcgttctcattacgaagtga

SEQ ID NO: 3499 - RNA, 3375 nt, synthetic construct
  misc_feature 1..3375: note = CCDS6519.1 variant
  source 1..3375: mol_type = other RNA
atggacagcctggcctccctcgtgctgtgcggcgtctctcttctgctcagcgggaccgttgagggagctatggatctgatccttattaactccctgcccctcgtgtctgacgccgaaacaagcctgacgtgtatcgcgtccggctggagacctcacgagccgattaccatcgggcgggatttcgaagctctgatgaatcagcatcaagaccccctcgaggtgacacaggatgtcacccgcgaatgggccaagaaagtggtttggaagagagagaaagcctctaagattaacggagcttacttttgcgagggccgggtgcgcggggaagccatcagaatccggacaatgaaaatgcgccagcaggctagcttcctgcctgccacccttacaatgaccgtcgacaagggagataatgtgaacatttcctttaagaaagttctgatcaaggaggaagacgcggtgatttataaaaatggcagcttcatccactctgtccccagacatgaggtgcctgatattctcgaggtgcatctgccccacgcccaacctcaggacgctggcgtctactccgcccggtatatcgggggaaacctttttacgagcgctttcacccgcctgattgttagacggtgtgaagcccagaagtggggcccggagtgcaatcacctctgtacagcgtgcatgaacaatggggtgtgtcacgaagataccggagagtgcatctgtccccctggctttatggggcgcacatgcgaaaaagcctgtgagctgcataccttcggaagaacgtgcaaggagcggtgctctggccaggaaggctgtaagtcctacgtgttttgcctgcccgacccttatgggtgtagctgcgctacaggatggaaaggcctccaatgtaacgaggcctgccaccccgggttctacggaccggattgtaagctgcgctgctcttgtaataacggcgaaatgtgcgacagatttcaggggtgtctttgctcccctggatggcagggcctgcagtgcgagcgggaaggcatccaaagaatgacccccaaaattgtcgacctccctgatcatatcgaggtgaatagcgggaagttcaaccccatttgtaaggcttccggatggcccctgcctacaaatgaggaaatgacccttgttaaaccggacggcaccgtgctgcaccccaaagattttaaccacacagaccatttctctgtcgccatcttcacgattcaccgcatcctccctcccgatagcggggtgtgggtttgctccgtgaacaccgtcgccggaatggtggagaagccttttaatatcagcgtcaaggtgctgcccaaaccgctgaacgctcctaatgttattgacacaggccataacttcgcggtgatcaatatttcttccgaaccctattttggggatggccctatcaagagcaaaaagctcctgtacaaacccgtcaaccactacgaggcctggcagcatattcaggtgaccaatgaaatcgttacacttaactatctggagcctcggaccgagtacgaactctgtgtgcaactggtcagacgcggagagggcggggaaggacaccccggcccggtgcggagattcacgacagcttctatcgggcttcctcctccccgcggactgaatctcctgcccaagagccagaccaccctgaacctcacatggcagccgatttttccctcctctgaggacgatttctatgtggaggttgaacggagaagcgtccagaagtccgaccaacagaatatcaaagtgcctggcaacctgaccagcgtgcttctgaataacctccacccccgcgagcagtacgtcgtgcgggccagagttaatacaaaggcccagggggaatggtctgaggatctgacggcttggaccctgtccgacattcttcctccccaacctgaaaacatcaaaattagcaacatcacacattcttccgccgtgattagctggaccatcctcgacggctattccatctctagcattacaatccgctacaaggtccagggcaaaaatgaggatcagcacgtggacgttaagattaagaacgcgaccatcacgcagtatcaactgaaaggactggagcccgaaaccgcttaccaggtggatatttttgccgagaataacatcgggtcctctaatccggccttcagccatgaactcgtcacactgcctgagtcccaggctcccgccgaccttggaggcgggaagatgctgctcatcgctattctgggaagcgccggcatgacctgcctgacagtgcttctcgcgtttctgatcattctgcagctcaaacgggccaacgttcaaagacggatggctcaggccttccagaatgtgcgcgaggaacctgctgtccaatttaactctgggaccctggcccttaatagaaaggtgaaaaacaatcccgatccgacgatctaccctgtgctggactggaacgatattaagttccaggacgtcatcggcgagggaaattttggccaggttctcaaggcgcggatcaaaaaggatgggctgagaatggacgccgctattaaacgcatgaaggaatatgcctccaaagatgaccaccgggatttcgctggagagctggaagtgctttgtaagctcggccaccatcccaacatcattaatctgctgggggcctgcgagcacagaggatacctctatctggccatcgaatacgctcctcatggcaaccttctggacttcctccgcaaaagcagagtgctggagacagaccccgcgtttgccattgctaactctaccgcctccacactgagctctcagcaacttctccacttcgccgctgatgtcgcccgggggatggactatctgagccagaagcagtttatccatcgcgatctggcggctagaaatatcctcgtgggcgagaactacgttgccaagattgccgacttcggactgtcccggggccaggaagtgtatgtcaaaaagaccatggggcgccttcccgtgagatggatggctatcgagagcctgaattactctgtttacaccacaaactccgatgtgtggagctatggagtcctcctgtgggaaattgtgtccctgggcgggacgccttactgtggaatgacctgcgccgagctttatgagaaactgccgcaaggctaccggctcgaaaagcccctgaattgtgacgatgaggtttatgacctcatgcgccagtgctggagagaaaaaccttacgagcggccctcttttgcgcagatcctggtgagccttaaccgcatgctggaagagagaaagacatatgtcaataccacactctacgagaagttcacctacgctggcattgattgttccgccgaagaggccgcttga

SEQ ID NO: 3500 - RNA, 1791 nt, synthetic construct
  misc_feature 1..1791: note = BAF84950 variant
  source 1..1791: mol_type = other RNA
atggccgacgctgaggccagagcggaatttcccgaggaagctcggcctgatcgcggcacccttcaggtgctccaagacatggccagcagactgcggatccactccattcgcgccacatgctctacgagctccgggcatccgacctcttgtagctcctctagcgagatcatgtccgtccttttcttctacattatgagatataagcagagcgatcccgaaaaccctgacaatgatcggtttgttctggctaaacgcctctctttcgtggacgtggccacaggatggctgggccaggggcttggagtcgcttgcggcatggcctacaccgggaagtattttgatagagcgtcctaccgggtgttctgtctgatgagcgacggagagtcttccgagggcagcgtttgggaagccatggcttttgcctcttattactccctcgataacctggtggctatcttcgacgtcaatcgcctgggccacagcggggccctccccgcggagcattgcattaacatctatcagagacggtgtgaagcctttggatggaatacatacgtggttgatggccgcgacgtggaggctctgtgccaagtcttctggcaggcctcccaggtgaaacacaagcctaccgctgtggtcgccaaaacatttaaggggagaggaaccccctctatcgaggatgccgaaagctggcatgctaagcctatgccgcgggagcgcgcggacgccattatcaaacttattgaatcccagatccaaacgagcagaaacctggacccccagcctcccattgaggattctcctgaagttaatatcaccgacgtgcggatgacatccccgcccgattacagagtgggcgacaagattgctacccgcaaagcctgtgggctcgccctggctaagctgggatatgccaacaatcgggtcgtggttctggatggcgacacaagatacagcaccttctctgagatctttaacaaagagtatcctgaacgcttcatcgagtgcttcatggcggaacagaatatggtgagcgtcgctctcggctgtgcctcccgggggagaacgattgcctttgcttctacattcgccgcttttctgacccgcgccttcgatcacatccggattggaggcctggcggagagcaacatcaatattatcgggtcccactgcggagtgagcgttggcgacgatggggcctctcagatggctctcgaagacatcgccatgtttagaacaattcccaagtgtaccatcttctaccctaccgatgctgtgtccacagagcatgccgtcgcgctggccgctaacgccaagggaatgtgctttattcgcacgacccggcccgagacaatggtgatctatacaccccaagaaagattcgagattggccaggctaaagtccttcgccactgcgtgagcgacaaggttaccgtgatcggcgccgggatcaccgtctacgaagccctggctgcggccgacgagctctctaaacaggatatttttatccgggtgattgacctgttcacgatcaagcctcttgatgttgctacaattgtgtccagcgccaaagccaccgaaggaagaatcattaccgtcgaggaccattatccgcaaggcgggatcggagaggctgtgtgtgccgcggtgtccatggatcccgacatccaggttcactctctggctgtcagcggcgtgcctcagtccgggaagtctgaggaactcctggatatgtacggcattagcgcccggcacatcattgtggccgtcaaatgcatgctgctcaattga

SEQ ID NO: 3501 - RNA, 861 nt, synthetic construct
  misc_feature 1..861: note = EAW88722 variant
  source 1..861: mol_type = other RNA
atggccgaggacggcgaagaggctgagttccactttgccgcgctgtacatcagcgggcagtggcccagactccgggctgataccgacctgcaacgccttggatcctctgccatggcccctagcagaaagttctttgtgggcgggaactggaaaatgaatggacggaagcagtccctgggcgaactcattgggacactgaacgctgccaaagtcccggctgatacggaagttgtgtgcgcgccccctaccgcctatatcgacttcgcccgccagaagctggatcccaaaattgctgtggccgctcagaattgttacaaggtcacaaacggagcctttaccggcgagatctctcctggcatgattaaggactgcggggcgacatgggtggttctgggacatagcgagagacggcacgtgttcggcgaatccgatgagctcatcgggcaaaaagtcgcccatgctctggccgaaggactgggcgtgatcgcttgtattggggagaagctcgacgagcgcgaagccggaatcaccgagaaagttgtgtttgaacagacaaaggtcattgccgataatgtgaaagactggtctaaggtggtcctggcttatgagcccgtttgggcgatcggcaccggcaagacggccacccctcagcaggctcaagaagtgcacgagaaacttagagggtggcttaagagcaacgtgtccgatgccgtcgcccagagcacacggattatctacggaggctctgtgaccggggctacatgcaaagagctcgcctcccagccggacgttgatggattcctggtgggcggggcgagccttaagcccgaatttgtcgacattatcaatgctaaacagtga

SEQ ID NO: 3502 - RNA, 357 nt, synthetic construct
  misc_feature 1..357: note = CAA72108 variant
  source 1..357: mol_type = other RNA
atgcccctggtggtcgccgttatcttctttagcctctgggtgttcgctctgggccagcttgagcaacctgaaatttccatctctagaccggccaacaagagcgcgcacatttcctggaaggcttctatccaggggtttagctccaaaattatccattggtactggcagaaacccaataagggactggagtatctcctgcacgtgttccttaccatctctgcccaggactgcagcggcgggaaaacaaagaagctggaagtctccaaaaacgcccatacgagcacctctacactcaagattaaatttctggagaaggaagatgaggtggtttaccactgtgcttgctggatccggcat

SEQ ID NO: 3503 - RNA, 414 nt, synthetic construct
  misc_feature 1..414: note = EAL23985 variant
  source 1..414: mol_type = other RNA
atgctgagcctcctgcacacctccacacttgccgtgctgggcgctctctgcgtctacggggccggacatctggagcagccccaaatctctagcacgaagaccctttccaaaacagcgagactggaatgtgttgtgtctggcattaccatcagcgctacatccgtgtattggtaccgggagcgccctggggaagtcattcagttcctcgtgtctatcagctatgacggaaccgttagaaaggagtccggcattccgagcgggaaatttgaagtggatcggatccccgagacatctacctccacgctgaccatccacaacgtcgagaagcaggacattgccacatactattgcgccctgtgggaagtgcatagctctcgccagttcgagccttcccacagcatcaatgtttactga

SEQ ID NO: 3504 - RNA, 366 nt, synthetic construct
  misc_feature 1..366: note = CAA30181 variant
  source 1..366: mol_type = other RNA
atgctgagcctcctgcacacctccacacttgccgtgctgggcgctctctgcgtctacggggccggacatctggagcagccccaaatctctagcacgaagaccctttccaaaacagcgagactggaatgtgttgtgtctggcattaccatcagcgctacatccgtgtattggtaccgggagcgccctggggaagtcattcagttcctcgtgtctatcagctatgacggaaccgttagaaaggagtccggcattccgagcgggaaatttgaagtggatcggatccccgagacatctacctccacgctgaccatccacaacgtcgagaagcaggacattgccacatactattgcgccctgtgggaagtg

SEQ ID NO: 3505 - RNA, 366 nt, synthetic construct
  misc_feature 1..366: note = CAA33345 variant
  source 1..366: mol_type = other RNA
atgctgagcctcctgcacacctccacacttgccgtgctgggcgctctctgcgtctacggggccggacatctggagcagccccaaatctctagcacgaagaccctttccaaaacagcgagactggaatgtgttgtgtctggcattaagatcagcgctacctccgtgtattggtaccgggagcgccctggggaagtcattcagttcctcgtgtctatcagctatgacggaacagttagaaaagagtccggcattccgagcgggaagtttgaagtggatcggatccccgagacctctacatccaccctgacgatccacaacgtcgagaaacaggacattgccacctactattgcgccctgtgggaagtg

SEQ ID NO: 3506 - RNA, 2382 nt, synthetic construct
  misc_feature 1..2382: note = AAA93251 variant
  source 1..2382: mol_type = other RNA
atgatggccgctctgtaccccagcaccgacctctccggcgcctctagctcctctctgcctagctccccgtctagctccagccccaacgaggtgatggcgcttaaggatgtcagagaagttaaagaggaaaatacactgaacgagaagctctttctgcttgcttgcgacaaaggggattattacatggtgaagaaaatcctggaagaaaattcttccggagacctcaacattaattgtgtggatgtcctgggccggaacgccgtgacgatcaccattgagaatgaaaacctggacatcctccagctgcttctggattatgggtgccaaagcgccgacgctctcctggttgccattgattctgaggtggtcggagctgtggacatccttctgaatcaccgccctaagagatccagccggcccacaatcgttaagctcatggaacgcattcagaaccctgagtactctaccacaatggatgtggcccccgtcatcctggcggcccatagaaataactatgagattctgaccatgctcctgaaacaggacgtgtcccttcctaagccgcacgctgtgggctgtgaatgcacactgtgtagcgccaaaaataagaaagattccctccggcattctcgctttagactggacatctaccggtgccttgctagccccgccctgattatgctcaccgaggaagaccctatcctgcgcgcgttcgagctgtccgccgatctcaaggaactgagccttgtcgaggttgagtttagaaacgactatgaggagctggctcggcagtgtaagatgttcgccaaagatctcctggctcaagcccgcaattctagagaacttgaggtgattctgaaccacacgtccagcgacgaacccctcgataagcgggggctgctggaggagcgcatgaacctctctagactgaaacttgccatcaagtacaatcagaaagaatttgtgagccagtccaactgccagcaattcctgaataccgtctggtttggacagatgtctggctaccggagaaagcctacatgtaaaaagatcatgaccgtgctcacagttggcattttctggcccgtgctgagcctgtgctatcttatcgctccgaagtcccagtttgggcgcattatccatacccctttcatgaaatttattatccacggagcgagctacttcacgtttctcctgctgctcaacctgtattctcttgtctacaatgaggacaagaaaaacacaatgggccccgccctggaacggatcgattatctcctgattctgtggatcattgggatgatctggtccgacattaagagactttggtacgagggactcgaagatttcctggaggagagccgcaatcagctgtctttcgtgatgaactccctctatctggctacctttgcccttaaagttgtggcccacaataagttccatgactttgctgatcggaaggactgggacgccttccaccctacactggtcgcggaaggcctctttgctttcgccaacgtgctgagctacctgagacttttcttcatgtacaccacctcctctatcctcgggcccctgcaaatcagcatgggacagatgctgcaggattttggcaaattcctcggcatgtttctgcttgtcctgttctcctttacaattgggctcacgcaactgtatgacaagggatacacctctaaagagcagaaggattgtgtgggcatcttctgcgaacagcagagcaatgacacattccattcctttattgggacctgcttcgccctgttttggtatatcttcagccttgctcacgttgccatttttgtgacacgcttctcttacggagaggagctccaatcctttgtcggcgctgtgatcgttgggacctataacgtggtcgtggtgattgttctgacgaaactgctcgtcgccatgctgcacaagagcttccagcttatcgcgaatcatgaagataaggagtggaaatttgcccgggctaagctgtggctctcttacttcgacgataaatgtacactgccccctccgtttaacatcattccctcccctaagaccatctgctatatgattagctctctgagcaaatggatctgttcccacaccagcaagggaaaggtgaaaagacaaaattctcttaaggaatggcgcaacctgaaacagaagcgggacgagaactaccagaaagtgatgtgctgtctcgtccatagatacctgacatccatgcgccagaagatgcagagcaccgatcaggccacagtggaaaatctcaacgagctgcggcaagacctttccaaattcagaaatgagattcgggatctgctcggctttcgcacgtctaagtatgctatgttctaccccagaaactga

SEQ ID NO: 3507 - RNA, 3315 nt, synthetic construct
  misc_feature 1..3315: note = AAZ73614 variant
  source 1..3315: mol_type = other RNA
atgagcttcagagccgctcggctgtccatgcgcaacagacggaatgacaccctcgattctacacgcacgctgtacagctccgcctctagaagcaccgacctttcctattctgagagcgatctggtgaactttatccaggcgaatttcaagaaacgggaatgcgtctttttcacaaaggactccaaagctaccgagaacgtttgtaagtgcggctacgcccaaagccagcacatggaagggacacagattaatcagtctgagaaatggaactataagaagcataccaaagaatttcccacagatgccttcggagacatccaatttgagaccctcggcaagaaagggaagtacattcgcctgtcctgtgatacggacgctgagatcctttatgaactgctcacccagcactggcatctgaaaacacctaatctggtgattagcgtgaccggaggcgccaagaacttcgctctcaagccgagaatgcggaaaatcttttctcgcctgatctacattgcccagtccaagggggcgtggatccttacaggaggcacccactatggcctgatgaaatacattggggaggtcgtgagagataatacgatcagccggtcttccgaagagaacattgttgccatcggaattgctgcctggggcatggtgagcaatcgcgacacactcatcagaaactgcgatgctgaggggtacttcctggcccagtatcttatggacgattttacccgggaccccctgtacatcctcgacaataaccatacacaccttctgctcgtcgataatggatgtcacggccatcctaccgtggaagcgaagctgcgcaaccaacttgagaaatatatttccgaaagaaccatccaggactctaactacgggggaaagattcccatcgtttgcttcgcccagggcggcgggaaagagacactgaaggctattaatacgagcatcaagaacaaaatcccttgtgtggtcgtggaaggatccggccagattgccgatgtgatcgctagcctcgtcgaggttgaggacgccctgacctcttccgccgtgaaggaaaaacttgtgcggtttctgcccagaacagtcagccgcctccctgaggaagagaccgaatcttggattaagtggctgaaagagatcctggagtgcagccacctcctgacagtgattaagatggaagaggctggggatgaaatcgtttccaatgcgatctcttatgccctttacaaggctttcagcacctccgagcaagacaaagataactggaatggacagctgaagctcctgcttgaatggaaccagctggacctcgccaatgatgagattttcacgaacgaccggagatgggagagcgccgatctgcaagaagtgatgtttacagctctgatcaaagaccgcccgaagttcgtccggctctttctggagaatggccttaacctgagaaaattcctcacccatgacgtgctgaccgaactgttttctaatcacttctccacacttgtttatcgcaacctccagattgccaagaatagctacaacgatgcgctgctgacctttgtgtggaagctcgtcgctaatttccggagagggtttcgcaaagaggaccggaacggaagagatgagatggacatcgaactgcacgatgtgtctcccattacacgccatcctcttcaggccctgttcatctgggccattctccagaacaagaaagagctgtccaaggtcatctgggaacaaacgcggggctgtaccctggctgcccttggcgctagcaaactcctgaagacactggccaaggtgaaaaatgacatcaacgcggccggggagtccgaggaactcgctaatgagtacgaaaccagagccgttgagctgtttacagaatgctattctagcgatgaggaccttgctgaacagctgctcgtgtactcctgtgaggcctggggaggctctaactgcctggagctggcggtcgaagccaccgatcagcacttcattgctcagcccggggtgcaaaattttcttagcaagcagtggtatggagagatctcccgggacacgaaaaactggaagattatcctctgcctgttcattatccctctggttggctgtgggttcgtgagctttcgcaaaaagcccgtcgataaacataagaagctcctgtggtactatgtggccttctttacctctccgttcgtggtcttttcctggaatgttgtgttctacatcgcttttcttcttctcttcgcctatgtgctgctgatggactttcacagcgtccctcatccccctgaacttgtgctctactctctggttttcgtgctgttttgcgatgaggtcagacagtggtacgtgaacggcgttaattatttcacagacctctggaacgtgatggacaccctgggactgttttacttcattgccggcatcgtcttccggctgcactccagcaataaatctagcctctattccgggagagtgatcttttgtctggattacattattttcacactgcgccttatccacatctttaccgttagccggaacctgggacccaagattatcatgctccagagaatgctgattgacgtgttctttttcctctttctgttcgctgtctggatggtggcgtttggcgtggcccgccaagggatccttagacagaatgaacagcggtggcgctggattttcagatctgtcatctatgagccctacctggctatgtttggacaggttccttccgatgtggacggcacgacatatgatttcgcccattgcaccttcacagggaacgagagcaaaccgctctgtgtggaactggacgagcacaatctgccccggtttcctgaatggatcaccattccccttgtctgcatctacatgctgtccaccaacattctcctggtgaacctcctggttgccatgttcggctacacagtgggaacggtccaagagaataacgatcaggtgtggaagtttcagcgctatttccttgttcaagagtactgttctagactgaatatcccttttcccttcattgtgtttgcttatttctacatggtcgtgaaaaagtgctttaagtgttgctgtaaagaaaagaacatggagagctccgtttgctgcttcaaaaatgaagacaacgagaccctcgcctgggaaggcgtgatgaaggagaattatctggtcaaaatcaacacaaaggcgaatgatacctctgaggaaatgcggcatcgctttagacagctggacacaaagctgaacgatctgaaagggctcctgaaggagattgctaataaaatcaagtga

SEQ ID NO: 3508 - RNA, 2097 nt, synthetic construct
  misc_feature 1..2097: note = AAK13079 variant
  source 1..2097: mol_type = other RNA
atgatgagaagccggtccaagtctccccgcagacctagcccgaccgcccggggcgctaactgcgacgtggagctgctcaaaacaacgacccgcgatagagaggaactgaagtgtatgcttgaaaaatacgagcggcacctggccgaaatccaggggaatgtcaaggttctcaaatccgagcgcgacaagattttcctgctttatgagcaagcgcaggaagagatcacaagactgcggcgcgaaatgatgaagtcttgcaaaagccccaagtccaccacagctcatgccattctcagacgggtggagaccgagcgcgatgtggcctttacagacctgagacggatgaccacggaacgcgattctctgagagagcggctcaaaatcgctcaggaaaccgccttcaacgagaaggctcacctggaacagagaattgaggagcttgaatgtacagtccataatctggacgatgagcgcatggaacaaatgagcaacatgaccctcatgaaagagacaatctccaccgtggaaaaggagatgaaaagcctggcccggaaggcgatggacacggagtctgaacttggaagacagaaggccgagaataactccctgcgcctcctgtacgaaaatacagagaaagatctgagcgacacccagcggcacctcgctaagaaaaagtatgaactgcagcttacacaagagaaaatcatgtgcctggatgagaagattgacaactttaccagacagaatatcgcccagcgcgaagagatttctatcctcggcgggaccctgaacgatcttgctaaggaaaaagagtgtctgcaggcctgcctcgacaagaaatccgagaatattgcgagcctgggagaatctctggccatgaaggagaaaacaatctccggcatgaagaacattatcgctgaaatggagcaagccagccggcagtgtacggaagctctcatcgtttgcgagcaggacgtgtccagaatgcgccggcaactggatgagaccaatgacgaacttgcccagattgccagagagcgcgatatcctggctcatgacaacgataatctccaggaacagttcgcgaaggccaaacaagagaaccaggctctgtctaagaaacttaacgacacacacaatgaactgaacgatattaagcagaaagtccaggacaccaatctcgaggtgaacaagctgaagaatatcctgaaaagcgaggaatccgagaaccggcaaatgatggaacagctcagaaaggccaatgaggatgccgaaaactgggagaataaagctcggcagagcgaggccgacaacaatacactgaaacttgaactgattaccgcggaggctgaagggaaccgcctcaaggagaaggttgattctctgaatagagaggtggaacagcacctgaacgccgagcggtcctacaagagccaaatctctacgcttcataaaagcgtcgtgaagatggaagaggaactccagaaagtgcagtttgagaaggtctccgccctggctgacctgtctagcacaagagagctctgtatcaaactggactccagcaaggaacttctgaatcgccagctcgttgccaaagatcaagagattgaaatgcgggagaacgaactggactctgctcactccgagatcgagctgcttagaagccagatggccaacgaacgcatttctatgcagaatctcgaggcgctgctggtggccaacagagataaggaatatcaatcccagatcgctctccaggagaaggaaagcgagattcagctgcttaaagagcatctgtgcctcgccgaaaataagatggctatccaatcccgggacgtggcccagttccgcaacgtcgtgacccagctggaggcggatctggacatcaccaaaagacagcttggaacagaacggtttgagcgcgagagagccgttcaagaactccggcgccagaattactctagcaacgcttatcacatgtcctctaccatgaagcctaatacaaaatgtcacagccccgagagagcccatcaccggtcccctgatcgcggcctggacagaagcctggaagagaacctctgctaccgggatttctga

SEQ ID NO: 3509 - RNA, 927 nt, synthetic construct
  misc_feature 1..927: note = CCDS48205.1 variant
  source 1..927: mol_type = other RNA
atgagacccgagggcagcctgacctaccgggtgcctgaacgcctcagacaggggttctgcggagtcggccgggccgctcaagccctggtttgtgcgtccgctaaggaggggacagcctttcgcatggaagccgtgcaggagggagctgccggcgtggaatctgagcaggctgcccttggggaggaagcggtcctgctcctggacgatatcatggccgaggtggaagttgtggctgaggaggaaggacttgtcgagagacgggaagaggcccagcgcgctcaacaggccgtgccgggccccggccctatgacgcccgaaagcgcgcctgaggagctgctcgccgttcaggtggaactggagcccgtcaacgctcaggccagaaaagccttctcccggcaacgcgaaaagatggagagacggcgcaaacctcacctggacagacgcggggctgtgattcagtctgtgccgggattttgggccaatgtcatcgctaaccatccccagatgagcgcgctcattaccgatgaagacgaggatatgctgtcctatatggtttctcttgaggtgggcgaagagaagcaccctgtgcatctgtgcaaaatcatgctgttctttcggagcaatccctacttccagaacaaggtcattacaaaggaatatctcgtgaatatcaccgagtacagagcctcccacagcacacctatcgaatggtatcccgactacgaggttgaggcttatcggagacgccatcacaactcttcccttaactttttcaattggtttagcgatcacaatttcgccgggtctaacaaaattgccgaaatcctgtgtaaggacctctggcggaatccgctgcaatactacaaaagaatgaagcctcccgaggaaggaaccgagacatccggcgatagccagctgctctcttga

SEQ ID NO: 3510 - RNA, 369 nt, synthetic construct
  misc_feature 1..369: note = M13231.1 variant
  source 1..369: mol_type = other RNA
atgagatgggccctgctcgtgctgcttgctttcctgagccccgcctcccagaagtctagcaacctcgagggccggaccaaatccgtcacacgccaaacggggtctagcgcggaaattacctgcgacctgacagttaccaatacattttacatccactggtatcttcatcaggagggaaaggctcctcagagactgctctactatgatgtgtccaccgcccgggacgtgctggaatctggcctgagcccggggaaatactatacacacacgccccgcagatggtcctggatcctccggctgcagaaccttattgagaatgatagcggagtctactattgtgccacctgggaccgccaaaagctgctctga

SEQ ID NO: 3511 - RNA, 804 nt, synthetic construct
  misc_feature 1..804: note = CCDS12619.1 variant
  source 1..804: mol_type = other RNA
atgggcgccagacagatccaaaccagctcctctcagacaagccccgaggaagctatggggacgcctcggattcagcatctgctcatcctgcttgtgctgggagcctccctcctgacctctggccttgagctgtactgccagaaggggctcagcatgacagtcgaagcggacccggctaacatgttcaattggaccacagaggaagttgagacctgtgataaaggagccctgtgccaagagacaattctgatcattaaggccggcaccgaaacggctatcctcgccaccaaagggtgtatccccgagggagaagaggctattacaatcgtgcagcactcctctcctcccggcctgattgtgaccagctattccaactactgcgaggacagcttttgtaatgataaggactctctttcccagttctgggaatttagcgagacaaccgcctctacggtctccacaaccctgcactgccctacatgtgtggcgctcggaacctgcttcagcgccccctctctgccttgtccgaacgggaccacacgctgctatcagggaaaacttgaaatcacgggcgggggaattgagtccagcgttgaagtgaagggctgtaccgctatgatcgggtgcagactgatgtccggcattctcgccgtcggccccatgtttgtgcgggaggcttgccctcatcaactgctgacacagccccgcaagaccgagaatggcgccacatgtctccctatccccgtttgggggctgcagcttctgctcccgctgcttctgccttctttcatccactttagctga

SEQ ID NO: 3512 - RNA, 1590 nt, synthetic construct
  misc_feature 1..1590: note = AHZ44440 variant
  source 1..1590: mol_type = other RNA
atgctgctcgccgtgctgtactgccttctgtggagcttccagacctccgctggccactttcccagagcctgtgtctctagcaagaacctcatggagaaagaatgctgtcctccgtggtccggggaccggtctccctgcggacaactgagcggccgcgggtcctgtcagaatatccttctgtctaacgcgcctctcggaccccagttcccttttacaggcgttgatgacagagagagctggccctccgtgttctataatcggacgtgccagtgtagcgggaactttatgggattcaattgcggcaactgtaagtttggcttctgggggcctaattgcaccgaacgcagactgctggtgcggcgcaacatttttgatctctctgctccggagaaagacaagttctttgcctacctgacacttgccaaacataccatctccagcgattatgtcattcccatcggaacatacggccaaatgaagaatgggtctacccctatgttcaacgacattaatatctatgatctgtttgtgtggatgcactactatgtttccatggacgctctcctgggaggcagcgaaatctggagagatattgacttcgcccatgaggctcccgccttccttccttggcaccggctgtttctcctgcgctgggagcaggaaatccagaagctgacaggggatgagaacttcaccattccctactgggactggagagatgcggaaaaatgtgacatctgcacggacgagtacatgggaggccagcatccgaccaatcctaacctcctgtctcccgcctcctttttcagctcctggcaaattgtgtgctctcggcttgaggaatataatagccaccagtccctgtgtaacggcacacctgaggggcccctccgcagaaaccccggaaatcacgataagagccggacccctcgcctgccgtcttccgctgacgtcgaattttgccttagcctgacacagtacgagtctggcagcatggataaagccgctaacttctcctttagaaataccctcgaagggttcgcctctcccctgacgggaatcgcggacgccagccagtccagcatgcataacgctctgcacatttatatgaatggcacaatgtctcaagtgcaggggtccgccaacgatcctatctttctcctgcatcacgctttcgttgacagcatctttgagcagtggcttcggagacaccgccccctgcaagaggtgtaccctgaagccaatgcccccattcggcataacagagagtcttatatggtcccgttcatccctctctaccgcaatggagactttttcatttccagcaaggatctgggctatgattactcctaccttcaggactctgatcccgacagcttccaggactatatcaaatcctacctggaacaggcttctcggatttggagctggctcctgggcgcggccatggtgggggctgtgctgaccgccctcctggccggacttgtctccctgctctgtagacacaagcgcaagcaactgcctgaggaaaaacagcccctgcttatggagaaggaggattatcatagcctctaccagtctcacctgtga

SEQ ID NO: 3513 - RNA, 1590 nt, synthetic construct
  misc_feature 1..1590: note = AGV39051 variant
  source 1..1590: mol_type = other RNA
atgctgctcgccgtgctgtactgccttctgtggagcttccagacctccgctggccactttcccagagcctgtgtctctagcaagaacctcatggagaaagaatgctgtcctccgtggtccggggaccggtctccctgcggacaactgagcggccgcgggtcctgtcagaatatccttctgtctaacgcgcctctcggaccccagttcccttttacaggcgttgatgacagagagagctggccctccgtgttctataatcggacgtgccagtgtagcgggaactttatgggattcaattgcggcaactgtaagtttggcttctgggggcctaattgcaccgaacgcagactgctggtgcggcgcaacatttttgatctctctgctccggagaaagacaagttctttgcctacctgacacttgccaaacataccatctccagcgattatgtcattcccatcggaacatacggccaaatgaagaatgggtctacccctatgttcaacgacattaatatctatgatctgtttgtgtggatgcactactatgtttccatggacgctctcctgggaggcagcgaaatctggagagatattgacttcgcccatgaggctcccgccttccttccttggcaccggctgtttctcctgcgctgggagcaggaaatccagaagctgacaggggatgagaacttcaccattccctactgggactggagagatgcggaaaaatgtgacatctgcacggacgagtacatgggaggccagcatccgaccaatcctaacctcctgtctcccgcctcctttttcagctcctggcaaattgtgtgctctcggcttgaggaatataatagccaccagtccctgtgtaacggcacacctgaggggcccctccgcagaaaccccggaaatcacgataagagccggacccctcgcctgccgtcttccgctgacgtcgaattttgccttagcctgacacagtacgagtctggcagcatggataaagccgctaacttctcctttagaaataccctcgaagggttcgcctctcccctgacgggaatcgcggacgccagccagtccagcatgcataacgctctgcacatttatatgaatggcacaatgtctcaagtgcaggggtccgccaacgatcctatctttctcctgcatcacgctttcgttgacagcatctttgagcagtggcttcggagacaccgccccctgcaagaggtgtaccctgaagccaatgcccccattggacataaccgggagtcttatatggtcccgttcatccctctctacagaaatggcgactttttcatttccagcaaggatctgggctatgattactcctaccttcaggactctgatcccgacagcttccaggactatatcaaatcctacctggaacaggcttctcgcatttggagctggctcctgggggcggccatggtgggagctgtgctgaccgccctcctggccggccttgtctccctgctctgtcggcacaagagaaagcaactgcctgaggaaaaacagcccctgcttatggagaaggaggattatcatagcctctaccagtctcacctgtga

SEQ ID NO: 3514 - RNA, 1590 nt, synthetic construct
  misc_feature 1..1590: note = AGV39049 variant
  source 1..1590: mol_type = other RNA
atgctgctcgccgtgctgtactgccttctgtggagcttccagacctccgctggccactttcccagagcctgtgtctctagcaagaacctcatggagaaagaatgctgtcctccgtggtccggggaccggtctccctgcggacaactgagcggccgcgggtcctgtcagaatatccttctgtctaacgcgcctctcggaccccagttcccttttacaggcgttgatgacagagagagctggccctccgtgttctataatcggacgtgccagtgtagcgggaactttatgggattcaattgcggcaactgtaagtttggcttctgggggcctaattgcaccgaacgcagactgctggtgcggcgcaacatttttgatctctctgctccggagaaagacaagttctttgcctacctgacacttgccaaacataccatctccagcgattatgtcattcccatcggaacatacggccaaatgaagaatgggtctacccctatgttcaacgacattaatatctatgatctgtttgtgtggatgcactactatgtttccatggacgctctcctgggaggcagcgaaatctggagagatattgacttcgcccatgaggctcccgccttccttccttggcaccggctgtttctcctgcgctgggagcaggaaatccagaagctgacaggggatgagaacttcaccattccctactgggactggagagatgcggaaaaatgtgacatctgcacggacgagtacatgggaggccagcatccgaccaatcctaacctcctgtctcccgcctcctttttcagctcctggcaaattgtgtgctctcggcttgaggaatataatagccaccagtccctgtgtaacggcacacctgaggggcccctccgcagaaaccccggaaatcacgataagagccggacccctcgcctgccgtcttccgctgacgtcgaattttgccttagcctgacacagtacgagtctggcagcatggataaagccgctaacttctcctttagaaataccctcgaagggttcgcctctcccctgacgggaatcgcggacgccagccagtccagcatgcataacgctctgcacatttatatgaatggcacaatgtctcaagtgcaggggtccgccaacgatcctatctttctcctgcatcacgctttcgttgacagcatctttgagcagtggcttcaacggcacagacccctgcaggaggtgtaccctgaagccaatgcccccattggacataaccgcgagtcttatatggtcccgttcatccctctctaccggaatggcgactttttcatttccagcaaggatctgggctatgattactcctaccttcaggactctgatcccgacagcttccaggactatatcaaatcctacctggaacaggcttctagaatttggagctggctcctgggggcggccatggtgggagctgtgctgaccgccctcctggccggccttgtctccctgctctgtcgccacaagcggaagcaactgcctgaggaaaaacagcccctgcttatggagaaggaggattatcatagcctctaccagtctcacctgtga

SEQ ID NO: 3515 - RNA, 1590 nt, synthetic construct
  misc_feature 1..1590: note = AGV39050 variant
  source 1..1590: mol_type = other RNA
atgctgctcgccgtgctgtactgccttctgtggagcttccagacctccgctggccactttcccagagcctgtgtctctagcaagaacctcatggagaaagaatgctgtcctccgtggtccggggaccggtctccctgcggacaactgagcggccgcgggtcctgtcagaatatccttctgtctaacgcgcctctcggaccccagttcccttttacaggcgttgatgacagagagagctggccctccgtgttctataatcggacgtgccagtgtagcgggaactttatgggattcaattgcggcaactgtaagtttggcttctgggggcctaattgcaccgaacgcagactgctggtgcggcgcaacatttttgatctctctgctccggagaaagacaagttctttgcctacctgacacttgccaaacataccatctccagcgattatgtcattcccatcggaacatacggccaaatgaagaatgggtctacccctatgttcaacgacattaatatctatgatctgtttgtgtggatgcactactatgtttccatggacgctctcctgggaggctacgaaatctggagagatattgacttcgcccatgaggctcccgccttccttccttggcaccggctgtttctcctgcgctgggagcaggaaatccagaagctgacaggggatgagaacttcaccattccctactgggactggagagatgcggaaaaatgtgacatctgcacggacgagtatatgggaggccagcatccgaccaatcctaacctcctgagccccgcctcctttttctccagctggcaaattgtgtgctcccggcttgaggaatacaattctcaccagagcctgtgtaacggcacacctgaggggcccctccgcagaaaccccggaaatcacgataagtcccggacccctcgcctgccgagctctgctgacgtcgaattttgcctttccctgacacagtatgagagcggctctatggataaagccgctaacttcagctttagaaataccctcgaagggttcgcctctcccctgacgggaatcgcggacgcctctcagagctccatgcataacgctctgcacatttacatgaatggcacaatgagccaagtgcaggggtctgccaacgatcctatctttctcctgcatcacgctttcgttgactccatctttgagcagtggcttcggagacaccgccccctgcaagaggtgtatcctgaagccaatgcccccattggacataaccgggagagctacatggtcccgttcatccctctctatagaaatggcgactttttcatttcttccaaggatctgggctacgattacagctatcttcaggactccgatcccgactctttccaggactacatcaaaagctatctggaacaggcttcccgcatttggtcttggctcctgggggcggccatggtgggagctgtgctgaccgccctcctggccggccttgtcagcctgctctgtcggcacaagagaaagcaactgcctgaggaaaaacagcccctgcttatggagaaggaggattaccattccctctatcagagccacctgtga

SEQ ID NO: 3516 - RNA, 714 nt, synthetic construct
  misc_feature 1..714: note = CAA04137 variant
  source 1..714: mol_type = other RNA
atgagccccctgtggtggggcttcctcctgtcctgccttgggtgtaagatcctgcctggagcccagggccaatttccgagagtgtgcatgaccgtcgactctctcgttaacaaagagtgttgcccccggctgggggctgaaagcgccaatgtgtgtggatcccagcagggccgcgggcagtgcacagaggtgagagcggatacgcggccttggtctggaccctacattcttcgcaaccaagacgatagagaactgtggcctcggaagttctttcaccgcacctgtaaatgcacaggcaatttcgctggctataactgtggggactgcaagtttggatggaccggccccaattgtgagcggaaaaagcctccggtcatcagacagaacattcatagcctctctccccaggaacgcgagcagttcctgggggccctggatctcgccaagaaaagagtgcaccctgactacgttatcacaacccaacattgggtgggactgcttggccccaatgggacacagcctcagtttgctaactgctccgtctatgatttctttgtgtggctgcactactatagcgttcgggacaccctcctgggaggcttctttccctggcttaaggtgtactattaccgcttcgtcattggcctgagagtgtggcagtgggaggtgatctcctgcaaactcatcaagcgggccacgacccgccaaccgtga

SEQ ID NO: 3517 - RNA, 1590 nt, synthetic construct; identical to SEQ ID NO: 3513
  misc_feature 1..1590: note = AAA61242 variant
  source 1..1590: mol_type = other RNA

SEQ ID NO: 3518 - RNA, 1590 nt, synthetic construct
  misc_feature 1..1590: note = AGV39054 variant
  source 1..1590: mol_type = other RNA
atgctgctcgccgtgctgtactgccttctgtggagcttccagacctccgctggccactttcccagagcctgtgtctctagcaagaacctcatggagaaagaatgctgtcctccgtggtccggggaccggtctccctgcggacaactgagcggccgcgggtcctgtcagaatatccttctgtctaacgcgcctctcggaccccagttcccttttacaggcgttgatgacagagagagctggccctccgtgttctataatcggacgtgccagtgtagcgggaactttatgggattcaattgcggcaactgtaagtttggcttctgggggcctaattgcaccgaacgcagactgctggtgcggcgcaacatttttgatctctctgctccggagaaagacaagttctttgcctacctgacacttgccaaacataccatctccagcgattatgtcattcccatcggaacatacggccaaatgaagaatgggtctacccctatgttcaacgacattaatatctatgatctgtttgtgtggatgcactactatgtttccatggacgctctcctgggaggcagcgaaatctggagagatattgacttcgcccatgaggctcccgccttccttccttggcaccggctgtttctcctgcgctgggagcaggaaatccagaagctgacaggggatgagaacttcaccattccctactgggactggagagatgcggaaaaatgtgacatctgcacggacgagtacgtgggaggccagcatccgaccaatcctaacctcctgtctcccgcctcctttttcagctcctggcaaattgtctgctctcggcttgaggaatataatagccaccagtccctgtgtaacggcacacctgaggggcccctccgcagaaaccccggaaatcacgataagagccggacccctcgcctgccgtcttccgctgacgtggaattttgccttagcctgacacagtacgagtctggcagcatggataaagccgctaacttctcctttagaaataccctcgaagggttcgcctctcccctgacgggaatcgcggacgccagccagtccagcatgcataacgctctgcacatttatatgaatggcacaatgtctcaagttcaggggtccgccaacgatcctatctttctcctgcatcacgctttcgtggacagcatctttgagcagtggcttcggagacaccgccccctgcaagaggtctaccctgaagccaatgcccccattggacataaccgggagtcttatatggtgccgttcatccctctctacagaaatggcgactttttcatttccagcaaggatctgggctatgattactcctaccttcaggactctgatcccgacagcttccaggactatatcaaatcctacctggaacaggcttctcgcatttggagctggctcctgggggcggccatggtgggagctgtcctgaccgccctcctggccggccttgtttccctgctctgtcggcacaagagaaagcaactgcctgaggaaaaacagcccctgcttatggagaaggaggattatcatagcctctaccagtctcacctgtga

SEQ ID NO: 3519 - RNA, 1590 nt, synthetic construct
  misc_feature 1..1590: note = AGV39162 variant
  source 1..1590: mol_type = other RNA
atgctgctcgccgtgctgtactgccttctgtggagcttccagacctccgctggccactttcccagagcctgtgtctctagcaagaacctcatggagaaagaatgctgtcctccgtggtccggggaccggtctccctgcggacaactgagcggccgcgggtcctgtcagaatatccttctgtctaacgcgcctctcggaccccagttcccttttacaggcgttgatgacagagagagctggccctccgtgttctataatcggacgtgccagtgtagcgggaactttatgggattcaattgcggcaactgtaagtttggcttctgggggcctaattgcaccgaacgcagactgctggtgcggcgcaacatttttgatctctctgctccggagaaagacaagttctttgcctacctgacacttgccaaacataccatctccagcgattatgtcattcccatcggaacatacggccaaatgaagaatgggtctacccctatgttcaacgacattaatatctatgatctgtttgtgtggatgcactactatgtttccatggacgctctcctgggaggcagcgaaatctggagagatattgacttcgcccatgaggctcccgccttccttccttggcaccggctgtttctcctgcgctgggagcaggaaatccagaagctgacaggggatgagaacttcaccattccctactgggactggagagatgcggaaaaatgtgacatctgcacggacgagtacatgggaggccagcatccgaccaatcctaacctcctgtctcccgcctcctttttcagctcctggcaaattgtgtgctctcggcttgaggaatataatagccaccagtccctgtgtaacggcacacctgaggggcccctccgcagaaaccccggaaatcacgataagagccggacccctcgcctgccgtcttccgctgacgtcgaattttgccttagcctgacacagtacgagtctggcagcatggataaagccgctaacttctcctttagaaataccctcgaagggttcgcctctcccctgacgggaatcgcggacgccagccagtccagcatgcataacgctctgcacatttatatgaatggcacaatgtctcaagtgcaggggtccgccaacgatcctatctttctcctgcatcacgctttcgttgacagcatctttgagcagtggcttcggagacaccgcctgctccaagaggtgtaccccgaagccaatgcccctattggacataaccgggagtcttatatggtccccttcatcccgctgtacagaaatggcgactttttcatttccagcaaggatcttggctatgattactcctacctgcaggactctgatcctgacagcttccaggactatatcaaatcctacctcgaacaggcttctcgcatttggagctggctgctgggggcggccatggtgggagctgtgctcaccgccctgcttgccggcctggtctccctcctgtgtcggcacaagagaaagcaactgcccgaggaaaaacagcctcttctcatggagaaggaggattatcatagcctgtaccagtctcacctgtga

SEQ ID NO: 3520 - RNA, 1590 nt, synthetic construct
  misc_feature 1..1590: note = AGV39086 variant
  source 1..1590: mol_type = other RNA
atgctgctcgccgtgctgtactgccttctgtggagcttccagacctccgctggccactttcccagagcctgtgtctctagcaagaacctcatggagaaagaatgctgtcctccgtggtccggggaccggtctccctgcggacaactgagcggccgcgggtcctgtcagaatatccttctgtctaacgcgcctctcggaccccagttcccttttacaggcgttgatgacagagagagctggccctccgtgttctataatcggacgtgccagtgtagcgggaactttatgggattcaattgcggcaactgtaagtttggcttctgggggcctaattgcaccgaacgcagactgctggtgcggcgcaacatttttgatctctctgctccggagaaagacaagttctttgcctacctgacacttgccaaacataccatctccagcgattatgtcattcccatcggaacatacggccaaatgaagaatgggtctacccctatgttcaacgacattaatatctatgatctgtttgtgtggatgcactactatgtttccatggacgctctcctgggaggcagcgaaatctggagagatattgacttcgcccatgaggctcccgccttccttccttggcaccggctgtttctcctgcgctgggagcaggaaatccagaagctgacaggggatgagaacttcaccattccctactgggactggagagatgcggaaaaatgtgacatctgcacggacgagtacatgggaggccagcatccgaccaatcctaacctcctgtctcccgcctcctttttcagctcctggcaaattgtgtgctctcggcttgaggaatataatagccaccagtccctgtgtaacggcacacctgaggggcccctccgcagaaaccccggaaatcacgataagagccggacccctcgcctgccgtcttccgctgacgtcgaattttgccttagcctgacacagtacgagtctggcagcatggataaagccgctaacttctcctttagaaataccctcgaagggttcgcctctcccctgacgggaatcgcggacgccagccagtccagcatgcataacgctctgcacatttatatgaatggcacaatgtctcaagtgcaggggtccgccaacgatcctatctttctcctgcatcacgctttcgttgacagcatgtttgagcagtggcttcggagacaccgccccctgcaagaggtgtaccctgaagccaatgcccccatcggacataaccgggagtcttatatggtcccgttcattcctctctacagaaatggcgactttttcatctccagcaaggatctgggctatgattactcctaccttcaggactctgatcccgacagcttccaggactatattaaatcctacctggaacaggcttctcgcatctggagctggctcctgggggcggccatggtgggagctgtgctgaccgccctcctggccggccttgtctccctgctctgtcggcacaagagaaagcaactgcctgaggaaaaacagcccctgcttatggagaaggaggattatcatagcctctaccagtctcacctgtga

SEQ ID NO: 3521 - RNA, 1614 nt, synthetic construct
  misc_feature 1..1614: note = AAC15468 variant
  source 1..1614: mol_type = other RNA
atgagcgcccccaagctgctctccctgggctgcatcttctttcctcttctcctgttccagcaagctagagcccagtttccgcggcagtgtgcgaccgtggaggctctgcgctctgggatgtgctgtcccgaccttagccctgtctccggacccggcacagatagatgcgggtctagctccggacggggccgctgtgaagccgttacggccgactctagacctcacagcccccagtaccctcatgatgggcgggacgatcgcgaggtgtggccgctgagattctttaaccggacctgccactgtaatggaaacttctccggccataattgcggcacatgtcgccccgggtggagaggagctgcctgcgaccaacgggtgctcattgtccgcagaaacctgctggatctcagcaaagaagagaagaatcactttgtgcgggctctggacatggccaaacgcaccacacatcctcttttcgttatcgcgaccagacggtctgaagagattctgggccccgatgggaacacacctcagtttgagaatatctccatttataactacttcgtgtggacccactattacagcgtcaagaaaacgtttctcggagtgggccaggaatctttcggggaggttgacttttcccacgaaggacccgccttcctgacctggcatagatatcaccttctgcgcctcgagaaggatatgcaggagatgctgcaagaaccgagcttctctctgccttactggaattttgctacaggcaagaacgtgtgtgacatctgcaccgatgacctcatgggctcccggagcaatttcgactccacactgatctctcccaacagcgtcttttcccagtggagagtggtgtgcgatagccttgaggactatgataccctggggacgctctgtaattctacagaagacggacctattcgccggaaccccgccggcaatgtcgctagacccatggttcagcgcctgcctgagccgcaggatgtggcccaatgccttgaagtggggctgttcgacacaccccctttttactccaacagcaccaactctttccggaataccgtcgagggatacagcgatcccaccggcaaatatgaccctgcggtgagatccctccataacctggcccacctgtttctcaatgggacaggaggccagacgcacctgtctcccaacgatccgatcttcgttcttctgcatacctttacagacgctgtgttcgatgagtggctccgccggtacaatgccgacattagcacctttcctctggaaaacgctcccatcggccacaatagacagtataacatggtccctttctggccccctgtgacaaataccgagatgtttgttacggcccccgacaaccttgggtacacatatgaaattcaatggccgtcccgcgagttcagcgtgcctgaaatcattgccatcgctgtcgtgggagcgctgctcctggtcgccctgatcttcggcaccgcttcttacctcattcgggccagacggtccatggatgaggccaatcagcccctgcttaccgaccagtatcagtgttacgctgaggaatacgagaagctgcaaaaccccaatcagagcgtggtttga

SEQ ID NO: 3522 - RNA, 1560 nt, synthetic construct
  misc_feature 1..1560: note = AAA20870 variant
  source 1..1560: mol_type = other RNA
atgagccccctgtggtggggcttcctcctgtcctgccttgggtgtaagatcctgcctggagcccagggccaatttccgagagtgtgcatgaccgtcgactctctcgttaacaaagagtgttgcccccggctgggggctgaaagcgccaatgtgtgtggatcccagcagggccgcgggcagtgcacagaggtgagagcggatacgcggccttggtctggaccctacattcttcgcaaccaagacgatagagaactgtggcctcggaagttctttcaccgcacctgtaaatgcacaggcaatttcgctggctataactgtggggactgcaagtttggatggaccggccccaattgtgagcggaaaaagcctccggtcatcagacagaacattcatagcctcagcccccaggaacgcgagcagttcctgggggccctggatctcgccaagaaaagagtgcaccctgactacgttatcacaacccaacattggctgggacttctgggccccaatgggacacagcctcagtttgctaactgctctgtgtatgatttctttgtctggctccactactatagcgtgcgggacaccctgcttggacccggccgcccgtacagagccattgatttctcccatcagggccctgcttttgttacgtggcaccggtatcatctgctctgcctggagcgcgacctgcaaagactcatcgggaatgaatccttcgccctgccctactggaactttgcgaccggacggaatgagtgtgatgtgtgcacagaccagcttttcggcgccgctagacctgatgaccccaccctgatctctcgcaactcccggttcagctcttgggaaacagtctgtgactccctcgatgactacaatcacctggtgaccctttgcaacgggacgtatgagggactgctcagacgcaatcagatgggccggaacagcatgaagctgcccacactgaaagatattagagactgtctctctctgcaaaagtttgataaccctccgttctttcaaaattccaccttcagctttcgcaacgcccttgaggggttcgacaaagctgatggaacactggactcccaggtgatgtctctccacaatctggtccatagctttcttaacggcaccaatgccctgccccactccgcggccaacgatcctatcttcgttgtgctccacagctttaccgacgctattttcgatgaatggatgaagcggtttaatccccctgccgacgcttggccccaggagctggccccgatcggccataacagaatgtacaatatggtgcctttctttccccctgtcacaaacgaggaactgttcctcacgtctgaccagctggggtattcctacgccattgatcttcccgtgagcgttgaagagacccctggatggcccacaaccctgctcgtggtcatgggcacactggtggctctggttgggcttttcgtgctcctggcgtttctgcagtatcgccggctcagaaagggatacaccccgctgatggagacgcacctttctagcaaacgctatacagaagaggcctga

SEQ ID NO: 3523 - RNA, 456 nt, synthetic construct
  misc_feature 1..456: note = CCDS7679.1 variant
  source 1..456: mol_type = other RNA
atgagacggctgctcctggtgaccagccttgtcgttgtgctgctctgggaggccggcgctgtgcccgcccctaaggtcccgatcaaaatgcaagtgaagcactggccctccgaacaggaccctgagaaagcgtggggagctcgcgttgtggaaccccctgagaaggatgaccagctggtcgtgcttttccccgttcagaaacctaagctgctcacaacggaagagaagccgagagggcagggccgggggcccattctgcctggaaccaaagcctggatggagacagaagataccctgggccatgtgctctctcccgagcctgaccacgatagcctgtaccatcccccgcctgaagaggaccaaggggaggaacgccccagactttgggtcatgcctaaccaccaggtgctgctcggacccgaggaagatcaggaccatatctatcacccccagtga

SEQ ID NO: 3524 - RNA, 525 nt, synthetic construct
  misc_feature 1..525: note = ACF47598 variant
  source 1..525: mol_type = other RNA
atggtgagctactgggacaccggcgtcctgctctgcgccctgctttcctgtctgctcctgacagggtctagctccggatctaaacttaaggatcccgagctgagcctcaagggcacgcagcacatcatgcaagctgggcagaccctgcatctgcagtgcagaggagaagccgcgcacaaatggtccctccctgagatggtttctaaggaaagcgagcggctgtccattacaaaaagcgcttgtggccgcaacgggaagcagttctgctctacccttacactgaataccgcccaagccaaccatacaggattttattcctgtaagtacctcgctgtgccgaccagcaaaaagaaagaaacggagtctgccatctatattttcatctccgacaccggcagaccctttgtggagatgtacagcgaaattcctgagatcatccacatgacagaaggccgggagctggtcattccctgccgcgtgacctctcctaatatcacagttacccttaagaaaaagaaggcttga

SEQ ID NO: 3525 - RNA, 750 nt, synthetic construct
  misc_feature 1..750: note = BAR92607 variant
  source 1..750: mol_type = other RNA
atgggcagcgacgtgagagatctgaacgccctcctgcccgctgtcccttcccttgggggaggcgggggatgcgccctgccggtttctggcgcggctcagtgggcccccgtgctcgacttcgcccctcccggggctagcgcctacggatccctgggcggccctgctccccctccggcgccccctccccctcccccgcctccccctcactcttttatcaagcaagagcccagctggggaggggccgaaccccatgaggaacagtgtctttccgccttcaccgtgcacttttctggccagttcacagggacggctggagcctgccggtatggcccttttgggccgccccctcccagccaggcttccagcggacaagcccgcatgttccctaatgcgccctacctgccgtcttgtctcgagtcccagcctgccattagaaaccagggctatagcaccgtcacatttgatggcaccccctcttacgggcatacaccttcccaccatgctgcccagttccccaatcacagctttaaacacgaagaccctatgggacaacagggctctctgggggagcagcagtattccgtgcccccgcctgtttacggatgccatacccccacagatagctgtaccggctcccaagctctgctcctgcggacgccctattctagcgacaacctttaccagatgacctcccagctggagtgcatgacatggaatcaaatgaacctcggggccaccctgaagggatga

SEQ ID NO: 3526 - RNA, 1350 nt, synthetic construct
  misc_feature 1..1350: note = AAA61299 variant
  source 1..1350: mol_type = other RNA
atgggcagcgacgtgagagatctgaacgccctcctgcccgctgtcccttcccttgggggaggcgggggatgcgccctgccggtttctggcgcggctcagtgggcccccgtgctcgacttcgcccctcccggggctagcgcctacggatccctgggcggccctgctccccctccggcgccccctccccctcccccgcctccccctcactcttttatcaagcaagagcccagctggggaggggccgaaccccatgaggaacagtgtctttccgccttcaccgtgcacttttctggccagttcacagggacggctggagcctgccggtatggcccttttgggccgccccctcccagccaggcttccagcggacaagcccgcatgttccctaatgcgccctacctgccgtcttgtctcgagtcccagcctgccattagaaaccagggctatagcaccgtcacatttgatggcaccccctcttacgggcatacaccttcccaccatgctgcccagttccccaatcacagctttaaacacgaagaccctatgggacaacagggctctctgggggagcagcagtattccgtgcccccgcctgtttacggatgccatacccccacagatagctgtaccggctcccaagctctgctcctgcggacgccctattctagcgacaacctttaccagatgacctcccagctggagtgcatgacatggaatcaaatgaacctcggggccaccctgaagggagtggccgctggctctagctccagcgtcaaatggacagaaggccagtctaatcacagcaccgggtacgagtccgataaccatacgacacctatcctttgtggagcgcagtatcgcattcacacccacggcgtgttcagagggatccaggacgttcggcgcgtgccgggagtcgcccccacactggtgagatctgctagcgaaacctccgagaagcggccttttatgtgcgcctaccccggctgtaataaacgctatttcaagctcagccatctgcaaatgcactctagaaagcataccggggagaaaccttaccagtgcgattttaaggactgtgaacggcgcttctccagaagcgatcagctgaaacggcaccagcgcagacatacaggcgtgaagcccttccaatgcaaaacgtgccagcggaagttttctagatccgaccacctcaagacccacacacgcacccatacaggaaaaaccagcgagaagcctttctcctgtcggtggccctcttgccagaaaaagtttgccagaagcgatgaactggtccgccaccataacatgcaccagcggaatatgacgaaacttcaactggctctctga

SEQ ID NO: 3527 - RNA, 279 nt, synthetic construct
  misc_feature 1..279: note = AAA63269 variant
  source 1..279: mol_type = other RNA
atgcagagacggggccaacccctggagaaccacgtggccctcatccattggcagagcgctgggattcctgcctccaaggtccacaattactgcaacatgaaaaagtctcgcctgggaagaagccgggcggttcgcatctcccagccgcttctgtctcccagacggtgtcctctccatctgaccgaacgcggcgctgggcttctgcagccccaacctcagggacccgtgagaacacctggcccgcccagcgggtcccaccctgccgccgctgacaattga

SEQ ID NO: 3528 - RNA, 246 nt, synthetic construct
  misc_feature 1..246: note = AAP35763 variant
  source 1..246: mol_type = other RNA
atggagagccccaagaaaaagaaccagcaactgaaagtgggcatcctccacctggggtccagacagaagaaaattcggatccagcttcgctctcagtgcgccacctggaaggtcatttgtaagagctgcatctcccaaacacctggaattaatctggacctcggctctggggttaaagtgaagatcatcccgaaagaggaacattgtaagatgcccgaagctggagaggaacagcctcaggtgtga

SEQ ID NO: 3529 - RNA, 1098 nt, synthetic construct
  misc_feature 1..1098: note = AAA59652 variant
  source 1..1098: mol_type = other RNA
atggcagtaatggcaccaagaactctactattattattatctggtgcgttagcattaacacaaacttgggcaggtagtcattcaatgagatacttttttacatcagtatcaagaccaggacgaggagaaccaagattcatagcagtaggatatgtagatgatacacaatttgtaagatttgacagcgatgccgcttcacaaaaaatggaaccaagagcaccatggatagaacaagaaggaccagaatattgggaccaagaaactagaaatatgaaagcccacagtcaaacagatagagcaaatttaggaactctaagaggatattataatcaatcagaagatggatcacatacaatacaaataatgtacggatgtgacgttggaccagatggacgatttttaagaggatatagacaagatgcatatgatggaaaagattatatagcattaaatgaagatttaagatcatggacagcagcagatatggccgcacaaattacaaaaagaaaatgggaagcagtacatgcagcagaacaaagaagagtatatctagaaggtagatgtgtagacggacttagaagatatttagaaaatggaaaagaaacactacaaagaacagatcctccaaaaacacatatgacacatcatccaatatcagaccatgaagctacattaagatgttgggcactaggattttatccagctgaaataacactaacatggcaaagagatggagaagatcaaacacaagatacagaactagtagaaacaagacctgcaggagatggcacatttcaaaaatgggcagcagtagtcgtgccttcaggagaagaacaaagatacacatgtcatgtacaacacgagggattaccaaaaccattaacattaagatgggaactaagttcacaaccaacaataccaatcgttggaataatagctggattagtattattaggagcagttattactggtgcagtagtagcagcagtaatgtggagaagaaaaagcagtgatagaaaaggaggaagctacacacaagcagcatcttcagattcagcacaaggatcagatgtaagcttaacagcatgtaaagtataa

SEQ ID NO: 3530 - RNA, 1098 nt, synthetic construct
  misc_feature 1..1098: note = AAA59606 variant
  source 1..1098: mol_type = other RNA
atggcagtcatggcaccaagaactttagtactattactatctggagcacttgctttaacacaaacatgggcaggatcacatagcatgagatatttctttacaagtgtaagtaggccaggaagaggagaaccacgatttatcgcagtaggatatgtagacgatactcaattcgttagatttgattctgatgcagcaagccaaagaatggaaccaagagcaccatggatagaacaagaaggacctgaatattgggacggtgaaacaagaaaagttaaagcacatagtcaaacacacagagtagatttaggaacattaagaggttattataatcaatcagaagcaggatcacatacagtacagagaatgtatggatgtgatgtaggatcagactggaggttcctacgaggatatcatcaatacgcatatgacggtaaagactacatagcattgaaagaagatttaagaagttggacagcagctgatatggctgcacaaacaactaaacacaaatgggaagcagcacatgtagctgaacaattaagagcatatttagaaggaacatgtgtagaatggctaagaagatatttagaaaatggaaaagaaactttacaaagaacagatgctccaaaaacacacatgacacatcatgcagtaagtgatcatgaagcaacattaagatgttgggcattaagtttctatccagcagaaataactttaacatggcaaagagatggagaagaccaaacacaagatactgaattagtagaaacaagaccagcaggagatggaacatttcaaaaatgggcagcagtagtagttccaagcggacaagaacaaagatatacatgtcatgtacaacatgaaggactaccaaaaccacttacactaagatgggaaccaagctcacaaccgacaatacctatagtaggaattattgctggattagtactatttggagcagtaataacaggagctgtagtagcagcagtgatgtggcgacgaaaatcaagtgatagaaaaggaggaagttatagccaagcagcaagttcagatagcgcacaaggatcagacgtatcattaactgcatgcaaagtataa

SEQ ID NO: 3531 - RNA, 1263 nt, synthetic construct
  misc_feature 1..1263: note = AAH37161 variant
  source 1..1263: mol_type = other RNA
atgcctggcggctgcagtagaggtccagcagctggcgacggaagattaagattagctagattagctctagtactacttggatgggtatcatcatcatcaccaacatcttcagcatcatcattcagttcatcagcaccattcctagcatcagctgtctcagctcaaccaccactaccagatcaatgtccagcactatgtgaatgttcagaagcagcaagaactgttaaatgcgtcaatagaaacttgacagaagtcccaaccgatctaccagcatatgtacgtaaccttttcctaacgggaaatcaactagcagtactaccagccggcgctttcgcaagaagacccccattagcagaattagcagcattaaacttatcaggatcacgcttagatgaagtacgtgcaggagcatttgaacatcttccttctttacgacaactagatctatcacacaatcccttagcagatctatcaccatttgcattttcaggatcaaatgcatccgtatctgctccatcaccattagtagaattaatactaaaccatatagtaccccctgaagatgaaagacaaaatagatcatttgaaggcatggtcgtagcagcactacttgctggaagagcactacaaggtctcagacgactcgaactagcatcaaatcactttttatatctacctagagatgtactagcacaattaccatctctacgacatttagatctatccaacaattcattagtttcactcacatatgtatcctttagaaatctaactcatcttgaatctctacatttagaagacaatgcattaaaagtactacataacggaacactagcagaattacaaggacttccacatataagagtctttttagacaacaacccatgggtatgcgattgccacatggcagacatggtaacatggttaaaagaaacagaagtagtacaaggaaaagacagactaacatgcgcataccccgaaaaaatgagaaacagagtactattagaacttaattcagcagatctagattgtgatccaattctaccaccttcactacaaacatcatacgtatttctaggtatagtattagcattaattggagcaatatttttactagttttatatctaaacagaaaaggaataaaaaaatggatgcataatataagagatgcatgtagagatcacatggaaggttaccattatcgatatgaaataaatgcagatccacgtttaactaatttatcatcaaactcagacgtataa

SEQ ID NO: 3532 - RNA, 1632 nt, synthetic construct
  misc_feature 1..1632: note = AAH33010 variant
  source 1..1632: mol_type = other RNA
atgagaaaacccgccgcaggattcctaccatcacttctaaaagtactattactccccttagctccagcagcagcacaagattctacacaagcatccactcccggatcgccattatccccaacagaatatgaaagatttttcgcacttctaaccccaacttggaaagctgaaactacatgtagattaagagcaacacacggttgcaggaatcccaccctagtacaattagaccaatacgaaaatcacggcctagtaccagacggagccgtatgttcaaacttaccatatgcctcatggttcgaatccttctgtcaatttacacattaccgatgctccaatcatgtctactatgcaaaacgcgtactatgctcccaaccagtatcaatcttatcaccaaatacacttaaagaaatagaagcatcagccgaagtatcccccaccacaatgacatcaccaataagtccacatttcacagtaacagaaagacaaacattccaaccgtggccagaaagattatctaacaatgtagaagaactactacaatccagtctaagcctcggaggacaagaacaagcaccagaacataaacaagaacaaggagtagaacacagacaagaacctacacaagaacacaaacaagaagaaggacaaaaacaagaggaacaagaagaagaacaagaagaggaaggaaaacaagaagaaggacaaggaacaaaagaaggacgagaggcagtatcccaattacaaacagactcagaaccaaaattccattcagaatcattgagctccaacccatcatccttcgcaccaagagtccgagaagtcgaatcaacaccaatgataatggaaaacatacaagaattaattagatcagcacaagaaatagacgaaatgaacgaaatctacgatgaaaactcctactggagaaaccaaaatccaggatcattattacaactacctcatacagaagcacttctagttctttgctactcaatagtcgaaaacacatgtataataacaccaactgctaaagcatggaaatacatggaagaagaaatattaggatttggcaaaagcgtatgcgactctctaggaaggagacatatgagtacatgtgctctatgtgatttttgttcattaaaactagaacaatgtcactcagaagcatccttacaaagacaacaatgtgatacatctcacaaaaccccgttcgtatcacctttactagcttcccaatctctctcaataggaaaccaagttggaagtccagaatccggtagattctatggattagatttatacggaggccttcatatggatttctggtgcgcaagattagcaaccaaaggctgtgaagatgtacgtgtatcaggatggttacaaacagaatttctttcttttcaagatggagactttcctacaaaaatatgcgacacagactatatccaatacccaaactactgcagttttaaatcacaacaatgcttaatgcgaaacagaaatagaaaagtatcacgaatgagatgcctacaaaacgaaacctattcagcactatcacccggaaaatcagaagacgtagtcctaagatggtcacaagagttctccaccttaacactaggtcaattcggctaa

SEQ ID NO: 3533 - RNA, 1830 nt, synthetic construct
  misc_feature 1..1830: note = AAB58754 variant
  source 1..1830: mol_type = other RNA
atgaaatgggtagaaagcattttcctaatcttcctattaaactttacagaatcaagaacattacacagaaacgaatacggaatagcaagtattctagattcataccaatgcacagcagaaatcagtctagcagacctagcaacaatattcttcgcccaattcgtacaagaagcaacatataaagaagtatccaaaatggttaaagatgctttaactgcaatagaaaaacctacaggagacgaacaatcttcaggatgcctagaaaatcaacttcccgcattcctagaagaactttgtcatgaaaaagaaattctagaaaaatacggtcactctgactgctgctcccaatcagaagaaggcagacataattgtttcctcgcacacaaaaaaccaacccccgcatcaatcccattatttcaagtaccagaaccagtaacatcctgcgaagcttatgaagaagaccgagaaacattcatgaacaaatttatttacgaaattgcccgacgacatcccttcctatatgcaccaacaatactcctatgggccgcaaggtacgacaaaataataccatcatgctgtaaagcagaaaacgcagtagaatgcttccaaacaaaagcagcaacagtcacaaaagaacttagagaatcatccctactaaaccaacatgcatgtgccgtaatgaaaaatttcggtaccagaacatttcaggcaataacagtcacaaaattatcacaaaaattcaccaaagttaattttacagaaatacaaaaattagttcttgacgtagcgcatgtacatgaacattgttgtagaggagatgtattagattgccttcaagatggagagaaaataatgtcctatatatgttcacaacaagacacactttcaaacaaaatcacagaatgttgcaaactaacaacactagaacgaggacaatgcatcatacatgcagagaatgacgaaaaaccagaaggactttcaccaaatttaaacagattcctaggtgatagagatttcaatcaattctcatccggtgaaaaaaatattttcttggcaagttttgtacacgaatattcccgaagacaccctcaactagcagtttcagtaatactgagagtagcaaaaggctatcaagaactactagaaaaatgttttcaaacagaaaatccactagaatgtcaagataaaggagaggaagaattacaaaaatacatacaagaaagccaagccctagcaaaaagatcatgcggattatttcagaaactcggagaatattacctacaaaacgcatttttagtagcatatactaagaaagcgcctcaattaacatcctcagaattaatggcaataacgaggaaaatggccgcaacagccgctacatgttgtcaattaagtgaagacaaattactagcatgcggagaaggagcagcagacataataattggccatttgtgcataaggcacgaaatgacaccagtaaatcccggagtaggacaatgctgcacctcttcctacgcaaacagacgaccttgtttctcatcactagtagtagatgaaacatacgtaccacccgctttctcagacgacaaattcatatttcacaaagatctttgtcaagcacaaggagtagccttacaaacaatgaaacaagagttcttaataaacttagtcaaacaaaaaccccaaataacagaagaacaactagaagctgtcatagcagacttttctggactactagaaaaatgctgccaaggacaagaacaagaagtatgtttcgcagaagaaggtcaaaaactcatttccaaaacacgggcagcactgggagtataa

SEQ ID NO: 3534 - RNA, 2565 nt, synthetic construct
  misc_feature 1..2565: note = AAI26251 variant
  source 1..2565: mol_type = other RNA
atgatggcatattcagatacaacaatgatgagcgatgacatagactggctgcgctcacaccgaggggtatgtaaagtagacttatataacccagaagggcaacaagatcaagacagaaaagtgatatgtttcgtagatgtatcaacacttaacgtagaagacaaggactacaaagatgcagcatcatcatcaagtgaaggaaatctaaacttaggaagcctagaagaaaaagaaataatagttataaaagacacagaaaagaaagatcaatccaaaacagaaggctctgtatgtctatttaaacaggcaccatccgacccagtctcagtcctaaattggctactatctgatttgcaaaaatatgcactcggttttcaacacgcgttatctccaagtacatcgacttgcaaacataaagtaggagacacagaaggagaataccatagggcatcctcagagaattgttactctgtttacgcagaccaagtaaacatagattacttaatgaatagaccacaaaatttaagattagaaatgaccgcagctaaaaatacaaacaacaatcagagccctagtgcgccgccagcaaaaccacccagtacgcaaagagccgtaataagccccgacggagaatgtagcatagatgacttaagtttttatgtaaataggctaagtagcctcgtaatccaaatggctcacaaagaaataaaagaaaaactagagggtaaatcgaaatgcctacaccactcaatatgtcccagccccggcaataaggaacggataagtccacgtactcccgcatcaaaaatagcctcagaaatggcgtatgaagcggtagaactaacagctgcggaaatgagaggaacaggagaagaatcaagagaaggtggacaaaagagctttctttacagtgaattatcgaataaatcaaaatctggagacaaacaaatgtcacaaagagaatcaaaagagttcgctgacagcatctcaaaaggactaatggtatacgccaatcaagttgcttcagatatgatggtgagtttgatgaaaacattaaaagtacattcctctggaaaaccaatccctgcatcagtagtattaaaaagagtactactaagacacaccaaagaaatagttagcgaccttatcgattcctgcatgaaaaacttacacaatatcacgggagtattaatgactgattccgatttcgtatcagctgtaaagagaaacctatttaatcaatggaaacaaaatgcaacagatataatggaagcaatgctaaaaagattagtttctgcactaataggcgaagaaaaagaaactaaatcacaatccttatcatatgcctccctaaaagcaggatcacatgatcctaaatgtagaaaccagtccctcgagttctctacaatgaaggcagaaatgaaagaaagagataaaggtaaaatgaaatcagacccttgtaaaagtctaacctcagccgaaaaagtaggagaacacatactgaaagaaggcttaaccatatggaatcaaaaacaaggaaatagctgcaaagtagcaacaaaggcttgctcaaataaagacgagaaaggcgagaaaatcaatgcatcaacggactcactagcaaaagatctaatagtctcagctctaaaacttatacaataccatttaactcaacaaactaaaggaaaagatacttgtgaagaagattgtccaggatccacaatgggttacatggcccaaagcactcaatatgaaaaatgcggaggaggacaatctgcaaaagcactctcagtaaaacaattagaatcacatagagcaccaggaccatcaacttgccaaaaagaaaatcaacaccttgattctcagaaaatggacatgtcaaacatagttctaatgttaatacaaaaattattaaatgaaaatccatttaagtgtgaagatccatgcgaaggtgaaaacaaatgctcagaacctcgcgcatccaaagcagcatcaatgagcaatagaagcgataaggcagaagaacaatgccaagaacaccaagaactagattgtacaagtggaatgaaacaagcaaacggtcaatttatagacaaattagtcgaaagcgtcatgaaactttgtttaataatggcaaaatattcaaacgatggagcagctctagcagaactggaagaacaagccgcatctgcaaataaaccgaattttagaggtacaagatgcattcactctggagcaatgccacaaaactaccaagatagtttaggacatgaagtcatagttaataaccaatgttcaacaaattccttacaaaaacaacttcaagcagttctacaatggatagcagcatcacaatttaatgtgccaatgctatacttcatgggagataaagatggtcaattagaaaaactaccacaagtatcagccaaagccgcggaaaaaggatactcagtaggcggactattacaagaagttatgaaatttgcgaaagaaagacaaccagacgaagctgttggaaaagtagcaagaaaacaattattagactggctactagcaaatctttaa

SEQ ID NO: 3535 - RNA, 1251 nt, synthetic construct
  misc_feature 1..1251: note = BAG61782 variant
  source 1..1251: mol_type = other RNA
atggtagactatcacgcagcaaaccaatcataccaatatggaccatctagcgccggaaacggagcagggggcggaggatcaatgggagattacatggcgcaagaagacgactgggacagggacctattactagatcccgcatgggaaaaacaacaaagaaaaacatttacagcatggtgcaacagccatttaagaaaagcaggaacacaaatagaaaacatagacgaagacttcagagatggactaaaattaatgctattactagaagtaatatccggagaaagattaccaaaaccagaaagaggtaaaatgagagttcacaaaatcaacaacgtaaacaaagcattagatttcatagcatcaaaaggcgtaaaactagtctcaataggagccgaagaaatagtagacggtaacgcaaaaatgactctaggaatgatatggacaataatactacgattcgctatacaagatatatcagtcgaagaaacatcagcaaaagaaggacttcttttatggtgccaaagaaaaactgcaccatacaaaaacgttaacgttcaaaacttccatataagctggaaagatggactagcattcaacgccttaatccatagacacagaccagaattaatcgaatacgacaaactaagaaaagatgatccagtgacaaatttaaataacgcattcgaagtagcagaaaaatacctagacatacccaaaatgttagatgcagaagatatagtaaatacagcaagaccagacgaaaaagcaataatgacatacgtatcatcattctaccacgcattttccggagcacaaaaagcagaaactgcagcaaacagaatatgcaaagtattagcagtcaaccaagaaaatgaacatctaatggaagactatgaaaaactagcatcagacttattagaatggataagaagaacaatcccatggttagaggacagagtaccacaaaaaacaatccaagaaatgcaacaaaaactcgaagattttagagattacagaagagtacacaaaccaccaaaagtacaagaaaaatgtcaactagaaataaacttcaacacattacaaacaaaattaagattatcaaacagaccagcattcatgccatcatggagatctagagcaagttcatcgccaacaagtacatgcgcagcatcaagcccagcaagaccaatgttatggggaccaggatcaagacccagatggagaagaagtggagcatcaccactaagataa

SEQ ID NO: 3536 - RNA, 1689 nt, synthetic construct
  misc_feature 1..1689: note = BAG65349 variant
  source 1..1689: mol_type = other RNA
atggtagattaccacgccgcaaaccaatcatatcaatacggaccatcctccgcaggaaatggagcgggtgggggaggctcaatgggagactatatggcacaagaagatgattgggatagagacctactcctcgacccagcgtgggaaaaacaacaaagaaaaacctttactgcatggtgtaactcacatttaagaaaggcaggaacacaaatcgaaaatatagatgaagactttagagatggcctaaaactaatgttattattagaagtcatatcaggggaaaggctaccaaaaccagaaagaggcaaaatgcgagtgcacaaaataaataatgtgaacaaagcactagattttatagcatcaaaaggagtgaagctagtatcaataggagcagaagaaatagtagacgggaatgcaaaaatgactctaggcatgatatggacaataatattaagatttgcaatacaagatataagtgtagaagaaacatcagcaaaagaaggactacttctatggtgccaacgaaaaacagcaccatataaaaatgtaaacgtacaaaattttcacatatcctggaaagatggtttggcattcaatgctctcatacacagacacagacctgaactaatagaatatgataaactaagaaaagatgacccagtgaccaacttaaacaacgcattcgaagtcgctgaaaaatatctagatattccgaaaatgctcgatgcagaagatatagtaaatacagctagaccagatgaaaaagccattatgacatacgtaagcagcttctaccacgcatttagcggagcacagaaagcagaaacagcagctaatagaatctgtaaagtactagccgtaaaccaagaaaatgaacacctaatggaagactacgagaagctagcatcagatttgctagaatggatacaaagaacaataccttggctagaagacagagtaccacaaaaagcaatacaagaaatgcaacaaaaattagaagatttcagggattatagaagagtacataagccaccaaaagtacaagaaaaatgtcaactagaaataaatttcaatacattacaaacaaaacttagactaagtaacagaccagcattcatgccatcagaaggaaaaatggtaagtgatataaataacggatggcaacacttagaacaagcagagaaaggttacgaagaatggttactgaacgaaataagaagattagaaaggttagaccacttagcagaaaaattcagacaaaaagcctcaatacatgaagcatggaccgatggaaaagaagcaatgttaaaacacagagattacgaaacagcaacattatcagacatcaaagcactaataagaaaacatgaagcattcgaaagcgatctagcagcacaccaagatagagtagaacaaatagcagcaatagcacaagaattaaatgaactagattactacgactcccataatgtcaatacaccagacggactacaagaaggacctggacaaccacattcaccaatacctcccttatgtatatacgcaaaacatagtttacaatctagcggagttggaggatgggcaggaagaggatggggaagactatcacccttatcactatgcggactagcaagaaggttccctaggccaggatggggagatttaggacccgcattattagtatggtaa

SEQ ID NO: 3537 - RNA, 2736 nt, synthetic construct
  misc_feature 1..2736: note = AAH05033 variant
  source 1..2736: mol_type = other RNA
atggtagattatcacgcagctaaccaatcatatcaatacggaccatcaagcgcaggcaacggcgcaggaggaggaggatccatgggagattacatggctcaagaagacgactgggaccgagacctactgcttgatccagcatgggaaaaacaacaaagaaaaaccttcacagcttggtgtaatagccatctccggaaagcaggaactcaaatcgaaaacatagatgaagactttagagacggactaaaattaatgcttctactagaagtaataagcggagaaagactcccaaaaccagaacgaggaaaaatgagagtacacaagataaataatgtcaataaagcactagattttatagcgtcaaaaggagtaaagctagtctcaatcggagcagaagaaattgtggacggaaacgcaaaaatgaccctaggaatgatatggacaataatcctgcgatttgcaatacaagatatatcagtagaagaaacatcagcaaaagaaggactattattatggtgccagaggaaaacagcaccatataaaaatgtaaatgttcaaaatttccatataagttggaaagacggactagcattcaacgcattaatacatagacacagaccagaattaatagaatacgataaacttcgtaaagacgatccagttactaatctaaacaatgcctttgaagttgcggaaaaatatttagatattccaaaaatgctagacgcagaagatatagtaaacactgcaagaccagacgaaaaagcgatcatgacatatgtgtcctcattttaccatgcattctcaggcgcacaaaaagcagagaccgcagcaaatagaatctgtaaagtactagccgttaatcaagaaaacgaacacttaatggaagattacgaaaaactagcatcagacttactcgagtggattagacgaactataccatggctagaagatagagtacctcagaaaacaatccaagaaatgcaacaaaaactagaggattttagagattatcgtagagtccataaacccccaaaagtccaagaaaaatgtcaattagaaataaacttcaacacactacaaacaaaactgagattaagtaatagaccagcatttatgccaagcgaaggtaaaatggtaagtgacatcaataatggatggcaacatctagaacaagctgaaaaaggatacgaagaatggctattaaacgaaatcagaagattagaacgactagaccacttagcagaaaaatttaggcaaaaggcttcaatccatgaagcatggacagatggtaaagaagcaatgctgaaacatagagactacgaaacagcaaccctatctgatattaaagccttaattcgcaaacacgaagcattcgaatcagatctagcagcacaccaagacagagtagagcaaatagcggccattgctcaagaattaaacgagctagattactatgacagccacaacgtaaacacaaggtgtcagaaaatatgcgatcaatgggacgcactgggatcattaactcatagcagacgtgaagctctagagaaaacagaaaaacaattagaagcaatcgaccaactacatttggaatacgcaaaaagagcagcaccattcaataattggatggaatcggccatggaagatcttcaagacatgttcatagtacatacaatagaagaaatagaaggattaatttcagcccatgatcaatttaaaagcacattaccagacgccgatcgagaaagagaagccatattagcaatacacaaagaagctcaacgaattgctgaaagtaaccacattaaattatcagggagcaacccatacacaaccgttacaccacaaataataaactccaaatgggagaaagtacaacaattagttccaaaaagggaccatgcactattagaagaacagagcaaacaacagtcaaatgagcatctacgacgacaatttgccagtcaagcaaacgtagtaggaccctggatacaaacaaaaatggaagagattggaagaatcagtatagaaatgaacggaaccttggaagaccaattatcacacttaaaacaatatgaaagaagtattgtagactacaaaccaaatttagacctattagaacaacaacaccaactaattcaagaagcactaatcttcgacaacaaacataccaactataccatggaacatatacgcgtcggatgggaacaactattaacaacaattgccagaacaataaacgaagtagaaaatcaaatattgactagagatgcaaaagggatttcacaagaacaaatgcaagaatttagagccagctttaaccatttcgataaagatcacggcggagcacttggaccagaagagtttaaagcatgcctcatttcattaggatatgacgtagaaaatgaccgacaaggagaagcagagttcaatagaattatgtctttagtagatccaaaccatagtggcctagtaacttttcaagccttcatagatttcatgagtagagaaaccaccgatactgacacagctgaccaagtaatagcatcattcaaagtattagctggagacaaaaattttataactgcagaagaattaagaagagaattaccacccgatcaggcagagtactgcatagcaagaatggcaccatatcaaggaccagacgcagtaccaggagcattagactataaaagtttttccaccgcattgtacggagagtcagatttatag

SEQ ID NO: 3538 - RNA, 597 nt, synthetic construct
  misc_feature 1..597: note = EAX10817 variant
  source 1..597: mol_type = other RNA
atggcattacaaggaataagtgtaatggaattaagtggattagcaccaggaccattttgtgcaatggtattagcagatttcggagcaagagtagtaagagtagacaggccaggaagtagatatgatgtatcaagattaggaagaggaaaaagaagtctagtgttagatttaaaacaaccacgaggagcagcagtattaagaagactatgtaaaagaagtgatgtattattagaaccatttagaagaggagtaatggaaaaattacaattaggaccagaaatattacaaagagaaaatccaagattaatatatgcaagattatcaggatttggacaaagtggaagtttttgcagattagcaggacatgacataaattatttagcattatcaggagggagaaatagcatatttaagttctttagtgtagaaaatagtgaaattgaaagtgtgggatcaacatcaagaacagaacatgtaggatggtggtcaacatttttatacgatctacaagactcaagatggggaatacatggatgttggagtaacagaactccagtattaagagcagcagatcaaagaacatggacaaaagtataa

SEQ ID NO: 3539 - RNA, 597 nt, synthetic construct
  misc_feature 1..597: note = BAF85677 variant
  source 1..597: mol_type = other RNA
atggcattacaaggaataagtgtagtggaattgagtggattagcaccaggaccattttgtgcaatggtactagcagattttggagcaagagtagtaagagtggatagaccaggaagcagatatgatgtaagtagattagggagaggaaaaagaagtttagtattagatttaaaacaaccaagaggagcagcagtattaagaagattatgtaaaagaagcgatgtattactagaaccatttagaagaggagtaatggaaaaattacaattaggaccagaaatattacaaagagaaaatccaagattaatatatgcaagattaagtggatttggacaaagtggaagtttttgtagactagcaggacatgatataaattatttagcactaagtggaggaagaaatagtatattcaaatttttcagtgtagaaaatagtgaaatagaaagtgtaggaagtacaagtagaacagaacatgtaggatggtggtcaacatttttatatgatttacaagatagtagatggggaatacatggatgttggagtaatagaacaccatttctaagagcagcagatcaaagaacatggacaaaagtataa

SEQ ID NO: 3540 - RNA, 2763 nt, synthetic construct
  misc_feature 1..2763: note = EAX05380 variant
  source 1..2763: mol_type = other RNA
atggaagtacaattaggacttggaagagtttatcctagaccacctagcaaaacctaccgtggtgcattccaaaaccttttccaatccgttcgagaggtaatacaaaatccaggtccaagacatcccgaagcagccagtgctgcaccccctggagcctcactgttattactccaacaacaacagcaacaacaacaacaacaacaacaacaacaacaacaacaacaacaacaacaacaacaagaaacaagtccacgacaacaacaacaacaacaaggagaagatggcagtccacaggcacatagacgtggacctactggatatttagtactagatgaagaacaacaaccttcccagccacaatctgctctggaatgccatcctgaaagaggatgtgtacctgaacctggtgcggcagtcgcagccagcaaaggacttcctcagcaattaccagcacctcctgacgaagatgacagcgcagcaccctcaacactatctcttttaggaccaacatttccaggattatcgtcctgctcagctgatttgaaagatatacttagcgaagcatctacaatgcagttactacaacaacaacaacaagaagctgtatctgaaggatcttcatctgggagagcaagagaggcatcaggagcgccaacaagctctaaagataattatttaggaggcacatcaacaatatctgataatgcaaaagagctatgtaaagccgtatccgtatccatggggttgggtgtagaagcactagagcatctaagcccaggagaacaattaagaggtgattgtatgtacgcacccctattaggagtaccccctgcagttagaccgacaccatgtgcaccattagcagaatgtaaagggagcttattagacgactcagcaggaaaaagcacggaagatacagcagaatactctccgtttaaaggaggatatacaaaaggactagaaggagaaagtttgggatgcagcggcagcgcagcggcaggatcatcaggcactcttgaactacctagtacattatcattatataaatctggagcattagatgaagctgcagcatatcaatctcgagattactataatttcccattagcactagccggtcccccacctccaccaccaccaccccatccacatgcaagaataaaactagagaatccattagactatggaagtgcatgggccgcggcagcagcacaatgcagatatggagaccttgcaagcctacacggagcaggagcagcaggaccaggatcaggatctccatctgccgcagcaagttcaagctggcatacactattcactgccgaagaaggtcaactatatggaccctgcggaggtggaggaggaggtggaggcgggggaggtggaggaggaggaggaggcgggggaggaggaggcggtgaagcaggagcagttgcaccgtatgggtacacacgaccaccccaaggattggcaggacaagaatctgacttcacagcaccagatgtatggtatccaggagggatggtatcaagagtaccatatcctagtcctacatgcgtcaaatccgaaatgggaccctggatggattcatattcaggaccttatggtgatatgcggcttgagacagcaagagaccacgtattaccaatcgattactattttccacctcagaaaacgtgtctaatttgcggtgatgaagcatcaggctgtcattatggagcactaacttgtggatcctgtaaagtcttctttaaaagagcagcggaaggtaaacaaaagtacttatgcgcatcacgaaatgattgtaccatcgataaattcaggaggaaaaactgcccatcttgtagactaagaaaatgttatgaagcaggaatgacattaggagcaaggaaattaaagaaattaggcaacctcaaacttcaagaagaaggagaagcgtcatccacaacatcaccaacagaagaaactactcaaaaactaacagtatcccatatagaaggctatgaatgccaacctatattcttaaacgtattagaagccatagaaccaggagtcgtgtgtgctggacacgacaataaccaaccagattcatttgcagcactattatcttcactcaacgaattgggagaaagacagctagtacacgtagtaaaatgggcaaaagccttgccaggattccgtaatctacatgtagacgatcaaatggccgtaatacaatatagctggatgggactcatggtatttgctatgggttggagaagttttacaaacgttaattcaagaatgttatattttgcacccgatctagtgtttaatgaatacagaatgcataaatcaagaatgtattcacaatgtgtacgaatgagacatctatcacaagaatttggttggttacaaataacacctcaagagttcctatgtatgaaggctttactattattttcaataataccagttgatggacttaaaaaccaaaaattctttgatgaactacgaatgaattatataaaagaattagacagaataatagcatgtaaacgtaaaaacccgacatcatgctctcgtcgattttatcaactcactaaattattagattcagtacaaccaatagcaagagaactacatcaatttacatttgacttgctaatcaaatctcacatggtatcagttgattttccagaaatgatggcagaaataatctcagttcaggtacccaaaatactgagtggaaaagttaaaccaatctacttccacacacaataa

SEQ ID NO: 3541 - RNA, 1239 nt, synthetic construct
  misc_feature 1..1239: note = AAH64630 variant
  source 1..1239: mol_type = other RNA
atggcaccagtagaacatgtagtagcagacgcaggagcatttctcagacacgcagcattacaagatataggcaaaaacatatataccataagagaagtagtaacagaaataagagacaaagcaaccagacgaagattagcagtactaccatacgaattaagatttaaagaaccactaccagaatacgtcagactcgtaaccgaattttctaaaaaaacaggagattatccatcactatccgcaacagatatacaagtcctagcgttaacataccaactagaagcagaattcgtgggagtttcacatttaaaacaagaaccacaaaaagtaaaagtatcaagttcaatacaacatccagaaactccattacacatttcaggattccacctaccatacaaaccaaaaccaccacaagaaacagaaaaaggacattctgcatgtgaaccagaaaacctagaattctcaagctttatgttctggcgaaatcccctaccaaacatagaccacgaactacaagaattattaatagacagaggagaagatgtaccatcagaagaagaagaagaagaagaaaatggattcgaagatagaaaagacgatagcgatgacgatggaggaggatggataacacctagtaacataaaacaaatacaacaagaattagaacaatgcgacgtaccagaagatgtacgagtaggatgcctcacaacagacttcgctatgcaaaacgtactattacaaatgggactccacgtactagccgtaaacggaatgttaataagagaagcaagatcctacatacttcgatgccacggatgttttaaaacaacatctgatatgtccagagtattctgctcacactgcggaaacaaaaccctaaaaaaagtaagcgtaacagtatcagacgatggaacattacatatgcatttctcaagaaatccgaaagtactaaacccaagaggcctaagatattcactacctacaccaaaaggaggaaaatatgcaataaacccccaccttacagaagaccaaagatttccacaactaagattatcccagaaagcccgacaaaaaacaaacgtcttcgcaccagattatatagcaggagtttcacccttcgtagaaaacgacatatcatcaagaagcgcaacactacaagtacgagactccacattaggagccggacgaagaagactaaacccaaacgcatcaagaaaaaaattcgtaaaaaaaaggtaa

SEQ ID NO: 3542 - RNA, 984 nt, synthetic construct
  misc_feature 1..984: note = AAH69102 variant
  source 1..984: mol_type = other RNA
atgcaaatgccagcaatgatgagtcttttattagtatctgtaggactaatggaagctctacaagcacaatcccatccaataacaagaagagatttattttctcaagaaattcaattagacatggcattagcctcattcgacgaccaatacgcaggatgtgcagcagcaatgacagcagccttaccagatctaaatcatacagaattccaagcaaaccaagtatatgcagattcatggacccttgcatcaagccaatggcaagaaagacaagcaagatggccagaatggtcactatcaccaacacgaccatcaccaccacctttaggattcagagacgaacacggagtagcattattagcatataccgcaaactcaccattacataaagaatttaatgcagccgtaagagaagcaggaagatcaagagctcactatctacatcacttttcatttaaaacactacatttcctactaacagaagcattacaattactaggatcaggacaaagaccaccaagatgccaccaagtatttagaggagtacatggattaagattcagacccgcaggaccaagagctacagtaagattaggaggattcgctagcgcaagtctaaaacatgtcgccgcacaacaatttggagaagacacattttttggaatatggacatgtctaggagccccaatcaaaggatactctttttttcccggagaagaagaagtattaataccaccattcgaaacatttcaagtaataaatgcatctagactagcacaaggaccagcaagaatctatttaagagcactaggaaaacactcaacatataactgtgaatacataaaagacaaaaaatgtaaatcaggaccatgccatcttgataactccgcaatgggacaatcaccactatcagcagtatggtcattattattactactatggtttttagtagtacgagcattcccagacggaccaggactattataa

SEQ ID NO: 3543 - RNA, 1035 nt, synthetic construct
  misc_feature 1..1035: note = AAH09751 variant
  source 1..1035: mol_type = other RNA
atggcccaaaaagaaaatagctatccttggccatatggaagacaaacagcaccatcaggcttatcaacattaccacaaagagtattaagaaaagaaccagttactccatcagcattagtcctaatgtcaagatcaaatgtacaaccaacagcagcaccaggacaaaaagtaatggaaaactcatcaggcactccagacatcttaacaagacactttacaatagacgacttcgaaatcggaagaccattaggaaaaggaaaatttggaaatgtatatctagcaagagaaaaaaaatcacatttcatagtagcactaaaagtactattcaaaagccaaatagaaaaagaaggagtagaacaccaactaagaagagaaatagaaatacaagcacatttacaccatccaaacatcctacgactatacaattacttctacgaccgaagaagaatatacctaatactagaatacgcaccaagaggagaactatacaaagaattacaaaaatcatgtacattcgacgaacaaagaacagcaacaattatggaagaactagcagacgccctaatgtactgtcacggtaaaaaagtaatacatagagatattaaaccagaaaacctattattgggactaaaaggagaactaaaaatcgccgatttcggatggtcagttcacgcaccatccttaagacgaaaaacaatgtgcggaacactagactacttaccaccagaaatgatagaaggaagaatgcacaacgaaaaagtagacctatggtgcatcggagtactatgctacgaacttctagtaggaaacccaccattcgaaagtgcttcacataacgaaacatacagaagaatagtaaaagttgacttaaaatttccagcatcagtccctatgggagctcaagatttaatatcaaaactattaagacataacccatcagaaagattacccctagcacaagtatcagcacacccatgggtcagagctaactcaagaagagtactaccaccatccgcactacaatcagtagcataa

SEQ ID NO: 3544 - RNA, 360 nt, synthetic construct
  misc_feature 1..360: note = AAD48083 variant
  source 1..360: mol_type = other RNA
atgtcaagatcagtagcactagcagtactagcactactatcactatcaggactagaagcaatacaaagaaccccaaaaatacaagtatactcaagacacccagcagaaaacggaaaatcaaacttcctaaactgctacgtatcaggattccacccatcagacatagaagtagacctattaaaaaacggagaaagaatagaaaaagtagaacactcagacctatcattctcaaaagactggtcattctacctactatactacacagaattcacaccaacagaaaaagacgaatacgcatgcagagtaaaccacgtaacactatcacaaccaaaaatagtaaaatgggacagagacatgtaa

SEQ ID NO: 3545 - RNA, 1137 nt, synthetic construct
  misc_feature 1..1137: note = AAH28058 variant
  source 1..1137: mol_type = other RNA
atgagaatgctagtatcaggacgaagagtaaaaaaatggcaattaatcatccaacttttcgcaacttgcttcctagcatcactaatgttcttctgggaacccatcgacaaccatatcgtatcacatatgaaatcttactcataccgatacctaataaactcatatgacttcgtaaatgacacactatctctaaaacacacatcagcaggaccaagataccaatacctaataaatcacaaagaaaaatgtcaagcacaagacgtattactattattattcgtcaaaaccgcaccagaaaactacgacagaagatcaggaataagaagaacatggggaaacgaaaactacgtaagatcacaactaaacgcaaatataaaaacactattcgcattaggaacaccaaacccattagaaggagaagaactacaacgcaaactagcatgggaagatcaaagatacaatgacataatccaacaagacttcgtagatagtttctacaacctaacattaaaactacttatgcaattctcatgggcaaacacatactgcccacacgcaaaatttttaatgacagcagacgacgatatatttatacacatgccaaacctaatagaatacctacaatccttagaacaaataggagtacaagacttctggataggaagagtacacagaggagcaccccccatacgagacaaatcatcaaaatactacgtatcatatgaaatgtaccaatggccagcatatccagactacacagcaggagcagcctacgtaatatcaggagacgttgcagcaaaagtatacgaagcatcacaaaccttaaactcatcactatacatagacgacgtcttcatgggattatgtgcaaacaaaataggaatagtaccacaagaccatgtcttcttctcaggagaaggtaaaacaccctatcacccatgcatatacgaaaaaatgatgacatcccacggacatctagaagacctacaagatctatggaaaaatgctacagatccaaaagtaaaaacaatatcaaaaggattcttcggacaaatatactgcagactaatgaaaataatattactctgtaaaatatcctacgtagacacatacccctgtagagcagcattcatctaa

SEQ ID NO: 3546 - RNA, 1602 nt, synthetic construct
  misc_feature 1..1602: note = AAA35516 variant
  source 1..1602: mol_type = other RNA
atgtggctaggtagacgagcattatgtgcattagttcttctcttagcatgtgcatcacttggattattatatgcaagtacaagagatgcaccaggacttagattaccacttgccccttgggcacctccccaatcaccaagaagaccagaactacctgatttggcacctgaaccaaggtatgctcacatccctgttagaataaaagagcaagtcgttggattgttagcatggaataattgtagctgcgaatcatcaggtggcggattacccttaccatttcaaaaacaagtaagagcaatagatttaacaaaagcctttgacccagctgaattaagagcagcatcagccaccagagaacaagaatttcaagcatttctatcacgctcccaatctcctgcagaccaattactaatagcaccagcaaactctcccctacaatatcctttacaaggcgtagaagtccaaccacttagaagtatattagttccaggactaagtttacaggccgcaagtggccaagaagtataccaggtaaatttaacggcctcattaggaacctgggatgtagctggcgaagtaacaggtgttacgttaacaggagaaggacaagcggatttaactctagtaagtccaggattggaccaacttaatcgacaattacaattagttacatactcatcaagatcatatcaaacaaacacagcagatacagtaaggttttcaacagaaggacatgaagcagcatttactataagaattagacaccctccaaatccaagattatatccaccaggctcactaccccaaggtgcacaatataacataagtgctttagtaacaatagccacaaaaacctttctacgttatgatagattaagagcattaattacatcaattagaagattttatcctaccgtaacagttgtaatagcagacgattcagataaaccagaaagggtatcaggaccttatgtggaacactatttaatgccttttggaaaaggatggtttgcaggacgaaatttagcagtaagtcaagtaacgacaaaatatgtactatgggtagatgatgattttgtatttaccgcaagaaccagactcgaaagattagtagatgtactagaaagaacacctttagacttagtcggaggtgcagtaagagaaatctcaggatttgcaacaacttatagacaattactatccgtagaaccaggcgcaccaggactaggaaattgccttagacaaagaagaggctttcatcacgaattagtaggttttccaggatgtgtagtgacagatggggttgtaaatttctttcttgcaagaactgacaaagtacgtgaagtaggatttgacccaagactatctagggtagcgcacttagaatttttccttgatggattaggaagtttaagagtaggttcgtgtagtgatgtagttgtagatcatgcttccaaattaaaattaccgtggacatcaagagatgccggagcagaaacatacgcaagatatagatacccaggaagtttagatgaatcacaaatggccaaacaccgattactattctttaaacatagattacaatgcatgacgtcacaataa

SEQ ID NO: 3547 - RNA, 849 nt, synthetic construct
  misc_feature 1..849: note = AAH74729 variant
  source 1..849: mol_type = other RNA
atggcaagcctaggccaaatattattttggtcaataataagtataataataatactagcaggagcaatagcactaataataggcttcggaatttcaggtagacacagcataacagtaacaacagtagcaagtgcaggaaacataggagaagacggaatactatcatgtacatttgaaccagacataaaattaagcgacatagtaatacaatggctaaaagaaggagtactaggattagttcacgaatttaaagaaggaaaagatgaattaagcgaacaagacgaaatgttcagaggtagaacagcagtattcgcagatcaagtaatagtaggaaacgccagtctaagactcaaaaacgtacaactaacagatgcaggaacatataaatgttacataataacaagcaaaggaaaaggaaatgccaacctagaatacaaaacaggagccttcagcatgccagaagtaaacgtagactacaatgcatcaagcgaaacattacgatgtgaagccccaaggtggtttccacaaccaacagtagtatgggcaagccaagtagaccaaggagcaaatttctcagaagtaagtaatacatcattcgaactaaatagtgaaaacgtaacaatgaaagtagtaagtgtattatacaatgtaacaataaataacacatactcatgcatgatagaaaatgatatagcaaaagcaacaggagatataaaagtaacagaatcagaaataaaaagaagatcacatttacaactactaaacagtaaagcatcattatgcgtaagcagcttctttgcaataagttgggcactattacctctatcaccatatctaatgctaaaataa

SEQ ID NO: 3548 - RNA, 132 nt, synthetic construct
  misc_feature 1..132: note = AAC50123 variant
  source 1..132: mol_type = other RNA
atggcagcaagagcagtatttctagcactatcagcacaactattacaagcaagattaatgaaagaagaaagcccagtagtaagctggagactagaaccagaagatggaacagcattatgctttatattttaa

SEQ ID NO: 3549 - RNA, 1158 nt, synthetic construct
  misc_feature 1..1158: note = AAN40694 variant
  source 1..1158: mol_type = other RNA
atggcagcagcgttatttgtattattaggattcgcattattaggaacacatggagcttcaggtgcagcagggtttgtacaagctccgttaagccaacaaagatgggtaggaggaagcgtcgaattacattgtgaagcagtaggaagtccagtaccagaaatacaatggtggtttgaaggacaaggaccaaacgatacctgttcacaattatgggatggagcaagactagatagagtacatatacacgcaacatatcatcaacacgcagcaagtacaataagtatagatacattagttgaagaagatacaggtacttatgaatgccgagcaagtaatgatccagacagaaatcatttaacaagagcaccaagagtaaaatgggtacgagcacaagcagtagtacttgtcctagaaccaggaacggtatttacaacagtagaagacctaggaagcaaaattttattaacatgttcactaaatgactcagcaacagaagtaacaggacatagatggttaaaaggaggtgtagtattaaaagaagatgcattaccaggacagaaaactgaatttaaagtagatagcgatgatcaatggggtgaatattcatgtgtatttttaccagaaccaatgggcacagcaaacattcaattacacggaccaccacgtgtaaaagcagtgaaatcaagcgaacatataaatgaaggagaaacagcaatgctagtatgtaaatcagaatcagtaccaccagtaacagattgggcatggtacaaaattaccgattcagaagacaaagcacttatgaatggaagtgaatcacgattctttgtaagttcatcacaaggaagatcagaattacatatagaaaatttaaacatggaagcagatccaggacaatatagatgtaatggaacttcaagtaaagggagcgatcaagcaataataactctgcgagtaagatcacatttagcagcattatggccatttttaggaatagtagcagaagttctagtattagtaactataatatttatttatgaaaaacgaagaaaaccagaagatgttctagatgatgatgatgcaggatcagcaccattaaaaagtagcggacaacaccaaaacgataaaggcaaaaatgtaagacaaagaaactcatcataa

SEQ ID NO: 3550 - RNA, 720 nt, synthetic construct
  misc_feature 1..720: note = ABX60202 variant
  source 1..720: mol_type = other RNA
atggcacacgcaggaagaacaggatatgataatagagaaatagtaatgaaatatatacattataaattatcacaaagaggatatgaatgggatgcaggagatgtaggcgcagcaccaccaggagcagcaccagccccaggaatatttagttcacaaccaggtcatacaccacatccagcagcaagtagagatccagtagcaagaacaagtccattacaaacaccagcagcacctggagctgcagcaggaccagcattaagtccagtaccaccagtagtacatttaacattaagacaagctggagatgatttttcacgaagatataggagagactttgcagaaatgagttcacaattacatttaacaccatttacagcaagaggaagatttgcaacagtagtcgaagaattatttagagatggagtaaactggggaagaatagtagcattttttgaatttggaggagtaatgtgcgtagaatcagttaatagagaaatgtcaccattagtagataacatagcattatggatgacagaatatctaaatagacatttacatacatggatacaagataatggaggatgggatgcatttgtagaattatatggaccatcaatgagaccattatttgattttagctggttaagtctaaaaacgttactatcactagcattagtaggagcatgtataacattaggcgcttatttatcacataaataa

SEQ ID NO: 3551 - RNA, 1290 nt, synthetic construct
  misc_feature 1..1290: note = ABX82700 variant
  source 1..1290: mol_type = other RNA
atggtcgaccctgtaggatttgcggaagcatggaaagcacaatttccagacagtgaaccaccaagaatggaattaagaagtgtaggtgatatagaacaagaattagaaaggtgtaaagccagcataagacgattagaacaagaagtaaatcaagaaagattcagaatgatttatctccaaacactattagcaaaagaaaaaaaaagctacgatagacaaagatggggatttagaagagccgcacaagcacctgatggagcaagtgaaccaagagcatctgcatcacgaccacaaccagccccagcagacggagcagatcctcctccggccgaagaaccagaagcgagaccagacggtgaagggtcacctggaaaagctaggccaggtacagcaagacgaccaggagcagcagcatcaggagaaagggatgataggggtccaccagcatcagttgcagcactccgaagtaactttgaaagaattcgtaaaggacatggacaaccaggagcagatgcagagaaaccattttacgtaaatgtagaatttcatcatgaaagaggacttgtaaaagttaatgataaagaagttagtgatagaatatcaagcttaggttcgcaagcaatgcaaatggaaagaaaaaaaagtcaacatggagcaggaagttcagtaggagatgcctcacgacccccttacagaggtaggtcaagcgaaagttcatgtggagtagatggagattatgaagatgcagaattgaatccaagatttttaaaagataatttaatagacgcaaacggaggaagtagaccaccatggccaccactagaatatcaaccatatcaatcaatatatgtaggaggaatgatggaaggagaaggtaaaggtccactgctcagatcacaaagtacatcagaacaggaaaaaagattaacatggcctagacgatcatacagcccaagaagttttgaagattgtggaggtggatacactccagattgcagtagtaatgaaaatctaacaagttcagaagaagattttagctcaggacaaagttcacgagtaagtccaagtccaaccacgtataggatgttcagagataaatcaagaagtccatcacaaaatagtcaacaatcatttgacagttcatcaccgccaacaccacaatgccacaaaagacacagacattgtccagtcgtagtaagtgaggctacaatagtaggagtaaggaaaacaggacaaatatggccgaatgatggagaaggagcattccatggagacgcagatggagggtaa

SEQ ID NO: 3552 - RNA, 1665 nt, synthetic construct
  misc_feature 1..1665: note = ABX82703 variant
  source 1..1665: mol_type = other RNA
atggtagatccagtaggatttgctgaagcatggaaagctcaatttccagatagcgaacctccaagaatggaattacgatctgtaggagacatagaacaagaattagaaagatgtaaagcatcaatcagaagattagaacaagaagtaaaccaagaaagatttagaatgatatatctccaaacattactagcaaaagaaaagaaaagttacgacaggcaaagatggggatttagacgagcagcacaagcaccagatggagcaagtgaacctagagcaagcgcctcaagacctcaacccgcacccgcagatggagcagacccaccgccagctgaagaacccgaagcaagaccagatggagaaggaagtccaggcaaagcaagaccaggaacagcaagaagaccaggagcagcagcatcaggagaaagagatgatagaggacctccagccagcgtggcagctctaagatcaaattttgaacgcataaggaaggggcatggacaaccaggagcagacgcagaaaaacccttttacgttaatgtagaatttcaccacgagagaggattagtaaaagtcaatgataaagaagtctctgacagaataagcagtttaggatcacaagcaatgcaaatggaaaggaagaaaagccaacatggagcagggtcttctgtaggcgacgcatcaagaccaccgtaccgaggccgaagctcggaaagtagctgtggagtagacggagactatgaagatgcagaattaaacccaagatttttaaaagataatttaattgatgctaacggaggatcaagaccaccctggcctccattagagtatcaaccctatcaatcaatctatgtaggaggtatgatggaaggtgaaggaaaaggacccctattaagaagccaatcaaccagtgaacaagagaaaagattaacatggccacgaagaagctatagtcctaggagcttcgaagattgtggtggaggatacacaccagactgctcaagcaatgaaaatttaacttcatcagaagaagatttcagctcaggacaatcatcacgagtaagtccaagtccaacaacatacagaatgtttcgcgataaatctagatctcctagtcaaaattcccaacaaagttttgacagctcatcgccaccaacaccacaatgccataaaagacatcgacattgtccagtagtagtatccgaagcaactatagttggcgttcgaaaaacaggacaaatatggccaaatgatggagaaggtgcatttcacggagatgctgatggaagttttggaacaccaccaggatatggatgtgcagcagatagagcagaagaacaaagaagacatcaagatgggttaccttatatagatgattcaccaagcagttcaccacatctttcatctaaaggtcgaggttctcgcgatgctttagttagcggagcacttgaatcaacgaaagcatcagaattggatttagaaaaaggcttagaaatgagaaaatgggtactatcaggaatattagcttcagaagaaacatatctatctcatttagaagcactattactacctatgaaaccattaaaagcagcagcaacaacaagtcaaccagtactcacctcacaacaaatagaaacaatattctttaaagttccagatttattataa

SEQ ID NO: 3553 - RNA, 1545 nt, synthetic construct
  misc_feature 1..1545: note = ABX82704 variant
  source 1..1545: mol_type = other RNA
atggtagatccagtaggattcgctgaagcctggaaagcacaatttccagatagtgaacctccaagaatggaattaagaagcgtaggggatatagaacaagaactagaaagatgtaaagccagcatacgacgattagaacaagaagtaaatcaagaaagattcagaatgatatatttacaaacattactagctaaagaaaagaaaagttacgatagacaaagatggggatttcgacgagcagcacaagcaccagatggagcaagtgaaccccgagcatctgcgtcaagaccccaaccagctcctgcagatggagcagatccaccacccgcagaagaaccggaagcacgacccgacggtgaaggaagtcccggtaaagcaagaccaggtacagcaagaagaccgggagctgcggcatcaggagaaagagacgatcgaggacctccagcttccgtagcagcattaagatcaaattttgaacgaatcagaaaagggcatggacaaccaggagcagatgccgaaaaaccattttacgtgaacgtagagttccatcatgaaagagggcttgtcaaagtaaatgataaagaagtatcagacagaataagcagtctaggttcacaagcaatgcaaatggaaagaaagaaatcacaacatggtgcaggatcatcagttggtgatgcatcaagaccaccatatagaggtaggtcaagcgaatctagctgcggagtagatggagattacgaagatgcagaattaaatccacgattcctaaaagataatttaatagatgcaaatggaggatccagaccaccttggccaccattagaatatcaaccatatcaatcaatatatgtgggaggaatgatggaaggagaaggaaaaggaccattactaagaagtcaaagcacatcagaacaagagaaaaggttaacatggccaagaagatcatattcacccagaagtttcgaagattgcggtggaggatacacacctgattgttccagtaatgaaaatttaacaagttctgaagaagattttagttcaggacagagctcaagagtaagcccatcacccacaacttatagaatgttcagagataaaagcagatctccttctcaaaatagccagcaatcattcgacagcagtagtcctccaacacctcaatgtcataaaagacatagacattgtccagtagtagtctcagaagctacaatagtaggagtaagaaaaacaggacaaatatggccaaatgatggggaaggagcatttcatggcgacgcagatggctcatttggaactccaccaggatatggttgtgcggcagatagagcagaagaacaaagaaggcatcaagatggcttaccatacatagatgatagtccatctagttcacctcatcttagcagcaaaggaagaggatcaagagacgccttagtatcaggagcactagaaagtacaaaagcaagtgaactagaccttgaaaaaggactagaaatgagaaaatgggtcttatcaggtatattagcttcagaagaaataacactataa

SEQ ID NO: 3554 - RNA, 1326 nt, synthetic construct
  misc_feature 1..1326: note = ABX82705 variant
  source 1..1326: mol_type = other RNA
atggtagaccctgtaggatttgcagaagcatggaaagcacaatttccagactcagaaccaccacgaatggaattaagatcagtaggagatattgaacaagaactagaaagatgcaaagcatcaataagaagattagaacaagaagtaaatcaagaaagattcagaatgatatatctacaaacattactagcgaaagaaaagaaaagttacgatagacagaggtggggattcagacgagcagcacaagcaccagatggtgctagtgaacctagagcatccgcatcaagaccacaaccagcccctgctgatggagcagatccaccgccagcagaagaaccagaagcgagaccggacggagagggtagtccaggaaaagcaagaccaggaacagcacgaagaccaggagctgcagcatcaggagaaagagatgacagaggaccgccagcaagcgtagcagctttaagatcaaattttgaaagaataagaaaaggacatggacaaccaggagcagacgcagaaaaaccattctacgtaaatgtagaatttcatcatgaaagaggtttagtaaaagtaaatgacaaagaagtatcagatagaattagtagcttggggagccaagcaatgcaaatggagagaaagaaaagtcaacatggagcaggatcaagtgttggagatgcaagcagaccaccttatagaggaagaagtagcgaaagctcatgtggagtagatggagattatgaagatgcagaattaaatccaagatttttaaaagataatctgatagacgcaaatggaggatctaggccaccttggccaccattagaatatcaaccatatcaaagtatttatgttggaggaatgatggaaggagaagggaaaggaccattactaagaagccaatcaacttcagaacaagaaaaacgtctaacatggccaagaagaagttatagcccgagaagttttgaagattgcggaggcggttatacaccagactgcagtagtaatgaaaacctaacaagttctgaagaagattttagttcagggcaatcatcaagagttagcccgagtccaactacatatcgaatgtttagagataaaagtagaagtccaagccaaaatagtcaacagagttttgatagctcaagtccaccaacaccacaatgtcataaacgtcacagacactgtccagtagtcgtaagtgaagcaacaattgtaggagtaagaaaaacaggtcaaatatggccaaacgatggagaaggagcatttcacggagatgctgatggaagtttagaactacaaggaaaaccatcaagatggacacaataa

SEQ ID NO: 3555 - RNA, 1575 nt, synthetic construct
  misc_feature 1..1575: note = ABX82706 variant
  source 1..1575: mol_type = other RNA
atggtagatccagtaggatttgctgaagcttggaaagctcaatttccagatagcgaaccaccacgaatggaactacgatcagtaggagatattgaacaagaattagaaaggtgtaaagcatcaataagaagattagaacaagaagtaaatcaagaaagattcagaatgatttacttacaaacgctactagcaaaagaaaaaaaaagttatgatagacaaagatggggatttagaagagcagcgcaagcaccagatggagcaagtgaaccaagagcgagtgcatcaagaccacaaccagcaccagcagacggagcagatccaccacctgctgaagagcccgaagctcgaccagacggagaagggagtccaggaaaagcacgaccaggaacagcaagaaggccaggagcagcagcttcaggagaaagagatgatagagggccaccagcatcagtagcagctttaagaagtaatttcgaaagaataagaaaaggacatggacaaccgggtgcagacgcagaaaaacctttttatgtaaatgttgaatttcaccatgaacgagggctcgtaaaagtaaatgacaaagaagtaagtgaccgtataagtagtttaggaagtcaagcaatgcaaatggagagaaaaaaaagtcaacatggtgctggttcatctgtaggagacgcaagtagaccaccatatcgaggaagatcatcagaaagtagctgtggagtcgatggagattacgaggacgcggaattaaatccaagatttctaaaagacaatctaattgatgcaaatgggggatcaagaccaccatggccaccacttgaatatcaaccttatcaatcaatttacgtaggaggaatgatggaaggtgaaggaaaaggaccattattaagaagtcaaagtacatcagaacaagaaaaaagattgacctggccgagaagaagctattcaccaagaagctttgaagactgcggaggaggttatacaccagattgctcgtcaaatgaaaatttaacatcaagtgaagaagacttcagcagtggccaaagcagcagggttagtccaagtccaacaacttataggatgtttagagacaaaagtagatcaccatcacagaacagccaacaaagtttcgactcaagttctcccccaacacctcaatgtcacaaaagacaccgacactgtccagtagttgtaagcgaagcaacaatagtcggtgtaagaaaaacaggacaaatatggccaaatgatggtgaaggagcatttcacggagatgcagatggatcattcggaacaccacccggatatggatgtgcggctgatagagcagaggagcaaaggagacatcaagatggattgccgtacatagacgattcaccaagcagtagtccacatctaagctctaaaggacgaggtagcagagatgcactagtatctggtgctttagaaagtacaaaagcaagtgaattagacttagaaaaaggactagaaatgagaaaatgggatccagtaaaaatgacacccacattcagcctacattgcatgatattatggccggtagaaataacactataa

SEQ ID NO: 3556 - RNA, 1398 nt, synthetic construct
  misc_feature 1..1398: note = ABX82707 variant
  source 1..1398: mol_type = other RNA
atggtagatccagttggatttgcagaagcttggaaagcacaattcccagatagcgaaccgcctagaatggaattaagatcagtaggagatattgaacaagaattagaaagatgcaaagctagcattagacgactagaacaggaagtcaatcaagagagattcagaatgatttatttacaaacattactagcaaaagaaaaaaaaagctatgatagacaaagatggggatttcgacgggcagcacaagcaccagatggagcatctgaaccaagagcaagtgcctcaagacctcaacctgcaccagcagatggagctgatccacctccagcagaagaaccagaagcaagacctgatggagaaggcagtccaggaaaagcaagaccaggaacagcaagaagaccaggtgcagcagcatcaggagaaagagatgatagaggtccaccagccagtgttgcagcactcagaagcaatttcgaaagaataagaaaaggccatggacaaccaggtgcagacgcagaaaaaccattttatgtaaatgtagaatttcatcatgaaagaggactagtaaaagtaaacgataaagaagtatcagaccgaataagtagtttaggatcacaggcaatgcaaatggaaagaaaaaaatcacaacatggagcaggttcgagcgtcggagatgcatcaagacctccatatagaggtcgatcaagcgaatcaagttgcggtgtagatggtgactacgaagacgcagagttaaatccaagatttctaaaagataatttaatagacgctaatggcggctcgagaccaccgtggccaccacttgaatatcaaccatatcagagtatttatgtcggtggaatgatggaaggagaaggaaaaggacctctactaagatcacaatcaaccagtgaacaagaaaaaagattaacatggccaaggagaagttacagtccaagatcatttgaagactgcggaggaggatatactccagactgcagtagtaacgaaaacttaacttcaagcgaagaagatttttcatcgggacaaagctcaagagtaagtcccagtccaacaacatatagaatgtttagagacaaaagtagaagtccttcacaaaacagtcaacaatcattcgactcatcatcaccaccaacaccacaatgtcataaaagacacagacattgtcccgtagtagtatcagaagcaacaatagttggagtaagaaaaactggacaaatatggccaaatgacggcgaaggagcatttcatggagaacatcctggtgcagcagaagaagtattccaaaaattactaccagacataagaggagcagcagatgccgatcaacttgtatgtgaaacaccagattgtccacaacactcagcagaccaccaataa

SEQ ID NO: 3557 - RNA, 1377 nt, synthetic construct
  misc_feature 1..1377: note = ABX82709 variant
  source 1..1377: mol_type = other RNA
atggtcgatccagttggatttgcagaagcttggaaagctcaatttcccgacagtgaaccaccaagaatggaattaaggagtgttggagacatagaacaggaattagaaagatgtaaagcatcaataagacgattagaacaagaagtaaatcaagaaagatttagaatgatatacttacaaacattgctggctaaagaaaaaaaaagttatgacagacaacgatggggttttaggagagcagctcaagcaccagatggagcgagcgaaccaagggcaagcgcatcaagaccacaaccagcaccggcagatggagctgacccacctccagcagaagaaccagaagcaagaccagacggggaaggtagcccgggaaaagcaaggccaggaacagcaagaaggccaggagccgccgcatcaggtgaaagagatgatagaggaccaccagcatcagtagcagcattaagaagcaattttgaaagaattagaaaaggacatggacaacctggagctgatgcagaaaaaccattttatgtaaatgttgaatttcatcatgaacgaggactagtaaaagtaaacgataaagaagtatctgacagaatttcaagtttaggaagtcaagcaatgcaaatggaaagaaaaaaaagccaacatggagcaggatcaagcgtaggagatgcaagtagacccccatataggggaagatcaagtgaaagttcatgcggagtcgatggagattacgaagatgcagaattaaatccaagatttttaaaagataatttaatagatgcaaacggaggaagcagaccaccgtggccgccattagaatatcaaccatatcaatcaatatacgtaggaggaatgatggaaggtgaaggtaaaggaccactattaagatctcaatcaacatcagaacaagaaaaaagactaacatggccaaggagatcatatagccctcgatcatttgaagactgtggaggaggatacactcctgattgctccagtaatgaaaacttaacaagtagtgaagaagatttttctagtggacaatcatcaagagttagtccatcaccaaccacatatagaatgttcagagataaatcacgatcaccaagtcaaaacagtcaacaatcatttgatagctcatcaccaccaacaccccaatgccataaaagacatagacactgtccagtagtagtatcagaagccacaatagtaggagtacgaaaaacaggacaaatatggccgaatgatggtgaaggagcatttcatggagatgcagacggaagtttcgggacacctcccggatattgttgtttatgtttaccggcatggccatcaggatgtacagcagcaaccgcaagagtaaccaggagttaa

SEQ ID NO: 3558 - RNA, 1365 nt, synthetic construct
  misc_feature 1..1365: note = ABX82710 variant
  source 1..1365: mol_type = other RNA
atggttgatccagtaggttttgcagaagcttggaaagcacaatttccggacagcgagcctccaagaatggaattacggtctgtaggggatattgaacaagaactagaaagatgcaaagcttcaataaggagattagagcaagaagtaaatcaagaacgattcagaatgatttatctgcaaacgctattagcaaaagaaaaaaaaagttacgaccgacaaagatggggttttcgtagagccgcacaagcacctgatggggcaagtgaaccaagagcatcagcatcaagaccacaaccagcaccagcagatggagcagatccaccgccagcagaagaaccagaagcaagaccagatggagaaggatcaccgggcaaggcaagaccaggtacagcaagaagaccaggagcagctgcaagtggcgaaagagatgatcgaggaccacctgcaagtgtagcagcactacgatcaaattttgaacgaataagaaaaggacatggacaaccgggagcagatgcagaaaaacctttttatgtaaatgtagaatttcatcatgaaagaggactagtaaaagtaaatgataaagaagtaagtgatagaataagtagtttaggaagccaagcaatgcaaatggaaagaaaaaaaagtcaacacggagccggaagctcagtaggagacgcatcaagaccaccatatagaggaagaagtagcgaaagtagttgcggagtagatggggactatgaagatgcggaattaaatcctcgttttttgaaagataacttaatagatgcaaatgggggaagtagaccgccgtggccacctcttgaatatcaaccataccaatcaatatacgtcggaggtatgatggaaggagaaggaaaaggacctcttcttagatcacaatcaacaagcgaacaagaaaaaagattaacatggccacgtagatcatattcaccaaggagctttgaagattgtggaggaggatacaccccagactgtagtagtaatgaaaacctaactagttcagaagaagatttttcaagtggacaaagttctagggtttcaccaagtcctacaacatatagaatgtttagagacaaaagtagatcgccatctcaaaattcacaacaaagttttgacagcagtagccctccaacaccacaatgtcataaaagacacaggcactgtcccgtggtagtaagtgaagcaacgattgtaggagttagaaaaactggacaaatatggccaaatgatggagaaggagcattccacggagatgcagatggttctttcggaacaccaccaggctatggttgtgcagcaggaagaccaccacatttaacagaattgccagttcaacatcaatag

SEQ ID NO: 3559 - RNA, 1404 nt, synthetic construct
  misc_feature 1..1404: note = ABX82711 variant
  source 1..1404: mol_type = other RNA
atggtggacccagtaggatttgcagaagcatggaaagcacaattcccagattcagaaccgccaagaatggaattgagatctgtaggagatatagaacaagagctcgaaagatgtaaagcgtcaataagaagattagaacaagaagtaaatcaagaaaggttcagaatgatataccttcaaacattactagcaaaagaaaaaaagtcatatgatagacaaagatggggatttagaagagcagcacaagcaccagatggagcatcagaaccaagagcgagtgcctctagaccacaaccagcacccgcagacggagcagatccaccaccagctgaagaaccagaagcaagaccagacggagaaggatcaccgggaaaagcccgaccaggaaccgcaagaagacctggagcagcagcctcaggagaacgagatgaccgtggtcctccagcatcagtagcagctctacgatcaaactttgaaagaataagaaaaggacatggccagccaggagcagatgcagaaaaaccattctacgtaaatgtagagttccaccatgaaagaggtctagtaaaagtaaatgataaagaagtaagtgatagaataagttcattaggatcacaagcaatgcaaatggaaagaaaaaaaagtcaacatggagcaggatcaagtgtaggagatgcctctagacctccatatagaggaagatctagtgaatcgtcttgtggagtagatggagactatgaagatgcagaactaaatccaagatttttaaaagataatttaatagatgcaaatggcggaagtagaccgccatggccacccttagaataccaaccataccagagcatatacgtaggagggatgatggaaggagaaggaaaaggaccactactaagatcacaaagtacttcagaacaagaaaaaagattaacatggccaagaagaagctacagtccaagaagttttgaagattgtggagggggctatacacccgattgttcatcaaatgaaaatttaacaagtagcgaagaagatttttcaagcggacaatcaagcagggtaagtccctcaccaacaacatatagaatgttcagagataaatcaaggagtccatcccaaaattcacaacaatcatttgattcaagtagcccgccaacaccacaatgtcataaaagacatcgacattgcccagtagtcgttagtgaagcaacaatagtaggagtaagaaaaaccggtcaaatatggccaaatgatggagaaggagcattccatggagacgcagtattaaaaacagaagtacctcatcaaggagtaagaagagcaagactaagtttagaagctttaggcgaagatccatcatttctttttccagcatctgatggaccaagacatagtagcacatggtaa

SEQ ID NO: 3560 - RNA, 1542 nt, synthetic construct
  misc_feature 1..1542: note = ABX82712 variant
  source 1..1542: mol_type = other RNA
atggtagatccagtaggattcgcagaagcttggaaagcacaatttccagatagtgaacccccacgtatggaactaagaagtgtaggagatatagaacaggaattagaaagatgtaaggcaagtattaggagattagaacaagaggtaaaccaagaaagattcagaatgatatatttacaaacactattagcaaaagaaaaaaaaagttatgatagacaaagatggggatttagaagagcagcacaagcccctgatggagcaagtgaaccaagagcatcagcatcaagaccacaaccagcaccagcagacggagcagacccaccaccagcagaagaaccagaagcaagaccagacggagaaggttcacctgggaaagctagaccagggactgcacgaagacctggagcagcagcatcaggagaacgagatgatcggggcccgccagcatcagtagcagcattaaggagcaattttgaaagaataagaaaaggacatggtcagccaggagcagatgcagaaaaaccattttatgtaaatgtcgaatttcatcacgaaagaggtctagtaaaagtaaatgataaagaagtaagcgacagaatatcatcactagggagccaggcaatgcaaatggaaagaaaaaaatcacaacatggtgctggctcaagcgtaggagacgcatcaagaccgccatatagaggaagatcatcagaaagttcatgtggtgtcgatggagactatgaagacgcagaattaaatccaaggtttctcaaagataatttaatagatgcaaatggaggctctaggccaccttggccaccattagaatatcaaccatatcaatcaatctatgtaggaggaatgatggaaggtgagggaaaaggaccattattacgttctcaatcaacttcagaacaagaaaaaagactaacatggccaagacgatcatactcaccaagaagtttcgaagactgtggggggggatatacaccagattgttcatcaaatgaaaatttaacatcaagtgaagaagattttagttcaggacaatctagtcgtgtaagtccaagtccaactacatacagaatgtttagagacaaatcaagatcaccatctcaaaatagccaacaatcattcgacagctcaagcccaccaacaccacaatgccataaacgacatcgacattgtccagttgtagtatcggaggcaacgatagtcggagtaagaaaaacaggacaaatatggccaaatgatggagaaggagctttccacggagatgcagacggttcattcggaactccaccaggatacggatgtgccgcggatcgagctgaagaacaaaggagacatcaagatggcttaccttatatagatgattcaccatcaagttcgccacatttatctagcaaaggaagaggaagtcgcgatgcattagttagtggagcattagaaagtaccaaagcaagcgaactagatcctgtaaaaatgacaccaacatttagtttacactgtatgatactatggccagtagaaataacattataa

SEQ ID NO: 3561 - RNA, 1221 nt, synthetic construct
  misc_feature 1..1221: note = ABX82714 variant
  source 1..1221: mol_type = other RNA
atggtagatccagtaggattcgctgaagcatggaaagcacaatttcctgattcagaaccacctcgaatggaattgagaagtgtaggagatatagagcaagaattagaaagatgtaaagctagcataagaagactagaacaagaagttaatcaggaaagatttagaatgatatatttgcaaacactattagcaaaagaaaaaaaatcatatgatagacaaagatggggattccgaagagcagcacaagcaccagatggagcttcagaaccaagagcctcggcatcgcgaccacaaccagcaccagcagatggcgcagaccctccaccagcagaagaaccagaagcaagaccagatggagaaggtagccctggaaaagccagaccaggaacagcaagaagaccaggagccgcagcaagtggagaaagagatgacagaggaccacccgcaagtgttgcagcattaagatccaattttgaaagaatacgaaaaggacacggtcaacccggagcagatgctgaaaaaccattctatgtaaatgtagaatttcatcatgaaagaggtttagttaaagtaaacgacaaagaagtctcagataggatttcaagcttaggatcacaagcaatgcaaatggaacgaaaaaaatcacaacatggagcaggatctagtgttggagatgcatcaagaccaccttatagaggaagaagctcagaatcatcttgtggagtcgatggcgattatgaagatgcagaactaaatccaagattcttaaaagataacctaatagatgctaacggaggctcaagaccaccatggccaccattagaatatcaaccttaccaatcaatatacgtcggaggaatgatggaaggagaaggaaaaggaccactactaagatcacaaagcacaagtgaacaagaaaaaaggcttacatggccaagaagatcatattcaccccgatcatttgaagattgcggaggaggatacacacctgattgctcgagcaatgaaaatttaacaagtagcgaagaagatttcagctctggtcaaagttcaagagtaagtccaagtccaacaacatatagaatgtttcgagataaatcaagaagtccatcacaaaattcacaacaatcatttgatagctcaagtccaccaactcctcagtgtcataaaaggcatagacactgccctgtcgtagtatcagaagcaacaagcggacaataa

SEQ ID NO: 3562 - RNA, 2346 nt, synthetic construct
  misc_feature 1..2346: note = AAH58926 variant
  source 1..2346: mol_type = other RNA
atggcaacacaagcagatttaatggaattagacatggcaatggaaccggatcgaaaagctgcagtctcacattggcaacaacagtcttacctagattcaggcattcacagcggtgcaactacaacagcaccatcactttctggaaaaggaaatccagaagaagaagatgtcgacacaagtcaagtattatatgaatgggaacaaggattctcacaatcatttacccaagaacaagtagctgatattgatggacaatatgcaatgacgcgggcccaaagagtaagggcagctatgttccccgaaacattagacgaaggaatgcaaattccatcaactcaatttgatgctgcccacccaacgaacgtacaaagactagcagaaccctcacaaatgttaaaacatgctgtcgtgaatctaataaactaccaagatgatgcagaactagccactcgagctataccagaattaacaaaactactaaacgatgaagatcaagtagtagtaaataaagcagcagtaatggtccaccaactttccaagaaagaagcatcaagacatgcaattatgagatcaccacaaatggtttcagcaatagttagaaccatgcaaaatacaaatgatgtagaaaccgctagatgcactgcaggaacgttacataacttatcccatcacagagaaggactcttagcaatatttaaaagtggaggaatacctgccctagttaaaatgcttggatcaccagttgacagcgtattattctatgcaataacgacacttcataatcttttacttcaccaagaaggggctaaaatggcagtaagattagctgggggtttacagaaaatggtagctctactcaataaaacaaacgtaaaatttctcgctataacaactgactgtttacaaatcctagcatacggaaatcaagaatcaaaacttataatactagcatcagggggaccacaagcattagtcaatatcatgagaacatacacatatgaaaaactactatggacgacctcacgggtattaaaagtattatcagtctgttcatcaaataaaccagctatcgtcgaagctggaggaatgcaagcgctaggattacatctcactgatccaagtcaaagattagtacaaaattgcctatggacactacgaaacttatcagacgcagctactaaacaagaaggaatggaaggactattaggaactttagtacaacttttaggatcagatgatataaacgtagtaacatgtgcagcaggaatactttcaaatttaacttgcaacaactacaaaaacaaaatgatggtatgccaagtaggcggaatagaagctctggtaagaacagtattacgagcaggagacagagaggatatcacagaaccagccatatgtgcccttcgacaccttacatcacgacaccaagaagctgaaatggcacaaaatgcagttagactacattacggacttcccgttgttgtaaaattattacacccaccttcacattggcctctaataaaagcaaccgtcggcttaattagaaacttagcactctgcccagctaatcacgcacctttgagagaacaaggagctataccaaggcttgtacaattacttgtaagagcgcaccaggacacacaacgaagaacaagtatgggaggtacacaacaacaattcgttgaaggggtaagaatggaagaaattgtagaaggatgcacaggtgctttacatatattggcaagagatgtacataatagaattgttattagaggtttaaatacaatacctctcttcgtacaacttttatattcccctattgaaaatatacaacgagtagccgcaggcgtactttgtgaactagcacaagacaaagaagcggctgaagcaatagaagcggaaggagcaaccgctccactaacggaattacttcattcaagaaatgaaggtgtagcaacatacgcagcagcagttctatttagaatgtcagaagataaaccacaagactacaagaaacgcttatcagtagagctaaccagctcgttatttcgaactgaacccatggcttggaacgaaacagctgatctaggattagatataggagcacaaggagaaccattaggctatagacaagatgacccatcttacagaagtttccattcaggcggatatgggcaagatgcattaggtatggacccaatgatggaacacgaaatgggaggacatcatcctggagctgactatcccgttgatggcctaccagatctaggacatgctcaagatctaatggatggattaccaccaggagattcaaatcaactagcctggtttgacacagatttataa

SEQ ID NO: 3563 - RNA, 1692 nt, synthetic construct
  misc_feature 1..1692: note = AAI21007 variant
  source 1..1692: mol_type = other RNA
atggatgtaggagaattactatcttaccaaccaaaccgaggtacaaaacgaccaagagacgacgaagaagaagaacaaaaaatgagaagaaaacaaactggaacaagagaaagaggtagataccgagaggaagaaatgacagtagtcgaagaagctgacgacgacaaaaaaagacttttgcaaataatagacagagatggagaagaggaagaagaagaagaagaaccactagatgaaagctcagttaagaaaatgatactaacattcgaaaaacgaagctataaaaaccaagaattacgaatcaaattcccagataaccccgaaaaattcatggagagtgaactagacctaaatgacattattcaagaaatgcacgtagtagcaaccatgcccgatctttatcacctcctagtagaacttaacgccgtacaatcattattaggacttttaggccacgacaatacagacgtaagtatcgcagtagtagatttactacaagaactaacagatatcgatacattacacgaaagtgaagaaggagcagaagtacttatagatgcactagttgacggacaagtagtagcactattagtacaaaatctagaacgactagacgaatcagtgaaagaagaagcagacggagtacacaacacactggcgatagttgaaaatatggcagaatttcgacctgaaatgtgcactgaaggcgcacaacaaggattattacaatggctattaaaacgactaaaagcaaaaatgccattcgatgcaaacaaattatattgctcagaggtattagctattctattacaagataatgacgaaaatagagaactactaggtgaactagatggaatagatgtactattacaacaattaagcgtattcaaacgacacaatccaagtacagcagaagaacaagaaatgatggaaaatctttttgacagtctatgttcatgtctaatgctatccagtaatagagaaagatttttgaagggagaaggattacaactaatgaacttaatgttaagagaaaaaaaaatatcaagaagctcagcattaaaagtattagatcacgcaatgattggaccagaaggaacagacaactgccataaatttgtagatattctaggcttacgcacaatattcccactatttatgaaaagtccacgaaaaatcaaaaaagtaggtactaccgaaaaagaacatgaagaacatgtctgtagcatattagcttcattattaagaaacctaagaggacaacaacgaacaagattacttaataaattcaccgaaaacgattccgaaaaagtagatagattaatggaactccactttaaatatctaggcgccatgcaggtagctgataagaaaatagaaggtgaaaaacacgacatggtaagaagaggagaaataatcgataacgatacagaagaagaattctacttacgaagactagacgcaggactgttcgtattacaacacatatgttatataatggccgaaatatgtaacgcaaatgttccccaaataagacaaagagtacatcaaatattaaatatgagaggatcgagtataaaaatagtgagacatataataaaagaatacgcagaaaacataggagacggaagatcacctgaatttagagaaaatgagcaaaaaagaatactaggactacttgaaaacttttaa

SEQ ID NO: 3564 - RNA, 1833 nt, synthetic construct
  misc_feature 1..1833: note = CCDS4772.1 variant
  source 1..1833: mol_type = other RNA
atggaaacagctccaaaaccaggtaaagatgtaccgcctaaaaaagataaacttcaaaccaaacgaaaaaaacccagaagatactgggaagaagaaacagtacctaccacagcaggagctagtcctggaccacctaggaacaaaaaaaatagagaattaagaccacaaagaccaaaaaatgcttatatccttaaaaaatcaagaatatccaaaaaaccacaagtaccaaaaaaaccacgagaatggaaaaatccagaatctcaaagaggcctaagtggcactcaagatccatttccaggtccagcaccagttcctgtagaagtagtacaaaaattttgtagaatagataaatcaaggaaactaccacatagtaaagctaaaacaagaagtagattagaagtagccgaagctgaggaagaagagacttcaataaaagctgcaaggagtgaactattactagccgaagaaccaggatttttagaaggagaagatggcgaagatacagcaaagatatgtcaagcagacattgttgaagccgttgatatagcatcggctgcaaaacattttgatttaaatctaaggcaattcggaccttaccgactcaattattctagaacgggcagacacctagcttttggcggacgacgaggtcacgtagcagctctagattgggtaacaaaaaaattaatgtgtgaaattaatgtaatggaagcagtaagagacataaggtttcttcattcagaagccttattagctgtagcacaaaatcgatggctacatatatatgataaccaaggaatagaactacactgtataaggagatgtgatcgcgtaacaagattagaatttctaccctttcattttctcctcgcaacagcatcggaaacaggattcctaacttacttagacgtaagcgtaggaaaaatagtagcagcactaaatgctagagcagggagactagatgtaatgagtcaaaacccatataacgcagtgatacatcttggacatagtaatggaacagtatcattatggtcccccgcgatgaaagaaccactagccaaaattctatgtcaccgaggaggcgtaagggctgtagcagtagacagcacaggaacttacatggcaacaagtggattagatcaccaactaaaaatattcgatctaagaggaacatatcaaccacttagcacaaggactctcccacatggagcaggacatcttgcattctcacaaagaggactattggttgctggaatgggagatgtcgtaaatatctgggccggacaaggtaaggcatcacctccatctttagaacaaccatacctaacacatcgactgtcaggtccagtacatggacttcaattttgcccatttgaagacgtactaggagtcggtcataccggagggataaccagtatgttagtacctggagcaggagaaccaaatttcgacggattagaatcgaacccatacagaagtagaaaacaaagacaagaatgggaagtaaaagcgttattagaaaaagtaccagcagaactaatatgtctagatccaagagcattagcagaagttgatgtaatatcattagaacaaggcaagaaagaacaaattgagagattaggctacgatccacaagcaaaagcaccatttcaacccaaaccaaaacaaaaaggacgaagtagtactgctagcctagtaaaacgaaaaagaaaagtaatggatgaagaacatagggacaaagtcagacaatccttacaacaacaacaccataaagaagcaaaagctaaacctacaggagcacgcccaagtgcactagatagatttgtccgataa

SEQ ID NO: 3565 - RNA, 897 nt, synthetic construct
  misc_feature 1..897: note = AAG37878 variant
  source 1..897: mol_type = other RNA
atgggaccaaaagatagtgcaaaatgtttacacagaggtccacaaccatcacattgggcagcaggagatggaccaacacaagaaagatgtggcccaagaagtttaggatcaccagtattaggtttagatacttgcagagcatgggatcatgtagacggacaaatattaggccaattaagaccattaacagaagaagaagaagaagaaggagcaggagcaacattaagtagaggaccagcatttccaggaatgggaagcgaagaattaagattagctagcttttatgattggccactaacagcagaagtaccaccagaattattagcagcagcaggcttctttcatacaggacatcaagataaagtaagatgctttttctgttacggaggattacaatcatggaaaagaggtgacgatccatggacagaacatgcaaaatggtttccatcttgtcaatttttattaagatctaaaggaagagactttgtacattcagtccaagaaacacactcacaattattaggtagctgggatccatgggaagaaccagaagatgctgcaccagtagcaccaagtgtaccagcaagcggatatccagaattaccaacaccaaggcgagaagtacaatcagaaagcgcacaagaaccaggaggagtaagcccagcagaagctcaaagagcatggtgggtattagaaccaccaggagcaagagatgtagaagcacaattaagaagactacaagaagaaagaacatgtaaagtatgcctcgatagagctgtatcaatagtatttgtaccatgtggtcacttagtttgtgcagaatgtgcgccaggactacaattatgtccaatatgtagagcaccagtaagaagtagagtaagaacatttttatcataa

SEQ ID NO: 3566 - RNA, 2280 nt, synthetic construct
  misc_feature 1..2280: note = EAW60925 variant
  source 1..2280: mol_type = other RNA
atggacctatccgcactacgtgtagaagaagttcaaaatgtaattaacgcaatgcagaaaatactcgaatgcccaatatgccttgaactaataaaagaacccgtatcaactaaatgcgaccacatattttgtaaattctgtatgttaaaattactaaatcaaaagaaaggtccatcacaatgcccactatgcaaaaacgatataactaaaagatcattacaagagtcaacaaggttctcacagctagtagaagaactactaaaaattatctgtgcattccaactcgatacaggattagaatatgctaactcatacaatttcgcaaagaaagagaacaactcacctgaacatctaaaagatgaagtatcaataatacaaagcatgggatatagaaaccgagcaaaaagactccttcaatcagaaccagagaatcctagcttacaagaaactagcttgtcagtacaactaagtaatctcggaacagtacgaacattaagaacaaaacaacgcattcaaccacagaaaacatcagtatatatagaactaggctcggactcaagtgaagacacagttaataaagctacatactgttcagtaggtgaccaagaattactacaaatcactccacaaggtacaagagatgaaatttccctagattctgccaagaaagcagcatgtgagttcagtgaaactgatgttacgaataccgaacaccatcaaccatcgaacaatgacctaaacacaactgagaaaagggccgcagaacgacatcccgaaaaatatcaaggagaagccgcaagtggatgcgaatctgaaacttcagtatcagaagattgctcagggttaagctcacaatcggacattcttactacccaacaaagagataccatgcaacataatcttataaaattacaacaagaaatggcagaactagaagcagtcttagaacaacatggaagccaaccatcaaattcatacccatcaatcataagcgactcatcagcattagaagatctacgaaaccccgaacaatccacatctgaaaaagtattaacctcacaaaaatctagtgaatacccaatatcacaaaatcctgaaggactatcagcagataaattcgaagtatcagccgacagtagtacatctaaaaacaaagaaccgggagtagaacgctcaagccccagtaaatgcccttcactagacgatcgatggtacatgcactcatgcagtggatctctacaaaatagaaactatccaagtcaagaagaactaataaaagtagtagacgtagaggaacaacaattagaagaatcaggaccccacgatttaacagaaacatcatatttacctagacaagatttagaagggacaccatacttagaaagcggaattagtctattttcagacgatccagaatcagacccaagcgaagacagagcaccagaaagtgcacgagtgggcaacataccaagctcaacatcagctttaaaagtacctcaattaaaagttgcagaatcagcacaatctccagcagctgcacacaccacagacacagccgggtacaacgcaatggaagaatcagtaagcagagaaaaacccgaactaacagcctccacagaacgagtcaacaaacgcatgtcaatggtagtatcagggttaacacccgaagagttcatgcttgtttacaaattcgcacgaaaacaccatataacactaactaacctaatcacagaagaaaccacacacgtagtaatgaaaacagatgcagaatttgtatgtgaaagaactttaaaatactttttaggaatagcaggaggaaaatgggtagtatcatacttctgggtaacacaaagtataaaagaaagaaaaatgctaaatgaacatgatttcgaagtaagaggtgacgtagtaaacggaagaaatcatcaaggaccaaaaagagcaagagagtcccaagacagaaagatcttcagaggtttggaaatatgttgctacggtccattcacgaatatgcccacagatcaattggaatggatggtacaactatgcggtgcgtcagtagtaaaggaactttctagctttactcttggaactggcgtgcatccgatagtggtagtccaaccagatgcatggacagaagacaacggattccacgctataggccaaatgtgtgaagcccccgttgtcacaagagaatgggtattagattcagtagcattgtatcaatgtcaagaacttgatacctaccttattccacaaatacctcattcacattattaa

SEQ ID NO: 3567 - RNA, 2160 nt, synthetic construct
  misc_feature 1..2160: note = EAW60922 variant
  source 1..2160: mol_type = other RNA
atggatctcagcgccctacgagtagaagaagtccaaaacgtaataaatgctatgcaaaaaatattagaatgccctatttgtctagaattaattaaagaaccagtttcaacaaaatgcgatcacatattctgcaaattctgcatgctaaaattactcaaccaaaaaaaaggaccatcccaatgtcctctctgcaaaaatgacatcactaaacgatcattacaggaatcaacaagattctcacaattagtagaagaattactaaaaataatatgcgcatttcaactagacacaggtctagaatatgcaaacagctacaatttcgcaaaaaaagaaaacaattcaccagaacacctaaaagatgaagtgtccataatacaatctatgggatatcgaaatagagcaaaacgactactacaatcagaacctgaaaatccatcattacaggaaacatcactctctgttcaactatcaaatcttggcaccgtaagaacattgagaaccaaacaacgaatacaacctcaaaaaacctccgtatacatagaattagccgcatgcgaattttcagagacagacgtaacgaatacagaacaccaccagccctctaataatgacttaaacacaacagaaaaaagagcagcagaacgacacccagaaaaataccaaggagaagctgcatcaggttgcgaaagcgaaacatccgtaagtgaagactgttcaggactatcttcacaaagtgacatacttactacccaacaaagagacaccatgcaacacaatctaataaaattacaacaagaaatggccgaactagaagcagtattagaacaacacggatcacaaccatcaaactcatacccctcaataatatcagactcatcagcacttgaagacttacgtaatccagaacaaagtactagcgaaaaagcagtactaacaagccaaaaatcttcagaatatcccatctcacagaaccccgaaggactaagtgccgacaaattcgaagtatcagcagacagtagtacttcaaagaataaagaacccggagtagaaagatcaagtccttcgaaatgcccatcattagacgacagatggtacatgcattcatgttctggctcactacaaaacagaaactatccatcacaagaggaactaataaaagtcgttgatgtagaagaacaacaactagaagaaagtggaccacatgatcttaccgaaacttcatatttacctagacaagacctagaaggaaccccctatctagaatcaggaatatcactattttccgacgacccagaatcagatccatcagaagaccgagcacctgaatcagcgagagtaggtaacataccatcatctacatcagcactaaaagtaccccagttaaaagtagctgaaagcgcacaaagcccagccgcagcacacacgacagacacagctggttacaacgcaatggaagaatcagtatcaagagaaaaacccgaactaacggcaagcacagagagagtaaataaaagaatgtccatggtagtatcaggcttgacccccgaagagttcatgctagtctacaaattcgcaaggaaacatcatatcacgctaacaaaccttataactgaagaaacaacacatgtagtaatgaaaacagacgcagaattcgtatgtgaaagaacacttaaatactttctaggaattgcaggaggaaaatgggtagtctcatacttctgggtaacccaaagtataaaagaacgaaaaatgttaaacgaacatgatttcgaagttagaggagacgtcgttaacggaagaaaccatcagggaccaaaaagagctagagaatcccaagatagaaaaatattcagaggcctagaaatatgttgttatggtccattcacaaatatgccaacagaccaattagaatggatggtccaattatgcggtgcaagcgtagtcaaagaattatcgagtttcacattgggcacaggcgtacaccccattgtagtcgtacaaccagacgcatggacagaagacaatggatttcatgcaataggacaaatgtgtgaagcaccagtagtaactagagaatgggtcttagactcagtagcactataccaatgccaagaattagacacatatcttattccacaaataccacattcacactattaa

SEQ ID NO: 3568 - RNA, 2166 nt, synthetic construct
  misc_feature 1..2166: note = EAW60923 variant
  source 1..2166: mol_type = other RNA
atggatctgtccgcactacgcgtcgaagaagtacaaaacgtaatcaacgcaatgcaaaaaattctagaatgcccaatctgtctagaactaatcaaagaaccagtatcaaccaaatgcgaccatatattttgtaaattctgcatgctaaaattattaaaccaaaaaaaaggaccctcacaatgtccattatgcaaaaacgacataacaaaaagatcactacaagaaagtacaagattttcgcaactagtagaagaattactcaaaataatatgcgcatttcaattagacacaggactggaatatgcaaactcctacaacttcgccaaaaaagaaaataactccccagaacacttaaaagatgaagtatccataattcaaagtatgggctaccgaaatagggcaaaaagattactacaatcagaaccagaaaacccatcattacaagaaacatcactatcagtacagctatccaacctaggtacagtaagaacactaagaacaaaacaacggatacaaccacaaaaaacctccgtatacattgaacttggatccgactcatcagaagacacagtaaataaagccacatactgctcagtaggtgatcaagaacttttacagataacaccacaaggaacacgtgatgaaataagcttagattcggccaaaaaaggagaagctgcaagcggatgcgaatcagaaacctcagtctcagaggattgttcaggactatcatctcaatcagatattctcaccacacaacaaagagatacaatgcaacacaacctaatcaaattacaacaagaaatggcagaattagaagccgtcttagaacaacacggatcccaaccctctaacagttacccatcaattatctcggattccagcgcactagaagacttgcgaaacccagaacaaagtacatccgaaaaagcagttttaacatctcaaaagtcatccgaatacccaatatcacaaaaccccgaaggattatcagccgacaaattcgaggtatcagcagactcatcaacatcaaaaaacaaagaaccaggcgtcgaacgatctagtcccagtaaatgcccctccttagacgatcgatggtacatgcactcatgctccggaagcttacaaaatagaaactacccatcacaagaagaactaatcaaagtagttgacgtagaagaacaacaactcgaagaatcgggccctcatgacctcaccgaaacaagctatctaccaagacaagatctagaaggaacaccttacctagaaagtggaatatctctattctcagacgatccagaatccgacccttcagaagatagagcaccagaaagtgcaagagttggaaacataccatcatccacatctgcactaaaagtaccacaactaaaagtagccgaatcagcacaaagtcccgcagcagcccacaccaccgacactgctggatacaacgcaatggaagaaagtgtaagtagagaaaaacccgaactaacagccagcacagaaagagttaataaaagaatgagcatggtagtaagcggattaacaccagaagaattcatgctagtatataaatttgctcgtaaacaccatatcaccttaactaacctaataacagaagaaacaacacatgtggtaatgaaaacagacgcagagttcgtttgtgaaagaacattaaaatactttttaggaatagcaggcggaaaatgggtagtaagctatttttgggttacacaatcaatcaaagaacgaaaaatgctaaacgaacatgatttcgaagtaagaggcgatgtcgtaaacggcagaaaccaccaaggaccaaaaagagcaagagaatcacaagacagaaaaatctttaggggcttagaaatatgctgctatggtccattcacaaacatgcccactgaccaactagaatggatggtccaattatgtggagcttcagtcgttaaagaactctcgtcatttacattaggaacaggggtacatccaatagtcgtagttcaacccgacgcatggacagaagataacggtttccacgccataggccaaatgtgtgaagccccagtagtaacaagagaatgggtcctagactcggtagcactttaccagtgccaagaattagacacatatttaataccacaaatccctcactcacactactaa

SEQ ID NO: 3569 - RNA, 36 nt, synthetic construct
  misc_feature 1..36: note = AIC83575 variant
  source 1..36: mol_type = other RNA
atggatttgagtgcgttaagggtagaggaagtgtga

SEQ ID NO: 3570 - RNA, 522 nt, synthetic construct
  misc_feature 1..522: note = ABC59810 variant
  source 1..522: mol_type = other RNA
atggatgcagaatttgtatgcgaaagaacattaaaatacttcctaggaatagcaggaggaaaatgggtagtaagttatttctgggtaacacaatcaataaaagaaagaaaaatgttaaatgaacatgactttgaagtaagaggagacgtagtaaatggaagaaatcatcaaggaccaaaaagagcaagagaaagtcaagatagaaaaatattcagaggattagaaatatgttgttacggaccatttacaaatatgccaacagatcaactagaatggatggtacaattatgcggagcatcagtagtaaaagaactaagctcatttacattaggaacaggagtacacccaatagtagtagtacaaccagacgcatggacagaagataacgggttccatgcaataggacaaatgtgtgaagcaccagtggtaacaagagaatgggtactagatagtgtagcattatatcaatgtcaagaattagatacatacttaataccacaaataccacatagtcattattaa

SEQ ID NO: 3571 - RNA, 1065 nt, synthetic construct
  misc_feature 1..1065: note = ABC88652 variant
  source 1..1065: mol_type = other RNA
atgcacagctgttcaggtagtctacaaaacagaaattacccatcacaagaagaattaataaaagtagtagatgtagaagaacaacaattagaagaatcaggaccacatgatctaacagaaacctcatacctacccagacaagatctagaaggaaccccatatttagaaagtggaatcagcctattcagtgatgatccagaaagtgacccttcagaagatagggcaccagaaagcgcacgagtaggaaacataccaagtagcacttcagcactaaaagtaccacaattaaaagtagcagaaagcgcacaaggaccagcagcagcacatacaacagatacagcaggatacaacgcaatggaagaatcagtaagcagagaaaaaccagaactaacagcatcaacagaaagagtaaataaaagaatgtcgatggttgtcagcggactcacacccgaagaatttatgttagtatataaattcgcacgaaagcatcacataacattaacaaacctaataacagaagaaacaacacacgtcgtaatgaaaacagacgctgagttcgtatgtgaaagaacattaaaatattttctaggtatagcaggcggaaaatgggtagtaagttacttctgggttactcaaagtataaaagaaagaaaaatgttaaatgaacatgatttcgaagtacgaggagatgtagtaaatggaagaaaccatcaagggccaaaaagagcaagagaaagtcaagacagaaaaatattcagaggattagaaatatgctgctacggtccatttacaaatatgccaactgatcaactagaatggatggtccaattatgcggagcatcagtagtaaaagaattatcaagttttacattaggaacaggagtacatccaatagtagtagtacaaccagacgcatggacagaagacaatggttttcacgcaatcggacaaatgtgcgaaacaccagtagtaacaagagaatgggtattagattcagtcgctttataccaatgtcaagaactcgatacatatctaataccacaaataccacactcacactattaa

SEQ ID NO: 3572 - RNA, 2043 nt, synthetic construct
  misc_feature 1..2043: note = EAW60939 variant
  source 1..2043: mol_type = other RNA
atggacctatctgcacttagggtagaagaagtacaaaacgttataaacgcaatgcagaaaatactagaatgccccatatgtttagaattaataaaagaaccagtctctactaaatgtgaccacatcttctgtaaattctgtatgctaaaattactaaatcaaaagaaaggtccaagtcaatgccccttatgcaaaaacgatataacaaaacgctcactacaagaaagtacccgcttttcacaattagtagaagaattactaaaaattatttgcgcattccaacttgacacaggtttagaatatgccaactcttacaactttgctaagaaagaaaataattcacccgaacacctgaaagatgaagtaagcataattcaatcaatgggctaccgaaacagagccaaaagattattgcaaagtgaaccagaaaacccttcattacaagaaacgagcttaagcgttcaactctccaacttaggtacagttcggacattaagaacaaaacaacgaatacaaccacagaaaacaagtgtttacatagaattgggagaagcagccagcgggtgcgaaagtgaaacaagcgtatcagaagactgcagtggtttatcttctcaatcagacatactaacaacacaacaaagagatacaatgcaacataacctcataaaactccaacaagaaatggcagaattagaagccgttctagaacaacacggctcacaaccatcaaacagttacccatcaatcatctcagactctagtgcattagaagatctcaggaacccagaacaaagcaccagcgaaaaagcagtacttacatcacaaaaatccagcgaatacccaatatctcaaaacccagaaggtctatcagcagataaatttgaagtaagcgcagactcatcaacaagcaaaaataaagaaccaggagttgaaagatcatcaccatcgaaatgcccatcattagacgatcgatggtacatgcactcatgcagcggaagtttacaaaaccgaaactatccatctcaagaagaattaataaaagtagtagacgttgaagaacaacaattagaagaaagtggtccacacgatttaacagaaacaagctatttaccaaggcaagacttagaaggaactccatacctggaaagtggaataagtttatttagtgacgatccagaaagcgatccatcagaagatagagctcccgaaagtgccagagtcggaaacataccgtcttcaacttcagctctaaaagtaccacaactaaaagtagcagaatccgcgcaatcaccagcagcagcccatacaacagataccgcaggatacaacgcaatggaagaatctgtatcaagagaaaaaccagaactaacagcatcaactgaaagagtaaataaaagaatgtcaatggtcgtatcaggacttacaccagaggagttcatgttagtatacaaattcgcacgaaaacatcacataactttaacaaatcttatcacagaagaaaccacccacgtagtgatgaaaacagacgcagagttcgtctgcgaacgcactcttaagtactttttaggaatagctggtggaaaatgggtagtttcatacttctgggtaacacaatcgattaaagaaagaaaaatgctaaacgaacatgacttcgaagtaaggggcgacgtagtaaacggcagaaatcaccaaggaccaaaaagagcacgtgaatcacaagatagaaaaatatttagaggtttagaaatctgctgctacggaccttttactaacatgccaactgaccaattagaatggatggtacaactatgtggagcatcagtagtaaaagaactatcaagtttcacactaggaacaggagtccatccaatcgtagttgtacaaccagacgcatggaccgaagacaacggttttcatgcaataggacaaatgtgtgaagcaccagtagtaacaagagaatgggtactagactcagtagccttatatcaatgtcaagaactagatacgtatctaataccacaaataccacacagtcactattaa

SEQ ID NO: 3573 - RNA, 546 nt, synthetic construct
  misc_feature 1..546: note = AAC72302 variant
  source 1..546: mol_type = other RNA
atgttactagaaccaggaagaggatgctgtgcattagcaatactattagcaatagtagatatacaaagcggaggatgtataaatataacaagctcagcatcacaagaaggaacaagattaaacctaatatgtacagtatggcacaaaaaagaagaagcagaaggatttgtagtattcttatgcaaagacagatcaggagactgttcacctgaaacaagcttaaaacaactaagactaaaaagagatccaggaatagatggagtaggagaaataagtagccaactaatgttcacaatatcacaagtaacaccattacatagcggaacatatcaatgttgcgcaagatcacaaaaaagcggaataagactacaaggacatttcttttcaatactatttacagaaacaggaaactatacagtaacaggactaaaacaaagacaacatttagaattctcacacaatgaaggaacattaagctcaggatttctacaagaaaaagtatgggtaatgctagtaacttcactagtagcattacaagcactataa

SEQ ID NO: 3574 - RNA, 639 nt, synthetic construct
  misc_feature 1..639: note = BAG58223 variant
  source 1..639: mol_type = other RNA
atgctattaagcgtatactttaaagaacaattcctagacggagacggatggacatcaagatggatagaaagcaaacacaaatcagacttcggaaaattcgtactatcatcaggaaaattctacggagacgaagaaaaagacaaaggactacaaacatcacaagacgcaagattctacgcactaagcgcaagctttgaaccattctccaacaaaggacaaacactagtagtacaattcacagtaaaacacgaacaaaacatagactgcggaggaggatacgtaaaactattcccaaacagcctagaccaaacagacatgcacggcgacagcgaatacaacataatgttcggaccagacatatgcggaccaggaacaaaaaaagtacacgtaatattcaattacaaaggaaaaaacgtactaataaacaaagacataagatgcaaagacgatgaattcacacacctatacacactaatagtacgaccagacaacacatacgaagtaaaaatagataactcacaagtagaatcaggatcactagaagacgactgggatttcctaccaccaaaaaaaataaaagacccagacgcatcaaaaccagaagactgggacgaaagagcaaaaatagacgacccataa

SEQ ID NO: 3575 - RNA, 891 nt, synthetic construct
  misc_feature 1..891: note = BAG65301 variant
  source 1..891: mol_type = other RNA
atgcacggagacagcgaatacaatataatgttcggaccagacatatgtggaccaggaacgaaaaaagtacatgtaatattcaactacaaaggaaaaaatgtattaataaataaagacataagatgcaaagacgatgaattcacacacttatacactctaatagtaagaccagacaacacatacgaagtaaaaatagataactcacaagtagaaagtggatcactagaggacgactgggatttcttgccaccgaaaaaaataaaagatccagacgcaagcaaaccagaagactgggacgaaagagcaaaaatagacgatccaacagacagcaaaccagaagactgggataaaccagaacatataccggacccagatgcgaaaaaaccagaagattgggacgaagaaatggacggagaatgggaaccaccagtaatacaaaatccagaatacaaaggagaatggaaaccaagacaaatagataatccagactataaaggaacatggatacacccagaaatagataacccggaatacagtccagacccaagcatatacgcatacgacaactttggagtactaggattagacttatggcaagtaaaatcaggaacaatatttgacaatttcttgataacaaacgacgaagcatacgcagaagaattcggaaacgaaacatggggagtaacaaaagcagcagaaaaacaaatgaaagacaaacaagatgaagaacaaagactaaaagaagaagaagaagataaaaaaagaaaagaagaagaagaagcagaagacaaagaagacgatgaagacaaagacgaagacgaagaagacgaagaagacaaagaagaagacgaagaagaagacgtacccggacaagcaaaagacgaactataa

SEQ ID NO: 3576 - RNA, 1254 nt, synthetic construct
  misc_feature 1..1254: note = AAA36582 variant
  source 1..1254: mol_type = other RNA
atgcttttaagtgttccattattattgggactattaggactagcggttgcagaaccagcagtatattttaaagaacagtttctagatggagatggatggacttcacgctggatagaaagtaaacataaaagcgatttcggaaaatttgtcttaagctcaggaaaattttatggagatgaagaaaaagataaaggattacaaacatcacaagatgctagattctacgcattaagcgcaagctttgaaccattctcaaataaaggacaaacactagtcgtgcaatttacagtaaaacacgaacaaaacatagactgcggaggaggatatgttaaactatttccaaatagcctagaccaaacagatatgcatggagatagtgaatacaatataatgttcggaccagatatatgtggaccaggaacgaaaaaggtacatgtaatatttaattataaaggaaaaaacgtactaataaacaaagacataagatgtaaagatgacgaattcacacacctatacacactaatagttagacccgataacacatatgaagtaaaaatagataacagtcaagtagaatcaggaagtcttgaagatgattgggatttcctaccaccgaaaaaaataaaagacccagacgccagtaagccagaagactgggacgaaagagcaaaaatagacgatccaacagactcaaaaccagaagattgggataaaccagaacatataccagatccagacgcaaaaaaaccagaagactgggatgaagaaatggatggtgaatgggaaccaccagtaatacaaaacccagaatataaaggagaatggaaaccacgtcaaatagataacccagactataaaggaacctggattcatccagaaatagataacccagaatacagcccagaccctagtatatacgcttacgataactttggagtattagggttagatctatggcaagtaaaaagtggaacaatatttgataattttctgataacaaatgacgaagcatacgcagaagaattcgggaatgaaacatggggagtaacaaaagcagcagaaaaacaaatgaaagataaacaagatgaggaacagagattaaaagaagaagaagaagataaaaaacgaaaagaagaagaggaagcagaagataaagaagatgacgaagacaaagatgaagacgaagaagatgaagaagataaagaagaagatgaagaagaagacgttccaggacaagcaaaagacgaattataa

SEQ ID NO: 3577 - RNA, 1155 nt, synthetic construct
  misc_feature 1..1155: note = BAB71655 variant
  source 1..1155: mol_type = other RNA
atggccagagccctagtccaactatgggcaatatgcatgctaagagtagccctagcaacagtatatttccaagaagaatttttagacggagaacactggcgaaacagatggttacaaagtacaaacgacagcagattcggacacttcagattatcatcaggaaaattttacggacacaaagaaaaagacaaaggtttacaaaccacccaaaacggaagattctacgctatatcagcaagattcaaaccattctcaaacaaaggaaaaacactcgtaatacaatacacagtaaaacacgaacaaaaaatggactgcggaggaggatacataaaagtatttccagccgacatagaccaaaaaaacttaaacggaaaatcacaatactacataatgttcggaccagacatatgcggattcgacataaaaaaagtccacgtcatactacacttcaaaaacaaataccacgagaacaaaaaattaatacgatgcaaagtagacggatttacacacctatacacactaatcttaagaccagacctaagttatgacgtaaaaatagacggacaaagtatagaatcaggaagcatagaatatgactggaacttaacaagtttaaaaaaagaaacatcaccagctgaatcaaaagattgggaacaaacaaaagacaataaagctcaagattgggaaaaacatttcttagacgcatcaacatcaaaacaatcagactggaacggagacctagatggagactggccagcaccaatgttacaaaaaccaccataccaagacggactaaaaccagaaggcatacacaaagacgtatggttacacagaaaaatgaaaaacacagactacctaacacaatacgatctatcagaatttgaaaacataggagcaataggactagaactatggcaagtacgatcaggaaccatctttgacaatttccttataacagacgacgaagaatacgcagacaacttcggaaaagcaacatggggagaaacaaaaggaccagaaagagaaatggatgcaatacaagcaaaagaagaaatgaaaaaagcaagagaagaagaagaagaagaactattatcaggaaaaataaatagacacgagcactactttaaccaatttcacagaagaaacgaactataa

SEQ ID NO: 3578 - RNA, 330 nt, synthetic construct
  misc_feature 1..330: note = CAA10193 variant
  source 1..330: mol_type = other RNA
atgttaatggcacaagaagcattagcatttttaatggcacaaggagcaatgttagcagcacaagaaagaagagtaccaagagcagcagaagtaccaggagcacaaggacaacaaggaccaagaggaagagaagaagcaccaagaggagtaagaatggcagtaccactattaagaagaatggaaggagcaccagcaggaccaggaggaagaacagcagcatgttttagttgtacaagtagatgtttaagtagaagaccatggaaaagaagttggagtgcaggaagttgtccaggaatgccacatttaagcccagatcaaggaagattttaa

SEQ ID NO: 3579 - RNA, 1440 nt, synthetic construct
  misc_feature 1..1440: note = CAA66853 variant
  source 1..1440: mol_type = other RNA
atggatttctcaagaaatctatatgatattggagaacaactcgacagcgaagacctagcatcattaaaattcttatcactcgactacattccacaaagaaaacaagaaccaataaaagacgcattaatgctattccaacgattacaggaaaaacgtatgctagaagaatctaacctatcattcttaaaagaactactcttccgaatcaatagactagacctcctaataacgtacttaaatacaagaaaagaagaaatggaacgagaactacaaacacctggaagagcccaaatatcggcataccgagtcatgctatatcagatcagcgaagaagtatcacgttcagaacttagaagctttaaattcctgttacaagaagaaatatctaaatgcaaattagatgacgatatgaatctactcgacatcttcatagaaatggaaaaacgagtcatactaggagaaggaaaactagacatattaaaaagagtatgtgcgcaaataaataagagcttactaaaaatcatcaacgactacgaagaatttagtaaagaaagaagctcatccctagaaggatcaccagacgaattctctaacggagaagaattatgtggagtaatgaccatctcagattcacctagagagcaagattcagaatcacaaacattagataaagtataccaaatgaaatcaaaaccaagaggatactgcctaataataaacaaccataacttcgcaaaagctcgagaaaaagttccaaaattacactcaatacgagatagaaacggcacacacctagacgcaggagcactaacaacaacatttgaagaactacatttcgaaataaaaccacatgatgactgtacagtagaacaaatatacgaaatactaaaaatttaccaattaatggaccactcaaacatggactgctttatctgttgtatattatcacatggtgataaaggaataatatacggaacagacggccaagaagcaccaatatacgaattaacttcacaatttacaggattaaaatgcccaagcctagccggaaaaccaaaagtattctttatacaagcatgccaaggagacaattaccaaaaaggaataccagtagaaacagactcagaagaacaaccttatctggaaatggatctatcatcaccacaaactagatacataccagacgaagcagatttcctattaggaatggcaactgtaaacaactgcgtatcatacagaaacccagcagaaggcacctggtacatacaatcattatgccaatcactaagagaaagatgccccagaggagacgatatactaacaatattaacagaagtaaattatgaagtatcaaataaagatgacaaaaaaaacatgggaaaacaaatgcctcaaccaacatttactctaagaaaaaaactagtattcccaagcgactaa

SEQ ID NO: 3580 - RNA, 1569 nt, synthetic construct
  misc_feature 1..1569: note = CCDS2340.1 variant
  source 1..1569: mol_type = other RNA
atgaaatcacaaggacaacactggtactcatcatcagacaaaaattgcaaagtatcattccgagaaaaactactaataatcgactcaaaccttggagttcaagacgtcgaaaacttaaaattcctctgcatcggcctcgtacccaacaaaaaacttgaaaaatccagttcagcaagtgacgtctttgaacatctcttagccgaagacctattatccgaagaagaccctttctttttagccgaactactttacatcatcagacaaaaaaaacttctacaacacctcaattgcacaaaagaagaagtagagagattattaccaactcgacaaagagtgtcattattcagaaatttactttatgaattatcagaaggaatagactctgaaaatctaaaagacatgattttcctactaaaagactcactaccaaaaaccgaaatgactagcctatcattcctggcattcttagaaaaacaagggaaaatagatgaagataacttaacttgtttagaagacttatgtaaaacagtagtacctaaattactaagaaacatagaaaaatataaaagagaaaaagcaatccaaatcgtaacaccaccggttgacaaagaagcagaatcataccaaggagaagaagaattagtctcacaaaccgatgtaaaaacatttcttgaagcactaccccaagaatcatggcaaaacaaacacgccggatcaaacggtaacagagcaactaacggcgccccatcactagtatcacgcggaatgcaaggagcttcagctaacactttaaactcggaaacatccacaaaaagagcagcagtatatagaatgaatagaaaccatagaggtctatgcgtaatagttaataaccactcattcacttcattaaaagacagacaaggaacacacaaagacgcagaaattttatctcatgtattccaatggttaggatttaccgtccacatccataacaacgtaacaaaagtagaaatggaaatggtcctacaaaaacaaaaatgcaatccagcacatgcagacggtgactgttttgtattttgtatcttaacccacggtcgcttcggagcagtctactcatctgatgaagcactaatacctataagagaaataatgagccacttcacagcactacaatgtccacgattagcagaaaaaccaaaattattctttatacaagcatgccaaggtgaagaaatccaaccgtccgtaagcatagaagcagacgctctaaatccagaacaagcacctacatcactacaagactcaatacctgcagaagcggatttcctactaggccttgcaactgtaccagggtatgtatcattccgtcatgtagaagaaggatcatggtatatacaatcactatgcaatcatctcaaaaaactagtacctagacacgaagatatactatcaatattaacagccgtaaacgacgacgtttcaagaagagtagacaaacaaggcactaaaaaacaaatgccacaaccagcattcacattaagaaaaaaattagtatttcctgtaccacttgacgccctctccctataa

SEQ ID NO: 3581 - RNA, 1020 nt, synthetic construct
  misc_feature 1..1020: note = EAW65632 variant
  source 1..1020: mol_type = other RNA
atgtggcaattatgggcatcattatgttgtttattagtattagcaaatgcaagatcaagacctagctttcatccattatcagatgaattagtaaattatgttaataaacgaaatacaacatggcaagcaggacataatttttataatgtagatatgtcatatttaaaaagattatgtggaacatttttaggaggaccaaaaccaccacaaagagtaatgttcacagaagatttaaaactaccagctagctttgatgcaagagaacaatggccacaatgtccaacaattaaagaaataagagatcaaggatcatgtggtagttgttgggcttttggagcagtagaagcaataagtgatagaatatgcatacatacaaatgcccatgtatcagtagaagtgtcagcagaagatttattaacatgttgcggaagcatgtgtggagatggatgtaatggaggatatccagcagaagcatggaacttctggacaagaaaagggctagtaagtggtggattatatgaatcacatgtaggatgtagaccatatagtattccaccatgtgaacaccatgtaaacggaagtcgaccaccatgtacaggagaaggagacacaccaaaatgtagcaaaatatgtgaaccaggttattcaccaacatataaacaagataaacattacggatataatagctactcagtatcaaatagtgaaaaagacataatggcagaaatatacaaaaatggacctgtagaaggggcatttagcgtatattcagactttttattatataaaagtggcgtatatcaacatgtaacaggtgaaatgatgggagggcatgcaataagaatactaggatggggagtagaaaatggaacaccttattggttagtagcaaatagttggaatacagattggggagataatggatttttcaaaatattaagaggacaagatcactgtggaatagaatcagaagtagtcgcaggaataccaaggacagatcaatattgggaaaagatataa

SEQ ID NO: 3582 - RNA, 1020 nt, synthetic construct
  misc_feature 1..1020: note = AAC37547 variant
  source 1..1020: mol_type = other RNA
atgtggcaattatgggcaagcttatgttgtttattagtactagccaatgcaagaagcagaccaagttttcacccattatctgatgaattagttaattatgtaaataaaagaaatacaacatggcaagcaggtcataatttttataatgttgatatgtcatatctaaaaagattatgtggaacatttttaggaggaccaaaacctccacaaagagtaatgtttacagaagatctaaaacttccagcaagttttgacgcaagagaacaatggccacaatgtccaacaataaaagaaatacgagatcaaggatcatgtggaagttgttgggcatttggagcagtagaagcaatatcagatagaatatgtatacatacaaatgcacacgtcagtgtagaagtatcagcagaagatttactaacatgttgtggatcaatgtgtggagatggatgtaatggaggatatccagcagaagcttggaatttctggacaagaaaaggtttagtaagcggaggattatacgaaagccatgtaggctgcagaccatattcaataccaccatgcgaacatcacgtaaatggatcaagacctccatgtacaggagaaggagatacaccaaaatgtagtaaaatatgtgaaccaggttatagtccaacttataaacaagacaaacattatggatataattcatattcagtatcaaattcagaaaaagatataatggcagaaatttataaaaatggaccagtagaaggagcattcagtgtatattctgattttttactatataaaagcggagtttatcaacacgtcacaggagaaatgatgggaggacatgcaataagaatactaggatggggagtcgaaaatggaacaccatattggctagtagcaaattcctggaatacagattggggagataatggtttttttaaaatactaagagggcaagaccattgtggaatagaatcagaagtagtagcaggcattccaagaactgatcaatattgggaaaaaatataa

SEQ ID NO: 3583 - RNA, 1002 nt, synthetic construct
  misc_feature 1..1002: note = EAW62731 variant
  source 1..1002: mol_type = other RNA
atgaatccaacactaatattagcagcattttgtttaggaatagcaagtgcaacattaacatttgatcatagcctagaagcacaatggacaaaatggaaagcaatgcataatagattatatggaatgaatgaagaaggatggagacgagcagtatgggagaaaaatatgaaaatgatagaattacataatcaagaatacagagaaggtaaacatagctttacaatggcaatgaatgcatttggtgatatgacgagcgaagaatttagacaagtaatgaatggatttcaaaatagaaaaccaagaaaaggaaaagtatttcaagaaccattattttacgaagcgccaagaagcgtagattggagagaaaaaggatatgtaacaccagttaaaaaccaaggccaatgtggaagctgttgggcatttagtgcaacaggagcgctagaaggacaaatgtttagaaagacaggaagattaatatcactaagtgaacaaaatttagtagattgtagtggaccacaaggaaatgaaggatgtaatgggggattaatggattatgcattccaatatgtacaagataatggaggattagatagtgaagaaagttatccttatgaagcaacagaagaaagttgtaaatataatccaaaatatagtgtagcaaatgacacaggatttgtagatatacctaagcaagaaaaagcattaatgaaagcagtagcaacagtaggaccaatatctgtagcaatagatgcaggacacgaaagttttcttttctataaagaaggtatatattttgaaccagattgtagcagtgaagatatggatcatggagtgttagttgtaggatatggatttgaaagcacagaatcagataataacaaatactggcttgttaaaaatagctggggagaagaatggggaatgggaggatatgtaaaaatggcaaaagatagaagaaatcattgtggaatagcatcagcagcaagttatccaacagtataa

SEQ ID NO: 3584 - RNA, 1002 nt, synthetic construct
  misc_feature 1..1002: note = AAA66974 variant
  source 1..1002: mol_type = other RNA
atgaatccaacactaatattagcagcattttgtttaggaatagcaagcgcaacattaacctttgatcactcattagaagctcaatggacaaaatggaaagcaatgcataatagattatatggtatgaacgaagaaggatggagaagagcagtatgggaaaaaaatatgaaaatgatagaattacacaatcaagaatatagagaaggaaaacatagttttacaatggcaatgaatgcatttggtgatatgacaagcgaagaattccgacaggtaatgaatggatttcaaaacagaaaaccaagaaaaggaaaagtatttcaagaaccactattttatgaagcaccaagaagtgtagactggagagaaaaaggatatgtgacaccagttaaaaatcaaggacaatgtggaagttgttgggcattttcagcaactggagcattagaaggacaaatgtttagaaaaacaggaagattaataagtttatcagaacaaaacttagtagattgtagcggaccacaaggaaacgaaggatgtaatggaggattgatggattatgcatttcaatacgtacaagataatggaggactagattcagaagaaagctatccatatgaagcaacagaagaaagttgtaaatataacccaaaatatagtgtagcaaacgacactggatttgtagatataccaaaacaagaaaaagcgctaatgaaagcagtagcaacagtcggaccaataagtgttgcaatagatgcaggacacgaatcatttctattttataaagaagggatatattttgaaccagattgttcaagcgaagacatggatcatggcgtattagtagtaggatatggatttgaaagtacagaatcagataataataaatattggttagtaaaaaactcatggggagaagaatggggaatgggaggatatgtgaaaatggcaaaagacagaagaaatcactgtggaatagcatcagcagcaagttatccaacagtataa

SEQ ID NO: 3585 - RNA, 456 nt, synthetic construct
  misc_feature 1..456: note = AAG17239 variant
  source 1..456: mol_type = other RNA
atggattacgcattccaatacgtacaagataacggaggattagactcagaagaaagttatccatatgaagcaacagaagaatcatgcaaatacaatccaaaatactcggtagcaaacgatacaggattcgtagacataccaaaacaagaaaaagcattaatgaaagcagtagcaacagtaggaccaatatcggtagcaatagatgcaggacacgaaagctttctattttacaaagaaggaatatatttcgaaccagattgctcaagcgaagacatggaccatggagtactagtagtaggatacggattcgaaagtacagaatcagacaataacaaatactggttagtaaaaaatagctggggagaagaatggggaatgggaggatacgtaaaaatggcaaaagacagaagaaatcactgtggaatagcatcagcagcaagctatccaacagtataa

SEQ ID NO: 3586 - RNA, 984 nt, synthetic construct
  misc_feature 1..984: note = AAA51932 variant
  source 1..984: mol_type = other RNA
atgttatttctactattaccactattagctgtcctaccaggagacggtaatgcagacggactaaaagaaccattaagtttccatgtaacatggatagcatcattttataatcattcatggaaacaaaatttagtatctggatggctatcagatctacaaacacatacttgggatagcaattcatcaacaatagtattcttatgtccatggtcaagaggtaacttttcaaatgaagaatggaaagaattagaaaccttatttaggatacgaacaataagatcatttgaaggaataagaagatatgcacatgaattacaatttgaatatccatttgaaatacaagtaacaggaggatgtgaattacattctggaaaagtatcaggtagttttctacaacttgcatatcaaggatcagattttgtaagttttcaaaacaattcatggctaccatatccagttgcaggaaacatggcaaaacatttctgcaaagtcttaaatcaaaatcaacatgaaaatgacataacacataatttattaagtgatacttgtccaagattcatattaggactattagatgcaggtaaagcacatttacaaagacaagtaaaaccagaagcatggttaagtcatggaccatcaccaggaccaggacacttacaattagtttgtcatgtctcaggattttatcccaaaccagtatgggtcatgtggatgagaggcgaacaagaacaacaaggcacacaaagaggagatatattaccatcagcagacggtacatggtacttaagagcaacattagaagttgcagccggagaagcagcagatttaagttgtagagtaaaacactcatcattagaaggacaagacatcgtattatattgggaacaccactcttcagtaggatttataatacttgcagtaatagttccattactactattaataggtctagcactatggtttagaaaaagatgtttttgttaa

SEQ ID NO: 3587 - RNA, 1002 nt, synthetic construct
  misc_feature 1..1002: note = AAA51939 variant
  source 1..1002: mol_type = other RNA
atgctactattaccatttcaattattagcagtactctttccaggaggaaatagtgaacatgcatttcaaggaccaacttcatttcatgtaatacaaacttcatcatttacaaactcaacatgggcacaaacacaaggatcaggatggctagatgacttacaaatacacggttgggattcagattcaggaacagcaatattcttaaaaccatggtcaaaaggaaatttttcagacaaagaagtagcagaattagaagaaatatttagagtatatatatttggttttgcaagagaagtacaagatttcgcaggagattttcaaatgaaatatccatttgaaatccaaggaatagcaggatgtgaactacattcaggaggagcaatagtatcatttttaagaggagctttagggggattagactttttaagtgttaaaaatgcatcatgcgtaccttcaccagaaggaggatcaagagcacaaaaattttgtgcattaataattcaatatcaaggaataatggaaacagtaagaatcctactatacgaaacttgcccaagatatttattaggagtattaaatgcaggaaaagcagatttacaaagacaagtaaaaccagaagcatggttatcaagcggaccatcaccaggtccaggcagactacaattagtatgtcatgtaagcggattttacccaaaaccagtatgggtaatgtggatgagaggagaacaagaacaacaaggaacacaactaggagacatactacccaacgcaaactggacatggtatctaagagctacactagatgtagcagatggagaagccgcaggactatcatgcagagtaaaacattcatcactagaaggacaagatataatattatattggagaaaccccacatcaataggatcaatagtattagcaataatagtaccatcactactactattattatgtctagcattatggtacatgagaagacgatcttatcaaaatataccataa

SEQ ID NO: 3588 - RNA, 1002 nt, synthetic construct
  misc_feature 1..1002: note = AAI26466 variant
  source 1..1002: mol_type = other RNA
atgctcttcttacaatttttattattagcacttctattaccaggaggagacaatgcagacgcctcacaagaacatgttagctttcatgtaatacaaatattttcatttgtcaatcaatcatgggcaagaggtcaaggatcaggatggctagatgaattacaaacacatggctgggattcagaatcaggcacaataatatttctacacaattggtcaaaaggtaacttttcaaatgaagaactatctgacttagaattactatttcgattttatctattcggattaacaagagagatacaagatcatgcctcacaagactattcaaaatatccatttgaagtacaagtaaaagcaggatgtgaattacactcaggaaaatcacctgaaggattctttcaagtcgcatttaacggactagacttactatcctttcaaaatacaacatgggttccatcacctggatgcggctcattagcacaatcagtatgccatcttctaaaccatcaatacgaaggagtcacagaaacagtatataatctaataagatcaacatgtccaagatttctattaggactactcgatgcaggaaaaatgtatgtacacagacaagtaagacctgaagcatggttaagttcacgaccatcactaggatcaggtcaactccttttagtatgccatgcatcaggattttatccaaaaccagtatgggtaacatggatgagaaacgaacaagaacaattaggaacaaaacacggagacatattaccaaatgcagacggaacttggtatttacaagtaatattagaagttgcatcagaagaaccagcaggattatcatgcagagtacgacattcctcattaggaggacaagacataatattatattggggacatcatttttcaatgaactggatagcactagtagtaatagtaccactagtaatattaatagtacttgtattatggtttaaaaaacattgctcctaccaagacatattataa

SEQ ID NO: 3589 - RNA, 1008 nt, synthetic construct
  misc_feature 1..1008: note = AAA59672 variant
  source 1..1008: mol_type = other RNA
atgggatgtttattatttttactattatgggcattattacaagcatggggatcagcagaagtaccacaaagactattcccattaagatgtttacaaatatcatcatttgcaaattcaagctggacaaggacagatggactagcttggttaggcgaactccaaacacatagctggtcaaatgacagcgatacagtaagatcactaaaaccatggtcacaaggaacattttcagatcaacaatgggaaactttacaacatatctttagagtttatagatcttcttttacaagagacgtaaaagaattcgcaaaaatgcttcgattaagttatccactagaactacaagtttcagcaggatgtgaagtacatcctggaaatgcatcaaataatttttttcatgtagcatttcaaggtaaagatatattatcatttcaaggaacatcttgggaaccaacacaagaagcaccattatgggtaaacttagcaatacaagtactaaatcaagacaaatggactagagaaacagtacagtggttattaaatggcacatgtccacaatttgtatcaggactactagaatcaggaaaatcagaattaaaaaaacaagtaaaaccaaaagcatggttatcacgaggaccatcacctggaccaggaagactacttttagtatgtcacgtatcaggattttatccaaaaccagtttgggtaaaatggatgagaggcgaacaagaacaacaaggaacacaaccaggagatatattaccaaatgcagatgaaacatggtatttaagagctacactagatgtagttgccggagaagcagcaggattaagttgtagagtaaaacattcatcattagaaggacaagatattgtactatactggggaggatcatacacttcaatgggtttaatagcactagcagtattagcatgtttactatttctactaatagtaggatttacatcacgatttaaaagacaaacatcatatcaaggagtactataa

SEQ ID NO: 3590 - RNA, 1167 nt, synthetic construct
  misc_feature 1..1167: note = EAW52830 variant
  source 1..1167: mol_type = other RNA
atgttactactttttttactatttgaaggtttatgttgccctggcgaaaataccgcagcaccacaagcattacaatcataccatttagcagccgaagaacaactatcattcagaatgttacaaacaagctcattcgcaaaccactcatgggcccattcagaaggatccggatggttaggagacctacaaacccatggttgggatacagtattaggaacaataagatttttaaaaccatggagccatggaaatttctccaaacaagaattaaaaaatttacaatcactttttcaactatatttccactcatttatccaaatagtacaagcctcagcaggacaattccaattagaatacccttttgaaatacaaatactagctggatgcagaatgaatgcaccacaaatcttcttaaacatggcatatcaaggttcagacttcttatcatttcaaggaatatcttgggaaccttctccaggcgcaggtatacgtgctcaaaacatatgtaaagtactaaacagatatctcgacataaaagaaatactacaaagtttacttggacatacatgtcccagattccttgccggactaatggaagcaggtgaatcagaattaaaaagaaaagtaaaaccagaagcatggttatcatgtggacccagtccaggaccaggccgattacaactagtttgtcacgtatcaggattctacccaaaaccagtatgggttatgtggatgagaggagaacaagaacaacgaggcacccaaagaggagatgttttacccaatgcagacgaaacatggtatctaagagctacactagatgtagcagcaggtgaagcagccggcctatcctgccgagtaaaacattcatcattagggggacacgacctaatcatacattggggaggctactcaatatttttaatactaatatgtctaactgtaatagtaactttagttatactagtagtagtagattcaagactaaaaaaacaatcaagcaacaaaaacatactctcaccacacaccccatcaccagtattcttaatgggagcaaacacacaagatacaaaaaactccagacatcaattttgcctcgcacaagtatcatggattaaaaacagagtcctaaaaaaatggaaaacaagactaaaccaactttggtaa

SEQ ID NO: 3591 - RNA, 894 nt, synthetic construct
  misc_feature 1..894: note = AAA35581 variant
  source 1..894: mol_type = other RNA
atgactaccccaagaaactcagtaaacggtacattcccagcagaaccaatgaaaggaccaatagcaatgcaaagcggaccaaaaccactcttcagaagaatgtcatcactagtaggaccaacacaatcattcttcatgcgagaatccaaaacattaggagcagtacaaataatgaacggcctattccacatcgccctaggaggattactaatgatacccgcaggtatatacgcaccaatatgcgtaacagtatggtatcctctatggggcggaataatgtacatcatatcaggatcactactcgcagccaccgaaaaaaacagcagaaaatgcttagtaaaaggaaaaatgataatgaactccttatccctattcgcagccatatcaggaatgatcctatcaataatggatatactaaacataaaaatatcacatttcctcaaaatggaatccttaaacttcataagagcacacaccccatacataaatatatacaactgcgaaccagcaaacccatcagaaaaaaactcaccatccacacaatactgctactcaatacaatcactattcttaggaatactatcagtaatgctaatattcgccttcttccaagaattagtaatagcaggaatagtagaaaacgaatggaaaagaacatgctcaagaccaaaatctaacatagtactattatcagccgaagaaaaaaaagaacaaaccatagaaataaaagaagaagtagtaggattaaccgaaacctcttcccaaccaaaaaacgaagaagatatagaaataataccaatacaagaagaagaagaagaagaaacagaaaccaatttcccagaaccaccacaagaccaagaatcatcaccaatagaaaacgattcatcaccataa

SEQ ID NO: 3592 - RNA, 1989 nt, synthetic construct
  misc_feature 1..1989: note = AAC18956 variant
  source 1..1989: mol_type = other RNA
atggaatcaaaaacagaaaaatggatggaacgcattcatctaaacgtcagcgagagaccattcccaccacatatacaattaccaccagaaatacaagaaagccaagaagttacactaacatgtcttctaaatttctcatgctacggctacccaatacagctacaatggttactagaaggtgttccaatgagacaagctgcagtaacatcaacatcattaacaataaaatcagtatttactagatccgaattaaaatttagtccacaatggagccaccacggaaaaatcgtcacatgccaattacaagacgctgacggaaaatttcttagtaatgacacagttcaattaaatgtaaaacatactccaaaattggaaattaaagtaacaccaagcgatgcaatagtcagagaaggtgattcagttacaatgacgtgcgaagtatcaagcacaaaccctgaatatacaacggtctcttggttgaaagacggcacaagtctaaagaaacaaaatacttttacgctaaatttaagagaagttacaaaagatcaaagtggtaaatactgttgtcaagtatctaatgatgtaggcccgggcagaagcgaagaagtgttcctacaagttcaatatgctccagaaccatctacagttcaaatattacattctcctgcagtagaaggctcacaagtagaatttttatgtatgtcactagcaaatcccctaccaactaactatacttggtaccataacggaaaagaaatgcaaggaagaacagaagaaaaagtacatataccaaaaattctaccatggcatgcagggacatactcatgtgtggcagaaaatattctaggaactggacaaagaggtccaggagcagaactcgacgtccaatacccacccaagaaagtaacaaccgtaattcaaaacccaatgcccataagagaaggagatacagtaacactaagctgtaactacaattcttcaaatccatcagtaacaagatacgaatggaaaccacacggagcgtgggaagaaccctctttgggagtactaaaaattcaaaaagttggatgggataacacgacaattgcctgcgccagatgcaattcatggtgctcatgggcatctcctgtagcattaaatgtacaatatgcaccacgagacgttagagtaagaaaaataaaaccacttagtgaaatacattcaggaaattcagtatcactgcaatgcgatttcagtagcagtcatccaaaagaagtccaattcttttgggagaaaaatggaagacttttaggaaaagaatcacaattaaactttgacagcatatcacccgaagacgcaggaagttactcatgttgggtaaataattctataggccaaacagcctcaaaagcatggacattagaagtattatatgctccacgacgtctaagagtatccatgtcgccaggagaccaagtaatggaaggtaaaagcgctactctaagatgtgaaagtgatgcaaatccaccagtatcacactatacatggtttgactggaataatcaaagtctcccatatcactcacaaaaactccgtttagaaccagtaaaagtacaacattcaggtgcatattggtgccaaggaacaaactcagtaggaaaaggacgatcaccattgtcaacattaactgtatattactctcctgaaacaataggaagaagagtagcagtaggactaggctcatgcctagcaatcttaatactagcgatatgcgggttaaaattacaacgaagagatgcagaatcatccgaaatgcaacgaccaccacgaacatgcgatgatacagtcacatactcagcactacataaaagacaggtaggtgactatgaaaacgtaataccagatttccctgaagatgaaggaatacattattcagaacttatacagtttggagtaggtgaaagaccacaagcccaagaaaacgtagattacgtaatattaaaacattga

SEQ ID NO: 3593 - RNA, 2544 nt, synthetic construct
  misc_feature 1..2544: note = AAB06448 variant
  source 1..2544: mol_type = other RNA
atgcatctactcggaccctggctcttactattagttctagaatacctcgccttttccgactcatctaaatgggtctttgaacacccagaaacattatatgcatgggaaggagcatgcgtatggataccctgcacctatagagccttagacggagacttagagtcatttatactttttcataaccccgaatataacaaaaatacaagtaaattcgatggaactcgcttatatgaaagcacaaaagatggtaaagtaccatccgaacagaaaagagttcaatttctaggagataaaaataaaaactgtacattaagcattcatcctgtacatctcaatgattcaggacaattaggattacgcatggaatcaaaaactgaaaaatggatggaaagaatacatctaaacgtatcagaaagaccgtttccaccacacattcagctaccaccagaaatccaagaatctcaagaagttactctaacatgtcttctcaatttctcatgctatggctacccaatacaattacaatggttattagaaggggtccctatgagacaagcagccgttacatctacctcacttacgataaaatcagtatttacacgctctgaattaaaattcagccctcaatggtctcatcacggaaaaatagtaacatgccaattgcaagatgcagacggtaaattcttatccaacgacacagtacaacttaatgtaaaacacacaccaaaattagaaataaaagtcacaccctcagacgctatagtaagagaaggagattcagtaaccatgacctgtgaagtatcctcctcaaatccggaatacacaacagtatcatggttaaaagacggcacaagtctcaaaaagcaaaatactttcacactaaacttacgagaagtcacaaaagaccaatcaggaaaatactgctgccaagtcagtaatgacgtaggaccaggacgatcagaagaagtatttctacaagtacagtacgcaccagaaccaagtactgtacaaatattacacagcccagcagtagaaggaagtcaagtcgagttcttatgcatgtcactcgcaaatccacttccaactaactatacatggtatcacaacggcaaagaaatgcaaggacggacagaagaaaaagtacacatccctaaaatacttccttggcatgcaggaacatactcctgtgttgcagaaaacatattaggaacgggacagagaggacctggagcagaactagatgttcaatatcccccaaagaaagttacgaccgttatacaaaaccctatgcccatcagagaaggagacacagtcacattaagttgtaactataattcaagcaatccaagcgttactagatatgaatggaaaccacacggtgcatgggaagaaccctcattaggagtactaaaaatccaaaatgtaggctgggataacacaacaatagcatgcgcagcttgcaattcctggtgtagctgggcatcaccagtagctttaaatgtacaatatgctcctagagatgtaagagtaagaaaaattaaaccactgtctgaaatacactcaggcaattccgttagccttcaatgtgacttctcaagtagtcatcctaaagaagtccaattcttctgggagaaaaatggcagactattaggcaaagaatctcaattaaactttgactcaatctccccagaagacgctggaagttattcgtgctgggtaaataactcaattggacagacagcatctaaagcatggactttagaagtattatacgctcccagaagattacgagttagtatgtcgcctggagatcaagtaatggaaggaaaatcagcaacattaacatgcgaatcagacgcaaaccctccagtatctcattacacatggtttgattggaacaaccaatcattaccttaccactcccagaaattgagattagaaccagtcaaagtacaacactcaggcgcatactggtgtcaaggaaccaactcagtcggaaaagggcgatctccattaagtacattaacagtttattactcaccagagactataggacgaagagtagctgtgggattaggatcctgtttagcaatcttaatactagcaatctgtggtttaaaactccaacgaagatggaaaagaactcaatcccaacaaggattacaagaaaattcatccggtcagagctttttcgtaagaaataagaaagtaagacgagccccactttcagaaggaccacactcactaggctgttacaacccaatgatggaggacggaataagctacacaacattaaggttcccagaaatgaatataccaagaacaggagatgctgaatcaagcgaaatgcaaaggccaccaccagattgtgacgatacagtcacttattcagcattacataaaagacaagtaggagattatgaaaatgtaatcccagattttcccgaagacgaaggaatacactactcagagttaatacaatttggagtaggagaaagaccccaagcacaagaaaacgtcgactatgtcatattaaaacattaa

SEQ ID NO: 3594 - RNA, 2544 nt, synthetic construct
  misc_feature 1..2544: note = ABK41939 variant
  source 1..2544: mol_type = other RNA
atgcacttattaggcccgtggttattactcctggtactcgaatatctagcatttagtgacagcagtaaatgggtattcgaacatccagaaacactatatgcatgggagggagcatgtgtttggataccatgtacatatagagctttagatggtgatttagagagctttatactctttcacaatccagaatacaataaaaacacatcaaaattcgatggtaccagattatatgaatctactaaagatggaaaagtaccaagcgaacaaaaacgcgttcaattccttggggataaaaacaaaaattgtaccttatcgattcacccagtccacctcaatgattcaggacaattaggattaagaatggaatcaaaaactgaaaaatggatggaacgtatacatctaaacgtatcagaaaggccattcccaccacacatacaactacccccagaaatacaggaatcccaagaagtcacgttaacttgcttacttaatttctcatgctatggatatccaatacaactacaatggctccttgaaggcgttcctatgagacaagcagcagtaacatcaacttcactaacaataaaatccgttttcaccagatcagaactaaaattcagcccacaatggtcacaccatggtaaaatagtaacatgtcaattacaagatgcagacggaaaatttctatcaaacgacacagttcaactaaacgtaaaacacacaccaaaactagaaataaaagttactccatcggatgctatagtacgcgaaggtgattctgtaacaatgacatgcgaagtttcttcgtctaacccagaatatacaaccgtctcttggttaaaagacggcacaagcctaaagaaacaaaatacttttaccctcaatttaagagaagtcacaaaagaccaatccggaaaatactgctgtcaggtatcaaatgacgtaggacctggcagatctgaagaagtttttcttcaagttcaatacgcaccagaaccctcaacagtacaaatccttcatagtccggcagtagaaggatctcaagtagagttcctatgcatgtctctagcaaacccattaccaactaattatacatggtaccataacggtaaagaaatgcagggaagaacggaagaaaaagtacatatacctaaaatattaccctggcacgctggtacatattcatgcgtggcagaaaatatactaggaacaggacaacgaggaccgggcgcagaattagatgttcaataccctcctaagaaagttacaacagtaatacagaatcccatgcctattcgggaaggagatacagtaacattgtcttgcaattacaacagctcaaatccgtctgtaacacgatatgaatggaaaccccacggagcttgggaagaaccttcattaggagtactaaaaattcaaaatgtcggatgggacaacaccacaatagcatgtgcagcatgcaattcttggtgctcctgggcttcacctgtagctttaaacgtacaatacgccccaagagatgtacgcgtaagaaaaataaaaccattatcagaaatccactcaggtaattctgtcagcttacaatgtgacttctcaagctcacacccgaaagaagtacaattcttctgggagaaaaatggacgattattaggcaaagaatcacagttaaattttgactcaatatcacctgaagatgctggaagttattcatgctgggtaaataactccattggacaaactgcttctaaagcctggactctggaagtactatatgcacctagaagactaagagtaagcatgtcaccaggagaccaggtaatggaaggaaaatccgcaacattaacttgtgaatctgatgcaaatccacctgtatcacattacacatggtttgattggaataatcaatctctcccatatcattctcaaaaattaagacttgaaccagttaaagtacaacattcaggagcatattggtgccaagggacaaatagcgttggtaaaggaagatcacccctatccacattgacagtatattactcacctgaaacaataggcagaagagtagcagtaggattaggctcatgtctagccatactcatactagctatatgtggattaaaactacaaagacgatggaaaagaacacaatcccaacaaggactccaagaaaacagtagtggccaatccttcttcgtaagaaataagaaagtaagacgagcgccattatcagaaggaccacactctctaggatgttacaatccaatgatggaagatggaatatcttatacgactttaagattcccagaaatgaatatccccagaactggagacgcagaatctagcgaaatgcaacgtcctccacctgattgcgatgacactgttacctatagcgcattacacaaaagacaagttggtgattatgaaaacgtaataccagactttcctgaagacgaaggaatacactactcagaactaatacaatttggagtcggagaaagaccacaagcacaagaaaacgtagattatgttatactaaaacactag

SEQ ID NO: 3595 - RNA, 1605 nt, synthetic construct
  misc_feature 1..1605: note = CAE47548 variant
  source 1..1605: mol_type = other RNA
atgttgcgaagacgaggaagccccggaatgggagttcatgttggagccgcattaggagcgctttggttttgccttactggtgctctcgaagtacaagtaccagaagatccagtagtcgcgctagtaggtacagatgcaacactatgctgttcatttagtcctgaaccaggattttcattagcacaattaaacctcatatggcaattaacagatactaaacaattagtacattcattcgcagaaggacaagaccaaggaagcgcatatgcaaacagaactgccttattcccagacttattagcacaaggaaatgcatctttaagattacaaagagtcagagtggcagatgaaggttcatttacctgttttgtatcaataagagattttggtagtgcagctgtatcattacaagtagccgcaccatactcaaaaccgtcgatgactctagaacccaacaaagatttacgtccaggagacacagtaacaataacatgtagctcatatcaagggtatccagaagctgaagtattttggcaagatggacaaggagttccattaacaggaaatgtaacaactagccaaatggcaaatgaacaaggactattcgacgtacacagcatcttacgagtagttttaggagcaaatggaacatattcatgtttagtaagaaatccagtacttcaacaagatgcgcatagctcagttacaataacaccacaaagaagtcctactggagctgtcgaagtacaagttccagaagatccagtcgttgctttagtaggaacagatgcaaccttaagatgttcattcagtccagaaccaggatttagtttagcacagcttaatttaatctggcagctaactgacacaaaacagctagtacattctttcacagaaggaagagaccaaggaagtgcatacgcaaacagaactgcattattcccagatctactagcacaaggtaatgcaagtttaagattacaaagagtaagagtagcagatgaaggaagttttacatgttttgttagcataagagacttcggaagtgcagcagtaagtttacaagtggctgcgccatacagtaaaccctcaatgacattagaaccaaataaagatcttagacctggcgatacagtaactataacatgctcgagttatagaggataccccgaagcagaagtattctggcaagatggacaaggtgtacctctaacaggtaatgttactacaagtcaaatggccaacgaacaaggactatttgatgtacattcagtattacgagtagtattaggagcaaacggaacatacagttgtctagtaagaaatccagtacttcaacaagacgcccatggatctgtcacaataacaggacaaccaatgacatttccaccagaagcattatgggttacagtcggtttatcagtatgtttaatagcactattagtagcactagcctttgtttgttggcgaaagataaaacaatcctgcgaagaagaaaatgcaggagctgaagatcaagacggcgaaggtgaaggcagtaaaaccgcattacaaccattaaaacatagcgacagtaaagaagatgatggccaagaaattgcataa

SEQ ID NO: 3596 - RNA, 639 nt, synthetic construct
  misc_feature 1..639: note = BAG57312 variant
  source 1..639: mol_type = other RNA
atgccactattactactattaccattattatgggcagacctaacacacagaccaaaaatattaataccaggaacactagaacccggacactccaaaaacctaacatgttcagtatcatgggcatgcgaacaaggaacaccaccaatattctcatggttatcagcagcacccacatcactaggaccaagaacaacacactcatcagtattaataataacaccaagaccacaagatcatggcacaaacctaacatgccaagtaaaattcgcaggagcaggagtaacaacagaaagaacaatacaactaaacgtaacatacgtaccacaaaacccaacaacaggaatcttcccaggagacggatcaggaaaacaagaaacaagagcaggagtcgtacacggagcaataggaggagcaggagtaacagcactactcgcactatgcttatgcttaatattcttcatagtaaaaacacacagacgaaaagctgcaagaacagcagtaggaagaaatgatactcacccaacaacaggctcagcctcaccagtatcagatggagcatcatggcacccagtatgcccagcagacacatcatcacaatgcggaccaccatcatgcccaatacaacacttccaaaattaa

SEQ ID NO: 3597 - RNA, 1095 nt, synthetic construct
  misc_feature 1..1095: note = AAK83654 variant
  source 1..1095: mol_type = other RNA
atgccactcttattattattaccattattatgggcaggagcactagcaatggacccaaacttttggttacaagtacaagaatcagtcactgtccaagaaggactatgcgtactagtaccatgcacatttttccatccaataccttactatgacaaaaattctcctgtccatggatattggtttagagaaggtgctataatatcaagagattcaccagtagccacaaacaaactagaccaagaagtacaagaagaaacacaaggacgattccgactattaggtgacccatcaagaaataactgttctctttccatagtagatgcaagaagaagagacaacggatcatacttcttcagaatggaacgaggatcaacaaaatactcatataaatcaccacaactatcagtacatgtaacagacttaacccacagaccaaaaattttaataccaggaacattagaacccggtcacagcaaaaacctaacatgttcagtatcctgggcttgtgaacaaggaacaccacctatattttcctggctctcagcagcaccaacatcattaggcccaagaactactcattcatcagtactaatcataaccccacgaccacaagaccatggaacaaacctaacttgccaagtaaaattcgctggagcaggagttacaactgaacgcacaatacaacttaacgtaacatatgtaccacaaaatccaacaacaggaatattcccaggagacggatcaggaaaacaagaaacaagagctggagtagtccatggagccataggaggagccggagtaacagcattattagcattatgtctatgtctaatattttttatagtaaaaacacatagacgaaaagcagcaagaacagcagtaggacgaaatgacacacatcccacaaccggatcagcaagtccaaaacaccaaaaaaaatcaaaactacatggaccaaccgaaacatcttcctgctctggagccgctcccacagtagaaatggatgaagaactccattacgcatccttaaattttcacggtatgaacccatcaaaagatacgtctacagaatactccgaagttcgaacacaataa

SEQ ID NO: 3598 - RNA, 1095 nt, synthetic construct
  misc_feature 1..1095: note = CAD36509 variant
  source 1..1095: mol_type = other RNA
atgccacttctactactactaccattattatgggcaggagcattagcaatggatccaaatttttggttacaagtacaagaatcagtaacagtacaagaaggattatgcgtactagtcccatgtacatttttccatccaattccctattacgataaaaacagtccagtgcacggctattggtttagagaaggagcaataatatctagagattctccagtagcaactaacaaactagaccaagaagtacaagaagaaacccaaggaagattcagattactaggagatccatcaagaaataattgttcactcagtatagtagatgcaagaagaagagacaatggatcatatttttttcgaatggaacgaggatcaactaaatatagctataaatcgccacaactatcagtacatgtaacagacttaacacatagacctaaaatattaataccaggaacattagaaccaggacactccaaaaatttaacatgctcagtaagttgggcatgtgaacaaggaacaccccctatattcagctggctcagtgcagctccaacatcattaggaccaagaacaacccactcatcagtcctaataattacaccaagacctcaagatcatggaacaaacttaacatgccaagtaaaattcgcaggagcaggagtcactacagaaagaacaattcaattaaacgtaacttatgtaccacaaaatcccacaacaggcatatttcccggagatggaagcggaaaacaagaaactagagctggtgttgtacatggagctataggaggcgctggagtaacagcattactagcattatgcttatgcttaatatttttcatagtaaaaacacatagaagaaaagcagcccgaacagctgtaggacgaaatgatactcatccaacaacaggctcagcatcaccaaaacaccaaaaaaaatcaaaattacacggaccaacagaaacatcaagctgctccggagccgcaccaactgtagaaatggatgaagaactacactacgcttcactaaactttcacggaatgaatccatcaaaagataccagtaccgaatactctgaagttagaacacaataa

SEQ ID NO: 3599 - RNA, 624 nt, synthetic construct
  misc_feature 1..624: note = AAA52295 variant
  source 1..624: mol_type = other RNA
atgcaaagcggaacacattggagagtattaggattgtgcttactatcagtaggagtatggggacaagatggaaatgaagaaatgggaggaataacacagacaccatataaagtaagcataagcggaacaacagtaatattaacgtgtccacaatatccaggaagtgaaatattatggcaacataatgataaaaatatagggggagatgaagatgataaaaatataggaagtgatgaagatcatttaagtttaaaagaatttagcgaattagaacaaagcggatattatgtatgttatccaaggggaagcaaaccagaagatgcaaatttttatttatatttgagagcaagagtatgtgaaaattgtatggaaatggatgtaatgagcgtagcaacaatagtaatagtagatatatgtataacaggaggattactattattagtatattattggagtaaaaatagaaaagcaaaagcaaaaccagtaacaagaggagcaggagcaggaggaagacaaagaggacaaaataaagaaagaccaccaccagtaccaaatccagattatgaaccaataagaaaaggacaaagagacttatatagtggattaaatcaaagaagaatataa

SEQ ID NO: 3600 - RNA, 495 nt, synthetic construct
  misc_feature 1..495: note = AAH25703 variant
  source 1..495: mol_type = other RNA
atgaaatggaaagcactattcacagcagcaatactacaagcacaattaccaataacagaagcacaaagcttcggactactagacccaaaactatgctacctattagacggaatactattcatatacggagtaatactaacagcactattcctaagagtaaaattctcaagatcagcagacgcaccagcataccaacaaggacaaaaccaattatacaacgaactaaacctaggaagaagagaagaatacgacgtattagacaaaagaagaggaagagacccagaaatgggaggaaaaccacaaagaagaaaaaacccacaagaaggactatacaatgaactacaaaaagacaaaatggcagaagcatactcagaaataggaatgaaaggagaaagaagaagaggaaaaggccacgacggcctataccaaggactatcaacagcaacaaaagacacatacgacgcactacacatgcaagcactaccaccaagataa

SEQ ID NO: 3601 - RNA, 2229 nt, synthetic construct
  misc_feature 1..2229: note = CCDS7897.1 variant
  source 1..2229: mol_type = other RNA
atggataaattctggtggcatgctgcatggggactatgtttagtcccattatctttagcacaaatcgatttaaatataacatgtagatttgcaggagtattccatgtagagaaaaatggaagatactcaatatcgagaacagaagcagcagatctttgcaaagcattcaatagcacactacccacaatggcacaaatggaaaaagcactatctataggcttcgaaacatgtagatatggattcatagaaggacatgtagtaataccccgaatacacccgaactcaatatgtgcggcaaataacaccggcgtctacattttaacatcaaatacatcacaatacgatacatattgctttaacgcatctgcaccaccagaagaagattgtacatcagtaacagatcttccaaatgcctttgacggaccaattaccataacaattgttaatagagacggaacaagatatgttcaaaaaggagaatatcgaacaaaccccgaagacatatacccttcaaacccaaccgatgatgacgtatctagtggaagctcctccgaaagatcatcaacatcaggaggttacatattttacactttttcaacagttcatccaatcccagacgaagactccccctggataacagattctacggacagaataccagcaacaaccttaatgtccacatctgcaactgcaactgaaactgcaaccaaacgtcaagaaacatgggattggttcagctggctatttctaccaagtgaaagtaaaaaccacttacataccaccacacaaatggctggtacatcaagtaatactatatcagcaggttgggaacccaatgaagaaaatgaagatgagagagacagacacttatcattttctggttccggaatagacgatgatgaagactttatctcctcaacaatatctaccacacctagggcatttgaccatacaaaacaaaaccaagactggacacaatggaatccatcacattctaacccagaagtcctacttcaaactacaacaagaatgacagatgtagatcgaaacggcacaacagcatacgaaggaaactggaatcccgaagcccacccacccttaatccatcatgaacaccatgaagaagaagaaaccccacattcaacatcaacaatacaagcaacaccatcctccactacagaagaaactgcaacacaaaaagaacaatggttcggaaacaggtggcacgaaggatacagacaaacaccaaaagaagattcacattccacaactggaactgcagcagcatcagcccacacttcacatcctatgcaaggtagaactacaccatccccagaagatagctcctggaccgacttcttcaaccctataagtcacccgatgggtaggggccatcaagcaggaaggagaatggacatggattcatcacattcaataacactacaacccacagctaacccaaatacaggactggtagaagacttggatagaactggtccattatcaatgactacacagcaatcaaatagccaaagtttttcaacatcccatgaaggcctagaggaagataaagaccatccaacgacttcaactctcacttcttcaaacagaaacgatgtaactggaggtagaagagatcccaaccacagtgaaggatcaacaacattactagaaggatacacttcacactacccacacaccaaagaatctagaacttttattccagttacaagcgctaaaacaggatcattcggcgtaacagcagtaaccgtaggtgactcaaatagcaacgtcaacagatccctaagcggagatcaagatacatttcatccatccggtggctctcacacaacacatggaagcgaatcagacggtcattctcatggatcacaagaaggaggagcaaacactacatctggaccaattagaaccccacaaatacctgaatggttaataatattagcctctctactcgcactagcactgatattagcagtatgcatagccgtcaatagtagaagaagatgcgggcaaaagaaaaagctagtaataaacagcggaaatggggcagtcgaagatcgcaaaccatcaggattaaacggagaagcatcaaaatcacaagaaatggtccatctagtaaataaagaatcatctgaaacccccgaccaatttatgacagcagacgaaaccaggaatctacaaaacgtcgatatgaaaattggcgtttaa

SEQ ID NO: 3602 - RNA, 2100 nt, synthetic construct
  misc_feature 1..2100: note = XM_006718388.1 variant
  source 1..2100: mol_type = other RNA
atggacaaattttggtggcatgcagcttggggcctatgtctagttccattatcgcttgcacaaattgatctaaacataacctgcagattcgccggtgtatttcatgtagagaaaaacggaagatattcaatttcaagaactgaagctgcagacctatgtaaagcatttaacagcactttgcctacaatggcacaaatggaaaaagcattaagcataggatttgaaacatgtcgatacggatttatcgaaggtcatgtagtaatacccagaatacacccaaactcaatatgtgccgccaacaacacaggagtatacatacttacttcaaatacatcacaatacgatacatattgctttaacgcatctgcaccacctgaagaagactgtacatccgtaacagatctaccaaatgcatttgatggcccaatcacaatcacaatagttaatagggatggaacacggtacgtacaaaaaggagaatatcgaaccaacccagaagatatatatccatctaacccaacagatgatgacgtatcatcaggttcatcatctgaaagatcaagcacatccggaggttatatattttacactttctctacagttcatcccattccagacgaagactcaccatggataacagattcaacagaccgtattcccgcaactacactaatgagcacatccgctacagcaacagaaacagccactaaacgacaagaaacatgggattggttcagttggctatttctaccttcagaaagcaaaaatcatctacatactaccacacaaatggcaggaacttcatctaacacaatatctgcaggatgggaaccaaatgaagaaaacgaagacgaacgtgaccgccacctatcgttttcaggatcaggaatcgatgatgacgaagattttatttcttcaacaatatcaacaacacccagagcattcgaccatactaaacaaaaccaagattggacccaatggaaccctagccactcaaacccagaagtcctactccaaacaactacaagaatgactgatgtagacagaaacggaaccacagcatatgaaggtaactggaatccagaagctcacccaccattaattcaccacgaacatcacgaagaagaagaaacaccacattctacatcaacaaccgcaagcgcacatacatctcatcccatgcaaggaaggacaacaccatcccccgaagactctagctggacagatttctttaacccaataagccacccaatgggtcgcggacatcaagcaggcagacgaatggacatggactcctcacactcaataactttacaacctacagcaaatccaaacaccggcctagttgaagacctagatcgaacaggaccactttcaatgaccactcaacaatctaactctcaatccttttcaacatcacacgaaggactagaagaagacaaagatcatccaacaacatctacattgacttcatcaaaccggaacgatgttaccggagggcgaagagatccaaaccatagtgaaggatcaacaacattactagaaggatacacatcacattatccacatactaaagaatcacgaacattcatcccagtaacctcagcaaaaaccggctcatttggagtaacagcagtaacagtaggtgactcaaactcaaacgtcaatagatcactctccggagaccaagacacattccatccttcaggaggctctcacacaacccatggatctgaatccgacggacactcacacggaagccaagaaggcggagcaaatacaacatccggacctattaggactccacagataccggaatggctaattatattagcaagtctcttagcactagccctcatcctagctgtatgcatagcagttaattcaagaagaagatgtggacagaaaaagaagctagtaataaactcaggaaatggagcagtagaagaccggaaaccatcaggtctaaacggagaggcttcaaaaagtcaagaaatggtacatttagtcaataaagaaagctcagaaacacctgatcaattcatgacagccgacgaaacaagaaacctccaaaacgtagacatgaaaataggagtttaa

SEQ ID NO: 3603 - RNA, 1377 nt, synthetic construct
  misc_feature 1..1377: note = AAA35572 variant
  source 1..1377: mol_type = other RNA
atgaacagaggagtaccattccgccaccttctactagtattacaactagcactattaccagccgccacacaaggaaaaaaagtagtactaggcaaaaaaggcgacacagtagaattaacatgcacagcatcccaaaaaaaatctatccaattccactggaaaaactcaaatcaaataaaaatattaggcaatcaaggttcttttctaacaaaaggaccatcaaaacttaatgaccgagcagatagcagacgatcactatgggatcaaggaaatttcccattaataatcaaaaacttaaaaatagaagattccgatacatacatatgcgaagtagaagatcaaaaagaagaagtacaactattagtatttggattaacagcaaactcagacacacacttactacaaggtcaatctctaacactaacactagaatcaccaccgggatcatccccatccgttcaatgccgatcaccaagaggcaaaaacatacaaggaggaaaaacactaagtgtaagccaactagaacttcaagactcaggaacatggacttgtacagtattacaaaaccaaaaaaaagtagaatttaaaatagacatcgtagtacttgcatttcaaaaagcatcatctatcgtatacaagaaagaaggagaacaagttgaattctccttcccattagcatttacagtagaaaaactaaccggctctggagagttatggtggcaggcagaaagagcatcatcatcaaaatcatggatcacattcgatttaaaaaacaaagaagtatccgtcaaaagagtcacacaagacccaaaattacaaatgggcaaaaagctaccactacacctaactctaccacaagctctaccacaatacgcaggatcaggcaatctaacgctagcactagaagctaaaacaggaaaactccatcaagaagtaaacttagtagtaatgcgcgcaacacaactccaaaaaaacctaacatgtgaagtctggggccctacatcaccaaaactaatgctatctctaaaactagaaaataaagaagcaaaagtttcaaaaagagaaaaagcagtatgggtactaaatcccgaagcaggaatgtggcaatgtctcctctcagactcaggacaagtattactagaatcaaacatcaaagtgctcccaacatggtccacaccagtacaacccatggccctaatagtactaggtggagtcgccggattactactatttataggtcttggaatcttcttctgcgtaagatgcagacatagaagaaggcaagctgaaagaatgtcccaaatcaaacgactactatccgaaaaaaaaacatgtcaatgcccacacagatttcaaaaaacatgcagtccaatataa

SEQ ID NO: 3604 - RNA, 186 nt, synthetic construct
  misc_feature 1..186: note = CAA44323 variant
  source 1..186: mol_type = other RNA
atgaaaagatttctatttctacttctaactatatctctacttgtaatggtacaaatacaaacaggtctatctggacaaaacgatacatctcaaacttcatctccatctgcatcttcaaatatatctggaggtatatttctatttttcgttgcaaatgcaattatacatctattttgcttttcataa

SEQ ID NO: 3605 - RNA, 186 nt, synthetic construct
  misc_feature 1..186: note = AAP35780 variant
  source 1..186: mol_type = other RNA
atgaaaagatttctatttctacttctaactatatctctacttgtaatggtacaaatacaaacaggtctatctggacaaaacgatacatctcaaacttcatctccatctgcatcttcatctatgtctggaggtatatttctatttttcgttgcaaatgcaattatacatctattttgcttttcataa

SEQ ID NO: 3606 - RNA, 186 nt, synthetic construct; identical to SEQ ID NO: 3604
  misc_feature 1..186: note = ACS44650 variant
  source 1..186: mol_type = other RNA

SEQ ID NO: 3607 - RNA, 954 nt, synthetic construct
  misc_feature 1..954: note = EAW93489 variant
  source 1..954: mol_type = other RNA
atgacagtagcaagaccatcagtaccagcagcactaccactactaggagaattaccaagacttctcttactagtcctactatgcctacccgcagtctggggagactgcggactacctccagatgtaccaaacgcccaaccagccttagaaggaagaacttcattcccagaagacacagtcataacatacaaatgcgaagaatcatttgtcaaaataccaggagaaaaagattcagtaatatgcctaaaaggctcccaatggtcagatatagaagaattctgtaaccaaaaaagttgccccaatccaggcgaaataagaaacggacaaatagacgtcccaggcggaatattatttggagcaacaatatcattctcatgcaatacaggatacaaactcttcggaagcacatcatcattctgcttaatatccggatcaagcgtacaatggtcagacccactaccagaatgccgagaaatatactgtcccgcacccccacaaatagacaacggaataatccaaggagaaagagaccattatggataccgacaatcagttacctatgcatgcaacaaaggattcacaatgataggcgaacactcaatatactgcacagttaacaatgacgaaggagaatggtcaggaccaccaccagaatgccgcggaaaatcactaacatcaaaagtacctccaaccgtccaaaaaccaaccaccgtaaacgtaccaacaaccgaagtttcaccaacatcacaaaaaacaacaacaaaaacaacaacaccaaatgcacaagcaacaagatcaacaccagtatcaagaactacaaaacacttccacgaaacaacaccaaacaaaggttctggcactacatcaggaacaacaagactactatcaggacacacatgcttcacactaactggattattaggaacactagtaactatgggattactaacataa

SEQ ID NO: 3608 - RNA, 882 nt, synthetic construct
  misc_feature 1..882: note = EAW93497 variant
  source 1..882: mol_type = other RNA
atgatcggagaacactcaatatattgcacagttaacaacgatgaaggcgaatggtccggaccaccaccagaatgcagaggaaaatcactaacatcaaaagtaccaccaacagtacaaaaaccaacaacagttaacgtcccaacaacagaagtatcaccaacatcacaaaaaacaacaactaaaacaacaacaccaaatgcacaaggaacagaaacaccatcagtactacaaaaacacacaacagaaaacgtctcagccacaagaacaccaccaacaccacaaaaaccaaccacagtaaatgtaccagcaaccatagtaaccccaacaccacaaaaacccacaacaataaacgtaccagccaccggagtttcatcaacaccccaaagacacacaatagtaaacgtatccgcaactggaacactaccaacactacaaaaaccaactagagcaaacgattccgcaacaaaatcacctgcagccgcacaaacatcattcatctccaaaaccctctcaacaaaaacaccatcagcagcccaaaacccaatgatgacaaacgcaagcgccacacaagccacactaacagcacaaaaattcaccacagccaaagtagcattcacccaatcaccatctgcagcaagaaaatcaaccaatgtacactcaccagtaacaaacggactcaaatcaacacaacgattcccatcagcccacatcacagcaacaagatccacacccgtatcacgcacaacaaaacacttccacgaaacaacaccaaacaaaggatcaggaacaacatctggcacaacaagactactttcaggacacacatgcttcacactaacaggtctactaggaacattagtaacaatgggactactaacataa

SEQ ID NO: 3609 - RNA, 804 nt, synthetic construct
  misc_feature 1..804: note = EAW93493 variant
  source 1..804: mol_type = other RNA
atgataggagaacactccatatactgcacagtaaacaacgacgaaggagaatggtccggaccaccaccagaatgcagaggaaaatcactaacatccaaagtaccacccacagtacaaaaaccaacaacagtaaacgtacctacaacagaagtatcaccaacatcacaaaaaacaacaacaaaaacaacaacaccaaacgcacaaggaacagaaacaccatcagtactacaaaaacatactacagaaaacgtatcagcaacacgaacaccaccaacacctcaaaaacccacaacagtcaacgtaccagcaacaatagtcacaccaacaccacaaaaaccaacaacaataaacgtaccagcaacaggagtatcatcaacaccacaaagacacacaatcgtaaacgtatcagcaacaggaacattaccaacattacaaaaaccaacaagagcaaacgattccgccacaaaatctccagccgcagcacaaacatcattcatctcaaaaacactatcaacaaaaacaccatcagcagcacaaaacccaatgatgaccaacgcatccgcaacccaagccacactcactgcccaaaaattcacaacagctaaagtagcattcacacaatcaccatcagcagccccaaccagatccacaccagtatcacgcaccacaaaacacttccacgaaaccacacctaacaaaggatccggaacaacatcaggaacaacacgattactatcaggacacacatgcttcacactcacaggattactaggaaccctcgtaacaatgggcctactaacataa

SEQ ID NO: 3610 - RNA, 1146 nt, synthetic construct
  misc_feature 1..1146: note = AAA52168 variant
  source 1..1146: mol_type = other RNA
atgacagtagcaagaccatccgtaccagcagccctaccattactaggagaactaccaagattactattactcgtactactatgcctaccagcagtttggggagactgcggtctaccacctgacgtaccaaacgcacaaccagctctagaaggaagaacatcattcccagaagacacagtcataacctacaaatgcgaagaatcattcgtaaaaatacctggagaaaaagactcagtaatatgtctaaaaggatcacaatggtcagatatagaagaattctgcaacagaagctgcgaagtaccaacaagactaaactcagcatccttaaaacaaccatacataactcaaaactacttcccagtaggaacagtagtagaatacgaatgtagaccaggatacagacgtgaaccatccctatcacccaaattaacctgtctacaaaacttaaaatggtctactgcagtagaattctgcaaaaaaaaatcatgccccaacccaggagaaataagaaacggacaaatagatgtaccaggaggaatcctattcggagccaccatatcattttcatgcaacaccggatacaaactattcggatctacctcatcattctgcctaatatcaggaagttcagtccaatggtcagacccattaccagaatgcagagagatatactgcccagcaccacctcaaatcgataacggaataatccaaggagaacgagatcactacggatatcgacaatcagtcacttatgcatgcaacaaaggatttacaatgataggagaacactcaatatattgcaccgtcaacaacgacgaaggcgaatggagcggaccaccaccagaatgtagaggtaaatcactgacatcaaaagtaccacccacagtacaaaaaccaacaaccgtaaacgtaccaacaacagaagtatcaccaacatcacaaaaaactacaacaaaaacaactactccaaacgcacaagccacaagatccacaccagtttcccgtacaacaaaacacttccatgaaacaacaccaaacaaaggatcaggaacaacatctggaacaacacgactacttagcggccatacatgcttcacactaacaggactattaggaacattagtaacaatgggactacttacttaa

SEQ ID NO: 3611 - RNA, 2577 nt, synthetic construct
  misc_feature 1..2577: note = CCDS73385.1 variant
  source 1..2577: mol_type = other RNA
atgctacaaacaaaagatttaatatggacattattcttcctaggtacagcagtctccctacaagtcgatatagtaccgagtcaaggtgaaataagtgttggcgaaagtaaatttttcctatgtcaagtagcaggcgacgcaaaagataaagatatatcatggttctcgccaaacggagaaaaactaacaccaaatcaacagcgaatttcagttgtatggaatgacgactcttcatcaacactaaccatctataatgccaatatagacgatgctggcatatacaaatgtgtagtaacaggagaagatggatcagaaagcgaagcaacagtaaatgtaaaaatatttcaaaaacttatgtttaagaatgcgcccacaccacaagaatttcgagaaggagaagacgcagtaatagtatgcgatgtagtatcgtctttaccacctacaataatctggaaacataaaggacgagacgttatactaaagaaagatgtcagattcatagtactatcaaacaattatttacaaataagaggaataaagaaaactgatgaaggtacatacagatgtgaaggaaggatattagcgcgaggagaaattaactttaaagatatacaagtcatagtaaatgtcccaccaacaatacaagctagacaaaatattgtaaacgcaacagcaaacctaggacaatcggttacattagtatgtgatgcagaaggattcccagaacccactatgtcgtggaccaaagacggagaacaaatcgaacaagaagaggacgacgaaaaatatatatttagtgatgactcaagtcaattaacaataaagaaagttgacaaaaacgatgaagccgaatacatttgtattgcagaaaataaagcaggagaacaagacgcaacaatccatttaaaagtatttgcaaaacctaaaataacttacgtagaaaatcaaacagctatggaactagaggaacaagtaactttaacatgcgaagcaagcggcgatcccataccaagtataacatggagaacaagtacgagaaacatcagttccgaggaaaaagccagttggaccagaccggaaaaacaagaaactttagatggccatatggtcgtaaggagtcatgctagagtctcaagcctcacactaaaaagcatacaatacactgatgcgggagaatatatatgtacagcaagcaatacgataggacaagactcccaaagtatgtatttagaagtacaatatgcacctaaattacaaggaccggtggccgtctatacatgggaaggtaaccaggttaatataacttgtgaagtgttcgcatatccaagtgcaacaatatcatggtttcgagatggtcaactactaccgtcatcaaactattcaaatataaaaatatataacactccaagcgcatcctatttagaagttactcccgacagtgaaaatgatttcggaaattacaattgtactgctgttaacagaataggacaagaatccttagaatttatacttgtacaagccgacactccaagcagccccagtattgaccaagtagaaccgtatagtagcactgcacaagtccaatttgatgaaccagaagccacaggtggggttccaatactcaaatataaagccgaatggagggcagttggtgaagaagtctggcattctaaatggtatgatgcgaaagaagcaagtatggaaggaatagttacaatagtcggtttaaaaccagaaacaacatatgcagtaagattagcagcattaaacggcaaaggactaggcgaaatatccgccgcaagcgagtttaaaacacaaccagtacaaggagaaccatcagcgcccaaacttgaaggacaaatgggagaagatggaaactcaataaaagtaaacctaatcaaacaagatgacggcggttcacctataagacattatctggtaagatatcgggcgctatcgagtgaatggaaaccagaaatacggttaccttcaggcagcgatcatgtgatgctaaaatcactagactggaacgcagaatatgaagtatatgtggtagcagaaaaccaacaaggaaaaagtaaagcagcccatttcgtgttccgaacaagtgcacaacctacagcaataccagccaacggtagcccaacatcaggtttatcaacaggtgcaatagtagggatattaatcgtcatttttgtattactactggtagtagtagatataacctgttatttcctaaataaatgtgggttatttatgtgtattgcagttaatttatgcggtaaagcaggtccaggagctaaaggcaaagacatggaagagggaaaagcagcatttagtaaagatgaaagtaaggaaccaattgtagaagttagaaccgaagaagaaagaactcccaaccacgacggaggaaagcatacagaaccaaacgagactactccattaacagaaccagaaaaaggaccagtggaagctaaaccagaatgtcaagaaactgaaaccaaaccagctcctgcagaggtaaaaacagtgccaaatgatgcaacacaaacaaaggagaatgaatcaaaagcatag

SEQ ID NO: 3612 - RNA, 867 nt, synthetic construct
  misc_feature 1..867: note = ABK41933 variant
  source 1..867: mol_type = other RNA
atgggacacacaagaagacaaggaacaagcccatcaaaatgcccatacctaaacttctttcaactactagtattagcaggactatcacacttctgctcaggagtaatacacgtaacaaaagaagtaaaagaagtcgcaacactatcatgcggacacaacgtatcagttgaagaactagcccaaacacgaatatactggcaaaaagaaaaaaaaatggtacttacaatgatgtccggcgacatgaacatatggccagaatacaaaaaccgcacaatctttgacataacaaacaatctatcaatagtaatactagcattaagaccctccgacgaaggcacatacgaatgcgtcgtactcaaatacgaaaaagacgcattcaaaagagaacacttagcagaagtaaccctatcagtaaaagcagatttccccactccctctatatcagacttcgaaatccctacatcaaacatacgaagaataatatgttcaacatcaggaggattcccagaaccacatttatcctggcttgaaaacggagaagaattaaacgcaataaacacaacagtatcacaagacccagaaacagaactttacgcagtatcatccaaactagactttaacatgacaacaaaccattcattcatgtgtctaataaaatacggacatctaagagtaaaccaaacattcaactggaacacaacaaaacaagaacatttcccagacaatctactaccatcatgggctataacattaatatcagtaaacggaatcttcgtaatatgctgtctaacatactgctttgcaccaagatgcagagaaagaagaagaaacgaaagactaagaagagaaagcgtacgaccagtataa

SEQ ID NO: 3613 - RNA, 867 nt, synthetic construct
  misc_feature 1..867: note = AAA36045 variant
  source 1..867: mol_type = other RNA
atgggacacacaagaagacaaggaacaagcccaagtaaatgcccatacttaaacttcttccaactactagtactagccggactatcacatttctgctccggagtaatacacgtaactaaagaagtaaaagaagtagccacactatcatgtggacacaatgtatcagtagaagaactagcacaaacaagaatatattggcaaaaagaaaaaaaaatggtactaaccatgatgtcaggagacatgaacatatggccagaatacaaaaacagaacaatcttcgacataacaaacaatttatcaatagtaatactagcactaagaccttcagatgaaggaacatacgaatgcgtagtactcaaatatgaaaaagatgcattcaaaagagaacaccttgccgaagtaacactctcagtaaaagcagacttcccaacaccatctataagtgactttgaaataccaacatcaaatataagaagaataatctgctcaacatcaggaggattcccagaaccacatctatcatggctagaaaacggcgaagaactaaacgcaataaacacaacagtaagccaagacccagaaacagaactatacgcagtaagttcaaaactagacttcaatatgaccacaaaccactcattcatgtgcctaataaaatacggacatctaagagtaaatcaaacctttaattggaacacaacaaaacaagaacactttcccgacaacttactaccatcatgggcaataacactaatatcagtaaatggcatattcgtaatatgctgcctaacttattgcttcgcaccaagatgtcgagaaagaagaagaaacgaaagactaagaagagaaagcgtacgcccagtttaa

SEQ ID NO: 3614 - RNA, 990 nt, synthetic construct
  misc_feature 1..990: note = CCDS3009.1 variant
  source 1..990: mol_type = other RNA
atggaccctcaatgcacaatgggcctatcaaacatactattcgtaatggcattcttactatcaggagcagcaccactcaaaatacaagcctatttcaacgaaacagcagacctaccatgccaattcgcaaactcacaaaatcaatcattaagcgaactagtagtattctggcaagaccaagaaaacttagtcctaaacgaagtctacttaggaaaagaaaaattcgactcagtacactcaaaatacatgggaagaacatcatttgacagcgatagctggacactaagattacacaacttacaaataaaagataaaggactatatcaatgcataatacaccacaaaaaaccaacaggaatgatacgaatacaccaaatgaacagtgaactctcagtattagcaaacttctcacaaccagaaatagtcccaatatccaatataactgaaaacgtctacataaacctaacatgcagctcaatccacggatacccagaaccaaaaaaaatgagtgtactattaagaacaaaaaacagcacaatagaatacgacggagtaatgcaaaaatcccaagacaacgtaacagaactatacgacgtaagtatatcactaagcgtatcattccccgatgtaacatcaaacatgacaatattctgtatacttgaaacagataaaacaagattactatcctcaccattctctatagaactagaagacccacaaccaccaccagaccacataccctggataacagcagtcttaccaaccgtaatcatatgcgtcatggtcttttgcctaatactatggaaatggaaaaaaaaaaaaagacccagaaattcatacaaatgcggaacaaacaccatggaacgagaagaatcagaacaaacaaaaaaacgagaaaaaattcatataccagaaagatcagacgaagcacaacgagtattcaaatcatcaaaaacctcctcatgcgacaaatcagacacatgcttctaa

SEQ ID NO: 3615 - RNA, 708 nt, synthetic construct
  misc_feature 1..708: note = AAA59674 variant
  source 1..708: mol_type = other RNA
atggcactccctgtaaccgcactcctattaccactagcattactactacacgcagcacgaccatcacaatttagagtatcaccattagatagaacttggaatttaggagaaacagtagaattaaaatgccaagtattactatcaaacccaacatcaggatgctcatggctatttcaacccagaggcgcagcagcatcaccaacattcctactatacctatcacaaaataaaccaaaagcagctgaaggactagacacacaaagattctcaggaaaaagattaggagatacattcgtattaacactatcagacttcagacgagaaaacgaaggatattacttttgctctgcactatcaaactcaataatgtacttctcacatttcgtacctgtattcctaccagcaaaaccaacaacaacaccagcaccacgaccaccaacaccagcaccaactattgcatcacaaccattatctctaagaccagaagcatgcagaccagcagcaggaggagcagtccacacaagaggactagacttcgcatgcgatatatatatatgggcaccattagcaggaacatgcggagtattactattatcattagtaataacactatactgcaatcatagaaatagaagaagagtatgcaaatgtccacgaccagtagtaaaatccggagataaaccttcattatcagcaagatacgtataa

SEQ ID NO: 3616 - RNA, 2472 nt, synthetic construct
  misc_feature 1..2472: note = EAW57688 variant
  source 1..2472: mol_type = other RNA
atgacagttcttcaagaaccagtacaagccgcgatctggcaagctttaaaccactacgcatacagagacgcagtatttctcgctgaaagactatacgctgaagtacattcagaagaagccttattcctactcgccacatgctactatcgatctggcaaagcctataaagcatacagacttttaaaaggccactcctgtacaacaccgcaatgcaagtacttattagcgaaatgctgcgtcgatttatctaaactagccgaaggagaacaaatcttgagtggaggagtcttcaacaaacaaaaatcacatgatgacatagtaaccgaattcggagactcagcctgctttacactatcactacttggacatgtttactgcaaaacagacagattagccaaaggatcagaatgctaccaaaaaagtttatcactaaatccatttttatggtctccattcgaatcactttgtgaaattggcgaaaaacctgacccagaccaaacattcaaatttacatccctacaaaacttcagcaactgtctacctaactcctgcacaacacaagtaccaaaccatagcttatcacacagacaacccgaaaccgtactaacagaaacaccccaagacacaatcgaacttaaccggttaaacttagaatcttcgaactctaaatactccttaaacacagattcatcagtatcatacatagattcagcagttatttcccctgatacagttccattaggcaccggaacatctatccttagtaaacaagtccaaaataaacccaaaacaggaagatcactgctcggagggcctgcagcattgtcgccattaacaccatcatttggaatcctacctttagaaactcccagcccaggtgacggatcctaccttcaaaattacactaacacaccaccagtgatagatgtaccatcaactggagcaccatcaaaaaaatccgtcgcacggataggtcaaactggtacaaaaagtgtattcagccaatcaggaaactcacgagaagttactcccatattagcacaaacacaaagcagcggaccacaaacatcaacaactccacaggtactttcacctacaataacctcccctccaaacgctctcccccgacgatctagtagactctttacaagtgattcatcaacaactaaagaaaattcaaaaaaactaaaaatgaaattccccccaaaaataccaaatcgaaaaaccaagagtaaaaccaacaaaggcggtatcacccaaccaaacataaacgactcactagaaatcaccaaactagattcatcaatcatttccgagggcaaaatcagcacaataacaccacaaattcaagcatttaacctacaaaaagctgcagcaggtctaatgtcattactaagagaaatgggcaaaggatacttagccctatgtagctataattgcaaagaagcaataaatatactctcacacctcccttcacatcattataacactggctgggtattatgtcaaataggaagagcctattttgaattaagcgaatatatgcaagccgaacgaatcttttctgaagtccgacgcatagaaaactatcgtgtagaaggtatggaaatctattcaaccacactctggcacctacaaaaagacgtagctttatctgtattatccaaagatctaactgatatggacaaaaacagtccagaagcatggtgtgcagcgggaaactgcttcagtttacagagagaacacgatatagcaataaaattctttcaaagagcaatacaagtcgatcctaactacgcatacgcatatacacttcttggtcacgaatttgtacttaccgaagaactagataaagcattagcctgtttccgcaatgcgatcagagtaaacccaagacattacaacgcatggtacggactagggatgatttactacaaacaagaaaaattctcattagcggaaatgcacttccagaaggctttagatatcaacccacaatcatccgtactattatgtcacattggcgtagtccaacacgcactaaaaaaaagcgaaaaagctcttgacaccctgaacaaagcaatagtaatagacccaaaaaaccccctgtgcaaattccaccgtgcatccgtgcttttcgcaaacgaaaaatataaatcagcattacaagaattagaagaactaaaacaaatagtaccaaaagaaagtttagtgtatttcttaattggcaaagtttacaaaaaactcggtcagacacatcttgccttaatgaatttctcatgggccatggacctagacccaaaaggtgcgaacaaccaaataaaagaagcaatcgataaaagatatctaccagatgacgaagaacccataacacaagaagaacaaatcatgggaacagacgaaagccaagaatcttccatgacagacgcagatgatacacaactacatgccgctgaatcagatgaattttaa

SEQ ID NO: 3617 - RNA, 2475 nt, synthetic construct
  misc_feature 1..2475: note = AAB34378 variant
  source 1..2475: mol_type = other RNA
atgaccgtactacaagaacccgtacaagcagcaatatggcaagctctaaatcattacgcctatagagacgctgttttccttgctgaaagactttacgctgaagttcactctgaggaagcattattcctattagcaacttgctactatagatccggaaaagcatataaagcctatagactacttaaaggccactcatgcactacacctcaatgtaaatatctactagccaaatgttgtgtagatttatcaaaacttgcagaaggtgaacaaatactctcaggaggtgtatttaacaaacaaaaaagccacgatgacatagtcaccgaattcggcgactctgcatgtttcactctctcactcctaggacatgtctactgcaaaacagacagattagcaaaaggcagtgaatgctaccaaaaatcactatccctaaaccccttcttatggtccccctttgaatctttatgcgaaatcggtgaaaaaccagatccagaccaaacctttaaattcacctctctacaaaacttttctaattgccttccaaactcatgcactacccaagtacctaaccattcattaagtcatagacaaccagaaacagtattaactgaaacaccacaagacactattgaattaaatcgactaaaccttgaatcaagtaattctaaatactctctaaatactgattcatcagtttcatacatagattcggcagtcatatccccagatactgttccattaggaacaggaacatcaatactatcaaaacaagtgcaaaataaacccaaaacaggacgatcactattaggcggaccagcagcactaagcccacttacaccctcattcggaatcttgccactagaaacaccatctcccggagatggatcatatctacaaaattacacaaacactcctcccgtaatcgatgtaccttcaacaggtgccccatctaaaaaaagtgtcgcacgcataggacaaacaggaacaaaaagcgtattttcacaatcaggaaattcacgcgaagtaactccaatactagcccaaacccaatctagtggtccacaaacatccacaacaccacaagtcctctctcctactatcacttcaccaccaaacgccttacccagacgatcatctcgactattcacttctgactcgtcgacaaccaaagaaaactcaaaaaagctaaaaatgaaatttccaccaaaaatcccaaacaggaaaacaaaatcaaaaactaataaaggaggaatcactcaacctaacattaacgacagcttggagataaccaaattagatagcagcatcatctcagaaggtaaaatttctactataacaccacaaatacaagcattcaaccttcaaaaagctgcagccgaaggtctaatgtcacttttgcgtgaaatgggaaaaggttatctcgcattatgttcatataactgtaaagaagccataaacatattatcccatctaccctcacaccattataacaccggatgggttctatgtcaaatcggacgtgcctactttgaactatccgaatacatgcaagcagaacgaatattctccgaagtacgaaggatagaaaactatcgagtcgaaggtatggaaatatatagcaccactttatggcacctacaaaaagacgtcgcactctcagtcttatccaaagatttaacagacatggacaaaaattcaccagaagcatggtgcgccgccggtaattgttttagcctacaaagggaacatgacatcgccattaaattctttcaacgtgcaatacaagttgatccaaactacgcctacgcatatacactgctaggccacgaatttgtcctaacagaagaattagacaaagcactagcctgcttccgtaacgcaatacgcgtcaacccacgccattataacgcctggtatggactaggaatgatttactataaacaagaaaaattttctttagctgaaatgcattttcaaaaagctctagatataaacccgcaatccagcgtattattatgtcatataggagtagtccaacatgcactaaaaaaatcagaaaaagctctcgacaccctgaacaaagctatagtaatagaccccaaaaacccactatgcaaattccatagagctagtgtattattcgccaatgaaaaatacaaatcagccctacaagagctcgaagaactcaaacaaatagtccccaaagaatcattagtctatttcctaataggaaaagtttataaaaaactagggcaaacacacttagccctaatgaatttttcatgggcaatggatttggatcccaaaggcgctaacaatcaaattaaagaagccatagataaacgatacttacccgatgatgaagaacctataactcaagaagaacaaatcatgggcacagacgaatcacaagaatcttccatgactgacgcagatgacacacaattacatgcagcagaatctgacgaattttaa

SEQ ID NO: 3618 - RNA, 1788 nt, synthetic construct
  misc_feature 1..1788: note = AAA51947 variant
  source 1..1788: mol_type = other RNA
atgagagtactcctagccgcattaggattactcttcttaggagctttaagagcatttccacaagacagaccttttgaagatacatgtcatggaaatccatcacattattatgataaagcagttcgtagatgttgttatagatgtcccatgggcttatttcctacacaacaatgtccacaaagacccactgactgcagaaaacaatgtgaaccagactactatttagacgaagcagatagatgtaccgcatgtgtcacatgttcaagagacgatctagtagaaaaaacaccatgtgcatggaattcctcacgagtatgcgaatgtcgaccaggaatgttttgttctacatccgctgtaaactcatgtgcacgctgcttttttcactctgtatgcccagcaggtatgatagtaaaatttccaggcactgcacaaaaaaacaccgtatgtgaaccagcatctcctggtgtatctccagcctgtgcttcacccgaaaattgtaaagaaccaagcagtggaactataccacaagcaaaaccaaccccagtatcacccgcaacatcaagtgcctcaactatgccagtaagaggaggaaccagattagctcaagaagcagcttcaaaacttacaagagctcctgattccccttcatcagtaggacgaccaagttcagatccaggtttatcaccaacccaaccatgtccagaaggatcaggagattgtagaaaacaatgcgagccagactactatctcgatgaagcaggtagatgtactgcatgtgtatcttgctcaagggatgatttagtagaaaaaacaccatgtgcctggaattcctcaagaacatgcgaatgtagaccaggaatgatatgtgcaacatctgccactaactcatgtgcacgatgtgtaccatatcccatttgcgcagcagaaaccgtcacaaaaccacaagatatggcagaaaaagatacaacttttgaagcaccaccactaggtacacaacctgattgcaatcccacaccggaaaacggagaagccccagcatcaacatctcctacacaatcattacttgtagactcacaagcttcaaaaactttacccataccaacatccgcccccgtagcgctaagttctactggtaaaccggtactagatgcaggaccagtcttattttgggttattttagtattagtagtcgtagtcggatcctcagcatttctcttatgtcaccgaagggcctgccgaaaaagaattagacaaaaattacatttatgttacccagttcaaactagtcaacctaaattagaattagtcgattcaagacctagacgctcatccacccaattaagatctggagcttctgtcacagaaccagttgctgaagaaagaggactaatgtcacaacctcttatggaaacttgtcattcagtaggagcagcatatttagaatcacttcctcttcaagacgcttccccagcaggtggaccctcttccccccgcgacttaccagaaccccgagtctcaacagaacatacaaataataaaatagaaaaaatatacattatgaaagcagatacagtaatagtaggaacagttaaagccgaattacccgaaggaagaggattagcaggaccagcagaaccagaattggaagaagaactagaagcagaccacacacctcactatcctgaacaagaaactgaacctcctctaggatcatgctcagacgtaatgctatcagtagaggaagaaggtaaagaagacccattaccgacagcagcatcaggtaaataa

SEQ ID NO: 3619 - RNA, 912 nt, synthetic construct
  misc_feature 1..912: note = EAW97060 variant
  source 1..912: mol_type = other RNA
atggcgacatcaaggtatgaaccagtagcagaaataggcgtcggagcctatggaacagtctataaagcaagagacccacattcaggacactttgtagcactgaaatctgtaagagtaccaaatggaggaggaggaggtggaggactaccaatcagcacagtaagagaagtagcattattaagaagattagaagcatttgaacatccaaatgtagtaagattaatggacgtatgcgcaacatcaagaacagatagagaaataaaagtaacattagtatttgaacatgtagatcaagatctaagaacatacttagacaaagctccaccaccaggattaccagcagaaacaataaaagatcttatgagacaatttttaagaggactagactttttacacgcaaattgtatagttcacagagatctaaaaccagaaaatatattagttacatcaggaggaacagtaaaactagcagattttggattagcaagaatatattcatatcaaatggcattaactccagtagtagtaacattatggtatagagcaccagaagtattattacaatcaacatatgcgacaccagttgacatgtggtccgtaggatgtatatttgcagaaatgttcagaagaaaaccactattttgtggaaattcagaagcagaccaattaggaaaaatattcgatttaataggacttccaccagaagatgattggccaagagatgtaagcctaccaagaggagcatttccaccaaggggaccaagaccagtacaatctgtagtaccagaaatggaagaatcaggagcacaactattattagaaatgttaacatttaatccacataaaagaatatcagcattcagagcactccaacatagttatttacataaagatgaaggaaatccagaataa

SEQ ID NO: 3620 - RNA, 912 nt, synthetic construct
  misc_feature 1..912: note = AAA35673 variant
  source 1..912: mol_type = other RNA
atggcaacctcaagatatgaaccagtagcagaaataggagtaggagcatatggaactgtatataaagcaagagatccacacagtggacatttcgtagctttaaaatcagtgagggttccaaatggtggaggaggaggaggaggattaccaatatcaactgttagagaagtagcattactaagaagattagaagcatttgaacatccaaatgtagtaagactaatggatgtatgtgcaacaagccgaacagacagagaaataaaagtaactctagtatttgaacatgtagatcaagatttaagaacatatttagataaagcaccaccaccaggactcccagctgaaacaataaaagatttaatgagacaatttttaagaggattagactttttacatgcaaattgtatagtacatagagatttaaaaccagaaaatatattagtaacttcaggaggaacagtcaaattagcagactttggattagcaagaatatattcatatcaaatggcattaactccagtagtagtaactttatggtatagagcaccagaagtattattacaatcaacctatgcaactccagtagatatgtggtcagtaggatgtatattcgcggaaatgttcagaagaaaaccactattttgtggcaatagtgaagctgatcaattaggaaaaatatttgatttaataggactcccaccagaagatgactggccaagagatgtatcattaccaagaggagcatttccaccaagaggaccacgaccagtacaatcagtagttccagaaatggaagaatctggagcacaattactactagaaatgttaacatttaatccacataaaagaatatcagcatttagagcattacaacattcatatttacataaagatgaaggaaatccagaataa

SEQ ID NO: 3621 - RNA, 690 nt, synthetic construct
  misc_feature 1..690: note = AAB50213 variant
  source 1..690: mol_type = other RNA
atggacgtctgcgcaacaagcagaacagatagagaaataaaagtaacattagtcttcgaacacgtagaccaagacctaagaacatacctagacaaagcacccccaccaggactaccagcagaaacaataaaagacttaatgagacaatttctcagaggactagacttcctacacgcaaactgcatagtacatcgagacctaaaaccagaaaacatacttgtaacatcaggaggcacagtaaaactagcagatttcggcttagcacgaatatacagctaccaaatggcactaacaccagtagtagtaacactatggtacagagcaccagaagtactattacaatcaacatacgccacaccagtagacatgtggagcgtaggatgcatattcgcagaaatgtttagaagaaaaccactattctgcggaaactcagaagcagatcaattaggaaaaatattcgatctaataggactaccaccagaagacgactggccaagagatgtatcactaccacgaggagcatttccaccaagaggacccagaccagtacaaagcgtagttccagaaatggaagaatcaggagcacaattattactagaaatgctaacattcaacccacacaaaagaatatcagcattcagagcattacaacacagttacctacacaaagacgaaggaaacccagaataa

SEQ ID NO: 3622 - RNA, 336 nt, synthetic construct
  misc_feature 1..336: note = AAH15669 variant
  source 1..336: mol_type = other RNA
atggcaacaagtagatatgaaccagtagcagaaataggagtaggagcatatggaacagtatataaagcaagagatccacatagcggacattttgtagcattaaaaagtgtaagagtaccaaatggaggaggaggaggaggaggattaccaataagtacagtaagagaagtagcattattaagaagattagaagcatttgaacatccaaatgtagtcagactaatggatgtatgtgcaacatcaagaacagacagagaaataaaaagatgttttgtagaaagtctaagttcagtagaaacattaaaaccaacatcatgggcaaaatcactaacataa

SEQ ID NO: 3623 - RNA, 429 nt, synthetic construct
  misc_feature 1..429: note = ACY78326 variant
  source 1..429: mol_type = other RNA
atggaaccagcagcaggaagtagtatggaaccaagtgcagattggttagcaacagcagcagcaagaggaagagtagaagaagtaagagcattattagaagcaggagcattaccaaatgcaccaaatagttatggaagaagaccaatacaagtaatgatgatgggaagtgcaagagtagcagaattattattattacatggagcagaaccaaattgtgcagatccagcaacattaacaagaccagtacatgatgcagcaagagaaggatttctagatacattagtagtattacatagagcaggagcaccatgtgcaatgccaggagcagtatgtccatggacatggttaagaagttgggcaatagcaatgagtcatggaacatgtgcaagattaagaggagcaccagaagcagtaacaatgccagcataa

SEQ ID NO: 3624 - RNA, 351 nt, synthetic construct
  misc_feature 1..351: note = EAW58598 variant
  source 1..351: mol_type = other RNA
atggaaccagcagcaggaagtagtatggaaccaagtgcagattggttagcaacagcagcagcaagaggaagagtagaagaagtaagagcattattagaagcaggagcattaccaaatgcaccaaatagttatggaagaagaccaatacaagtaggaagaggaagtgcagcaggagcaggagatggaggaagattatggagaacaaaatttgcaggagaattagaaagtggaagtgcaagtatattaagaaaaaaaggaagattaccaggagaatttagtgaaggagtatgtaatcatagaccaccaccaggagatgcattaggagcatgggaagcaaaagaagaagaataa

SEQ ID NO: 3625 - RNA, 471 nt, synthetic construct
  misc_feature 1..471: note = AFN61598 variant
  source 1..471: mol_type = other RNA
atggaaccagcagcaggaagtagtatggaaccaagtgcagattggttagcaacagcagcagcaagaggaagagtagaagaagtaagagcattattagaagcaggagcattaccaaatgcaccaaatagttatggaagaagaccaatacaagtaatgatgatgggaagtgcaagagtagcagaattattattattacatggagcagaaccaaattgtgcagatccagcaacattaacaagaccagtacatgatgcagcaagagaaggatttctagatacattagtagtattacatagagcaggagcaagattagatgtaagagatgcatggggaagattaccagtagatttagcagaagaattaggacatagagatgtagcaagatatttaagagcagcagcaggaggaacaagaggaagtaatcatgcgagaatagatgcagcagaaggaccaagtgacataccagattaa

SEQ ID NO: 3626 - RNA, 327 nt, synthetic construct
  misc_feature 1..327: note = CCQ43815 variant
  source 1..327: mol_type = other RNA
atggaagtaatgatgatgggaagtgcaagagtagcagaattactattattacatggagcagaaccaaattgtgcagatccagcaacattaacaagaccagtacatgatgcagcaagagaaggatttttagatacattagtagtattacatagagcaggagcaagattagatgtaagagatgcatggggaagattaccagtagatttagcagaagaattaggacatagagatgtagcaagatatttaagagcagcagcaggaggaacaagaggaagtaatcatgcaagaatagatgcagcagaaggaccaagtgatataccagattaa

SEQ ID NO: 3627 - RNA, 399 nt, synthetic construct
  misc_feature 1..399: note = AAA82236 variant
  source 1..399: mol_type = other RNA
atggtaagaagatttttagtaacattaagaataagaagagcatgtggaccaccaagagtaagagtatttgtagtacatataccaagattaacaggagaatgggcagcgccaggagcaccagcagcagtagcattagtattaatgttattaagatcacaaagattaggacaacaaccattaccaagaagaccaggacatgatgatggacaaagaccaagtggaggagcagcagcagcaccaagaagaggagcacaattaagaagaccaagacatagtcatccaacaagagcaagaagatgtccaggaggattaccaggacatgcaggaggagcagcaccaggaagaggagcagcaggaagagcaagatgtttaggaccaagcgcaagaggaccaggataa

SEQ ID NO: 3628 - RNA, 2109 nt, synthetic construct
  misc_feature 1..2109: note = CCDS12584.1 variant
  source 1..2109: mol_type = other RNA
atggaatctccctcagccccaccacacagatggtgtatcccatggcaacgactattgctaacagccagtcttctaacattctggaatcccccaaccactgcaaaattaaccatagaatctaccccatttaatgtagcagaaggtaaagaagttctcttattagtacacaatttacctcaacacctctttggatacagttggtataaaggagaaagagtagatggaaatagacaaatcataggatatgttataggtacacaacaagcaacccccggcccagcatattcaggaagagaaataatttatccaaatgcatcattactaatccaaaacataatacaaaacgacaccggcttctacaccctacatgttataaaatcagacctagtgaacgaagaagcaacaggtcaatttcgtgtctaccctgaattaccaaaaccctccatatcatccaacaattctaaaccagtagaagataaagatgccgtagcttttacatgcgaacctgaaacgcaagatgcaacctacctatggtgggtcaataaccaatccttaccagtttcaccacgattacaattatcaaatggaaaccgtacactcacactgttcaacgtcaccagaaatgacacagcatcatacaaatgcgaaacacaaaacccagtttcagcaagaagatcagatagtgtaatactaaacgtattatacggacccgatgcacctactatatcaccattaaatacaagttacagaagtggtgaaaatttaaacctctcttgccacgcagcctcgaacccacccgctcaatactcctggttcgtaaatggcacattccaacaatcaacccaagaacttttcattccaaacataacagtcaacaactccggttcatacacatgtcaagcacataactcagataccggactcaatcgcaccacagtaacaacaataacagtatatgctgaaccaccaaaaccatttataacatcaaacaactcaaatccagtagaagatgaagatgcagtagcattaacatgtgaaccggaaatacaaaataccacatatttatggtgggtaaacaatcaatccctacctgtatccccaagactacaattatccaacgataatagaacactaacattattatcagtaacacgtaacgacgtaggaccatatgaatgcggaatacaaaatgaactatcagtcgaccactccgaccccgtaatcttaaacgtactttacggacccgatgaccctacaatatcaccatcatacacctactatagaccaggagtaaacctaagcctatcatgccatgcagcatcaaaccctcctgcacaatactcatggttaatagatggcaacatacaacaacacacacaagaactattcatatctaacataacagaaaagaatagtggtttatatacatgccaagcaaacaattcagcatccggtcattcaagaacaaccgtcaaaacaataaccgtatccgcagaactaccaaaaccctcaatcagctcaaataactcaaaaccagtagaagacaaggacgcagtagccttcacatgcgaacccgaagcccagaacaccacatacctatggtgggtcaatggccaatctttacctgtatcacctagactccaattatcaaatggtaatagaaccctaacactattcaatgtaactagaaatgacgcacgcgcctacgtatgcggaatacaaaactccgtatcagcaaatcgtagcgaccctgtaaccttagacgttctatatggcccagacacaccaataatatcaccaccagactcatcatacctttcaggagcaaacttaaacttgtcatgccactcagcaagcaacccaagtccacaatactcatggagaattaatggtataccccaacaacacacacaagtactctttattgcaaaaataaccccaaataataacggaacttacgcatgttttgtttctaatctagcaacaggccgcaataactcaatcgtaaaatctataaccgtctctgcctcaggaacctccccaggcttaagcgctggtgcaacagtcggcatcatgatcggagttctcgtaggagtcgcactaatataa

SEQ ID NO: 3629 - RNA, 1035 nt, synthetic construct
  misc_feature 1..1035: note = AAA51739 variant
  source 1..1035: mol_type = other RNA
atgggaccaccttcagctccaccttgtcgactacacgtaccatggaaagaagtcctactaacagcatcactactaacattctggaatcctccaacaaccgccaaacttaccatagaatccacaccattcaatgtcgcagaaggaaaagaagtattactactcgcacataacttaccccaaaatagaataggctactcttggtacaaaggagaaagagtcgacggaaattcattaatagtaggatacgtaataggaacacaacaagcaacaccaggcccagcatactcaggaagagaaactatatacccaaacgcatcactattaatacaaaacgtaacacaaaatgacacaggattctacacactacaagtaatcaaatcagacttagtaaacgaagaagcaaccggacaatttcacgtctacccagaactaccaaaaccaagcatatcctcaaacaattccaacccagtagaagacaaagacgccgtagcattcacatgcgaaccagaagtacaaaatactacctacctctggtgggtaaacggccaatcactaccagtctcaccaagactacaactatcaaatggaaacatgacactaacactcttatcagtaaaaagaaacgacgcaggatcatatgaatgtgaaatccaaaacccagcttcagcaaatcgaagcgacccagtaacactaaatgtactttatggaccagacggaccaacaatatcaccctcaaaagcaaactaccgaccaggtgaaaatctaaacttatcatgccatgcagcatcaaatcctccagcacaatacagctggttcataaacggaacttttcaacaatccacacaagaattatttatacccaacataacagtaaacaactccggttcatacatgtgccaagcacacaactcagcaacaggactaaaccgaaccacagtcacaatgataacagtctcaggatcagccccagtattatcagcagtagcaactgtaggaataactataggagtattagcaagagttgccctaatataa

SEQ ID NO: 3630 - RNA, 1173 nt, synthetic construct
  misc_feature 1..1173: note = AAB04533 variant
  source 1..1173: mol_type = other RNA
atgggagcaacaaccatggaccaaaaatcactatgggcaggagtagtagtattactcctcctacaaggtggaagcgcatacaaattagtatgctatttcacaaattggagccaagacagacaagaaccaggaaaatttaccccagaaaatatcgacccattcttatgcagccacttaatatactcatttgcatcaatagaaaacaacaaagtcataataaaagacaaatcagaagtaatgctataccaaactataaattcactcaaaacaaaaaacccaaaattaaaaatattactctcaataggaggatacctatttggatctaaaggattccaccccatggtcgattcatcaacatcaagactagaatttataaactcaataatactattcctaagaaatcacaatttcgacggactagacgtctcatggatatacccagatcaaaaagaaaatacacatttcactgtactaatacacgaactagcagaagcattccaaaaagacttcacaaaaagtacaaaagaacgattactattaacagcaggagtatcagcaggaagacaaatgatagacaactcataccaagtcgaaaaacttgctaaagaccttgactttataaaccttctatcatttgactttcatggatcatgggaaaaaccactaataaccggacacaactcacccttatccaaaggatggcaagacagaggaccatcatcatattacaacgtcgaatacgcagtaggatattggatacacaaaggaatgccatcagaaaaagtagtaatgggaatacccacatatggacacagcttcacattagccagtgcagaaacaacagtaggagctcccgcatcaggaccaggagcagcaggcccaataacagaatcttcaggattcctagcctactacgaaatttgtcaattcctaaaaggcgcaaaaataacaagactacaagaccaacaagtaccatatgcagtaaaaggcaaccaatgggtcggatacgatgatgtaaaatcaatggaaaccaaagtacaattcttaaaaaacttaaatctaggcggagccatgatctggagcatagacatggacgatttcacaggcaaaagctgtaatcaaggaccttaccccctagtacaagcagtaaaaagatcactcggatcactataa

SEQ ID NO: 3631 - RNA, 2832 nt, synthetic construct
  misc_feature 1..2832: note = AAD40367 variant
  source 1..2832: mol_type = other RNA
atgacacagagatcaatagcaggaccaatatgtaatttaaaattcgtaactctgctagtagcactatcctcagaactccccttcttaggcgcgggtgtacaattacaggataacggctacaacggacttctaatagcaataaatcctcaagttccagaaaaccaaaatctaatatcaaatattaaagaaatgataacagaagcatcattttatttatttaacgcaacaaaaagacgagtattctttagaaacataaaaattctaatcccagcgacctggaaagcaaataacaattcaaaaattaaacaagaatcatacgaaaaagcaaacgtaatagtgacggattggtatggcgcacacggagacgacccatatacactgcaatatcgaggctgtggtaaagaaggaaaatacatacattttactcctaactttctattaaatgacaacttaacagcaggctacgggtcacgaggcagagtctttgttcacgaatgggcacacctacgatggggagtattcgacgaatataacaatgataaaccattttatataaatggacaaaatcagataaaagtaactagatgttcaagcgatatcacaggaatattcgtttgcgaaaaaggaccttgcccccaagaaaactgtataatttccaaattatttaaagaaggatgcacttttatatataactctacccaaaacgcaacagctagcataatgtttatgcaatcactaagttccgtagtagaattttgtaatgcaagcacacataaccaagaagcgcccaatttacaaaatcaaatgtgttctctcagatcagcatgggacgtcataacagattcagcagattttcaccactcttttcccatgaatgggacagaactaccaccacctccaacattttcattagtacaagcaggagataaagttgtctgtctagtactagacgtatcctcaaaaatggctgaagcagacagattactacaattacaacaagcagcggagttttacttaatgcaaatagtagaaatacatacgttcgtcggcatcgcttcattcgattcaaaaggagaaattagagcacaacttcatcaaataaattcaaatgatgatcgaaaactgttagtctcatatttaccaaccacagtttccgcaaaaaccgatatctcaatttgtagcggtctaaagaaaggtttcgaagttgttgaaaaactaaatggaaaagcatatggttccgtcatgatcctcgtaacatctggcgatgataaactactcggaaactgtcttccaacagtgttatcatcaggaagcacaatacactctatcgcactaggatcctctgcagcaccgaacctagaagaattatctagactaacaggaggactcaaattctttgtacccgacatatcgaactcaaattcaatgattgatgcattttcacgcatatcttcaggcacaggagatatattccaacaacacatacaattggaatccacaggagaaaatgtcaaacctcaccatcaactcaaaaataccgtaactgtcgacaatacggtgggtaacgacacaatgtttttagtaacttggcaagcatcgggaccaccagaaatcatactattcgatccagacggtcgaaaatattacacgaataactttataactaatctaaccttcagaaccgcatcattatggataccaggcaccgctaaaccaggacattggacttataccttaaacaatacacaccattcattacaagccctgaaagtaacagtgacctcacgcgcctctaactcagctgtaccaccagctacagtagaagcgtttgttgaaagagatagtcttcattttccacatccagtaatgatatacgcaaatgtaaaacaaggattctatcctatcctcaatgccaccgttactgccaccgtagaacccgaaacaggagaccctgtaacgttacgacttcttgatgatggagcaggagctgacgtaatcaaaaatgatggaatatactccaggtatttcttttcatttgcagctaacggacgttatagtctaaaagtacatgtaaaccattccccatctatttcaacaccagctcatagcatccctggctcccatgcaatgtacgtaccaggctacacagcgaatggaaatatacaaatgaacgcacctcgtaaatccgtaggacgaaacgaggaagaaagaaaatggggattctctcgagtctcaagcggcggatcattctccgtcctaggagtacccgcaggaccacaccctgatgtattcccaccatgtaaaataattgatctagaagcagtgaaagtagaagaagaactcacactatcctggacagcaccaggcgaagacttcgatcaaggtcaagctacttcatatgaaataagaatgtctaaatcattacaaaacatccaagacgacttcaataatgcaatattagtaaatacatccaaaagaaacccccaacaagccggaatacgtgaaatatttacattcagcccacaaatctcaactaatggacctgaacaccaacctaatggagaaacacatgaaagtcacagaatttacgtcgcaatacgtgccatggaccgaaattctttacaatcagcagtctcaaacatcgcccaagcaccattgtttataccacctaatagtgatcctgtcccagcacgagattacctaatacttaaaggcgtactcacagcaatgggattaataggaataatatgtctaataatagtcgtcacacaccatactttatcacgcaaaaagagagcagataagaaagaaaatggcaccaaactattataa

SEQ ID NO: 3632 - RNA, 708 nt, synthetic construct
  misc_feature 1..708: note = AAF82135 variant
  source 1..708: mol_type = other RNA
atggaagaagaaacacatacagatgcaaaaataagagcagaaaacggaacaggaagtagcccaagaggaccaggatgtagtttaagacatttcgcatgcgaacaaaatttattaagtagaccagatggatcggcatcattcctacaaggggacacaagcgtactagcaggagtatacggaccagcagaagtaaaagtaagcaaagaaatattcaacaaagcaacattagaagtaatattaagaccaaaaataggattaccaggagtagcagaaaagagtagagaaagactaataagaaacacctgtgaagcagtcgtactcggaacattacacccaagaacaagcataacagtagtattacaagtagtatcagatgcaggatcactattagcatgttgcttaaacgcagcatgtatggcattagtagatgcaggagtaccaatgagagcactattttgcggagtagcatgcgcactagatagcgatggcacattagtattagatccaacaagcaaacaagaaaaagaagcaagggcagtactaacattcgcattagatagcgtagaaagaaaattactaatgagctcaacaaaaggattatactcagacacagaattacaacaatgcctagcagcagcacaagccgcaagccaacacgtattcagattctatagagaaagcctacaaagaagatatagcaaaagctaa

SEQ ID NO: 3633 - RNA, 1752 nt, synthetic construct
  misc_feature 1..1752: note = CCDS6312.1 variant
  source 1..1752: mol_type = other RNA
atggaagtagccgcaaactgttccctaagagtaaaaagaccactactagacccacgattcgaaggatacaaactatcacttgaaccactaccttgctaccaattagaactagacgcagcagtcgcagaagtaaaattaagagacgaccaatacaccttagaacacatgcacgcttttggaatgtacaactatttacactgcgattcatggtaccaagactcagtatactacatagacacactaggaagaatcatgaatttaacagtaatgctcgatacagcactaggaaaaccaagagaagtttttcgactacctactgacttaacagcatgcgacaaccgattatgcgcctcaatacacttcagttcatcaacatgggtcacactgagcgatggtacaggacgactatacgtcatcggaacaggagaaagaggaaattccgcatcagaaaaatgggaaatcatgttcaacgaagaattaggagacccttttataataattcattcaataagcctactaaacgcagaagaacacagtatagcaactctactactaagaatagaaaaagaagaactggacatgaaaggatcaggcttttacgtatcactagaatgggtaactatatcaaaaaaaaatcaagacaacaaaaaatacgaaataataaaaagagacatactaagaggaaaatcagtaccccattacgcagcaattgaaccagacggaaacggattaatgatcgtttcatacaaaagtttaacctttgtacaagccggacaagacttagaagaaaacatggacgaagacatatctgaaaaaataaaagaaccactctattactggcaacaaacagaagacgatttaactgtcacaattcgattaccagaagattcaaccaaagaagacatccaaatacaatttttacctgaccatattaacatcgtgttaaaagatcatcaattcttagaggggaaattatattcatcaatagatcatgaatccagtacatggatcataaaagaatccaatagtctagaaatatcactaataaaaaaaaacgaaggactaacatggccggaactagtaataggagataaacaaggagaattaataagagattcagcacaatgcgcagcaatagccgaacgtttaatgcatttaacatcagaagaattaaaccctaatccagataaagaaaaaccgccctgtaacgcccaagaattagaagaatgcgacatatttttcgaagaatcctcctcactatgtagattcgatggaaacactctaaaaacaacacacgtagtaaacctaggatcaaaccagtacctattttcagtaatagttgacccaaaagaaatgccatgcttttgccttagacacgatgtagacgcattactatggcaaccacattcaagcaaacaagacgatatgtgggaacacatagcaactttcaacgccctaggatacgtacaagcatcaaaacgagacaaaaaattttttgcatgcgcaccaaactactcctacgcagccctatgcgaatgtttaagaagagtatttatatacagacaaccagcaccaatgagtacagtattatacaatcgaaaagaaggaagacaagttggtcaagtagcaaaacaacaagtagcaagcttagaaaccaacgaccctatcctaggcttccaagcaacaaatgaacgactattcgtattaacaacaaaaaatttattcttaataaaagtaaacactgaaaactaa

SEQ ID NO: 3634 - RNA, 1563 nt, synthetic construct
  misc_feature 1..1563: note = CCDS41288.1 variant
  source 1..1563: mol_type = other RNA
atgagttcaccactagcatcactttcaaaaaccagaaaagttcccctaccctcagaaccaatgaaccctggaagaagaggaatacgaatatacggagatgaagacgaagtcgatatgttatcagacggatgtggtagtgaagagaaaatatccgtaccctcatgttacggtggaataggagctccagtaagtcgacaagtaccagcaagtcatgactcagaactcatggcatttatgacaagaaaactatgggatctagaacaacaagtaaaagcacaaacagacgaaatattatcaaaagaccagaaaattgcagcattagaagatttagtacaaacactaagaccacacccagcagaagcaacactacaaagacaagaagaactagaaacaatgtgcgtacaattacaaagacaagtaagagaaatggaaagatttctatcagattatggactacaatgggttggtgaaccaatggatcaagaagactcagaaagcaaaactgtatcagaacatggagaacgagactggatgacagcaaagaaattctggaaaccaggggactcattagcaccaccagaagtagacttcgaccgtctattagcatcattacaagatttaagcgagctagtcgttgaaggtgatacacaagtaacaccagtaccaggtggagctagattacgaacattagaaccaataccacttaaattatatagaaacggaataatgatgtttgacggaccattccaaccattctatgatccaagtacacaacgatgtctacgagatatcttagacggtttctttccatctgaactacaaagactatatcctaacggagtaccctttaaagtaagtgacttaagaaatcaagtttatttagaagacggtttagacccttttcctggagaaggaagagtagtaggtagacaactaatgcataaagccctagacagagtagaagaacatccaggatccagaatgacagccgaaaaatttctcaatagactgcctaaatttgttataagacaaggtgaagttatagatataagaggaccaataagagatacactacaaaattgctgcccgttacctgcaagaatacaagaaatcgtagtagaaacaccaacgttagcagctgaaagagaaagatcacaagaatcaccaaatacccctgcaccaccactatcaatgttaagaataaagtctgagaatggcgaacaagcatttttattgatgatgcaaccagacaacacaataggagacgttagagcactactagctcaagcaagagttatggatgcatcagcatttgaaatattttcaacatttcctccaacactatatcaagacgatacattaacactacaagctgctggcctagtacctaaagcagcactattattaagagcacgtagagcaccaaaaagcagcttaaaattttcaccaggaccatgtccaggaccaggaccaggtccaagcccaggaccaggcccaggaccaagtccaggacccggacccggaccatcaccttgtccaggaccctcaccaagtccccaataa

SEQ ID NO: 3635 - RNA, 429 nt, synthetic construct
  misc_feature 1..429: note = AAA88022 variant
  source 1..429: mol_type = other RNA
atggcaacaaaaatagataaagaagcatgtagagcagcatataacttagtaagagacgacggaagtgcagtaatatgggtaacattcaaatacgacggatcaacaatagtaccaggagaacaaggagcagaataccaacacttcatacaacaatgtacagacgacgtaagattattcgcattcgtaagatttacaacaggggatgcaatgagcaaaagatcaaaatttgcactaataacatggataggagaaaacgtaagcggactacaaagagcaaaaacaggaacagacaaaacattagtaaaagaagtagtacaaaactttgcaaaagaatttgtaataagcgacagaaaagaactagaagaagactttataaaaagcgaactaaaaaaagcaggaggagcaaattacgatgcacaaacagaataa

SEQ ID NO: 3636 - RNA, 495 nt, synthetic construct
  misc_feature 1..495: note = CCQ43891 variant
  source 1..495: mol_type = other RNA
atggcaacaagggatccatgggtatggatggcaagtccagattttcaagcaagaaaaggaaaaagagtacatcaagaaacattagcaccaggagaaacaaaagataaaatggaattattaggattaagaggaccattagatttattaggaccaggtgcattattagcaacattaggaaaaatggcaccaggagaacataaagcacaaagagcaccaaaagaaagtccagataaaacagcaagatgggcacaaagagatccacaaggaccaagagtaagtttagaatatttagaaagacgagcaacaatgggacatcaagcaagtttagatcatcaaggaccaagagcaagtcaaggagcatggggactaggagaaagaacagtatggacagtaccacaagatagacgaggaagtttagcaacagaagcaagaatggaattacaaggaccaggagtaccacaagcaagtagagcaagtagagaaacacaatggtaa

SEQ ID NO: 3637 - RNA, 1623 nt, synthetic construct
  misc_feature 1..1623: note = AAO18361 variant
  source 1..1623: mol_type = other RNA
atgggaccaggagaaagggcaggaggaggaggagatgcagggaaaggcaatgcagctggcggtgggggtggaggaaggtcagcaactacagctggaagtagagcggtatcagcactatgtttgttattgagtgtaggtagtgcagcagcttgtctgctattaggagtacaggcagcggctttacaaggtagagtagcagcattagaggaagaaagggaattattgagacgagcaggacctccaggagccttagacgcatgggcagaaccacatttagagagattattacgtgaaaagttagatggactagcgaaaataagaactgcaagagaagcaccaagtgaatgcgtatgcccaccgggcccaccgggaagaagagggaagccaggaagaagaggagatccaggccctccaggacaaagcggtagagatggatatccaggacctcttggattggatggtaaaccaggattaccagggccaaagggagaaaagggtgcaccaggagacttcggaccaagaggagaccaaggtcaagatggtgccgcaggaccaccaggaccaccaggaccaccaggagcaagaggaccaccgggagatactggaaaagatggcccaagaggagctcaaggaccggcaggaccaaaaggagaaccaggacaagatggagaaatgggacctaaagggccgccaggtcccaaaggtgaaccaggagtacctggaaagaaaggagatgatggaacaccaagccaaccaggaccaccgggaccaaaaggtgaacccggaagtatggggccacgaggcgaaaacggtgtagatggagcacctggaccaaaaggagaaccaggtcatagaggaacagatggtgcagcaggtccaagaggagcaccgggactcaaaggagaacaaggggatacggtagtaatagactatgatggtaggatattagatgctttaaaaggacctcctggaccgcaagggccaccaggaccaccaggtattccaggagcaaaaggagaattaggtttaccaggagcaccgggtatagatggagaaaaaggaccaaaaggacaaaaaggagatccaggagagccgggaccagcaggtctaaaaggagaagcaggggagatgggattatcagggttaccaggagcagatggcttaaaaggggaaaaaggtgaaagtgcaagcgattcattgcaagaatctctagcgcaattaatagtagaaccaggacctccgggacctccaggaccacctggcccaatgggattacaaggaatacaaggaccaaaaggtttggatggtgctaaaggggaaaaaggggcaagtggtgaaagagggccaagtggattaccgggtccagtgggacctcctggattaataggtctaccgggaacaaaaggagaaaaagggagaccaggtgagccaggattggatggatttccaggaccaagaggagaaaaaggtgatagatcagaaaggggtgaaaaaggagaaagaggtgtaccaggaagaaaaggagttaaaggacaaaaaggagaacctggaccaccaggattagatcagccttgtcctgtgggcccagatggactaccagttccgggttgttggcataaatga

SEQ ID NO: 3638 - RNA, 492 nt, synthetic construct
  misc_feature 1..492: note = CAG25548 variant
  source 1..492: mol_type = other RNA
atgctagcaagagcactactactatgcgcagtactagcactatcacacacagcaaacccctgctgctcacacccatgccaaaacagaggagtatgcatgtcagtaggattcgaccaatacaaatgcgactgcacaagaacaggattctacggagaaaactgctcaacaccagaattcctaacaagaataaaattattcctaaaaccaacaccaaacacagtacactacatactaacacacttcaaaggattctggaacgtagtaaacaacataccattcctaagaaacgcaataatgtcatacgtattaacatcacgatcacacctaatagactcaccaccaacatacaacgcagactacggatacaaatcatgggaagcattctcaaacctatcatactacacaagagcattaccaccagtaccagacgactgcccaacaccactaggagtaaaagcactacacgcatcagtattccaagacagatcataa

SEQ ID NO: 3639 - RNA, 1632 nt, synthetic construct
  misc_feature 1..1632: note = AAC50809 variant
  source 1..1632: mol_type = other RNA
atgggaacatcattatcacccaatgatccatggccactcaatcctctttcaattcaacaaacaacactacttttattattatctgttctcgctactgtacatgtaggtcaaagattattaagacaaagaagaagacaactaagatcggctcctccaggcccgtttgcatggcccctaattggaaacgcagccgctgttggacaagcagcacatctatccttcgcaagattagcaagacgatatggagatgtgtttcaaataagattaggatcttgtcccatagtagttctaaatggtgaaagagcaatacatcaagctctagtacaacaaggatcagcatttgcagatagaccagcttttgcatcctttagagtagtatctggaggtagatcaatggcatttggacattacagtgaacattggaaagtacaaagacgagcagcacattcgatgatgagaaatttctttacacgacaacccagatctcgacaagttttagaaggccatgttttgtctgaagctagagaattagtcgctttattagttcgcggatcagctgatggcgcattcttagatccaagacccctcactgtagtagcagttgcaaatgttatgtccgctgtatgttttggttgtagatattcacatgatgaccctgaatttagagaactactatcacacaacgaagaatttggacgtaccgtaggagcaggatccctagttgacgtaatgccatggttacaatattttccaaatccagtaagaacagtttttagagagttcgaacaactaaatagaaatttctcaaatttcatattagataaatttttaagacactgcgaatctttaagaccaggtgcagcacctagagacatgatggatgcttttatactctcagctgaaaagaaagcagcaggagactctcacggaggtggagctcgattagatttagaaaacgtcccagcaactataactgatatatttggagcttctcaagatactctatcaactgctctacaatggttactcctactattcactcgataccctgatgttcaaacacgagtacaagctgaactagatcaagtagtcggtagagacagattaccatgtatgggagaccaaccaaacttaccttacgttctcgcattcctatatgaagccatgagattttcatcattcgtcccagtcacaataccacatgccaccactgctaacacttcagtattaggatatcacataccaaaagatactgttgtttttgtaaatcaatggtcagtaaatcacgacccgctcaaatggccaaatcccgaaaattttgatcctgcaagatttttagataaagatggactaataaacaaagatttaacatcaagagtaatgatattcagcgttggtaaaagaagatgcattggagaagaactttcaaaaatgcaattatttctattcatatcaatattagcacatcaatgcgactttagagctaaccctaacgaaccagcaaaaatgaacttttcatatggacttacaataaaaccaaaatctttcaaagttaatgtaaccctaagagaaagtatggaattactagattcagcagtacaaaatctacaagcaaaagaaacatgtcaataa

SEQ ID NO: 3640 - RNA, 333 nt, synthetic construct
  misc_feature 1..333: note = NM_001129828 variant
  source 1..333: mol_type = other RNA
atgtggatgggactaatacaattagtagaaggagtaaaaagaaaagatcaaggattcttagaaaaagaattttaccataaaacaaacataaaaatgagatgtgaatttctagcatgctggccagcattcacagtattaggagaagcatggagagatcaagtagactggagcagactactaagagatgcaggattagtaaaaatgagcagaaaaccaagagcaagctcaccactaagcaataaccatccaccaacaccaaaaagattcccaagacaaccaggaagagaaaaaggaccaataaaagaagtaccaggaacaaaaggaagcccataa

SEQ ID NO: 3641 - RNA, 384 nt, synthetic construct
  misc_feature 1..384: note = NM_001129826 variant
  source 1..384: mol_type = other RNA
atgtggatgggactaatacaattagtagaaggagtaaaaagaaaagatcaaggattcttagaaaaagaattttaccataaaacaaacataaaaatgagatgtgaatttctagcatgctggccagcattcacagtattaggagaagcatggagagatcaagtagactggagcagactattaagagatgcaggattggtaaaaatgagcagaaaaccaagagcaagctcaccactaagtaataaccatccaccaacaccaaaaagaagaggaagcggaagacatccattaaacccaggaccagaagcactatcaaaatttccaagacaaccaggaagagaaaaaggaccaataaaagaagtaccaggaacaaaaggatcaccataa

SEQ ID NO: 3642 - RNA, 570 nt, synthetic construct
  misc_feature 1..570: note = AAI40914 variant
  source 1..570: mol_type = other RNA
atgacagataaaacagaaaaagtagcagtagatccagaaacagtattcaaaagaccaagagaatgcgatagcccaagttatcaaaaaagacaaagaatggcattattagcaagaaaacaaggagcaggagactcactaatagcaggaagcgcaatgtcaaaagcaaaaaaattaatgacaggacacgcaataccaccatcacaattagactcacaaatagacgatttcacaggatttagcaaagacagaatgatgcaaaaaccaggaagtaatgcaccagtaggaggaaacgtaacaagctcattcagtggagatgacttagaatgcagagaaacagcaagctcaccaaaaagccaaagagaaataaatgcagacataaaaagaaaactagtaaaagaactaagatgcgtaggacaaaaatatgaaaaaatatttgaaatgctagaaggagtacaaggaccaacagcagtaagaaaaagatttttcgaaagcataatcaaagaagcagcaaggtgcatgagaagagactttgtaaaacacttaaaaaaaaaattaaaaagaatgatataa

SEQ ID NO: 3643 - RNA, 795 nt, synthetic construct
  misc_feature 1..795: note = AAH20662 variant
  source 1..795: mol_type = other RNA
atgctcagactactaagattagcattggcattttacggaagaacagcagatccagcagaaagacaaggaccacaacaacaaggattaccacaaggagatacacaactaacgacagtacaaggagtagtaacatcattttgtggagattatggaatgatagacgaaagcatatactttagctcggacgtagtaacaggaaatgtaccactaaaagtaggacaaaaagtaaatgtcgtagtagaagaagataaaccacattatggattgagagcaataaaagtagatgtagtaccaagacacttatatggagcaggaccatcagactcgggcacaagagtactaataggatgtgtaacaagcataaacgaagataatatatacatatcaaattcaatatatttctcaatagcaatagtaagtgaagattttgtaccatacaaaggagatctattagaagtagaatatagtacagaaccaggaataagcaatataaaagcaacgagcgtaaaaccaataagatgcatacacacagaagaagtatgcataacaagtgtacacggaagaaatggtgtaatagattatacaatatttttcacactagatagcgtaaaattacccgacggatatgtaccacaagtagacgatatagtaaacgtagtaatggtagaaagcatacaattttgttttatatggcgagcaatatcaataacaccagtacacaaaagttcaagcggattccaagacgatggaggactaggaagaccaaaaagagaaagaagaagtcaatcaatataa

SEQ ID NO: 3644 - RNA, 2844 nt, synthetic construct
  misc_feature 1..2844: note = CCDS735.1 variant
  source 1..2844: mol_type = other RNA
atgtcattaccatccagacaaaccgcaataatagtcaacccacccccgcctgaatatataaatacaaagaaaaatgggagactaactaatcaactacaatatctacagaaagtcgtcctaaaagacctatggaaacactcattctcatggcccttccaaagaccagtagacgctgtgaaactgcaacttcctgattactacacaattattaaaaatccgatggacctgaatacaattaagaaacgactagaaaacaaatactatgcaaaagcatctgaatgcatagaagactttaacacaatgttttccaattgttatctctacaataaacccggcgacgacatagttttaatggcccaagcactagaaaaattatttatgcagaaattatcacaaatgccacaagaggaacaagtagtcggcgtaaaagaaagaataaagaaaggaacacaacaaaatatcgcagtatcatcagcaaaagaaaaatcatctcccagcgcgaccgaaaaagtgtttaaacaacaagaaataccgtcagtattccctaaaacgtcaataagtcctttaaacgtagtacaaggagcatccgttaactcatcatcacaaacagcagctcaagtaacaaaaggagtaaaacgaaaagcagacacaacaacaccagcaacatctgcagttaaagcaagcagcgagttcagcccaacattcacagagaaaagtgtagcactaccaccaataaaagaaaatatgcccaaaaacgtactaccagacagccaacaacaatataacgtagttaaaacagtaaaagttactgaacaactacgacattgcagtgaaattttaaaagaaatgttagcgaagaaacatttttcatatgcctggccattttataatccagtagatgtcaacgcactcggattacacaactattacgacgtcgttaaaaacccaatggatctgggcacgataaaagagaaaatggataaccaagaatataaagatgcgtacaaattcgctgctgacgtaagactcatgtttatgaactgctataaatataacccgccagaccacgaagtagtaaccatggccaggatgctacaagatgtttttgaaacacatttcagcaaaatccccatagaacccgtagaaagtatgccactatgttacataaaaactgatataacagaaacaacgggcagagaaaacacaaatgaagcaagtagcgaaggaaactcatctgacgactcagaagacgaacgtgtcaaacgactagcaaaattgcaagaacaattaaaagcagtacatcagcaactacaagtactctcccaagtcccattcagaaaactaaataaaaagaaagaaaaatctaagaaagagaaaaagaaagaaaaagtgaacaatagcaacgaaaatccacgaaaaatgtgtgaacagatgagactaaaagaaaaatcaaaaaggaaccagcccaagaaacgtaaacaacaattcatagggctaaaatcagaagacgaagacaatgcaaaaccaatgaactacgacgagaaaagacaattatccttaaacataaataaattaccaggagacaaacttgggagagttgtacatataatacaatctagagaaccctccctatcaaattcaaaccccgatgaaatagaaatagatttcgaaactctaaaagcaagcacactgagggaattggaaaaatatgtaagcgcatgcttaagaaaaagacctttaaaaccaccagcaaagaaaataatgatgtccaaagaagaattacatagtcaaaagaaacaagaattagagaaaagattattggacgtaaataaccaactaaattcaagaaaacgacaaaccaaatccgacaaaacacaaccatccaaagcagtagaaaatgtatcacgtctatcagaaagttcaagttcatcttcctcctcaagtgaaagcgaatcttcctcatcagacctctcaagctccgattcatcagactcggaatcggaaatgttcccaaaatttacagaagtcaaaccaaacgattcaccgtcaaaagaaaatgtaaagaaaatgaaaaatgaatgcatccctccagaaggaagaacaggtgtcactcaaataggatattgcgtccaagacactacatctgctaacacaacattagtacaccaaacaacaccctctcatgtaatgccaccaaaccatcaccaactagcattcaattaccaagaactagaacatctgcaaacagtcaaaaatatatcaccactacaaatcctaccaccatcaggtgactcagaacaattatctaatggaataacagtcatgcacccgtctggagacagcgatacaacaatgttagaatcagaatgccaagcaccagtacaaaaagatatcaaaattaaaaatgcggattcatggaaatcattaggcaaacccgtcaaaccctcaggagtgatgaaatcatcagacgaactattcaaccaattcagaaaagcagccatagaaaaagaagtaaaagcaagaacacaagaactaatacgaaaacatttagaacaaaataccaaagaactcaaagcatctcaagaaaatcaaagagatttaggaaatggattgaccgttgaatccttttccaataaaatccaaaataaatgctccggagaagaacaaaaagaacaccaacagtcctcggaagcacaagacaaaagcaaattatggctattaaaagatagagacttagcccgccaaaaagaacaggaaagaagaagaagagaagcaatggtaggcactatagatatgaccctacaatcagacataatgactatgttcgaaaacaatttcgactaa

SEQ ID NO: 3645 - RNA, 543 nt, synthetic construct
  misc_feature 1..543: note = CCDS35455.1 variant
  source 1..543: mol_type = other RNA
atgcaagcagaaggaagaggaacaggaggatcaacaggagatgcagatggaccaggaggaccaggaataccagatggaccaggaggaaatgcgggaggacccggagaagcaggagcaacaggaggaagaggaccaagaggagcaggagcagcaagagcaagtggaccaagaggaggagctccaagaggaccacatggaggagcagcaagtgcacaagatggaagatgtccatgtggagcaagaagaccagatagcagattattagaattacatataacaatgccattttcaagtccaatggaagcagaattagtacgaagaatattaagtagagatgcagcaccattaccaagaccaggtgcggttttaaaagattttacagtatcaggaaatttactatttataagattaacagcagcagatcatagacaattacaattaagtataagctcatgtttacaacaactatcattattaatgtggataacacaatgttttctaccagtatttttagcacaagcaccatcaggacaaagaagataa

SEQ ID NO: 3646 - RNA, 633 nt, synthetic construct
  misc_feature 1..633: note = CAA10196 variant
  source 1..633: mol_type = other RNA
atgcaagcagaaggacaaggaactgggggaagcacaggagatgcagatggaccgggaggaccaggaataccagatggaccaggtggaaatgcaggaggaccaggagaagcaggagcaacaggaggaagaggaccaagaggagcaggagcagcaagagcaagtggaccaagaggaggagcaccgagaggaccacatggaggagcagcaagtgcacaagatggaagatgtccatgtggagcaagaagacctgatagtagattactacaactacatataacaatgccattttcaagtccaatggaagcagaattagtaagaagaatattatcaagagatgcagcaccattaccaagaccaggagcagtattaaaagattttacagtatcaggaaatttattatttatgagtgtaagagatcaagatagagaaggagcaggaagaatgagagtagtaggatggggattaggaagtgcaagtccagaaggacaaaaagcaagagatttaagaacaccaaaacataaagtaagtgaacaacgaccaggaacaccaggaccgccaccacctgaaggagcacagggagatggatgtagaggggtagcatttaatgtaatgtttagcgcaccgcatatataa

SEQ ID NO: 3647 - RNA, 1992 nt, synthetic construct
  misc_feature 1..1992: note = CCDS13459.1 variant
  source 1..1992: mol_type = other RNA
atggcagcgactgaaatatcagtactatcagaacaattcacaaaaataaaagaacttgaattaatgcctgaaaaaggactaaaagaagaagaaaaagacggtgtctgtagagaaaaagaccatcgatctccatcagaactcgaagcagaaagaacatcaggagcattccaagactcagtactagaagaagaagtcgaactcgtcctggcaccgtctgaagaaagcgaaaaatatatactaacacttcaaacagttcattttacatccgaggcagttgaattacaagacatgtcactattatcaattcaacaacaagaaggagtacaagtagtagtacaacaaccaggaccaggcctactatggttagaagaaggaccaagacaatcactacaacaatgcgtagcaatatcaatacaacaagaactatattcaccacaagaaatggaagtactacaattccacgcactagaagaaaacgtcatggtagccagtgaagattcaaaactagcagtcagtttagcagaaaccacaggattaataaaactagaagaagaacaagagaaaaaccaactattagcagaaagaacaaaagaacaactatttttcgtcgagacaatgagtggagacgaaagatcggatgaaatagtattgacagtaagcaattcaaatgtagaagaacaagaagaccaacccacagccggacaagcagatgcagaaaaagcaaagagtaccaaaaatcaaagaaaaactaaaggcgccaaaggtacttttcattgcgatgtatgcatgtttacatcatcaagaatgtcatcatttaacaggcatatgaaaacccataccagtgaaaaaccgcacctatgtcatctctgcttaaaaaccttcagaacagtaacattactacgcaaccacgttaatacacacacaggcacaagaccatacaaatgcaatgattgtaacatggcattcgttacatcaggagaattagttaggcatagaagatacaaacatacacatgaaaaaccattcaaatgctcaatgtgtaaatacgcctcagtagaagcaagtaaacttaaacgacatgtaaggagccacacaggagaaagaccattccaatgctgccaatgttcatacgcatcaagagacacctacaaactcaaaagacatatgcggacacattcaggcgaaaaaccatatgaatgccacatatgccatacaagatttacacaatccggaacaatgaaaatccacatattacaaaaacacggggaaaacgtaccaaaataccaatgcccacactgtgcaaccataatagcaagaaaatcagacttaagagtacatatgagaaacctacatgcatactcagccgcagaacttaaatgccgatactgttcagcagtctttcatgaaaggtacgcattaatccaacaccagaaaacacataaaaacgagaaaagattcaaatgtaagcattgttcctatgcttgcaaacaagaaagacatatgacagcccatatacgaacacacacaggagaaaaaccattcacatgcctcagctgtaataaatgttttagacaaaaacaacttctcaatgcccactttagaaaatatcacgatgcaaactttatccctacagtatataaatgctccaaatgcggcaaaggattctcacgctggataaacttacatagacacagtgaaaaatgtggaagcggagaagcaaaatcagcagcctcgggaaaaggacgaagaacaagaaaaagaaaacaaacaatactaaaagaagccaccaaaggacaaaaagaagccgcaaaaggatggaaagaagcagctaacggagacgaagcagcagcagaagaagcctcaacaacaaaaggagaacaattcccaggagaaatgtttccagtagcatgtagagagacaactgctagagtaaaagaagaagtagacgaaggagtaacatgcgaaatgttattaaacacaatggacaaataa

SEQ ID NO: 3648 - RNA, 2148 nt, synthetic construct
  misc_feature 1..2148: note = CCDS11368.1 variant
  source 1..2148: mol_type = other RNA
atgtcacaagttatgtcatcgccacttttagctgggggacatgcagtgtcactagcaccatgtgatgaaccaagaagaacacttcaccctgcaccatccccctcattacccccacaatgctcttactatactacagaaggatggggcgctcaagccctcatggcccctgtcccttgtatgggaccacccggtcgattacaacaggcaccacaagtagaagccaaagctacatgttttctaccttcacctggagaaaaagccttaggaactccagaagatttagactcttacatagacttttcattagaaagtctaaatcaaatgattttagaactagacccaacatttcaactacttcctccaggaacaggaggatcacaagcagaactagcacaatcaaccatgtcaatgcgaaagaaagaagaatcagaagcactagatataaaatatatagaagttacttctgcaagatcacgctgccacgacggaccacaacactgttcctcaccttctgtcacccctccattcggatcattaaggagtggaggacttttactatctagagatgtacccagagaaacacgctcatcctcagaatcattaatattttcaggaaaccaaggaagaggacaccaacgaccactacccccatctgaaggcctatctcctagaccacctaattcaccttcaatttcaattccatgcatgggctctaaagcctcatcaccacatggactaggatctccattagtagcatcaccacgtctagagaaaagacttggcggacttgcaccccaacgaggctcacgaatttcagttctttctgcctcaccagtaagtgatgtatcatacatgttcggttcctcccaatcactacttcactcctcaaattcctcccaccaatcttcatcacgttcattagaaagtcccgctaactcatcatcatccctacattccttaggatccgtttctctgtgtacccgaccatcagatttccaagcacccagaaaccccactttaacaatgggacagcctagaactccacattctcctcccttagccaaagaacatgccagctcttgcccaccatcaattacaaattcaatggtagacataccaatcgtactaataaacggatgcccagaaccgggttcatctcccccacaaagaactccaggccatcaaaactctgtacaaccaggagcagcctctccatctaatccatgtccagccacaagatcaaattcacaaacactatctgatgctcctttcaccacttgtccagaaggacctgcccgcgacatgcaacctaccatgaaattcgtcatggatacatctaaatactggttcaaacccaatataacacgagaacaagcaatagaattactacgtaaagaagaacccggcgcatttgtaattcgagacagttcatcatacagaggatcttttggactagctttaaaagttcaagaagtacctgcatcagctcaatcaagacctggagaagactcaaacgatctaataagacatttcttaatagaatcttcagcaaaaggagtacacctcaaaggagcagatgaagaaccttactttggttccctctcagcctttgtatgtcaacactcaattatggcattagctctcccatgcaaactaaccattccacaacgcgaactaggtggagcagatggggcaagtgactccacagactctccagcctcatgccaaaagaaatcagcaggatgtcatactctatatctatcttcagtatctgtagaaacattaacaggtgccttagcagttcaaaaagcaatatcaaccacatttgaacgtgatatactaccaaccccaactgttgtccacttcaaagtaactgaacaaggaataacactaacagatgttcaaagaaaagtatttttcagacgacattacccactaacaactctaagattttgtggaatggacccagaacaaagaaaatggcaaaaatattgcaaaccttcctggatttttggtttcgttgctaaatcccaaactgaaccacaagaaaacgtatgtcatctatttgcagaatatgatatggttcaacccgcatcacaggtaattggattagtaacagccttacttcaagacgctgaaagaatgtaa

SEQ ID NO: 3649 - RNA, 1302 nt, synthetic construct
  misc_feature 1..1302: note = AAH06510 variant
  source 1..1302: mol_type = other RNA
atggccctaagagtaacaagaaattcaaaaataaacgctgaaaataaagcaaaaattaacatggcaggcgcaaaaagagtaccaacagcacccgccgcaacatcaaaacccggcctaagacccagaacagcactaggtgacataggaaacaaagtaagcgaacaactacaagcaaaaatgccaatgaaaaaagaagccaaaccatcagccaccggaaaagtaatagacaaaaaattaccaaaaccactagaaaaagtaccaatgctagttccagtaccagtatcagaaccagtacccgaacccgaaccagaacccgagccagaaccagtaaaagaagaaaaactatcacccgaaccaatactagtagacacagcaagcccttcaccaatggaaacaagcggatgcgcaccagccgaagaagacctatgtcaagcattctcagacgttatattagcagttaatgacgtagatgcagaagacggagcagacccaaatctatgctcagaatacgtaaaagacatatatgcatacttaagacaactagaagaagaacaagccgtaagacccaaatacttattaggcagagaagtcacaggaaacatgagagcaatcttaatagactggctcgtacaagtacaaatgaaattcagattattacaagaaactatgtacatgaccgtatcaataatagacagattcatgcaaaacaactgcgtaccaaaaaaaatgttacaactagtaggagtaacagccatgttcatagcctcaaaatacgaagaaatgtaccccccagaaataggtgacttcgcattcgtaaccgacaatacatatacaaaacatcaaataagacaaatggagatgaaaatactaagagcactaaacttcggattaggcagaccactaccactacacttcctgagacgagcatcaaaaataggagaagtagatgtagaacaacacactttagcaaaatatttaatggaactaacaatgctagactacgacatggtccacttcccaccatcacaaatcgcagcaggcgcattctgcctagcactaaaaatactagacaatggagaatggacaccaacattacaacactacctctcatacacagaagaatcattacttcctgtcatgcaacatctagcaaaaaacgtagttatggtaaatcaaggactaaccaaacacatgacagtaaaaaataaatatgcaactagcaaacacgcaaaaatatcaaccctaccccaactaaactctgcactagtacaagacttagcaaaagcagtagcaaaggtataa

SEQ ID NO: 3650 - RNA, 888 nt, synthetic construct
  misc_feature 1..888: note = AAA58392 variant
  source 1..888: mol_type = other RNA
atggagcatcaattattatgctgtgaagtagaaacgatcagaagagcatacccagatgcaaacttgcttaatgacagagtattaagagcaatgctaaaagcagaagaaacatgtgcaccaagtgttagctatttcaaatgcgtacaaaaagaagtactaccaagcatgagaaaaatagtagcaacatggatgctagaagtatgcgaagaacaaaaatgcgaagaagaagtctttccattagcaatgaactatctagatcgatttctatcactagaaccagtgaaaaaaagtagactacaactactaggagctacatgtatgtttgtagcgagcaaaatgaaagaaacaatcccactaacagcagaaaaactatgcatatacacagacaatagcataagaccggaagaattactacaaatggaattactattagtaaataaattaaaatggaatttagccgcaatgacaccacatgactttatagaacattttttatcaaaaatgcctgaagcagaagaaaataaacaaatcataagaaaacacgcacaaacattcgtagcattatgcgcaactgatgtcaaattcataagcaatccaccgagcatggtagcagcaggaagcgtagtagcagcagtacaaggactaaacctaagaagcccaaacaacttcttaagctactacagactaactcgatttttatcaagagtgataaaatgcgatccagattgcctaagagcgtgccaagaacaaatagaagccctattagaatcatcattaagacaagcacaacaaaacatggacccaaaagcagcagaagaagaagaagaagaagaagaagaagtagatctagcatgcacaccaactgacgtaagagacgtagatatataa

SEQ ID NO: 3651 - RNA, 651 nt, synthetic construct
  misc_feature 1..651: note = AAA36601 variant
  source 1..651: mol_type = other RNA
atgctaagattaagtgaaagaaatatgaaagtattactagcagcagcattaatagcaggatccgtattctttttattactaccagggccaagtgcagcagatgaaaaaaaaaaaggaccaaaagtaacagtaaaagtatacttcgacctaagaataggagatgaagatgtaggaagagtaatatttggactattcggaaaaacagtaccaaaaactgtagataactttgtagcactagcaacaggagaaaaaggatttggatataaaaatagcaaatttcatagagtaataaaagactttatgatacaaggaggagatttcacaagaggagacggaacaggaggaaaatcaatatatggagaaagattcccagacgaaaactttaaattaaaacattacggaccaggatgggtaagcatggcaaatgcaggaaaagatacaaatggaagccaatttttcataacaacagtaaaaacagcatggttggacggaaaacatgtagtattcggaaaagtactagaaggaatggaagtagtaagaaaagtagaaagtacaaaaacagatagcagagataaaccattaaaagatgtcataatagcagactgtggaaaaattgaagtagaaaaaccattcgcaatagcaaaagaataa

SEQ ID NO: 3652 - RNA, 1044 nt, synthetic construct
  misc_feature 1..1044: note = AAD10634 variant
  source 1..1044: mol_type = other RNA
atgcctagaggacaaaaatcaaaattaagagcaagggaaaaaagaaggaaagcaagagaagaaacacaaggactcaaagtagcacacgcaacagcagcagaaaaagaagaatgtccatcaagctcgccagtactaggagacactccaacaagctcaccagcagcaggaatccctcaaaaacctcaaggtgcaccacccactacgacagcagcagcagcagtaagttgtacagaaagcgatgaaggagcaaaatgccaaggagaagaaaacgcaagtttctctcaagcaacaacaagcacagaatcaagcgtaaaagatccagtagcatgggaagcaggaatgttaatgcactttatacttagaaaatacaaaatgagagaaccaataatgaaagcagatatgctaaaagtagtggacgaaaaatataaagatcactttacagaaatattaaacggagcttcaagaagattagaactagtattcggattagatctaaaagaagataatccaagcgggcacacatacacattagtttccaaattaaatttaactaacgatggaaatctaagtaacgattgggatttcccaagaaacggattgctaatgccattactaggcgtaattttcttaaaaggtaactcagcaacagaagaagaaatatggaaattcatgaacgtattaggagcatacgacggagaagaacacctaatctatggagaaccaagaaaatttatcacacaagaccttgtacaagaaaaatatttaaaatatgaacaagtaccaaatagcgatccaccaagatatcaatttctttggggcccgcgagcatacgcagaaacaacaaaaatgaaagtattagaattcttagcaaaaatgaacggagcaacaccaagagacttcccatcacactatgaagaagcattaagagacgaagaagaaagagcacaagtaaggagttcagtaagagcaagacgaagaacaacagcaacaacatttagagcgagaagtagagcaccatttagcagaagcagtcatcccatgtaa

SEQ ID NO: 3653 - RNA, 2436 nt, synthetic construct
  misc_feature 1..2436: note = BAF91373 variant
  source 1..2436: mol_type = other RNA
atggaatcacaaggagttccacccggaccatatagggcaacaaaactttggaacgaagtcacaacatcatttagggcaggaatgcctctacgcaaacacagacaacatttcaaaaaatacggaaactgctttacagcaggagaggccgttgactggctgtatgatctactacgaaataatagcaacttcggcccagaagtcactagacaacaaacaatacaactattaaggaaattcctaaaaaaccatgttatagaagacataaaaggtagatggggatccgaaaacgttgatgacaacaatcagttattccgtttccctgcaacttcccccctcaaaacattgccccgacgctatcctgaactaagaaaaaacaatatagaaaatttttccaaagacaaagactcaatatttaaattaagaaacctaagccgaagaacgccaaaacgccacggactacatttatcccaagaaaatggagaaaaaataaaacacgaaataataaacgaagaccaagaaaacgccattgacaacagagaattatctcaagaagatgtcgaagaagtttggagatatgtaatcctaatttaccttcaaacaatactaggagtcccttcactcgaagaagtaataaatcctaaacaagtaataccccaatatatcatgtacaatatggcaaatacttccaagcgcggagtagttatacttcaaaacaaatccgacgatcttccacactgggtactatccgctatgaaatgcttagcaaactggccacgatcaaatgacatgaacaaccctacatatgtaggcttcgaacgagatgtattccgaacaatcgccgactacttcctagatttacccgaacccctattaacttttgaatactatgaattattcgttaacatactcgtagtttgtggctatataacagtctcggatagatccagtggaatacataagatacaagacgacccccaatcatcaaaattcctgcatttaaataacctaaactcattcaaatcgacagaatgcctcttactatcattactgcaccgtgaaaaaaataaagaagaatccgactcaacagaacgattacaaatttcaaaccccggattccaagaaagatgtgctaaaaaaatgcagctagtaaatcttagaaatagacgcgtctcagcaaacgacataatgggaggatcatgccacaatttaataggtctatcaaacatgcatgatctttcatcgaattcaaaaccacgctgctgctcacttgaaggaatagttgacgtacctggcaacagcagtaaagaagcatcctctgtgtttcaccaatctttccctaatatagaaggacaaaacaacaaactatttctagaatcaaaacctaaacaagaattcctcctaaacctacactctgaagagaatatacaaaaaccattctccgccggcttcaaaagaacatcaacacttacagtacaagatcaggaagaactttgcaacggaaaatgcaaatccaaacaactgtgccgctcacaatcactcttattaagatcctcaacaagacgtaactcatatattaatacacccgtagccgaaataattatgaaaccaaacgtaggccaaggatcaacatctgtacagacagctatggaatctgaactaggagaaagcagcgcaaccataaataaacgattatgcaaatcaacaatagaattaagtgaaaactccttattaccagcttcatcaatgctcacaggaacccaatccttactacaaccacacctagaaagagtagctattgatgcactacaactttgctgcttactactaccacctccaaatagacgcaagctacaactactcatgaggatgatatccagaatgtcacaaaacgtagacatgcccaaactacatgatgccatgggaacacgatcattaatgatacacacattctccagatgcgtcctgtgttgtgcagaagaagtagatctagacgaactcttagccggtagattagtatcatttttaatggaccaccaccaagaaatactacaagtcccctcatatctacaaacagcagtcgagaaacatctagattacctaaaaaaaggacacatcgaaaatcccggagacggactgttcgctccactaccgacctattcatactgtaaacaaatatctgcccaagaatttgatgaacaaaaagtttccacatcccaagcagcaatagcagaactccttgaaaacataatcaaaaatagatccttacctctaaaagaaaaaagaaaaaaattaaaacaatttcaaaaagaataccccctaatctatcaaaaaagatttccaacaacagaatccgaagctgcattattcggagataaacccaccattaagcaacccatgctaattctacgcaaaccgaaattcagatcacttcgctag

SEQ ID NO: 3654 - RNA, 297 nt, synthetic construct
  misc_feature 1..297: note = AAA46940 variant
  source 1..297: mol_type = other RNA
atgcacggagacacaccaacattacacgaatacatgctagacctacaaccagaaacaacagacttatactgttacgaacaattaaacgacagctcagaagaagaagacgaaatagacggaccagcaggacaagcagaaccagacagagcacactataacatagtaacattctgttgcaaatgcgacagcacactaagactatgtgtacaaagcacacacgtagacataagaacattagaagacttactaatgggaacattaggaatagtatgcccaatatgcagccaaaaaccataa

SEQ ID NO: 3655 - RNA, 318 nt, synthetic construct
  misc_feature 1..318: note = AAA46947 variant
  source 1..318: mol_type = other RNA
atgcacggaccaaaagcaacattacaagacatagtactacacctagaaccacaaaacgaaataccagtagacctactatgccacgaacaactatcagactcagaagaagaaaacgacgaaatagacggagtaaaccaccaacacctaccagcaagaagagcagaaccacaaagacacacaatgctatgcatgtgctgcaaatgcgaagcaagaataaaactagtagtagaatcatcagcagacgacctaagagcattccaacaactattcctaaacacactatcattcgtatgcccatggtgcgcatcacaacaataa

SEQ ID NO: 3656 - RNA, 297 nt, synthetic construct
  misc_feature 1..297: note = AAA46951 variant
  source 1..297: mol_type = other RNA
atgagaggagaaacaccaacactacaagactacgtactagacctacaaccagaagcaacagacctacactgctacgaacaactaccagactcatcagacgaagaagacgtaatagactcaccagcaggacaagcagaaccagacacatcaaactacaacatagtaacattctgctgccaatgcaaatcaacactaagactatgcgtacaatcaacacaagtagacataagaatactacaagaactactaatgggatcattcggaatagtatgcccaaactgctcaacaagactataa

SEQ ID NO: 3657 - RNA, 294 nt, synthetic construct
  misc_feature 1..294: note = AAA46959 variant
  source 1..294: mol_type = other RNA
atgagaggacacaaaccaacactaaaagaatacgtactagacctatacccagaaccaacagacctatactgctacgaacaactatcagactcatcagacgaagacgaaggactagacagaccagacggacaagcacaaccagcaacagcagactactacatagtaacatgctgccacacatgcaacacaacagtaagactatgcgtaaactcaacagcatcagacctaagaacaatacaacaactactaatgggaacagtaaacatagtatgcccaacatgcgcacaacaataa

SEQ ID NO: 3658 - RNA, 300 nt, synthetic construct
  misc_feature 1..300: note = AAA46967 variant
  source 1..300: mol_type = other RNA
atgcacggagaaataacaacactacaagactacgtactagacctagaaccagaagcaacagacctatactgctacgaacaactatgcgactcatcagaagaagaagaagacacaatagacggaccagcaggacaagcaaaaccagacacatcaaactacaacatagtaacatcatgctgcaaatgcgaagcaacactaagactatgcgtacaatcaacacacatagacataagaaaactagaagacctactaatgggaacattcggaatagtatgcccaggatgctcacaaagagcataa

SEQ ID NO: 3659 - RNA, 330 nt, synthetic construct
  misc_feature 1..330: note = AAA47051 variant
  source 1..330: mol_type = other RNA
atgagaggaccaaaaccaacactacaagaaatagtactagacctatgcccatacaacgaaatacaaccagtagacctagtatgccacgaacaactaggagaatcagaagacgaaatagacgaaccagaccacgcagtaaaccaccaacaccaactactagcaagaagagacgaaccacaaagacacacaatacaatgctcatgctgcaaatgcaacaacacactacaactagtagtagaagcatcaagagacacactaagacaactacaacaactattcatggactcactaggattcgtatgcccatggtgcgcaacagcaaaccaataa

SEQ ID NO: 3660 - RNA, 321 nt, synthetic construct
  misc_feature 1..321: note = CAA52574 variant
  source 1..321: mol_type = other RNA
atgcatggaccaagagaaacattacaagaaatagtactacatctagaaccacaaaacgaactagatccagtagacttactatgttacgaacaattaagcgaaagcgaagaagaaaacgatgaagcagacggagtatcacacgcacaattaccagcaagaagagcagaaccacaaagacataaaatactatgtgtatgttgcaaatgcgatggaagaatagaactaacagtagaaagctcagcagaagacttaagaacactacaacaattattcttaagcacactatcattcgtatgcccatggtgtgcaacaaaccaataa

SEQ ID NO: 3661 - RNA, 306 nt, synthetic construct
  misc_feature 1..306: note = M62877.1 variant
  source 1..306: mol_type = other RNA
atgagaggaaatgtaccacaattaaaagatgtagtactacatctaacaccacaaacagaaatagatctacaatgctatgaacaattcgattcatcagaagaagaagatgaagtagacaatatgagagaccaactaccagaaagaagagcaggacaagcaacatgctatagaatagaagcaccatgttgcagatgcagtagcgtagtacaactagcagtagaaagctcaggagatacattaagagtagtacaacaaatgctaatgggagaactatcactagtatgcccatgctgtgcaaataactaa

SEQ ID NO: 3662 - RNA, 300 nt, synthetic construct
  misc_feature 1..300: note = CAA52586 variant
  source 1..300: mol_type = other RNA
atgagaggagacaaagcaacaataaaagactacatactagacctacaaccagaaacaacagacctacactgctacgaacaactaggagactcatcagacgaagaagacacagacggagtagacagaccagacggacaagcagaacaagcaacatcaaactactacatagtaacatactgccactcatgcgactcaacactaagactatgcatacactcaacagcaacagacctaagaacactacaacaaatgctactaggaacactacaagtagtatgcccaggatgcgcaagactataa

SEQ ID NO: 3663 - RNA, 318 nt, synthetic construct
  misc_feature 1..318: note = CAA52597 variant
  source 1..318: mol_type = other RNA
atgcacggaaaagtaccaacactacaagacgtagtactagaactaacaccacaaacagaaatagacctacaatgcaacgaacaactagactcatcagaagacgaagacgaagacgaagtagaccacctacaagaaagaccacaacaagcaagacaagcaaaacaacacacatgctacctaatacacgtaccatgctgcgaatgcaaattcgtagtacaactagacatacaatcaacaaaagaagacctaagagtagtacaacaactactaatgggagcactaacagtaacatgcccactatgcgcatcatcaaactaa

SEQ ID NO: 3664 - RNA, 297 nt, synthetic construct
  misc_feature 1..297: note = AAF13691 variant
  source 1..297: mol_type = other RNA
atgagaggaaacaacccaacactaagagaatacatactagacctacacccagaaccaacagacctattctgctacgaacaactatgcgactcatcagacgaagacgaaataggactagacagaccagacggacaagcacaaccagcaacagcaaactactacatagtaacatgctgctacacatgcgacacaacagtaagactatgcataaactcaacaacaacagacgtaagaacactacaacaactactaatgggaacatgcacaatagtatgcccatcatgcgcacaacaataa

SEQ ID NO: 3665 - RNA, 324 nt, synthetic construct
  misc_feature 1..324: note = ACL12335 variant
  source 1..324: mol_type = other RNA
atgcacggaccaaaagcaacactatgcgacatagtactagacctagaaccacaaaactacgaagaagtagacctagtatgctacgaacaactaccagactcagactcagaaaacgaaaaagacgaaccagacggagtaaaccacccactactactagcaagaagagcagaaccacaaagacacaacatagtatgcgtatgctgcaaatgcaacaaccaactacaactagtagtagaaacatcacaagacggactaagagcactacaacaactattcatggacacactatcattcgtatgcccactatgcgcagcaaaccaataa

SEQ ID NO: 3666 - RNA, 318 nt, synthetic construct
  misc_feature 1..318: note = AAA79500 variant
  source 1..318: mol_type = other RNA
atgcacggaaaagtaccaacactacaagaagtaatactagaactagcaccacaaacagaaatagacttacaatgcaacgaacaactagactcaagcgaagacgaagacgaagacgaaatagaccacctactagaaagaccacaacaagcaagacaagcagaacaacacaaatgctacctaatacacgtaccatgctgcaaatgcgaattagtagtacaactagacatacaaagcacaaaagaagaactaagagtagtacaacaactactaatgggagcactaacagtaacatgcccactatgcgcatcaagcaaataa

SEQ ID NO: 3667 - RNA, 1392 nt, synthetic construct
  misc_feature 1..1392: note = AAF80488 variant
  source 1..1392: mol_type = other RNA
atgggtaaagaaaaaactcacataaatatagtcgtaataggacacgtggactcaggaaaaagcacaacaactggacatttaatatataaatgcggtggaatagacaaaagaacaatcgaaaaatttgaaaaagaagcagcagaaatgggtaaaggaagctttaaatatgcatgggttctagacaaattaaaggcagaaagagaaagaggaatcactatagatataagtctatggaaatttgaaacaacaaaatattatataacaataatagacgcaccaggacacagggattttataaaaaacatgataacaggcacaagccaagcagactgcgcagtattaatagtggcagccggagtaggagaatttgaagcaggcatatcaaaaaatggacaaacaagagaacatgcactcttagcatatacattaggtgtaaaacaattaatagttggcgtcaacaaaatggactcaacagaacccgcatacagcgaaaaacgatatgatgaaatagtaaaagaagtatcagcatatataaaaaaaataggttataatccagcaacagtaccatttgtacctatatcaggctggcatggtgacaatatgctagaacccagtccaaacatgccatggtttaaaggatggaaagtagaaagaaaagaaggaaacgcctcaggagtttcattactagaagcgttagacacaatattaccaccgacaagaccaacagacaaaccattaagattaccattgcaagacgtatataaaataggcgggataggaaccgtaccagtaggtagggtagaaacaggaatcttacgaccaggtatggtagtaacatttgcacctgtaaatataactaccgaagtaaaaagcgtagaaatgcatcatgaagcactatcagaagcactaccaggagacaacgtaggttttaatgttaaaaatgtatccgtaaaagatataaggagaggaaacgtatgtggcgattcaaaaagtgatccaccacaagaagccgcacaattcacatcacaagtaataatattaaatcacccaggccaaatatcggcaggatacagtccagtaatagactgccataccgcacatatagcctgcaaatttgcagaattaaaagaaaaaatagacagaagaagtggaaaaaagctagaagataatcccaaatcactaaaaagtggagatgcagccatagtagaaatggtaccaggaaaacctatgtgtgtcgaatcattcagccaatatccaccactagggagattcgcagtaagagacatgagacaaacagtagctgtaggtgtaataaaaaatgtcgaaaaaaaatcaggaggagcaggaaaagtcactaaaagcgcacaaaaagcacaaaaagcaggaaaataa

SEQ ID NO: 3668 - RNA, 2919 nt, synthetic construct
  misc_feature 1..2919: note = EAW51573 variant
  source 1..2919: mol_type = other RNA
atggatacagatttatatgacgaatttggtaattatattggtcccgaactagattcagacgaagacgacgatgaactcggcagggaaaccaaagatcttgacgaaatggacgacgatgatgatgatgatgatgtaggagaccatgacgatgatcatccagggatggaggtagtgctacacgaagataagaaatattatcctacagcagaagaagtatatggccccgaagtagaaacaatagtacaagaggaagatacacaacctttaaccgaaccaataatcaaaccagtcaaaacaaagaaattcactttaatggaacaaacactacctgttaccgtctatgaaatggatttcctagccgatttgatggataacagtgagttaataagaaatgtaacactatgtggccacctacatcatggtaaaacctgtttcgtcgattgccttattgaacaaactcatcccgaaataagaaaaagatatgaccaagatctatgttacacagatatattatttacagaacaagaaagaggagtcggtataaaatccacaccagtaacagtagtactacctgacaccaaaggaaaaagctacctatttaatataatggatacaccaggacatgttaactttagtgatgaagtcaccgcaggcctccgaatatcagatggtgtcgtactattcatagatgcagctgaaggagtaatgttaaacacagaaagattaataaaacatgcagtacaagaaagactggcagtaactgtatgtataaacaaaattgaccgattaatattagaattaaaattaccaccaaccgatgcatattataaattacgacatatagttgatgaagtaaacggattaattagtatgtactccacagacgaaaacctaatcctatcaccattactaggaaacgtctgtttctcttcttcccaatatagtatatgtttcacactcggctcctttgcaaaaatatacgcggatacttttggagatattaattaccaagagttcgcaaaacgtctttggggagacatatatttcaatccaaaaacgagaaaatttaccaagaaagccccaactagctcatcacaaagatcatttgttgaatttatactagaaccactatacaaaattctagcacaagttgtcggtgatgttgatacaagtttacctcgaactttagatgaattaggaatacatttaacaaaagaagaactaaaattgaatatccgaccactcttacgactcgtatgcaagaaattcttcggagaatttacagggttcgttgatatgtgcgttcaacatataccctctccaaaagtaggtgcaaaaccaaaaatagaacatacatatacaggcggtgtagattcagatctaggtgaagcaatgtcagactgtgatccagatggtccacttatgtgccataccactaaaatgtactccaccgacgatggagttcaattccatgcatttggtagagtacttagtggaacaatacatgccggccagccagtcaaagttctaggagaaaattataccttagaagatgaagaagattcacaaatatgcactgtcggacgcttatggatatcagtagcaagatatcatatagaagttaatagagtaccagcaggaaattgggtattaatagaaggagtcgaccaaccaatagtaaaaacagcaaccataacagaaccgcgaggcaatgaagaagctcaaattttcagaccattaaaattcaacactacaagcgtaataaaaattgccgtcgaaccagtaaatccttcagaattaccaaaaatgttagatggcttaagaaaagtaaacaaatcatacccatccttaacaactaaagtagaagaaagtggagaacatgtcatattaggaactggagaactatatttagattgtgtgatgcatgatttgagaaaaatgtacagcgaaatagatattaaagtcgctgatcctgtagttaccttctgtgaaacagttgtagaaacaagttcgctaaaatgtttcgcagaaactccaaataagaaaaataaaataactatgatagcagaaccattagaaaaaggattagcagaagatatagaaaacgaagttgtccaaatcacgtggaacagaaagaaattaggtgaatttttccagacaaaatacgattgggatcttctagcagcaagaagcatttgggcatttggaccagatgcaacaggaccaaatatcctagtagatgacactctaccctccgaagtagacaaagcactcttgggatcagtaaaagattcaatagttcaaggatttcaatggggaacaagagaaggaccactatgcgatgaactgattagaaatgtaaaatttaaaatattggatgccgtagttgcacaagaacccctacatagaggaggcggccaaataataccaaccgcaaggcgtgtagtttacagtgcatttttaatggcaacacctagactaatggaaccatattattttgtcgaagtccaagcccctgcagattgtgtttctgcagtatatacagtcttagcacgaagaagaggacatgtcacacaagatgcacctatacccggatcaccattgtacacgattaaggcttttatcccagcaatcgattcatttggctttgaaactgatctacgtactcatacacaaggacaagcgttttcgctatcagtttttcatcattggcaaattgtacctggagacccccttgataaatccattgtaataaggccactagaaccacaacccgccccacacctagcacgtgaatttatgataaaaacaagaagaagaaaaggactatcagaagatgtatccatatccaaattctttgatgatccaatgctattggaactagctaaacaagatgtcgttctaaattatccaatgtaa

SEQ ID NO: 3669 - RNA, 1971 nt, synthetic construct
  misc_feature 1..1971: note = EAW50963 variant
  source 1..1971: mol_type = other RNA
atgagaccatcaggcacagctggcgcagcattattagcattactagcagcattatgtccagcatcaagagcactagaagaaaaaaaagtatgtcaaggaacgagcaataaattgacacaattaggcacatttgaagaccacttcctatcattacaacgaatgttcaacaattgtgaagtagtattaggaaacttagaaataacttacgtacaaagaaattacgacctaagttttcttaaaactattcaagaggtagcaggatacgttttaatcgctttaaacacagtagagcgaataccattagaaaacttgcaaataattagaggaaatatgtattacgaaaattcttatgctttagccgtattatcaaactacgatgcaaacaaaacaggcctaaaagaattaccaatgaggaacttacaagaaattttgcatggagcagtacgatttagtaataaccccgcactatgtaatgtagaatccatacaatggagagatatagtgtcatcagacttcttaagtaacatgtcaatggattttcaaaatcacctaggatcatgccaaaaatgcgacccaagctgcccaaatggttcatgttggggagcaggagaagaaaattgccaaaaattgacaaaaataatatgtgctcaacaatgctcaggaagatgcagaggaaaaagcccttcggattgctgtcataaccaatgtgccgctggatgcacaggaccaagagaaagtgattgtttagtatgtagaaaatttcgcgatgaagcaacgtgcaaagacacatgccctccattaatgctatacaacccaacaacatatcaaatggatgtaaatcccgaaggaaaatacagttttggagcaacatgcgtaaaaaaatgtccaagaaattatgttgtaacagatcatggaagctgtgtacgcgcatgcggagcagattcatatgaaatggaagaagatggagtccgaaaatgcaaaaaatgtgaaggtccgtgtcgaaaagtatgcaatggaatagggattggagaattcaaagatagcttaagcataaacgcaacaaatataaaacactttaaaaattgcacaagcatatcaggagatcttcatattctcccagtagcatttagaggagatagcttcacacacacccctccattagacccacaagagctcgatattctaaaaacagtaaaagaaataacaggttttctattaatacaagcatggccagaaaatcgtacagatcttcacgcatttgaaaatctagaaataattcgaggaagaaccaaacaacacggacaattctcattagcagtagtatcattaaatataacatcactaggcctaagatcactaaaagaaataagtgatggagacgtaataatatctggtaataaaaatctatgttatgccaacacaataaattggaaaaagctattcggaacaagcggccaaaagaccaaaataataagcaatagaggagaaaatagttgcaaagcaacaggacaagtttgtcacgcactatgcagccctgaaggatgttggggcccagaaccacgagattgcgttagctgtcgcaatgtatcaagaggtagagagtgcgtagataaatgtaatttattagaaggagaaccgcgagaatttgtagaaaacagcgagtgcatacaatgtcacccagaatgcctaccacaagcaatgaatataacatgtacaggaagaggaccagacaactgtattcaatgtgcacactacatagatggaccccactgcgtaaaaacttgcccagcaggagtaatgggtgaaaataatacattagtatggaaatatgctgatgcaggacatgtatgccatttatgtcacccaaactgtacatatggatgtacaggaccgggattagaaggatgtcccaccaacggatcatatatcgttagtcattttcctagatcattctacaaaatgagcgtacat

SEQ ID NO: 3670 - RNA, 3411 nt, synthetic construct
  misc_feature 1..3411: note = ADL28125 variant
  source 1..3411: mol_type = other RNA
atgcgaccatcaggcacagcaggggcagcgttattagctttgctcgctgccctttgtccagcaagtagagcattagaggaaaagaaagtatgtcaagggacatctaataaactaactcaacttggaaccttcgaggaccatttcttgtccttacagaggatgttcaataactgtgaagttgtcttaggcaacctcgaaataacgtacgtacaacgaaattatgacctaagttttctcaaaacaatacaagaagtcgccggttatgtattaattgcgttaaacacagtcgaacgaataccattagaaaatctccaaatcattagaggaaatatgtactatgaaaatagctatgctttagcagtattatcaaactacgatgccaataaaacaggactaaaggaactcccaatgagaaatttacaagaaatattacacggagccgtacgcttttcaaacaatccagcattatgcaacgttgaaagtattcaatggagagacatagtcagctcagactttttatccaacatgtccatggacttccaaaaccatcttggatcttgtcagaaatgtgatccaagttgtcccaatggttcttgttggggtgcaggagaagaaaactgccaaaaactaactaaaatcatatgcgcacaacaatgcagcggacgttgtagagggaagtctccttccgactgttgccataaccaatgtgcagcaggctgcacaggccctcgagaaagtgattgtttggtctgccgcaagtttagagatgaagctacatgcaaagacacatgtccaccattaatgctatataacccaaccacatatcaaatggatgtaaatcccgagggaaaatactcattcggagccacgtgcgttaagaaatgtccaagaaactatgtagttacagatcatggatcatgtgttcgagcctgcggagcggatagctacgagatggaagaggatggtgtcagaaaatgtaagaaatgcgaaggaccatgtagaaaagtttgtaatggaataggaattggcgaatttaaagattcactctcgataaatgctaccaatataaaacattttaaaaattgcacttctatctcgggagacctacacatattaccggtagcattcagaggtgatagctttacgcacacaccacctttagatccccaagaactagacatattaaaaactgtaaaagaaataacagggtttttattaatacaggcttggcccgagaatcgaaccgatttacatgcattcgaaaatcttgaaataattagaggaagaactaaacaacacggacaattttccttagcagtagttagcctaaatataacatcactcggattaaggtcacttaaagaaataagcgatggggatgtaataataagtggtaataaaaatctctgctatgcaaatacgataaattggaagaaactcttcggaacctctggacagaaaacaaaaatcatatcaaatagaggagaaaattcatgtaaagcgacaggacaagtttgccacgctctatgctcaccagagggatgctggggtcccgaaccccgagattgtgtttcatgccgaaatgttagccgaggtagggaatgtgtagataaatgcaaccttttagaaggagaacctcgggagttcgtagaaaattccgaatgcatccaatgtcatcctgaatgcttaccacaagcaatgaatatcacttgtacaggaagaggtcccgacaattgcatccaatgtgctcattatatagatggcccgcactgtgtaaaaacatgtccggccggagtcatgggggaaaataatacattggtatggaaatacgcagatgccgggcacgtttgtcatttatgtcacccaaattgcacatatggatgtacaggaccaggtcttgaaggatgtccaacaaacggaccaaaaatcccaagtatagcaacaggaatggtgggagcactacttcttcttttagttgtagcattaggaataggtctttttatgagaagacgacatatcgttagaaaacgaactttacgtcgcctcttacaagagagagaattagtagaaccgctaaccccatctggagaagcaccaaatcaagcattactaagaatactcaaagaaacagaatttaagaaaataaaagtactaggatcaggcgcatttgggacagtatacaaagggctttggatacctgagggagagaaagtaaaaataccagtagcaattaaagaactacgagaagcaacaagtcctaaagcaaacaaagagatcctagatgaagcatatgtaatggcaagtgtagataacccacatgtatgtaggctactagggatttgcttaacttcaactgttcaattaattacacaactaatgccattcggatgcctactagactatgtacgagaacataaagataacataggttcccaatatctcttaaactggtgtgttcaaatagcaaaaggaatgaattatctcgaagatagaagacttgtacaccgagacctcgcagctagaaatgtattagtaaaaaccccacaacacgtaaaaataacagactttggactagcgaaactattaggcgctgaagaaaaagagtaccatgcagaaggaggtaaagtaccaatcaaatggatggcgctagaaagcatcttacataggatatacacacatcaaagcgacgtatggtcatacggagtaacagtatgggaattaatgacctttggctcaaaaccatatgacggcatacccgctagtgaaatctcatcaatacttgaaaaaggtgaaagattaccgcaacctccaatatgtacaatagatgtatatatgataatggtaaaatgttggatgattgatgcagactctagaccaaaattccgagaactaataatcgaattttccaaaatggcaagagatccacaaagatacttagtaatccagggagacgaaagaatgcacctaccgtcccctacagattcaaatttctatagagcccttatggacgaagaagatatggatgacgtagttgacgcggatgaatacctaattccacaacaaggattcttttcttcaccgtccacatcaagaacaccactactaagcagtctatcagcaacaagtaacaactccacagttgcttgtatagaccgtaacggtcttcagtcttgcccaataaaagaggactcatttttacaaaggtattcttcagatcctacaggcgcattgacagaagactctatagacgacacatttctacctgtccccggcgaatggcttgtatggaagcaatcttgttcaagcacaagctctacacactcagcagctgcatcacttcaatgtccatcacaggtcttaccaccagcatctccagaaggagagacagtagcagaccttcaaactcaataa

SEQ ID NO: 3671 - RNA, 150 nt, synthetic construct
  misc_feature 1..150: note = CCO13722 variant
  source 1..150: mol_type = other RNA
atgtgcgcaacctgcgccatacaaaccgccccaaccggcccaaacaaatcatcactctcagacttctcactaccactaaaactacacttcctctcaaccatatcaatatcaccattcgcctcaaacaaagtactaacactattcatctaa

SEQ ID NO: 3672 - RNA, 1218 nt, synthetic construct
  misc_feature 1..1218: note = CCDS47587.1 variant
  source 1..1218: mol_type = other RNA
atgagaccatcaggaacagccggagcagcactattagccttattagcagcattatgtccagcatcaagagcactagaagaaaaaaaagtatgccaaggaacatcaaacaaattaacacaacttggaacctttgaagaccactttttatcactacaacgaatgtttaacaattgtgaagtagtcctaggaaacctagaaataacatatgtacaaagaaactatgacttatcattcttaaaaacaatacaagaggtcgcaggctatgtactaatagcactaaatactgtagaaagaataccattagaaaacctacaaataattagaggaaatatgtactacgaaaactcttacgcactagcagtcttatcaaactacgacgccaataaaacaggtctaaaagaactcccaatgagaaacctacaagaaatattacatggagccgtaagattcagcaataacccagcactatgcaacgtagaatcaatacaatggcgagatatagtatccagtgactttctatcaaacatgagcatggactttcaaaaccacctaggatcatgccagaaatgtgacccttcatgtccaaacggatcatgctggggtgcaggagaagaaaattgccaaaaactaacaaaaataatatgcgcacaacagtgctcaggaagatgcagaggaaaatcaccatcagattgctgtcataaccaatgtgcagccggatgcacaggaccacgagaatcagattgcttagtatgcagaaaatttagagatgaagcaacatgcaaagatacatgcccaccacttatgctatataatcctacaacataccaaatggatgtaaatccagaaggaaaatactcgttcggagccacatgcgtaaaaaaatgcccaagaaactacgtagtaacagaccacggctcatgcgtaagagcatgcggagccgacagctatgaaatggaagaagacggggtaaggaaatgtaaaaaatgcgaaggtccatgtagaaaagtatgcaacggaataggaataggtgaattcaaagactcactttcaataaatgcaacaaacataaaacatttcaaaaactgtacatcaatttcaggtgacctacatatattaccagtagccttcagaggagattctttcacacacacacctccactagatcctcaagaacttgatatactaaaaactgtaaaagaaataacaggactatcataa

SEQ ID NO: 3673 - RNA, 3633 nt, synthetic construct
  misc_feature 1..3633: note = AAG35789 variant
  source 1..3633: mol_type = other RNA
atgcgtccatccggaacagccggtgccgcactacttgcacttctagctgctctatgtccagcatcgagagctctcgaagaaaagaaagtatgtcaaggcacatctaacaaattaacacaactgggaacgtttgaagaccatttcctcagcttacaacgaatgttcaataattgtgaggtagtattaggtaatctagaaataacctatgtacagcgtaattacgacttatctttcttaaaaacaatacaagaagtcgcagggtatgtattaattgccttaaacacagtagaaagaatcccgctagaaaatctacaaattatacgtggtaacatgtattatgaaaatagctatgctttggcagtactgtctaattatgacgcaaataaaactggattaaaagagctaccaatgaggaacttacaagaaatactacacggagcagtcagatttagcaacaaccctgcattatgtaatgtagaatcaattcaatggcgagatatagtaagttctgatttcttatctaatatgagcatggattttcaaaatcacttaggtagttgtcaaaaatgcgatccatcctgcccaaacggtagctgttggggagcaggagaagaaaattgtcaaaaactaaccaaaatcatatgcgctcaacaatgttcaggtagatgccgaggtaaatcacccagtgattgttgtcataatcaatgcgccgcgggatgcacaggcccaagagaatcagattgtttagtatgcaggaaattcagagacgaagctacctgtaaagatacttgcccaccgcttatgctatataatcccacaacataccaaatggacgttaacccagagggaaagtactcgttcggagcgacctgcgttaagaaatgccctagaaattacgtcgtcacagatcatggtagctgcgtaagagcatgcggagcagattcttacgaaatggaagaggacggagtaagaaaatgtaagaaatgtgaaggaccatgtagaaaagtttgcaatggaataggcataggagagttcaaagattcactctcaattaatgctactaatataaaacatttcaaaaactgtacatctatttcaggagacctgcatatactcccagtcgcattcagaggggactcttttacccacactcccccattggacccacaagaattagacatccttaaaacagttaaagaaattactggattcttacttatacaagcatggccagaaaatagaacagatctacatgcattcgaaaatcttgaaataatcagaggacgaactaaacaacatggacaatttagcctagcagtcgtttctttaaatataacaagccttggcttaaggtccctaaaagagatatccgatggagatgtcataatatcaggcaataaaaacctatgctatgctaatacaatcaattggaagaaattatttggtacatcaggacagaaaacaaaaattatatcaaaccgcggtgaaaactcatgtaaagccacaggacaagtatgtcatgcattatgcagcccagagggttgttggggcccagaaccacgggattgcgtgagttgtcgaaacgtaagtagaggccgagaatgcgtagataaatgtaatcttttagaaggtgagccgagagagttcgtagaaaactctgaatgtatacaatgccatccagaatgtttaccacaagctatgaatataacatgcacaggaagagggccagacaattgtattcaatgcgctcattatattgacggtcctcactgcgtcaaaacatgccctgcaggagtaatgggtgaaaacaatacgctagtatggaaatacgctgacgcaggacatgtatgccatctatgtcacccaaattgtacatatggctgtacaggacctggcctagaaggatgcccgacaaatggacccaaaatacctagtatagcaactggcatggtaggagcactactcttactattagtcgtcgcactgggcataggtttatttatgagacgtagacatatcgttcgaaaacgaacactaaggcggttactacaagaaagagaattagttgagccactaaccccaagtggtgaagcaccaaaccaagcattattacgaattttgaaagaaactgaatttaagaaaataaaagttttaggatcaggtgcatttggtacagtatacaaagggttatggataccagaaggcgaaaaagtcaaaattccagttgccataaaagagttacgggaagctacatctccaaaagcaaataaagaaatattagatgaagcatacgtaatggctagtgtagacaatcctcacgtttgcagattacttggaatatgccttacctccaccgtccaactaataacgcaactaatgccatttggatgtcttttagactacgttcgagaacacaaagataatattgggtcccaatatctactaaactggtgtgttcaaatagctaaaggaatgaattatttagaagatagaagattagtgcatcgagatctcgcggcgagaaacgtccttgtgaaaactccacaacatgttaaaataacagattttggattagcaaaactattaggtgcggaagaaaaagaataccatgccgaaggcgggaaagtaccaatcaaatggatggcactcgagtcaattttacacagaatttatactcatcaatcagatgtatggagttatggagttactgtctgggaattaatgacattcggcagcaaaccctatgacgggataccagctagtgaaataagctcaatattagaaaaaggagaaagacttccacaaccacctatctgtactatagacgtatatatgataatggtcaagtgctggatgattgatgctgattcaagacctaaattcagagaattaataattgagttctcaaaaatggcaagagacccacaaaggtatctcgtaattcaaggagacgaaagaatgcatcttccaagtccaaccgattccaatttttatcgcgcattaatggacgaagaagacatggacgacgtagtagacgccgatgaatacctcattcctcaacaaggattcttttcaagtccatcaacaagtcgcactcccttattaagctcactaagtgctacctcaaacaattcaacagtagcttgtatagatcgaaacggacttcaaagttgtcccataaaagaagattcatttttacaacgatactcctcggaccctacaggagcattaactgaagattctatagatgacacatttctaccagtacctgaatatatcaaccaatcagtacccaaaagaccagcaggatctgtacaaaatcccgtctatcataatcaacctcttaatccagcaccaagtcgagatccacattaccaagatccacactcgacagcagtaggaaaccctgagtatttaaatactgtacaaccaacttgtgtaaatagcacgtttgatagtccagcacattgggcacaaaaaggaagtcaccaaatatcactagataaccccgattatcaacaagatttctttccaaaggaagcaaaaccaaacggaatatttaaaggtagcacagcagaaaatgcagaatatctacgcgtcgcaccccaatcctccgaatttataggagcatag

SEQ ID NO: 3674 - RNA, 1395 nt, synthetic construct
  misc_feature 1..1395: note = AAI18666 variant
  source 1..1395: mol_type = other RNA
atggctgcagaagacgtaataatatgtgcacaacaatgctcaggccgatgtcgaggaaaaagtccatctgattgttgtcataaccaatgtgcggcaggatgtaccggacctagagaaagtgactgcctagtatgtagaaaatttagagatgaagcaacatgtaaagatacatgtccaccattaatgctatataatccaacaacataccaaatggatgtaaatccagaagggaaatatagtttcggggcaacatgtgttaaaaaatgtccaagaaattacgtggtaacagatcatggatcgtgtgtacgagcatgtggagctgatagttatgaaatggaagaagacggagtaagaaaatgcaaaaaatgtgaaggtccatgtagaaaagtctgtaatggaataggaataggagaatttaaggactctctaagtataaatgcaacaaatataaaacattttaaaaattgtacatcaataagcggtgatctacatatactacctgtagcatttcgaggagattcatttacacacacaccaccattagatccacaagaattagacattttaaaaactgtaaaagaaataacaggtttcctattgatccaagcatggccagaaaacagaacagatttacatgcatttgaaaatctggaaatcataagaggaagaacaaaacaacatggacaattttctttagcagttgtaagcttaaatataacttcactaggattaagatcacttaaggaaatatcagacggtgatgtaattataagtggaaacaaaaacttatgttatgcaaatactataaattggaaaaaacttttcggaacttcaggacaaaaaactaaaataataagtaacagaggagaaaatagttgcaaagcaacaggacaagtatgtcatgcattatgtagtccagaaggttgttggggaccagaacctagagattgtgtatcatgtagaaatgtcagcagaggccgagaatgcgtcgataaatgtaatctattagaaggagaacctagagaatttgttgaaaattcagaatgtatacaatgccatccagaatgtttaccacaagcaatgaatataacatgtacaggaagaggaccagataattgtatacaatgtgcacattatattgacggtccacattgtgtaaaaacatgtccagcaggagtaatgggtgaaaacaatacattagtatggaaatatgcagatgccggacatgtatgtcatttatgtcatcctaattgtacatacggatgtaccggaccaggattagaaggatgtcccactaatggaccaaaaataccatcaatagcaacaggaatggtaggagcactattattattactagtagtcgcactaggaataggaccattacatggaagataa

SEQ ID NO: 3675 - RNA, 3276 nt, synthetic construct
  misc_feature 1..3276: note = AAH94761 variant
  source 1..3276: mol_type = other RNA
atgagaccatccggaacagctggagccgcgttactagcattattagcagcattatgtccagcaagtagggctctggaagaaaagaaagtctgtcaaggaacttcaaataaattgacccaattaggaacatttgaagaccacttcctttcactacaaagaatgttcaataattgtgaagtagttctaggaaatctagaaattacatatgtacagcgcaattacgatttatcattcttaaaaacaatacaagaagtcgcagggtacgttctcatagccttgaatactgtcgagagaatacctttagagaacttacaaataatacgaggaaacatgtactatgaaaattcatatgcattagccgtactctctaattatgatgcaaataaaactggtttaaaagaattaccaatgcgtaatttacaaggtcaaaaatgtgacccatcctgtcccaatggatcttgttggggagctggtgaagagaactgtcaaaaacttaccaaaataatatgcgctcaacaatgcagtggaagatgcagagggaaatccccttccgactgctgtcacaaccaatgcgccgcaggatgcacagggcctagggaatcagactgcttagtatgccgtaaattcagagatgaggcaacatgcaaagatacatgtccgccactaatgctatacaatccaaccacataccaaatggatgtaaatccagaaggtaaatactcattcggcgcaacatgcgtgaaaaagtgcccacgcaactacgtagtgacagaccatggcagttgtgttagagcatgcggagcagattcttacgaaatggaagaggatggagttagaaaatgtaagaaatgtgaaggaccatgtagaaaagtatgtaatggaataggaataggagaatttaaagatagtttaagcatcaatgcaaccaatattaaacatttcaaaaattgtacttcaataagtggagatctccacattctgccagtagcttttagaggcgatagttttacacacacaccaccactcgatccgcaagaattagacatcctcaaaacagtgaaagaaataacaggatttctactaatacaagcgtggcccgaaaaccgtaccgacttacacgcatttgaaaacctagaaataatacgtggaagaaccaaacaacatggacaattcagcctcgcggtagtcagtttaaacataacatcacttggactacgctcattaaaagaaatcagcgatggagacgtcataataagcggaaataaaaatttatgctacgccaatactataaattggaagaaactattcggaaccagtggccagaaaactaaaataatatctaacagaggagaaaactcttgcaaagcaacaggacaagtatgtcatgccttatgttctcctgaaggatgctggggcccagaaccaagggattgtgtttcatgtcgtaacgtctctcggggacgcgaatgcgtcgacaaatgtaatctactagaaggagaacctcgcgagttcgttgaaaattctgaatgcattcaatgtcatccagaatgtctaccccaagctatgaacataacatgtactggaagaggacctgataattgcatacaatgtgcacactatatagatggacctcattgtgttaaaacttgtcccgccggtgtaatgggtgagaataatacacttgtatggaaatatgccgacgcaggacatgtatgccatttatgccatccaaactgtacatacggctgcactggacccggacttgaaggctgtccaacaaatggacctaaaataccaagtatcgctactgggatggtaggagcattactacttctattagttgtagcactaggaataggattattcatgagacgtcgacacatagtccgaaaaagaacgctccgacgattattacaagaaagagaacttgtagaaccattaaccccatcaggagaagcccccaaccaagccttattacgtatactaaaagaaactgaatttaagaaaataaaagtcctaggatctggcgctttcggtacagtttataaaggattatggattccagaaggcgaaaaagttaaaattccagttgctataaaagaactgagggaggcaacaagtccgaaagcaaataaagaaatattagatgaggcttatgtaatggcttcagttgataacccacatgtctgcaggttactcggaatatgtctaacaagcactgtgcaactaatcacgcaattaatgccattcggctgtttattagactatgtaagagaacacaaagataatataggctcacaatatttactcaattggtgtgtacaaatagcaaaaggaatgaactacttagaagaccggagattagtacatcgtgacctcgccgccagaaatgtattagtcaaaacaccacaacatgtcaaaatcaccgacttcggcttagcaaaattacttggtgccgaagaaaaagaatatcacgcagaaggaggcaaggtcccaataaaatggatggctctagaaagtatattacacagaatctacacacatcaatccgatgtatggtcatacggagtgaccgtctgggaactaatgacattcggatctaagccttatgatggtataccagccagtgaaatttcttcaattctagaaaaaggagaaagactaccacaaccaccaatatgtacaatagatgtttacatgataatggtaaaatgttggatgatagatgctgatagtcgtccaaagtttcgagaactaataatagaattttcaaaaatggcaagagatcctcaaagatacctagtaatacaaggagacgaaagaatgcatttaccgagtcctacagatagcaacttctacagagcactaatggacgaggaagatatggatgatgtagtagatgcagatgaatacctaatcccccaacaaggattcttttcaagccctagcacatcaagaacacctttactaagctccctatcagcaacaagcaataattcgacagtcgcctgtatagataggaacggcctacaatcctgcccaataaaagaagacagtttcttacaaaggtattcaagtgatcctaccggagcactgacggaagactcaattgacgatacatttctacccgtccctggcgaatggcttgtatggaaacaaagctgtagctctactagctcaacacattcagcagcagcttcactacagtgtccttctcaagtactacctccagcatcaccagaaggggaaacagtcgctgatctgcaaacacaataa

SEQ ID NO: 3676 - RNA, 216 nt, synthetic construct
  misc_feature 1..216: note = CAA34902 variant
  source 1..216: mol_type = other RNA
atgagaccaagcggaacagcaggagcagcattactagcactattagcagcactatgtccagcaagcagagcattagaagaaaaaaaaggaaaaggagtaagcagaagattaccaagaagaccaagaatagcaccaagaacaccacaaccagcacaaccaagaacaggagcaccagcaagagcaagagcaccagcaagaccattcttattcccataa

SEQ ID NO: 3677 - RNA, 720 nt, synthetic construct
  misc_feature 1..720: note = AAH10992 variant
  source 1..720: mol_type = other RNA
atgccattgggacacataatgagactagacttagaaaaaatagcattagaatacatagtaccctgcctacacgaagtaggattctgttacttagacaatttcttaggagaagtagtaggagattgtgtattagaaagagtgaaacaacttcattgcacgggagcactaagagacggacaattagcaggaccaagagcaggggtatcaaaaagacacttacgaggagaccaaataacatggataggaggaaacgaagaaggatgtgaagcaatatcatttttattaagcttaatagatagattagtattatactgtggaagtagattaggaaaatactatgtaaaagaaagaagcaaagcaatggtagcatgctatccaggaaacggaacaggatacgtaagacatgtagataacccaaatggagatggaagatgtataacatgcatatactatttaaacaaaaattgggatgctaaactacatggaggaatattaagaatatttccagaaggaaaatcattcatagccgatgtagaaccaatattcgacagattactttttttctggagtgatagaagaaatccacacgaagtacaaccatcatacgcaacaagatacgcgatgacagtatggtactttgacgcagaagaaagagcagaagcaaaaaaaaaatttagaaatctaacaagaaaaacagaaagcgcattaacagaagattga

SEQ ID NO: 3678 - RNA, 1566 nt, synthetic construct
  misc_feature 1..1566: note = BAH13456 variant
  source 1..1566: mol_type = other RNA
atggctacaagcctacacgaaggaccaacaaaccaattagacctactcatacgagcagtcgaagcaagtgttcattcatcaaacgcacattgcaccgacaaaacaatagaagcagcagaggccctattacacatggaatctccaacatgcctaagagactcaagatcaccagaattcatccacgcagctatgagacctgatgtcattacagaaaccgtcgtagaagtaagcacagaagaatcagaaccaatggacacatcaccaataccaacaagtccagactcacatgaacctatgaaaaaaaaaaaagtaggaagaaaaccaaaaacacaacaatcaccaataagtaacggatctcccgaattaggtataaaaaaaaaacctagagaaggaaaaggaaataccacatacctatgggaattcctattagacctcctccaagataaaaatacctgtccaaggtatataaaatggacccaaagagaaaaaggaatattcaaattagtcgacagcaaagcagtcagtaaactctggggaaaacacaaaaacaaaccagacatgaactacgaaaccatgggaagagcactaagatactattaccaaagaggaatattggccaaagtagaaggacagagactagtataccaattcaaagacatgccaaaaaacatagtcgtcatagacgacgataaaagtgaaacatgtaacgaagatttggcaggtacaacagatgagaaatcactcgaacgagtttcactaagtgcagaaagtctactaaaagcagcaagttcagtaagatccggaaaaaattcaagtcccataaattgcagtagagcagaaaaaggcgtcgccagagtcgtaaatataacatcacccgggcacgacgcatcgagtagaagcccaactacaaccgcatcagtctcagcaaccgcagccccacgaacagtaagagtagccatgcaagtaccagtagtcatgacctccctaggacaaaaaataagtacagttgcagttcaatcagtaaacgcaggcgctccactaataacatcaacatctcccaccactgccacatcaccgaaagttgtaatccaaacaatacccacagtaatgccagcatctacggaaaacggagacaaaataactatgcaacccgcaaaaatcataacaataccagctacacaattagcacaatgccaactacaaacaaaatcaaacctaaccggatccggatcaataaacatagtaggaactccactggcagtaagagcattaacaccagtctcaatagcacacggcactccagtaatgagactatcaatgcctacacaacaagcatcaggccaaacgccaccaagagtcatttcggcagtcattaaaggaccagaagtaaaatcagaagcagtagcaaaaaaacaagaacacgacgtcaaaactttacaactcgtagaagaaaaaccagcagatggtaacaaaacagtaacacatgtagttgtagttagtgcaccctccgcaatagcattaccagtgacaatgaaaacagaaggactagtaacatgcgaaaaatga

SEQ ID NO: 3679 - RNA, 810 nt, synthetic construct
  misc_feature 1..810: note = BAC67168 variant
  source 1..810: mol_type = other RNA
atggcagcagcattatttgtcttactaggatttgcactattaggaacacacggagcctcaggagcagctggaacagtattcacaacagtagaagatctaggaagtaaaattctattaacatgttcactaaatgactcagcaacagaagtaactggacataggtggttaaaaggaggagtagtattaaaagaagacgcattaccaggacaaaaaacagaatttaaagtagattcagacgatcaatggggagaatactcatgcgtattcttaccagaaccaatgggaacagctaatatacaattacacggaccaccaagagtaaaagcagtaaaatcaagcgaacacataaatgaaggagaaacagcaatgttagtatgcaaaagcgaatcagtaccaccagtaacagattgggcatggtataaaataacagatagtgaagacaaagctttaatgaatggatcagaaagtagatttttcgtaagtagcagccaaggaagaagtgaattacatatagaaaacttaaatatggaagcagacccaggacaatacagatgcaatggaacaagttcaaaaggttcagatcaagcaataataacattaagagtaagaagccacttagcagcactctggccatttctaggaatagtagcagaagtactagtactagtaacaataatattcatatatgaaaaaagaagaaaaccagaagatgtactagatgacgatgacgcaggaagtgcaccattaaaaagttcaggccaacaccaaaatgataaaggaaaaaacgtcagacaaagaaactcgtcataa

SEQ ID NO: 3680 - RNA, 945 nt, synthetic construct
  misc_feature 1..945: note = AAA35723 variant
  source 1..945: mol_type = other RNA
atggcaccaccacaagtattagcattcggattactattagcagcagcaacagcaacatttgcagccgcacaagaagagtgcgtttgcgaaaactataaactagcagtcaactgcttcgtaaataacaatagacaatgccaatgcacatcagtgggagcacaaaacacagtaatatgcagtaaattagcagcaaaatgtctagtaatgaaagcagaaatgaatggatcaaaattaggaagaagagcaaaaccagaaggagcattacaaaacaatgacggattatacgacccagactgcgacgaaagtggactatttaaagcaaaacaatgtaacggaacctcaatgtgctggtgcgtaaacacagccggagtaagaagaacagacaaagacacagaaataacatgcagtgaaagagtaagaacatattggataataatagaactcaaacacaaagcaagagaaaaaccatatgacagcaaaagtttacgaacagcactacaaaaagaaataaccacaaggtatcaattagacccaaaattcataacaagtatactatacgaaaacaacgtaataacaatagacctagtacaaaatagtagtcaaaaaacacaaaacgacgtagacatagcagacgtagcatactacttcgaaaaagacgtaaaaggagaatcactattccactcaaaaaaaatggacctaacagtaaacggagaacaattagacctagatccaggacaaacattaatatattacgtagacgaaaaagcaccagaattctcaatgcaaggactaaaagcaggagtaatagcagtaatagtggtagtagtaatagccgtagtagcaggaatagtagtactagtaatatcaagaaaaaaaagaatggcaaaatatgaaaaagcagaaataaaagaaatgggagaaatgcatcgagaactaaacgcataa

SEQ ID NO: 3681 - RNA, 2931 nt, synthetic construct
  misc_feature 1..2931: note = CCDS169.1 variant
  source 1..2931: mol_type = other RNA
atggaattacaagcagcaagggcatgctttgctctgctatggggatgtgctctcgctgcagcagctgctgctcaaggtaaggaagtagtacttctagattttgcagcagcaggaggcgaattaggctggcttacacatccctatgggaaaggttgggacttaatgcaaaatattatgaatgatatgcctatatacatgtattccgtttgcaacgttatgtccggagaccaagataattggctaagaactaactgggtatatagaggagaagctgaaagaatatttatagagttaaaatttactgttagagactgtaattcctttccgggcggagcatcctcatgtaaagaaacattcaacttatattatgctgaaagtgacctagactatggaacaaatttccaaaaaagactattcacaaaaatagatacaatagcacctgacgagataacagtttcatctgatttcgaagctagacatgtgaagttaaatgtagaagaacgatctgtgggaccactaacccggaaaggattttacctagcgtttcaggacattggtgcatgtgtcgcattactatcagtaagagtatattataaaaaatgcccagagttactacaaggcctagcacattttccagaaacaatagctggtagcgatgcaccttcactggcaactgtagcaggaacatgcgtagatcatgctgttgtacctccaggaggtgaagagccacgcatgcactgtgctgtagacggagagtggttagtaccaataggacaatgcctatgtcaggctggatatgaaaaagtagaagatgcatgccaggcatgcagcccaggcttttttaaatttgaagcttcagagtcaccgtgcttagaatgcccagaacatacgcttccgagtccggagggagcaacttcgtgtgaatgtgaagaaggattctttagagcgcctcaagacccagcatcaatgccatgcactcgaccaccctcagccccacactatttaacagcagtcgggatgggagcaaaagttgaattgcgatggacaccaccacaagatagtggaggtcgagaagacatagtgtacagtgttacgtgtgaacaatgttggccagaaagcggagagtgtggaccttgtgaagctagcgttagatatagtgaaccaccccacggtttaacacgaacatctgtaacagtgtcagatttagaaccccatatgaattatacttttactgttgaagcgcgcaacggggtatcgggattagttacatcaaggtcatttagaacagcaagtgtcagcataaatcaaacagaacctccaaaggtacgtttagaaggtaggtcaacaacaagcttatccgtatcatggtcaattccaccaccacaacaatctcgagtatggaaatatgaagtgacttatagaaaaaaaggcgattcgaattcgtacaacgtaagaagaacagaaggatttagtgtaacacttgatgatctagcacctgatactacatatttagtacaggtacaagctttaacccaagaaggacaaggagcaggatcaaaagtacatgaatttcagactcttagtcctgaaggaagtgggaatctggcagttatcggcggcgtcgcagtaggggtagtactactattagtattagccggagtaggattttttatacacagaagaagaaagaatcaaagagcacgacaatctccagaagatgtttatttctctaaatccgaacaactgaaaccacttaaaacatacgttgatccccatacttacgaagacccaaaccaagccgttcttaaattcacaacagaaatccatccatcatgcgtaacaaggcaaaaagtgataggtgctggagaatttggagaagtctacaaaggtatgttaaaaacatcatcaggaaaaaaagaagtcccagtagcaataaagacactaaaagcaggttacacagaaaaacaaagagtagacttcttaggggaagcaggaataatgggtcaatttagccaccataacataattaggttggaaggagtaatctcaaaatacaagccaatgatgataataacggaatatatggaaaatggagcgcttgataaatttctgcgcgaaaaagatggagaatttagcgtgcttcaattagtcggaatgttaagaggaattgccgcgggaatgaaatacttagctaatatgaattatgtacacagagatcttgcagcaagaaacattttagtaaattcgaacttagtatgtaaagtaagtgattttggattatcaagagttttagaggatgatcccgaagcaacttatacgacatcaggagggaaaattccaataagatggacagccccagaagccatttcatacagaaaatttacttcagcaagtgatgtttggtcatttggaatagtaatgtgggaagtaatgacatacggcgaacgaccatactgggaattaagtaatcatgaggttatgaaagcaataaatgatgggttcagattaccaactccaatggactgtcctagtgcaatatatcagctaatgatgcaatgttggcaacaagaacgagcacgaagacctaagtttgcggatatagtatcaatcctagacaaattaataagagctccagacagcctaaagacactagcagactttgacccaagagtaagcataagactaccttccactagtggatcagaaggagtaccatttagaacagtttccgaatggttagaatcaataaaaatgcaacaatatacagaacactttatggccgctggatacacggcaattgaaaaagtagtacagatgacaaacgacgatattaaaagaataggagtacgtttaccaggacatcaaaaacgaatagcatacagcttactgggcctaaaagaccaagtaaataccgtgggaattccgatataa

SEQ ID NO: 3682 - RNA, 2952 nt, synthetic construct
  misc_feature 1..2952: note = AAG43576 variant
  source 1..2952: mol_type = other RNA
atggactgccaactcagtatattgttgctactatcatgcagtgtattagacagctttggagaattaattcctcaaccgtctaatgaagtaaatttattagacagcaaaactatacaaggagaattgggatggatatcctacccatctcacggttgggaagaaatatcaggagttgatgaacattatacaccaatacgaacttaccaagtgtgtaatgtaatggaccatagccaaaataactggctaagaactaattgggtaccacgaaactctgcccagaaaatctatgtcgaattaaaattcactctgcgagactgtaacagtataccattagttctaggtacatgcaaagaaacattcaatttatattatatggaaagtgatgacgatcacggcgtaaaatttagagaacaccaatttaccaaaatcgacacaatcgcagcagatgaatcgttcacacaaatggatttaggagacagaatattgaaactcaatacagaaataagagaagtaggtccagtaaacaagaaaggtttctatctagcattccaagacgtgggcgcttgcgtagcattagtttcagtacgagtatacttcaagaaatgtccgtttactgtcaaaaatttagctatgtttccagataccgtaccaatggattcccaaagtctagttgaagttcgaggatcatgtgtaaacaattcaaaagaagaagatcccccaagaatgtactgttcaacggaaggtgaatggctagtccccataggtaaatgtagctgcaatgccggatatgaagaaagaggtttcatgtgccaagcatgtagaccaggattttacaaagcactagatggaaatatgaaatgtgctaaatgtccaccacattcaagcacacaagaagatggctcaatgaattgcagatgtgaaaataattattttagagcagacaaagatccaccttcaatggcatgcacaagaccaccatcaagtcctagaaatgtaatatctaacatcaacgaaacaagcgtaatattagattggagctggcctttagatacagggggacgaaaagacgtaacatttaatataatctgtaagaaatgcggttggaacataaaacaatgtgagccatgctcaccaaatgtaagattcctaccaaggcaattcgggctaactaacacaacagtcacagtaacggatctactagcacatacaaattacacttttgaaatagatgctgtaaacggagtcagcgagctaagttcaccacccagacaattcgcagctgtttcaataacaaccaaccaagctgcaccatcaccagtccttacaatcaagaaagaccgaacatcaagaaactctatttcactatcatggcaagaaccagaacaccctaatggaataatcctagactatgaagttaaatattacgaaaaacaagaacaagaaacttcttatactatactacgtgcaagaggaactaatgtaacaatttccagtctaaaacctgatacaatatacgtcttccaaatacgcgcaagaacagcagcgggttacggaacaaattctaggaaattcgaatttgaaacatctccagattccttttcaatttctggtgaatcctcacaagtcgtaatgatagcaatatccgcagcagtagcaataattttattaacagtagtaatctatgttttaataggaagattctgcggttataaaagtaaacatggcgcagacgagaaacgattacatttcggaaatggacatcttaaattaccaggcctcagaacatatgtagatccccacacttatgaagacccaactcaggcagtacacgagttcgcgaaagaactagatgcaaccaacatatcaatagacaaagtagttggggctggagagttcggagaagtatgtagtggaagattaaaactaccaagtaaaaaggaaatatcagttgcgataaagacgctgaaagtgggttacacagaaaaacaaagaagagatttcttgggagaagctagcataatgggccaatttgaccatcctaatataatacgattagaaggagtggtaactaagtcaaagccagtaatgattgtaacagaatacatggaaaacggaagcctagattcatttttaaggaaacacgatgcacaattcacagtaattcaattagtaggcatgttaagaggtatcgcatcaggtatgaaatatttatcagacatggggtacgtacatcgcgacttagcagctcgaaatattttaataaattctaatctcgtatgtaaagtatcagattttggtctatccagagtattagaagatgacccagaagctgcatacactacccgaggtggaaaaatcccaattcgctggacatcaccagaagcaattgcatatcgaaaatttactagcgcttcagacgtatggtcatatggaattgtcctatgggaagttatgtcatacggagaaaggccatattgggaaatgtcaaaccaagacgtaataaaagcagtagatgaaggttatagactacctccaccaatggattgcccagcagcactttatcaattaatgttagactgctggcaaaaagatcgaaataatagaccaaaatttgaacaaatagtaagcattctcgacaaattaataagaaaccctggtagcctaaaaattataacatcagctgccgcacgaccatcaaatctcttactcgaccaatcaaacgtcgacataacgactttcagaacaacaggagattggcttaatggtgtctggacagcgcactgcaaagaaatatttacaggagttgaatactcgagctgtgacaccatagcaaaaatttcaactgacgatatgaagaaagttggagtaactgtagtaggcccacagaagaaaatcataagtagcataaaagcattagaaacccaaagcaaaaatggcccagtaccagtataa

SEQ ID NO: 3683 - RNA, 2952 nt, synthetic construct
  misc_feature 1..2952: note = AAH63282 variant
  source 1..2952: mol_type = other RNA
atggactgtcagctaagtatcttattattattaagttgtagtgttttggactcattcggagaactaataccacagccatcaaacgaggtcaatctattagacagcaaaacaatacaaggtgagctaggatggatatcttacccatcacatggttgggaagaaataagtggagtagacgaacactatacccccatacgcacataccaagtgtgcaatgtcatggatcactcacaaaataattggcttagaacaaattgggtcccaagaaatagtgctcagaaaatatatgtagaactaaaatttacactaagagattgtaatagtataccattagtactagggacgtgtaaagaaacattcaatttatattatatggaatcagatgatgaccatggtgtaaaattccgagaacaccaatttacaaaaatagacacaattgcggcagacgaatctttcactcaaatggacttaggtgacagaatactaaaattaaataccgaaattcgagaagtaggaccagtaaacaaaaaaggattttacctagcatttcaagatgttggtgcctgcgtcgccctcgtatcagtcagagtatattttaaaaaatgtccctttacagtaaaaaatttggctatgttcccagacactgttcccatggactcacaatctttggtagaagttagaggaagctgtgttaataatagtaaagaagaagacccacccaggatgtactgctcgacagaaggagaatggctggtaccaatcggaaaatgctcatgtaatgctggatacgaagaacgcggatttatgtgtcaagcatgccgcccaggtttctataaggcacttgacggtaacatgaaatgcgcaaaatgtcctccacattcaagtacacaagaagacggatcgatgaattgccgctgtgaaaacaactatttcagagcagataaagaccctccctcaatggcatgcaccaggccaccatcatcacctcgaaatgtcataagtaatataaatgaaacatcagtaatattagactggtcatggccattagatacaggtggcagaaaagacgtaaccttcaacataatttgtaaaaaatgtggttggaatatcaaacaatgtgaaccatgttcaccaaatgtaagatttcttccaaggcaattcggattgactaatactacagtaacagttacagatttactagcacacacgaactacacatttgaaatagatgcagtcaacggagtaagtgaattatccagcccacctcgacaatttgcagctgtctcaataacaaccaatcaagcagctcctagtccagtattgacaataaaaaaagatagaacatcaagaaactcaattagcttatcatggcaagagcctgaacaccctaacggaataattctagattacgaagtaaaatactatgaaaaacaagaacaggaaacatcatatactatattgagagcaagaggaacaaatgtaacaataagcagtctcaaacccgatacaatttacgtattccaaatacgagcacgaacagcggcaggttatggaacaaactcacgcaaatttgaattcgaaacttcacccgattcttttagcataagtggcgaatcatcacaagtggtgatgatagctatctcagcagcagtagccataattctattaacagtagtaatttatgttttaatcggaagattctgtggatataaatcaaaacatggcgcagatgaaaaaagactacactttggaaacggccacttaaaactaccaggtctacgaacctacgtagacccacatacttacgaagatccaacacagacagtacatgaatttgcaaaagaattggacgcaacgaatatctccatagataaagtagtcggagcaggcgaatttggagaagtatgtagcggtagactaaaactaccatcaaagaaagaaatatccgttgcaataaaaaccctcaaagtaggatacaccgagaaacaaagaagagatttcctcggagaagcctcaataatgggtcaatttgaccaccctaacataatacgcctagaaggagtagtaacaaaatcaaaaccagttatgatcgtaacagaatacatggaaaatggatctttagacagctttctcagaaaacatgacgcacaatttactgttatacaacttgtaggtatgctaagaggaatagcctcaggtatgaaatacttatctgatatgggctatgttcaccgtgatctcgctgcaagaaacattttaattaacagcaacctcgtatgtaaagtaagtgactttggattaagtagagttctagaagacgacccagaagcagcatacacaacaagaggaggaaaaatccctataaggtggacatcaccagaagcaatagcctacagaaaatttacctcagcgtcagatgtctggtcatatggcatcgtactatgggaagtcatgagctatggagaaagaccatattgggaaatgagcaaccaagatgtcattaaagcagtagacgaaggatatcgacttccaccaccaatggactgccctgcagccttgtatcaattaatgttagattgttggcaaaaagatagaaataatagacccaaatttgaacaaattgtatcaattttagataaactaattaggaatccgggatcattaaaaataatcacatccgcagcagcaagacccagtaacctattattggatcaaagtaatgttgatataacaacattcagaactactggagattggcttaacggtgtttggactgcccattgcaaagaaatattcacaggagttgaatattcctcatgtgatacaatagctaaaatctcaacagatgatatgaaaaaagtcggtgtcacagtagtgggccctcaaaaaaaaataatcagtagcataaaagccctggaaacccaatcaaaaaatggacctgttccagtataa

SEQ ID NO: 3684 - RNA, 1389 nt, synthetic construct
  misc_feature 1..1389: note = BAG54127 variant
  source 1..1389: mol_type = other RNA
atgccaatgtcaacaattttaccagtaacatctccctgtttaccagcaacaggagttacagtatgggaattaatgacatttggcgctgaaccatacgccggtcttagactagcagaagttccagatctattagaaaaaggagaacgacttgcacaaccacaaatctgtaccatagatgtatacatggtaatggtaaaatgctggatgatagatgaaaatattagaccaacgtttaaagaacttgctaatgagtttacaaggatggctagagacccacctagatatcttgtaataaaacgagaatcaggaccaggtatagcaccaggaccagaaccacatggattaacgaataaaaaattagaagaagtagaacttgaaccagaattagatctagatttagacctcgaagcagaagaagataacttagcaacaactactctagggtcagctctatcactacctgtaggaacactaaaccgaccaagaggaagtcaatcattattatcaccatcttcgggatatatgccaatgaatcaaggaaatttaggagaatcatgccaagaatcagcagtctcaggatcatcagagagatgtccaagaccagtatcattacatccaatgccacgaggttgtttagcttctgaaagttcagaaggacacgtcacaggttcagaagcagagttacaagaaaaagtttcaatgtgcagatcaagaagtagatcaaggtcaccacgacctagaggtgactcagcataccatagccaaagacattcactccttacgccggtcacaccactaagtccaccaggactagaagaagaagacgtaaacggatatgtaatgccagatacacatcttaaaggaacaccatcatcaagagaaggaacattatcctcagttggactaagttctgtattaggaacagaagaagaagatgaagatgaagaatatgaatatatgaatagaagaagaagacatagccccccacatcctccaagaccaagctcattagaagagttaggctacgaatatatggacgttggttcagacctatcagcatccttaggatcaacccaaagctgccctttacatccagtaccaataatgccaacagccggaacaacaccagatgaagattatgaatatatgaacaggcaaagagatggaggaggaccaggcggagattacgcagcaatgggagcatgccctgcatcagaacaaggttatgaagaaatgagagcattccaaggaccaggacatcaagcaccacacgtacattatgcacgattaaaaacattacgatcattagaagcaacagactcagcattcgataatccagattattggcattcacgattattcccaaaagcaaatgcacaaaggacataa

SEQ ID NO: 3685 - RNA, 2766 nt, synthetic construct
  misc_feature 1..2766: note = BAG57868 variant
  source 1..2766: mol_type = other RNA
atgagagctaacgatgcattacaagtactaggacttttattcagtttagcaaggggatccgaagtaggaaacagccaggctgtatgtccaggcacgttaaatggcttaagcgtaaccggagatgcagaaaaccaataccaaaccttatataaattatatgaaaggtgtgaagtcgtaatgggtaacttagaaatagttttaactggccataatgctgatctttcatttctacaatggatcagagaagtaaccggatacgtcctagtagctatgaatgagttctcgacactacctctacctaatctgagagttgttagaggtacacaagtatacgatgggaaattcgctatctttgtaatgctaaattataatactaactctagtcacgcattaagacaactccgattaacacaactaacagaaatactctcaggtggggtatatatagagaaaaacgataaactatgtcatatggatactatagattggagagacatagtgagagatagagatgcagaaatcgtagttaaagataacggaagaagttgtccaccatgtcatgaagtatgtaaaggaagatgctggggtcctggaagtgaagattgtcagacactaactaagactatatgcgcacctcaatgcaatggacattgtttcggaccaaaccccaatcaatgctgccatgatgaatgtgccgggggatgcagtggaccacaggatacagactgctttgcatgtagacattttaacgattccggtgcatgcgtcccaagatgtccacaacctctagtttacaataagctaacatttcaattagaaccaaacccacatacaaaataccaatatggaggtgtatgtgtcgcctcatgtccccataatttcgttgtagatcaaactagctgcgtaagagcctgtccaccggacaaaatggaagtagacaaaaacggacttaaaatgtgtgaaccatgcggagggctatgtcccaaagcatgtgaaggcactggcagtggatctagatttcaaactgttgatagcagtaatatagacggatttgtaaattgtactaaaatactaggcaacctagattttctcataaccggtcttaatggcgatccttggcataaaataccagcgttagatccagaaaaattaaacgtttttcgaacagtacgagaaattacaggctatcttaatatccaatcttggccaccacatatgcataattttagtgtattttcaaacctaacgactattggaggaagatcattatataatagaggcttttcattactgattatgaaaaacctaaacgtaacatcactaggatttagatcattaaaagaaatttcagccggcagaatatacatatcagccaatagacaactatgttatcatcattcattaaactggaccaaggtactcaggggaccgaccgaagaaagattggatatcaaacataataggcctaggcgagattgcgtagcagaaggaaaagtatgtgatccattatgtagcagtggaggatgttggggacccggtcccggacaatgcctatcatgcagaaactatagcagaggcggagtatgcgtaactcactgtaatttcttaaacggtgaaccaagagaatttgcacatgaagctgaatgctttagttgtcacccagaatgccaaccaatggaaggaaccgcaacgtgtaacggcagtggatcagatacctgcgcacaatgcgcacactttagagacggaccccattgtgtatcttcttgtccacatggagtactaggagcgaaagggccaatttataaatatccagatgtacaaaacgaatgtagaccatgtcatgaaaactgtactcagggttgtaagggaccagaattacaagactgtctaggacaaacattagtcctaataggaaaaacacatctaacaatggccttaactgttattgccgggctagtagtaatatttatgatgctaggaggaacattcttatattggagaggtagaaggatacaaaacaaacgagcaatgcgacgatacttagaacgaggtgaaagtatagaacctttagatccatccgaaaaggcaaataaagtcttagcaagaatatttaaagaaacagaactaagaaaactaaaagtgttaggttctggagtctttggaacagtccataaaggggtttggatcccagagggagaaagtattaaaatcccagtatgtataaaagtaatagaagataaatcaggtagacaaagtttccaagcagtgacagatcatatgttagctataggctcgttagaccatgcccatatcgttagattacttggtttatgtccaggcagttctctacaattagtaacacagtatctaccactaggcagcttattagatcatgttaggcaacaccgtggagcattaggaccacaactattattaaactggggagtacaaatcgcaaaaggtatgtactacctggaagaacacggaatggtacaccgaaatttagctgcaagaaatgttttacttaaatctccatcgcaagtacaagttgctgattttggagtagcagacttacttccaccagacgataaacaacttctctattcagaagccaaaaccccaataaaatggatggccctagaatctatacatttcggaaaatatactcatcaaagtgatgtatggagttacggacaatgtatatggatgccaagtttaccatcactagcaccagtatccaacctacctttcgaaacacctagctaa

SEQ ID NO: 3686 - RNA, 3927 nt, synthetic construct
  misc_feature 1..3927: note = AAB59446 variant
  source 1..3927: mol_type = other RNA
atgaagcctgcaacagggctctgggtatgggtcagcttattggtagccgcaggaactgtccaaccaagtgacagtcaatctgtatgtgcaggaacagaaaacaaattaagttctctgtccgatctcgaacaacaatatcgagcactcaggaaatattatgaaaattgtgaagtggttatgggaaatttagaaataacatcaattgaacacaaccgcgacctatcctttttaagatcagttagggaagtgactggatatgtattagttgctttaaaccaatttcgatatttacctctagaaaatctgcgaataatacgaggcacgaagttatatgaagatcgatatgcattagctattttcctaaattatagaaaggatggaaactttggcttgcaagagctaggacttaaaaatttaaccgaaattttaaatggtggtgtttatgtcgatcaaaataaattcttatgctacgcagatacgatccactggcaagatattgtacgaaacccatggccgagtaatctcactctagtttcaacaaatggaagtagtgggtgtggcagatgtcacaaatcttgcacaggtagatgttggggaccaactgaaaatcactgccaaacactgacaagaaccgtatgcgccgaacaatgcgatggaagatgttacggaccatacgtatccgactgttgtcatcgcgaatgtgcaggcggctgtagcggtcccaaggatacagactgtttcgcgtgtatgaactttaacgactccggagcctgcgtaacacaatgcccacaaacatttgtatacaacccaactacctttcaattggaacataatttcaatgcaaagtacacatacggagcattttgcgttaagaaatgccctcacaacttcgttgtagactcttcttcctgcgtaagagcctgcccatcatcaaaaatggaagttgaagaaaacggaataaaaatgtgtaaaccctgcacagacatatgtccgaaagcatgtgatggaattggaaccggctcattaatgagtgcccaaactgtagacagttccaatatagataaatttataaattgtacaaaaattaacggtaatcttatatttctagtaacaggtattcatggagatccatacaacgctatagaagcaatagacccagaaaaactaaacgtattccgaacggttagggaaataactggatttttaaatatacagtcatggcctcctaacatgacagatttcagtgtatttagtaatttagtaacaatcggtggacgcgtactttatagtggactatctctattaattttaaaacaacagggtatcacttcactacaatttcaaagtctaaaagaaatatccgctggtaatatatatataaccgataatagtaacctatgttattatcatacaataaattggacaactctattctctacaatcaatcaacgaattgtaataagggataacagaaaagcagaaaattgtactgcagaaggcatggtatgtaatcacttatgtagtagtgacggctgctggggtcctggacctgatcaatgcttatcttgtagaagatttagtagaggaagaatatgcatagaatcctgcaatttatacgacggagaatttcgcgagtttgagaatggaagtatatgtgtagaatgtgatccccaatgcgagaaaatggaagatggtttactaacatgccacgggcctggaccagataattgtacaaaatgcagccatttcaaagatggacccaattgtgtagaaaaatgcccagatggacttcaaggcgcaaattcatttatttttaaatatgcagatcccgatcgagaatgtcatccttgtcatccaaactgtacacaaggatgtaatggaccaacatctcatgattgtatatattatccttggacgggacattcaacactacctcaacatgcaagaactcccctgatcgccgctggagttataggtgggctattcatcctagtaatagttggcttaacatttgcagtttatgtcagaaggaaatctattaaaaagaaacgagcacttaggaggtttttggaaactgaattagtagaacctttaacaccgtcgggaacagcaccaaaccaagcacaactaagaatacttaaagaaaccgaactaaaaagagtaaaggtattgggcagcggagcattcggaacagtatataaggggatatgggtaccagaaggtgaaacagtcaaaatacctgtagcaataaaaatactgaacgaaacaacaggcccaaaagcaaacgtagagttcatggatgaagcactaataatggcatctatggaccacccacaccttgtacgattactaggagtatgcctatctccaacaatacagctagtgacccaactaatgcctcacggttgtctcctagaatatgtacatgaacacaaagacaacataggaagtcaactattgttaaactggtgtgtacaaatagcaaaaggaatgatgtatttagaggaacggcgtttggtccatagagatctagctgcgcggaatgttctagtaaagtcacctaatcatgtgaaaataactgacttcggattagcaagactcctcgaaggagatgaaaaagaatacaatgctgatggcggtaaaatgccaattaaatggatggcactagaatgtatacattacagaaaatttactcaccaatcagatgtttggtcatatggagtgacaatctgggaattaatgactttcggtggaaaaccatacgatggaatcccaacgagagaaatacctgatctcctggaaaagggtgaaagattaccgcaacccccaatatgcacgatagatgtttatatggttatggtaaaatgctggatgatagatgcagatagcagacctaagttcaaggaattagctgcagaattttcacgaatggccagagacccccaacgatacctggtaatccaaggagatgatcgaatgaaactacccagtccaaacgactccaaattctttcaaaatcttctagatgaagaagacttggaagacatgatggatgcagaagaatatttagtacctcaagcatttaatattccaccgccaatctatacttcaagagctagaatagactctaatcgatcagagataggtcactcaccaccccctgcctatactccaatgtctggaaatcaatttgtatatcgagatggcggatttgccgcagaacaaggagtatctgttccatatcgtgcacccacctcaacaataccagaggcacccgtagcacaaggagctacagcagaaatctttgacgacagttgttgtaacggtacgttaagaaaaccagtcgcaccacatgtacaagaagattcaagcacacaaagatattctgccgaccctacagtattcgcaccagaaagatcaccaaggggagaactggatgaagaagggtacatgactccaatgcgagataaaccaaaacaagaatatttaaatcctgtcgaagaaaatcctttcgtatcacggaggaaaaacggagacctccaagcgctggataatcccgaatatcacaatgcgagtaatggaccacccaaagcggaagacgaatatgtaaacgaaccactatatctaaacacttttgcaaacaccttaggaaaagcagaatatttaaagaataacatattgagtatgccagaaaaagcaaagaaagcatttgacaaccctgactactggaatcattcgttaccaccaagatcaactctacaacatccagattatttacaagaatactctacaaaatacttctataaacaaaatggaagaatacgcccaatagttgccgaaaatccagaatacctatcagagttctcacttaaacctgggactgttctcccaccacccccttatcggcatcgaaataccgtagtataa

SEQ ID NO: 3687 - RNA, 1461 nt, synthetic construct
  misc_feature 1..1461: note = CCDS46648.1 variant
  source 1..1461: mol_type = other RNA
atgatacaaacagttcccgacccagcagcacacataaaagaagcactatcagtagtttcagaagatcaatctcttttcgaatgcgcatacggtactccacacttagcaaaaacagaaatgactgcatcatcatcatccgactacggacaaacatcaaaaatgtcaccacgtgttccacaacaagactggctatcacaaccaccagcaagagtcactataaaaatggaatgcaatccatcccaggtaaacggttcaagaaattctccagacgaatgctccgtagcaaaaggaggaaaaatggtaggctccccagatacagtcggtatgaactatggatcatacatggaagaaaaacatatgcccccacccaacatgacaacaaacgaaagaagagttatagtacctgcagatccaacactatggagtacagaccacgtaagacaatggctagaatgggcagtaaaagaatacggactaccagatgtaaacatacttctattccaaaacatagatggcaaagaattatgcaaaatgacaaaagacgactttcaacgattaacaccatcatataacgcagatatattactatctcacctccactacctacgagaaacacctttaccacacttaacctcagacgacgtcgacaaagcactacaaaactcacctagacttatgcacgcaagaaataccggaggcgcagccttcatattcccaaacacatctgtataccccgaagcaacacaaagaataacaacacgaccagacctaccatacgaaccacctcgacgatcagcttggaccggacacggacaccccacaccacaatcaaaagcagcccaaccatcccccagcactgtacctaaaacagaagaccaacgaccacaactcgatccataccaaatattaggaccaacatcctctagattagctaacccaggatcaggtcaaatccaattatggcaattccttctagaattactatcagattcttcaaactcatcatgcatcacctgggaaggtacaaacggagagttcaagatgaccgacccagatgaagttgcaagaagatggggagaaagaaaatcaaaaccaaacatgaactacgacaaattatcgagagccctaagatactattacgataaaaacataatgacaaaagtacacggaaaaagatacgcatataaattcgatttccacggcatagcacaagcattacaaccacatccaccagaatcatcattatacaaatacccatcagatttaccatacatgggctcataccatgcccatccacagaaaatgaacttcgtagcaccacatccccctgctttaccagttacttcatcctccttcttcgctgccccaaacccatactggaactcacctacaggaggaatatatccaaatactcgactaccaacatctcacatgccaagtcacttaggaacatactactaa

SEQ ID NO: 3688 - RNA, 1359 nt, synthetic construct
  misc_feature 1..1359: note = AAA19786 variant
  source 1..1359: mol_type = other RNA
atgagcgaaacccccgctcaatgcagcataaaacaagaacgcatttcatatacaccaccagaatcaccagtaccatcctatgcatcttcaacaccattacatgtaccagtaccccgagccttaagaatggaagaagattcaataagactccctgcacatttaagactacaaccaatatactggtctagagacgatgtagcacaatggttaaaatgggccgaaaacgaattctcactacgacctatagatagcaacactttcgaaatgaatggcaaagcactactattactaacaaaagaagacttcagataccgatcaccacacagcggagatgtattatatgaattattacaacacatattaaaacaacgaaaaccacgaatactattctcacccttctttcatccaggaaattcaatacatacacaaccagaagtaattctacatcaaaatcacgaagaagacaactgcgtacaaagaacaccaagaccatcagtagataacgtgcaccataaccctccaacaatcgaattactacacagatcaagatcaccaataaccacaaatcacagaccatcccccgaccccgaacaacgacctttacgatcaccactagacaacatgattcgccgcctctctccagcagaaagagctcaaggaccaagaccacaccaagaaaacaaccaccaagaatcctatcccctatcagtatcaccaatggaaaacaatcactgcccagcctcatccgaatcacacccaaaaccatcttcacccagacaagaatctacaagagtaatacaactaatgccatctcccatcatgcacccactcatactcaatccccgtcactcagtagatttcaaacaatctcgactctcagaagacggattacacagagaaggaaaaccaataaacctctcacatagagaagacttagcatatatgaaccacataatggtatctgtatccccacccgaagaacatgctatgcctataggtcgaattgcagactgccgcctcctatgggactatgtatatcaactcctctcagactccagatacgaaaacttcatccgatgggaagacaaagaatcaaaaatctttagaatcgtagaccccaacggacttgcaagactatggggaaaccataaaaatcgaacaaacatgacatatgaaaaaatgtcaagagcactacgacactattacaaattaaacataataagaaaagaaccaggacaacgactactattccgattcatgaaaactcctgatgaaataatgtcaggccgcactgacagactagaacacctagaatcacaagaattagacgaacaaatataccaagaagacgaatgctag

SEQ ID NO: 3689 - RNA, 1971 nt, synthetic construct
  misc_feature 1..1971: note = AAH04817 variant
  source 1..1971: mol_type = other RNA
atggccagtacagattactcaacatattcccaagcagcagcccaacaaggatatagcgcttatacagctcaaccgacgcaaggctatgcacaaacaacacaagcatatggacaacaaagttacggaacttatggacaaccaacagatgttagctacacacaagcacaaaccacagctacatatggacaaacagcttatgctacatcatatggccaaccaccaacaggttacacaaccccgaccgctccacaggcttatagtcaaccagtacaaggatatggaacaggggcatacgatactacgacagcaaccgtcacaaccacacaggcaagctatgcagcacaatcagcatatggaacacaaccagcatacccagcatatggacaacaacccgcagcaacagcacccacaagaccacaagatggcaataaaccaacagaaacaagtcaaccacagtcatcaacaggtggatacaatcaaccatctttagggtatggtcaatcaaattattcgtacccgcaagtaccaggttcctatccaatgcaaccagtaactgctcctccatcttatccaccgacaagctattccagtacacaaccgacatcttatgaccaaagttcatatagtcaacagaatacttatggtcaaccaagttcatatggtcaacaatccagttacggccaacaatcaagttatggtcagcagccacctacttcatatccaccacaaaccggaagttattctcaagcacccagccaatatagtcaacaatctagttcatatggacaacaaagctcatttcgacaagatcatccaagtagtatgggcgtatatggacaagaatcaggaggattttcaggaccaggtgaaaatagatcaatgtctggcccagataacagaggcagaggaagaggaggatttgaccgaggaggaatgtcaagaggaggaagaggaggaggaagaggaggcatgggaagcgcaggagaaagaggaggattcaataaaccaggtgggccgatggatgaaggaccagacttagatttaggaccaccagtagatccagatgaagacagcgacaatagcgccatttatgtacaaggacttaacgacagtgtaactctagatgacctggcagatttctttaaacaatgtggagtagtgaaaatgaacaaaagaaccggtcaaccaatgattcatatctatcttgataaggagacaggaaagcctaaaggtgatgcaacagtttcatatgaagatccaccaacagcaaaagcagcagttgaatggtttgatggaaaagattttcaaggttcaaaattaaaagtaagtttagcaagaaagaaaccaccaatgaatagtatgagaggaggactaccgccacgagaaggaagaggtatgccaccgccactaagaggaggaccaggaggaccaggaggaccaggaggtccaatgggaagaatgggcggacgaggaggagatcgaggaggattcccaccaagaggtccaagaggaagtagaggaaaccctagtggtggaggaaatgtgcaacatcgagcaggagattggcaatgcccaaatccgggatgcggtaaccaaaattttgcatggagaacagagtgcaatcaatgtaaagcaccaaaaccagaaggattcctaccaccacctttcccaccaccaggtggagatagaggcagaggtggccctggaggaatgagaggtggcagaggaggattaatggaccgaggtggtccaggaggaatgtttagaggaggtagaggtggagatagaggaggatttagaggcggtcgaggcatggataggggaggattcggtggaggaagaagaggaggacccggaggaccaccaggaccattaatggaacaaatgggaggcaggcgaggaggaagaggtggaccaggtaaaatggacaaaggagaacatagacaagaaagaagagatcgaccttattaa

SEQ ID NO: 3690 - RNA, 1998 nt, synthetic construct
  misc_feature 1..1998: note = AEA07595 variant
  source 1..1998: mol_type = other RNA
atgggacaaacaggcaaaaaatcagaaaaaggaccagtctgctggaggaaaagagtaaagtctgaatacatgagattaagacaactaaaaagatttagacgagcagatgaagtaaaaagcatgtttagctcaaacagacaaaaaatactagaaagaaccgaaatactaaaccaagaatggaaacaaagaagaatacaaccagtccacatattaacatcagtaagttcattaagaggtacaagagaagttgaagacgaaacagtactacataacataccatatatgggcgatgaagtacttgatcaagatggcacattcatcgaagaactcataaaaaattatgatggaaaagtgcatggagacagagaatgtggatttattaatgatgaaatatttgtagaattagtaaacgcgctaggtcaatataacgatgatgacgacgacgacgatggagatgacccagaagaacgagaggaaaaacaaaaagaccttgaagaccatagagacgacaaagaaagcagacctccaagaaaatttcctagtgacaaaatatttgaagccataagctcaatgttcccggataaaggcactgcggaagaattaaaagaaaaatacaaggaattaacagaacaacaactacctggagcgctaccaccagaatgtacaccaaatatcgacggaccaaacgctaaaagcgtacaaagagaacaatcactacatagcttccataccttattttgccgaagatgttttaagtatgattgctttctacatccatttcacgcaacgcctaatacctacaaaagaaaaaacacggaaacagcactcgataacaagccatgtggacctcagtgctatcaacacctagaaggagcaaaagaatttgccgctgcactaacagcagaaagaataaaaacacctccaaaaagaccaggaggaagaagaagaggaagactcccaaacaattcatcgaggccaagcacaccaacaataaatgtcttagaatcaaaagatacagattctgatcgagaagcaggaactgaaacaggaggagaaaacaacgataaagaagaagaagaaaaaaaggatgaaacttcaagcagcagcgaagcaaacagcagatgccaaaccccaataaaaatgaaacccaatatagaaccaccagaaaatgttgaatggtctggggctgaagcgagcatgttccgggtactgatcggaacatactacgacaatttttgtgcaatagcaagattaataggaacaaaaacttgtagacaagtatatgaatttcgagtaaaagaatcaagtataatagcaccagcaccagcagaagatgtagacactccacctcgaaaaaaaaaaagaaaacatagactatgggctgctcactgtcgaaaaatacaactaaaaaaaggacaaaatagatttccaggatgcagatgtaaagcacaatgtaatacaaaacaatgtccctgttacctagcagtcagagagtgtgatccagatttatgcttaacgtgcggagcagcagatcattgggattcaaaaaatgtaagctgtaaaaactgctctatacaacgaggatcaaaaaaacatttattattagcgccaagtgacgtcgccggatggggaatttttataaaagacccagtacaaaaaaatgagtttatctcagaatattgcggtgagatcatatcacaagatgaagcagatagaagaggcaaagtatatgacaaatatatgtgcagctttttattcaacttaaataacgactttgtagtagacgcaacaagaaaaggcaacaaaatacgatttgcaaaccatagcgttaatccaaactgctacgcaaaagtcatgatggtaaatggcgatcacagaattggtatattcgcaaagcgagccatccaaaccggagaagaactatttttcgattatagatattcacaagcagacgcccttaaatatgtaggcatagaaagagagatggaaataccataa

SEQ ID NO: 3691 - RNA, 1005 nt, synthetic construct
  misc_feature 1..1005: note = EAW80068 variant
  source 1..1005: mol_type = other RNA
atgggacaaacaggaaaaaaaagtgaaaaaggaccagtatgctggagaaaacgagtaaaatcagaatacatgagattaagacaattaaaaagattcagacgagcagacgaagtaaaaagtatgttctcatcaaacagacaaaaaatactagaaagaacagaaatattaaatcaagaatggaaacaaagaagaatacaacccgtacatatattaacatctgtatcaagcctaagaggtacaagggaatgctcagtaacatcagacctcgacttcccaacccaagtaataccactaaaaacactaaacgcagtagcaagcgtaccaataatgtacagttggtcaccattacaacaaaactttatggtagaagacgaaacagtgttacacaacataccatacatgggagacgaagttctagaccaagacggtacattcatagaagaactaataaaaaactacgacggaaaagtacacggagacagagaatgtggatttataaatgatgaaatattcgttgaattagtaaacgctttaggacaatataacgacgacgacgacgatgacgatggagacgacccagaagaaagagaagaaaaacaaaaagacctcgaagaccatagagacgataaagaaagtagaccaccaagaaaattcccttcagacaaaatatttgaagcaataagctcaatgttcccagataaaggaacagcagaagaactaaaagaaaaatacaaagaattaacagaacaacaactaccaggagcattaccaccagaatgcaccccaaacatagacggacctaacgcaaaaagcgtacaaagagaacaatcactacacagcttccacacactattctgcagacgatgctttaaatacgactgtttcctacacccatttcacgccacaccaaacacatataaaagaaaaaatacagaaacagcactagacaacaaaccatgcggaccacaatgctatcaacacctcccactcttaccaagaaactaa

SEQ ID NO: 3692 - RNA, 195 nt, synthetic construct
  misc_feature 1..195: note = CCO13726 variant
  source 1..195: mol_type = other RNA
atgccactagtaaacataatgatgatgacaatgatgatgatggaaacaatactaaaaaaagaaaaaaaatcaagaaaaatatggagaataacagaaatgataaaaaaagcagcacacctaggaaacttcctactaataaaattcctaaaaccattcccacaatgcttccaaataagagcacaacaaaaaaactaa

SEQ ID NO: 3693 - RNA, 2241 nt, synthetic construct
  misc_feature 1..2241: note = AAC51520 variant
  source 1..2241: mol_type = other RNA
atgggccagacaggaaaaaaatcagaaaaaggaccagtttgttggaggaaaagagtaaaatcggaatatatgcgcttaagacaattaaaaaggttcagacgagcagacgaagttaaatcaatgttcagttcaaatagacaaaaaattctagaaagaacagaaatactaaatcaagaatggaaacaaagacgaatacaaccagtacacatactaacgtctgtttcttcattaagaggtacgagagaatgtagtgtaacatcagatttagactttcctacacaggtaataccactaaaaactttaaacgcagtagcaagtgtaccaataatgtactcatggtcacctttacaacagaattttatggtagaagatgaaactgtactacataatataccatacatgggtgacgaagtactagatcaagatggaacttttatagaagaattaattaaaaactatgacggaaaagtacacggggacagggaatgcggattcatcaacgatgaaatatttgtagagctcgtaaacgctctaggccaatataacgacgacgatgacgatgatgacggcgatgacccagaagaaagagaagaaaaacagaaagacctagaagaccacagagacgataaagaaagcagaccaccacgaaaatttccttctgataaaatcttcgaagcaatatcaagtatgtttccggataaaggaacagcagaagaactaaaagaaaaatataaagaactaactgaacagcaattacctggagctctccctccagaatgcacacctaatatagatggaccaaatgctaagtctgttcaacgagaacagtcattacactcattccatacattattttgtagaagatgtttcaaatacgattgttttctacacccatttcacgccacaccaaacacatataaaagaaaaaacacagaaacggcattagacaataaaccatgtggaccacaatgctaccaacacctagaaggcgcaaaagaattcgcagccgcactgacagcagaaagaataaaaactccaccaaaaagaccaggtggacgaagaagaggaagactaccaaataattcttctagaccgtcaacacccacaataaatgtactcgaatcaaaagatacagactccgatagagaagcaggaacagaaaccggaggggaaaacaacgacaaagaagaagaagaaaaaaaagacgaaacaagcagtagctcagaagcaaacagccgatgtcaaactccaataaaaatgaaacctaatattgaacctcctgaaaatgttgaatggtcaggagcagaagcaagcatgttcagagttttaataggaacatactatgataatttttgcgcaatagcaagactaatagggactaaaacatgcagacaggtatacgaattccgagtcaaagaaagctcaataatagcaccagctccggctgaagacgtcgatacacccccaagaaaaaaaaaaagaaaacatcgattgtgggccgcccactgcaggaaaatacaactaaaaaaggatggatcaagtaatcacgtatacaactatcaaccttgtgaccaccctagacaaccctgtgattcatcatgtccatgtgtaatcgctcaaaatttttgtgaaaaattttgtcaatgctcatcagaatgtcaaaatagatttccaggatgcagatgcaaagcacaatgcaatacaaaacaatgtccttgttatttagcagtaagagaatgcgatccagatctctgtttaacatgcggagcggcggaccattgggatagcaaaaatgtatcttgtaagaattgcagtatccaaagaggatctaaaaaacatcttctattagcaccatcagatgtagcgggatggggaatatttatcaaagacccagttcaaaaaaacgaattcatatcagaatactgtggtgaaataatatcacaggacgaagcagatagaagggggaaagtatatgataaatatatgtgcagttttctatttaatctaaacaacgactttgtagtagacgcgacgagaaaagggaataaaattagattcgcaaatcattctgtaaacccaaactgctacgctaaagtaatgatggttaacggagatcatcgaataggtatctttgctaaaagagcaatacaaacaggggaagaactgtttttcgattaccgatattcacaagccgacgctttaaagtacgtaggcatagaacgagaaatggaaattccataa

SEQ ID NO: 3694 - RNA, 2124 nt, synthetic construct
  misc_feature 1..2124: note = AEN79481 variant
  source 1..2124: mol_type = other RNA
atgggacaaacaggcaaaaaatcggaaaaaggaccagtatgctggcgaaaaagggtcaaatcagaatatatgaggttacgacaactaaaaagatttagaagggcagatgaagttaaatccatgttctcatctaatagacaaaaaatcttagaacgaacagaaatacttaatcaagaatggaaacaaagaagaatacaaccagtacacatattaacaagcgtaagtagtttaaggggaacaagagaggtcgaagacgaaactgtattacacaacataccatatatgggagatgaagtactagatcaagacggaacatttatagaagaactaataaaaaactatgacggaaaagttcatggagacagggaatgtggttttataaacgatgaaatattcgtagaattagtcaatgccctaggacaatataatgatgacgatgatgatgacgatggagacgacccagaggaacgagaagaaaaacaaaaggacctagaagaccatagagacgataaagaaagtcgaccaccaaggaaattcccttctgacaaaatcttcgaagcaattagctctatgtttccagataagggaacagcagaagaattgaaagaaaaatacaaagaacttacagaacaacaattacccggagcacttccaccagaatgtacacccaatatagacggtccaaatgccaaatcagtacaacgagaacaaagcctacattcatttcacacgctattttgcagacgttgtttcaaatacgattgttttctacacccattccatgccacaccaaacacttataagagaaaaaatacagaaacagcattagataataagccatgtggaccacaatgctatcaacatctagaaggcgcaaaagaattcgcagcagcactaacagcagaaagaataaaaacaccacctaaacgaccgggaggtagaagacgaggaaggctcccaaacaattcatcacgcccaagtacaccaacaataaacgtattagaatcaaaagatactgatagcgatagggaagcaggtacagaaacaggcggcgaaaataatgacaaagaagaagaagaaaaaaaagacgaaacttcaagtagttctgaagcaaattctagatgtcaaacaccaatcaaaatgaagccaaatatagaacccccagaaaatgtagaatggtctggagctgaagctagcatgttcagagtcctaataggaacatattacgataatttttgtgcaatagcaagactcataggaacaaagacatgcagacaagtctacgaatttagagtcaaagaaagtagtataatcgcaccagcacccgccgaagacgtagatactccaccaaggaaaaaaaaaagaaaacacagactttgggcagcacactgccgtaaaatccagctaaaaaaagatggatcaagcaatcacgtatacaattaccaaccatgcgaccatccaagacaaccttgcgacagcagctgtccctgcgtaatagcccaaaacttctgcgaaaaattctgtcaatgttcctcagaatgccaaaacagatttccaggatgcagatgcaaagcacaatgcaacacaaaacaatgcccatgttaccttgcagtaagagaatgcgacccagatctttgtttaacatgcggcgcagcagatcactgggattctaaaaacgttagttgtaaaaattgttcaatccaaagaggatcaaaaaaacacctattactagccccctcagatgtagcaggatggggaatatttataaaagaccccgtacaaaaaaatgaatttatatcagaatattgtggcgaaattataagccaagatgaagctgacagaaggggaaaagtatacgataaatatatgtgctcgtttctttttaacctaaataatgacttcgtagtggatgcaacacgaaaaggaaataaaataagattcgcaaaccatagcgtaaaccccaactgttacgcaaaagtaatgatggtgaacggtgatcatagaatcggaatattcgcaaaaagagctatacaaacgggagaagaactattcttcgattacagatactcacaagcagacgcactaaaatatgtaggcatagaacgagaaatggaaataccataa

SEQ ID NO: 3695 - RNA, 399 nt, synthetic construct
  misc_feature 1..399: note = AAB87141 variant
  source 1..399: mol_type = other RNA
atggtagaagcattctgtgcaacatggaaactaacaaactcacaaaatttcgatgaatatatgaaagcattaggagtaggatttgcaacaagacaagtaggaaacgtaacaaaaccaacagtaataatatcacaagaaggagataaagtagtaataagaacactatcaacatttaaaaatacagaaatatcattccaattaggagaagaatttgatgaaacaacagcagacgatagaaattgcaaaagcgtagtatcactagatggagataaattagtacatatacaaaaatgggacggaaaagaaacaaatttcgtaagagaaataaaagacggaaaaatggtaatgacattaacattcggagatgtagtagcagtaagacattacgaaaaagcataa

SEQ ID NO: 3696 - RNA, 765 nt, synthetic construct
  misc_feature 1..765: note = CAA36870 variant
  source 1..765: mol_type = other RNA
atgtggcaactactactaccaacagcactattactattagtatcagcaggaatgcgaacagaagatctaccaaaagccgtagtattcctagaaccacaatggtacagagtactagaaaaagactcagtaacactaaaatgccaaggagcatattcaccagaagacaactcaacacaatggttccacaacgaatcactaatatcatcacaagcctcatcatacttcatagacgccgcaacagtagacgactcaggagaataccgatgtcaaacaaacctatcaacactatcagacccagtacaactagaagtacacataggatggttactactccaagcaccaagatgggtattcaaagaagaagacccaatacacttaagatgccactcatggaaaaacacagcattacataaagtaacatacctacaaaacggaaaaggaagaaaatacttccaccacaactcagacttctacataccaaaagccacactaaaagactcaggatcatatttctgcagaggattattcgggtctaaaaacgtatcatcagaaacagtcaacataacaataacacaaggactcgcagtatctaccatatcatccttctttcccccaggatatcaagtatcattctgtctagtaatggtattactattcgcagtagatacaggactatacttctcagtaaaaacaaacataagatcatcaacaagagactggaaagatcacaaattcaaatggagaaaagacccacaagacaaataa

SEQ ID NO: 3697 - RNA, 873 nt, synthetic construct
  misc_feature 1..873: note = CCDS1232.1 variant
  source 1..873: mol_type = other RNA
atgggaggaggagcaggagaaagactatttacatcatcatgcctagtaggcctagtccccctaggactaagaatatccctagtaacatgcccactacaatgcggaataatgtggcaactactactaccaaccgcattactactattagtatcagcaggaatgagaacagaagacctaccaaaagcagtagtattcctagaaccccaatggtacagagtactagaaaaagactccgtaacactaaaatgccaaggcgcatactccccagaagacaacagcacacaatggttccataacgaatcactaatatcatcacaagcatcctcatacttcatagacgcagcaaccgtagatgactcaggagaataccgatgccaaacaaacctctcaacactatctgatccagtccaactagaagtccacatcggatggctattactacaagcacctagatgggtattcaaagaagaagacccaatacacctaagatgccactcatggaaaaacaccgcattacataaagtcacatatctacaaaacggaaaaggacgaaaatacttccaccacaactcagacttctacataccaaaagcaacattaaaagactcaggatcttacttctgcagaggactattcggaagcaaaaacgtatcatcagaaacagtaaacataacaatcacacaaggactagcagtttcaaccatatcatcatttttcccacccggataccaagtatcattctgcctagtaatggtattactattcgcagtagacacaggactatacttctctgtaaaaacaaacatacgatcatcaacaagagactggaaagaccacaaatttaaatggagaaaagatccacaagacaaataa

SEQ ID NO: 3698 - RNA, 807 nt, synthetic construct
  misc_feature 1..807: note = AAH74858 variant
  source 1..807: mol_type = other RNA
atgtcactatcattcctactactactattcttctcacacctaatactatcagcctgggcacacggagaaaaaagactagcaccaaaaggacaaccaggaccagcagccactgatagaaacccaagaggatcctcatcacgacaatcatcatcttcagcaatgtcttcttcatcagcatcatcatctccagctgcatcactaggatcacaaggatcaggactagaacaatcatcatttcaatggtcaccctcaggacgaagaacaggatcattatactgcagagtaggaataggattccacctacaaatatatccagacggaaaagtaaacggatcacacgaagccaacatgctatcagtattagaaatattcgcagtatcacaaggaatagtaggcatcagaggagtattcagcaacaaattcttagcaatgtcaaaaaaaggaaaactacacgcatcagcaaaattcacagacgactgtaaattcagagaaagattccaagaaaactcttacaacacatacgcatccgccattcacagaaccgaaaaaacaggaagagaatggtacgtcgccctcaataaaagaggcaaagcaaaaagaggatgctcaccaagagtaaaaccacaacacatatcaacacactttctaccaagattcaaacaatcagaacaacccgaactatctttcacagtaacagtaccagaaaaaaaaaaaccaccatcaccaataaaaccaaaaatacccttatccgcaccaagaaaaaacacaaattccgtaaaatacagattaaaattcagattcggctaa

SEQ ID NO: 3699 - RNA, 117 nt, synthetic construct
  misc_feature 1..117: note = AAB06462 variant
  source 1..117: mol_type = other RNA
atgagcacaagatgtggagaagcaggaagagcaagaggaacacaaccacatagaggatacagagcacaaaaccaaccatataaaatgcacttaggaccaccaagactagaagaataa

SEQ ID NO: 3700 - RNA, 2466 nt, synthetic construct
  misc_feature 1..2466: note = AAA59470 variant
  source 1..2466: mol_type = other RNA
atggtctcatggggaagatttatatgcttagtagtcgttacaatggctacattatctttagctagaccctcatttagtctagtagaagatactacactagaaccagaagaaccacccacaaaatatcagatttctcagccagaagtatatgtagccgcgccaggagaatcccttgaagtaagatgtttattaaaagacgctgcagtaatatcctggactaaagatggagtccatctaggaccgaacaatcgaactgtattaattggtgaatatctacagataaaaggagcaaccccacgagactcaggcttgtatgcctgtacagcctcacgcacagtagattccgaaacctggtattttatggttaatgtcacagacgcaatttcaagtggagatgatgaagatgacacggacggagctgaagacttcgtaagcgaaaatagtaataacaaacgagcaccctattggacaaacacagagaaaatggagaaaagactacatgccgtaccagcagcaaacaccgtaaagtttagatgtccagccggtggtaacccaatgccaacgatgagatggctaaagaatggcaaagaatttaaacaggaacacagaataggcggttataaagtaaggaaccaacactggtcgctaattatggaatcagtagtaccttcagacaaaggtaattatacctgcgtagtagaaaatgaatacggatcaataaaccacacatatcacctagacgtcgtagaaagatctccgcaccgaccaatattacaagcaggcttaccagcaaacgcatccacagtagtaggaggagacgtagaatttgtgtgtaaagtctatagcgacgcgcaaccacatattcaatggataaaacacgtcgagaaaaacggatctaaatatggcccggacggactaccctatttaaaagtactaaaagcagcaggagttaatacaacagacaaagaaatagaagtattatatataagaaatgttacatttgaagacgcaggagaatatacgtgcttggccggaaatagtataggaatctcattccacagcgcatggctaactgtattgccagcaccaggcagagaaaaggaaataacagcatcaccagactaccttgaaatcgcaatatattgtataggggttttcttaatagcatgcatggtggttacggtaatactatgtagaatgaaaaacacaacaaagaaacccgacttttcaagtcaaccagctgtacataaattaactaaaagaataccattaagacgacaagtaactgtaagtgcagaaagttcgtcatcaatgaatagcaatacaccattagtacgaattacaacaagattatcaagtactgcagatactccaatgctagctggtgtctcagaatatgaattacccgaagatccaaaatgggaatttccaagggacaaattaacattaggaaaacctctaggcgaaggatgtttcggtcaggtagtaatggcagaagcagtggggatagataaagataaaccaaaagaagcagttacagtagcagtaaaaatgctaaaagatgatgccacagaaaaagatctctccgacttagtttctgaaatggaaatgatgaaaatgatagggaaacacaaaaacataataaatctcttaggagcttgtacacaagacggaccattatatgtaatagtagaatatgcatcaaagggaaacctaagagaatatttaagggctagacgacctccaggaatggaatattcatacgacattaatcgagtaccagaagaacaaatgacatttaaggacttagtttcctgtacttatcaattagctagaggaatggaatacctagcaagtcaaaaatgcatacacagagatttagctgcaagaaacgtacttgtaacagaaaataacgttatgaaaatagctgactttggcttagcaagagatatcaacaatatagattactacaagaaaacaacaaatggtagactaccagtcaaatggatggcaccagaagcactattcgatcgagtatacacacatcagtcagatgtctggagctttggagtattaatgtgggaaatatttaccctaggaggaagtccgtacccgggaataccagtagaagaactcttcaaactattaaaagaagggcacagaatggataaaccagcgaattgtacaaatgaattatacatgatgatgagagactgctggcatgctgtaccctcacaaagaccaacattcaaacaattagtagaagatttagacagaatactaacattaacaacaaatgaagaatatctagatttaagtcaaccactggaacaatattcaccctcatatcctgacacaagatcatcatgttcatcaggtgatgattcagtattttccccagatccaatgccctatgaaccgtgcctgcctcaatatccacatattaacggatctgttaaaacataa

SEQ ID NO: 3701 - RNA, 1908 nt, synthetic construct
  misc_feature 1..1908: note = EAW74574 variant
  source 1..1908: mol_type = other RNA
atggctccaccattacttttattactactagcatctggagcagcagcttgtccacttccatgtgtatgtcaaaatttatcagaatctctttctacattatgcgcacacagaggattattatttgtacctccaaatgttgatagaagaacagtggaattaagattagctgataattttatccaagctctaggaccacctgatttcagaaacatgactggattagttgatctaactctttcaaggaacgcaataacaagaataggtgcaagagcatttggtgacttagaatcgctaagatctttacatctagatggaaacagattagttgaacttggaacaggatcactgagaggccctgtaaatctacaacatttaattctatctggaaatcaactaggaaggatagcaccgggcgcattcgatgattttctagaatcacttgaagacttagacctctcttataacaaccttagacaagtaccatgggcaggtataggcgctatgcctgcactacatacattaaatctcgaccataacttaatagacgcacttccaccaggagcctttgcacaattaggtcaactaagtagactagatctaacttcaaacagactagctacactagcccctgatccactgtttagcagaggcagagatgcagaagcatcaccagcccctctagttctttcattctcaggaaatcctttacattgtaattgcgaattattatggctaagaagattagctagaccagatgacttagaaacttgtgctagtcccccaggattagctggcagatatttttgggcagtcccagaaggcgaatttagttgcgaaccaccactaatagcaagacatacacaacgtctttgggtattagaaggtcaaagagctacgttgagatgcagagctcttggcgatccggcacctacaatgcattgggtcggacctgacgatagattagtaggcaatagctctagggcacgtgcatttccaaacggtactttagaaataggagtaactggcgcaggagatgccggtggatatacatgtatagcaacaaacccggctggtgaagctactgctcgtgttgaattaagagttctcgctctccctcacgggggtaatagttcagctgaaggcggtcggccaggaccttcggatatagctgcttctgcaagaactgcagctgaaggagaaggaaccttagaatcagaaccagctgtacaagtaacggaagtaactgcaacaagtggattagtctcatggggtccaggaagaccagctgatccagtatggatgtttcaaatacaatataattcctcagaagatgaaaccttaatttacagaatagttccggcatcaagtcatcattttctattaaaacatctagttcctggagcagattatgacttatgtttattagcactatctccagcagctggtccatcagatttaacagcaacaagattattaggatgcgcacactttagtacattaccagcttcacctttatgtcacgctttacaagcacacgtactaggaggaacactaacagtagctgtcggaggtgtattagtagcagccttattagtatttacagtagcactattagtcagaggaaggggagcaggtaatggtaggctacctctaaaactttctcatgtacaatctcaaacaaatggaggaccaagtccaacacccaaagcacatcctccccgatcccctcccccaagaccacaaagatcctgttcactagatctaggagatgcaggttgttatggatatgcccgaagattaggaggagcatgggctagaagatcccattcagtacacggaggattattaggcgccggatgcagaggagtcggaggatctgcagaaagactggaagaaagtgtcgtataa

SEQ ID NO: 3702 - RNA, 3297 nt, synthetic construct
  misc_feature 1..3297: note = EAW96782 variant
  source 1..3297: mol_type = other RNA
atgccccctagacaaccacctcgccaggctggaggtggcttatcacgagaatttggtaaactattacctgcattgtcacattctcctctaggaggtctcggcagcggcagcgggtctgtagccccaggacagggacgtgcaggcgccatgggatcccgaacacctgaatcacctctacatgcagttcaattaagatggggacctagaagaaggccgcccttattgccacttctactattattactacctcctccaccgagagtaggaggtttcaacttagacgcagaagccccagctgttttatccggaccacctggttctttctttggtttttcagtcgaattttatagaccaggaactgatggagtatctgtattagttggcgccccgaaagcaaacacatcacaaccaggagttttacaaggaggagccgtctacctatgcccatggggagcatctcctacccaatgcacgcctattgaatttgactctaaaggaagtcgtttattagaatcctccctctcatctagcgaaggtgaagaacccgtagaatataaatcattacaatggtttggagctactgtacgagcccatggatccagcatattagcatgcgccccactttattcatggcgaacagaaaaagaacccttatctgaccctgtaggaacatgttacctgtcaacagacaattttactaggatactagaatatgcaccttgtcgatcggacttttcttgggcagcaggacaaggctattgccaaggtggattttccgcagaatttacaaaaacaggaagagtagtactcggaggaccgggctcatatttttggcaaggccaaatacttagcgcgacacaagaacaaatagctgaaagttactatccagaatatttaataaatctagtgcaaggccaactacagaccagacaagcatcatcaatatatgacgattcatacttaggctactctgtagcagtaggtgaatttagtggagacgatacagaagattttgtagcaggagttccaaaaggaaatcttacatacggatatgtaacaatactaaacggatcagatataagatcattatataatttctcaggtgaacaaatggcatcatattttggatacgcagtagcagcaaccgatgtcaatggtgacggattagatgatctattagtcggagcaccattactaatggatagaacaccggatggaagaccccaagaagtaggacgtgtatacgtatatcttcaacacccagcgggtatagaaccaacgccaactctcaccttgacaggtcatgatgaatttggacgatttggatcttctcttacacctctcggagatctagatcaagatggttataatgacgtagccatcggagcaccttttggaggtgaaacacagcaaggggtagtatttgtttttcccggagggccaggcggacttggctctaaaccctcccaagtattacaaccactatgggctgctagtcatacaccagactttttcggatcggcactacgaggcggtagagaccttgatggaaatggatatccagacctaatagtaggttcatttggcgtcgataaagctgtcgtatatagagggcgtcccattgtaagcgcctcagcttcattaaccatattcccagcaatgttcaatcctgaagaaagaagctgctcattagaaggtaatcctgtagcatgcattaatttatccttttgtttaaacgcatcgggaaaacatgtagctgattcaataggattcaccgtagaactacaacttgattggcaaaaacaaaaaggaggcgtacgccgcgcactattccttgcctcacgacaggccacactcacgcagacactactaatacagaatggggccagagaagactgcagagaaatgaaaatttatctaaggaatgaatctgaatttagagacaaattgagtccaatacatatagcgttaaacttttctttagacccacaagcaccagttgactcacatggattacgcccagccttgcactatcaatcaaaatctcgaatagaagataaagcacaaattctattagattgtggcgaggacaatatctgtgttccggatttacagttagaagtatttggcgagcaaaatcatgtgtatttaggtgataaaaatgcactaaacttaacatttcatgcacagaacgtaggagaaggtggagcttatgaagctgaattacgtgtaacagcaccaccagaagcagaatattctgggctcgtacgacatccaggtaatttttccagtctcagttgtgactattttgcagtaaaccaaagtagattacttgtatgcgaccttggaaatccaatgaaagccggcgctagcttatggggcggcctaagattcacagttccacacctcagggacactaagaaaacaatacaatttgattttcagatactaagcaaaaatcttaataatagtcaatcagatgtggtctcttttcgtctatcagtagaagcacaagcacaggttactctaaatggagtgtctaaaccagaagcagttctctttcctgtctcagattggcacccacgagaccaacctcaaaaagaagaagatctggggcccgcagtacaccatgtttatgaactaatcaaccaaggaccgtcatcaattagtcaaggcgttctagaattatcatgtccacaagctctagaaggccaacaattgttatatgtaacgcgtgtaactggactaaattgcactacaaaccacccaataaacccaaaaggattagaattagacccagaaggatcacttcatcaccagcagaaaagagaagcaccatcacgatcctcagcaagttcaggaccccaaattcttaaatgtccagaagctgaatgctttaggttacgctgtgaattaggaccattacaccaacaagaatcacaatcactacaactacatttcagagtttgggccaagacattcttacaaagagaacaccaaccattttctcttcaatgtgaagcggtatacaaagctctcaaaatgccatacaggatattaccaagacaattaccgcaaaaagaacgacaggtagcaacagcagtacaatggaccaaagcagaaggatcatatggagtgcctttatggattataatcctcgcaatactgttcggtctactgttacttggattacttatctacattctttataaattaggctttttcaaaagatcactaccatatggcacagccatggaaaaagcacaattaaaacctcctgcaacatcagatgcctaa

SEQ ID NO: 3703 - RNA, 3597 nt, synthetic construct
  misc_feature 1..3597: note = EAX08808 variant
  source 1..3597: mol_type = other RNA
atggctgaacacccgccactacttgatacgacacaaatcttatcatcagatataagcctactttccgccccaatagtttcggccgatggtacccaacaagtaatattagtccaggttaatcctggcgaggcttttacgattagaagagaagatggccaattccaatgtataaccggaccagcgcaggtaccaatgatgtccccaaacggctcagtacccccgatttacgtcccaccaggatacgcacctcaagtaattgaagacaatggagtacgaagagtagtagtagtcccccaagctccagaatttcatccgggatcacacactgtactacaccgatcacctcatccacccttaccaggatttataccggtacctactatgatgccaccgcctccgagacacatgtactcacctgtaacaggcgcaggagatatgacaacacaatatatgcctcaatatcaatcatcacaagtatatggagatgtagatgcccattcaacacatggaagatctaattttagagatgaaagaagctccaagacatacgaaagactacaaaagaaacttaaggacagacagggaacacaaaaagataaaatgtctagcccaccatctagtcctcaaaagtgtcccagcccaattaatgaacacaatggactgataaaagggcaaatagctggtggcataaatacaggatctgcaaaaataaaatctggcaagggaaaaggagggactcaagtagatactgaaattgaagaaaaagacgaagaaacaaaagcgtttgaagccctattgagtaatatagttaaaccagtggcttcagatattcaagcacggactgtagttttaacatggtcaccaccatcatctctaattaatggtgaaacagatgaaagttctgtccccgaactttatggatatgaagtattaatatcatcaactggcaaagatggtaaatacaaaagtgtctacgtaggcgaagaaacaaacataactttaaatgatcttaaaccagctatggattaccatgctaaagtacaagcagaatacaatagtatcaaaggcacaccatcagaagcagaaatcttcacaacattatcctgcgaacccgatattcctaatcctccgcgaatcgctaataggactaaaaatagtctgacactccaatggaaagctccatcggacaacggaagtaaaatacaaaacttcgtactagaatgggacgaaggaaaaggtaatggcgagttttgtcagtgttatatgggatcacaaaaacaatttaaaatcactaaactgtcccctgcaatgggatgcaaatttagattatcagctagaaacgattacggtacttctgggttttcagaagaagttctatactatacaagcggctgcgctccttcaatgccagctagtcccgtcctcacaaaagcaggcattacctggttaagtctacaatggtcaaaaccatcgggcacaccatcagatgaaggaatttcatatatactagaaatggaagaagaaacatccggatatggatttaaacctaagtacgatggagaagacttagcttataccgtgaaaaacctaagaagatctaccaaatacaaatttaaagtaatagcctacaatagcgagggaaaaagtaatccttccgaagttgttgaatttacaacatgtccagataaaccaggaataccagtgaaaccttcggttaaaggaaaaatacacagtcattcatttaaaattacatgggatcctcccaaagacaatggtggcgctacaataaataaatacgttgtagaaatggctgagggaagcaatggaaataaatgggaaatgatatactcaggagcaactagagaacacctatgcgaccgactaaatccaggttgtttttaccgactgagagtatattgtataagcgatggaggccaatctgcagttagcgaaagtcttttagttcaaactcctgcagtaccacctggaccatgtttaccaccgagattacaaggaagaccaaaagcaaaggaaatacaacttagatggggaccaccattagttgacggcggatcaccaatatcatgctattcggtagaaatgagcccaatagaaaaagacgaaccacgagaagtataccaagggtctgaagtagaatgtacagtaagttccttattaccaggaaaaacatactcattccgtcttagagccgcaaacaaaatggggtttggaccatttagtgaaaaatgcgatattaccacagcacccggaccaccagatcaatgcaaaccaccacaggtaacttgtagatctgcaacctgcgcacaggtaaattgggaagttccactcagtaatggcacagacgtaacagaatatagattagaatggggaggagtagaaggaagcatgcagatatgttattgcggtccaggattatcatatgaaattaaggggctatcgccagcaaccacatactattgtagagtgcaagctctttccgtagttggagcagggccatttagtgaggttgttgcatgtgttacacctccatcagtaccaggcattgtgacatgtctccaggaaatttcagacgatgaaatagaaaacccacattactccccctcaacatgtttagctatatcgtgggagaaaccatgcgaccatggatcagaaatattagcatattcaatagactttggagacaaacaatctcttaccgtcggcaaagtaacatcctatatcattaataacctacaacctgatactacgtacagaatacgaatacaagcacttaactcattaggagcaggcccattttcacacatgattaaattaaaaacaaaaccactgcctccagatcctccaagactcgaatgtgtggcttttagccatcaaaacctcaagttgaaatggggtgaaggaacacccaaaactctatcaacagatagcatacaatatcatctccaaatggaagacaaaaatgggagatttgtctcactttatagaggtccctgccacacatataaagtacaacgactgaacgaaagtacttcatacaaattttgtatacaggcttgcaacgaagcaggagaaggtcctttaagtcaagaatacatattcacaacaccaaaaagcgtacccgcagcattaaaagcccctaaaatagaaaaggtcaacgaccatatatgcgaaattacatgggaatgtcttcaaccaatgaaaggagacccagttatatatagcctacaagtcatgttaggaaaagactccgaatttaaacaaatttataaaggccccgactcgagttttagatactctagtctacagttaaactgtgaatatagatttagggtttgtgcaatcaggcaatgccaagactcactaggacatcaagatcttgtaggaccgtatagcacaacggtcttattcataagtcaacggacagaaccacccgcttcaactaatagagatacagtagaatctaccagaacacgccgcgcgctaagcgatgagcaatgcgcagcagtgatcctcgtactatttgcattcttttcaattttaatcgcttttataatacaatactttgttataaaataa

SEQ ID NO: 3704 - RNA, 3429 nt, synthetic construct
  misc_feature 1..3429: note = EAX08809 variant
  source 1..3429: mol_type = other RNA
atgtctggtccggcccaagtgcctatgatgtctccaaacggatcagtacctccgatatatgtcccacccggctacgctccacaagtcatagaagataacggtgttagaagggtcgtagtagtacctcaagcccctgagttccacccaggtagtcacactgttctacaccgatcacctcatccacccttaccagggttcatccctgtccctacaatgatgcctcccccacccagacacatgtactcccccgtcactggagcaggagatatgaccacacaatatatgccacaatatcaatctagccaagtttacggagacgtagatgctcactccacacatggacgcagtaattttagagatgaacgatcttccaaaacatacgaaagactgcaaaagaaattgaaagatagacaaggtacacaaaaagataaaatgagcagtcctccatcgtcaccacaaaaatgtccttcaccaataaatgaacataatgggcttattaaaggacaaatagcaggaggaataaataccgggtcagcaaaaataaaatcaggtaaaggaaaaggtggaacacaggtagatacagaaatagaagaaaaagacgaagaaactaaagcctttgaagctctactctctaacatagtaaaaccagtcgcttcagatattcaagcaagaacagttgtattaacatggtcacctccctcttccctaattaatggcgaaacggatgaatcaagcgtgcctgaactatacggctacgaagtcctaatatcttcaactggtaaagacggaaaatataaatctgtatatgtaggagaagaaacaaacataactctaaacgacttaaaaccagcaatggactatcacgcaaaagtacaagccgaatacaactcaataaaaggcactccatctgaagcagaaatattcactacattaagttgtgaacccgatattccaaatcctccccgcattgcaaacagaaccaaaaactccctaacattacaatggaaagcaccgtctgataatgggtccaaaatacaaaattttgtattagaatgggatgaaggaaagggaaatggagaattttgccaatgctacatgggatcacaaaaacaattcaaaataacaaaactctcccctgcaatgggttgtaaatttagactctcagcacgtaatgattatggaacaagcggtttttccgaagaagtactctattatacaagtggatgtgcaccatccatgccagcttccccagtattaactaaagcaggaatcacctggttatcattgcaatggtcaaagcctagtggcaccccatctgatgaaggaatatcttatatactagaaatggaagaagaaacatccggctatggatttaaacctaagtacgacggagaggatctagcctacacagttaaaaatcttaggagatctactaaatacaaatttaaagtaattgcatataacagcgaaggtaaaagtaatccgagtgaagtggtagaatttactacatgcccagataaaccaggaatccctgtaaaacccagcgtaaaagggaaaattcattctcattcttttaaaataacatgggacccaccaaaagacaatgggggagcgaccatcaataaatatgtagtagaaatggcagaaggatctaacggtaacaaatgggaaatgatatactctggtgctacacgtgaacatttgtgcgaccgcctaaacccaggatgtttttatcgattaagagtatactgcatatctgacggtggacaatcagcggtatctgaatctctattagttcagacaccagcagtacctccagggccatgtcttcccccaagattacaaggtagaccaaaagcaaaagaaatccaattgcgctggggtccacctctcgtcgacggtggatccccaataagttgctattcggtagaaatgtcgccaatagaaaaagatgagccaagagaagtatatcaaggtagcgaagttgaatgcactgtatcgagtttattgcccggcaaaacttacagtttccgactcagagccgcaaacaaaatgggatttggacccttctccgaaaaatgcgacattactacggcaccgggacctccagaccaatgtaaaccacctcaagtaacatgccgctccgctacttgtgcacaagtcaactgggaagtaccactttctaacggtacagatgtaactgagtacagattagaatggggcggagtcgaaggatcaatgcaaatttgctactgcggaccaggattaagttacgaaataaaaggtttatctccagctactacatattattgcagagtacaagccctatctgtagtaggagcaggaccattctccgaagtagtggcatgtgtaacaccaccaagcgtacccggaattgtaacatgcttacaggaaatatcagacgatgaaatagagaatcctcattattccccgtcaacatgtctcgctatatcctgggaaaaaccttgcgatcatggctccgaaatattagcatactccatagattttggagacaaacaatcattaaccgttggaaaagtcacgtcatatataataaataacttgcaaccagatacaacatatagaataagaatacaagccttaaattcattaggagcaggtcctttttcacacatgataaagttaaaaaccaaacctcttcctcctgatccccctcgtctggagtgcgttgcgttcagccaccaaaacctgaaacttaaatggggagaaggaaccccaaaaacactcagtaccgactcaatccaataccatctacaaatggaagataaaaacggaagatttgtaagtttatatagaggaccctgccatacttacaaagttcaacgacttaacgaatcaacgtcttacaaattttgtattcaagcatgtaacgaagcaggagaaggtccattatcacaagagtatattttcactactccaaaatctgtacctgcagctcttaaggcaccaaaaatcgaaaaagtaaacgaccacatatgcgaaataacttgggagtgcctgcaacctatgaaaggtgacccagtaatatattcgttacaagttatgttaggtaaagatagcgaatttaaacaaatatataaaggccctgactcatctttcagatattcatcattacaattaaactgtgaatataggtttagagtatgcgcaattagacaatgccaagactcactaggacatcaagatttagtaggaccatactcaacaaccgtactttttatatcacaacgaaccgaaccaccagcatcaacaaatagagatacggtagaatcaaccagaacaagacgtgcattatcagacgaacaatgtgcagcagtaattcttgtactctttgcgttctttagcatattaatagcatttataattcaatattttgtaataaaataa

SEQ ID NO: 3705 - RNA, 1020 nt, synthetic construct
  misc_feature 1..1020: note = EAW49214 variant
  source 1..1020: mol_type = other RNA
atgccaccaagtaaaccacatccaccagtagtaggaaaagttacgcatcatagcatagaattatattgggacctagaaaaaaaagcaaaaagacaaggaccacaagaacaatggtttagatttagcatagaagaagaagatcccaaaatgcatacatatggaataatatatacaggatacgcaacaaaacacgtagtagaaggattagaaccaagaacattatacagatttagattaaaagtaacatcgccatcaggagaatgtgaatacagtccattagtaagtgtgagtacaacgagagaaccaataagttcagaacatctgcatagagcagtaagtgtaaatgacgaagacttattggtaaggatattacaaggaggaagagtaaaagtagacgttccaaataaatttggatttacagcattaatggtggcagcacagaaaggatacacaaggttagtaaaaatattagtaagtaatgggacggatgtaaacctaaaaaatggaagcggaaaagatagtttaatgttagcatgttacgcaggccatctagatgtagtaaaatatctaagaagacacggagcaagttggcaagcaagagatttaggaggatgtacggcattacattgggctgcagatggaggacactgtagcgtaatagaatggatgataaaagacggatgcgaagtagatgtagtagacacaggatcaggatggacaccattaatgagagtgagcgcagtaagcggaaatcaaagagtggcaagcttattaatagacgcaggagccaacgtaaatgtaaaagatagaaatggaaaaacaccattaatggtagcagtattaaataatcatgaagaattagtacaattattattagataaaggagcagatgcaagtgtaaagaacgaattcggaaaaggtgtattagaaatggcaagagtatttgacagacaatcagtcgtaagtttactagaagaacgaaaaaagaaacaaaggccgaaaaaatcatgtgtatgttaa

SEQ ID NO: 3706 - RNA, 3150 nt, synthetic construct
  misc_feature 1..3150: note = BAF84259 variant
  source 1..3150: mol_type = other RNA
atgggtagtaggacgcctgaatcaccactacatgcagttcaattaaggtggggacccagaaggagacctcctctattaccactattgctacttctactaccacctccaccccgagtaggaggtttcaatcttgatgcggaagcacccgcagtattaagtggaccacccggtagtttctttggattttctgtagaattttaccgacccgggacagatggtgtgtcagtattagtcggagcacccaaggcaaacacaagtcaacccggagtcttacaaggtggagctgtctatttatgtccatggggagcgtcacctactcaatgcacaccaattgagtttgattctaaaggaagtcgtctattagaatcatcattaagcagcagtgaaggtgaagaaccagttgaatataagagtctccaatggttcggcgccacagtcagagctcatggctcatcaattctcgcctgtgctccactatattcatggagaaccgaaaaagaaccactttcagatccagttggcacatgttacctttctactgataatttcacacgaatactagaatatgccccttgcagatcggatttttcttgggctgcaggacaaggttattgtcaaggaggtttcagcgctgagttcaccaaaacaggccgtgtagttcttggaggaccaggctcatatttctggcaaggtcaaatattaagtgcaacacaagaacaaattgccgaatcctactatccagaatacctaataaacttagtacaaggtcaattacaaaccagacaagcctcttcaatatatgatgatagttatctaggatactcagtagcagtaggtgaattttccggagatgatacagaagattttgttgcaggagtccctaaagggaacctcacatatggatacgtcaccattctaaatggaagcgacataagaagtctttataacttttcaggagaacaaatggcctcttactttgcttatgcagtagccgcaacagacgtaaacggagacggattagacgatcttttagttggagcaccattactaatggatcgcactccggatggaagaccacaagaagtaggtcgcgtttatgtctacttgcaacatccagcaggaatagaatctactcctacattaacgttaacaggacatgacgaatttggcagattcggtagttcactaacaccattaggtgacttagatcaagatggttataatgatgtcgcaattggagcaccttttggaggagaaacgcaacaaggagtagtttttgtattcccaggaggcccaggcggtttagggtcaaaaccctctcaagtattacagcctctctgggcggcctcacacacaccagactttttcggttctgcactaagaggaggacgtgatcttgatggaaatggatacccagatctaattgtaggatcattcggagtcgataaagcagttgtttacagaggaagacctattgtatcagcatcagcatcacttacaatattcccagcaatgtttaatccagaagaaagatcatgttccttggaaggaaatcccgtcgcttgtattaacctaagtttttgcttaaatgcttcaggaaaacatgttgcagactccattggatttacagtcgaactacaacttgattggcaaaaacaaaaagggggagttcgccgagctctcttcttggcctctcgacaagcaacactgactcaaacactactcattcaaaatggagctcgcgaagattgcagagaaatgaaaatatatttaagaaatgaatctgagtttagagataaattatcaccaatccatattgccctaaatttctcactagaccctcaggctccagtcgacagtcatggacttcgacccgcattacactatcaatcaaaatcaagaattgaagacaaagcccaaatactattaggttgtggtgaagacaacatatgtgtaccagatctacaattagaagtatttggcgaacaaaatcacgtatacctgggagataaaaatgcactaaatttaacattccatgcccaaaacgttggagaaggaggtgcttatgaagctgaattacgcgttaccgcacctccagaagcagaatattcaggtctagtacggcatcccggaaatttcagtagtctcagttgtgattattttgcagttaatcaatcacgtttattggtatgtgatcttggaaacccaatgaaagcaggagcatcattgtggggaggattaagattcacggttccacatttacgtgatactaagaaaacgatacaatttgacttccaaattctctccaaaaatttaaataattcacaaagtgatgtagtatctttccgcttgagtgtagaggcacaagcgcaagtaacactgaacggcgtaagtaaacccgaagcagttcttttccctgtttccgattggcatccaagagaccaaccccaagaagaagaagatttaggtccagcagtacatcatgtatatgaattaataaaccaaggcccatcatcaatttcccaaggtgtgttagagctcagctgcccacaggcattagaaggtcaacaattattatatgtaacacgagtaacaggactaaattgtactactaatcaccccatcaacccaaaaggattagaattggatcctgaaggatcgctacatcatcaacaaaaacgggaagcaccatcccgatccagtgcatcctccggaccacagatattaaaatgtccagaagccgaatgttttagactgcgttgcgaacttggacccctacatcaacaagagagtcaaagtttgcaacttcatttcagagtttgggcaaaaacctttttacaaagagaacaccaaccattcagtttacaatgcgaagctgtctataaagctctaaaaatgccgtacaggatactacctcgccaactgccacaaaaagaaagacaagttgccacggccgtacaatggactaaagcagaaggatcatacggcgtacctttatggattataattttagcaatattatttggtttgttattattaggtcttcttatatatatactttataaactaggctttttcaaaagaagcctaccatatggaacagcaatggaaaaggcccaattaaaaccaccagcaacatcagacgcttaa

SEQ ID NO: 3707 - RNA, 3150 nt, synthetic construct
  misc_feature 1..3150: note = BAG35324 variant
  source 1..3150: mol_type = other RNA
atgggctcacgaacaccagaatcaccattacacgcagttcaactaagatggggacctagaagaagaccgccattactcccccttttacttctactattaccacctcctccacgcgtaggaggatttaatcttgacgccgaagctcctgctgttttgtcaggaccaccaggttcatttttcgggttcagtgttgaattttacagacccggtacagatggcgtctcagtccttgtaggagctccaaaagctaatacttctcaacccggagtcctacaagggggtgctgtttacttgtgcccatggggagctagtccaacacaatgtactccaattgaatttgacagtaagggaagccgattactcgaatcatcactttcatcaagcgaaggagaggaacctgtcgaatacaaaagtttacaatggttcggagcaacagttagagcacatgggtcttcaatattagcatgcgctcctttatatagttggcgtaccgaaaaagaacccctaagcgatccagtaggaacatgttacctatccacagataatttcacaaggattctcgaatacgcaccatgtagatccgatttttcgtgggctgcaggtcaaggttattgtcaaggaggattttctgcagaatttacaaaaaccggcagagtagtacttggaggcccaggatcgtacttttggcaaggacagatattatcagcaacccaagaacaaattgctgaaagttattaccctgagtatttaataaacttagtacaaggacagttacaaacaagacaagcctcaagtatatacgatgactcctatttaggatattccgtggctgtaggtgagttttccggagatgacacagaagatttcgtagctggtgtacccaaaggtaacttaacatatggttatgtaactatactcaatggaagtgatatacgatcattatacaattttagtggagaacaaatggctagctatttcggatatgcagtcgctgcaactgatgtaaatggtgatgggctagatgatctcttagttggagcacctttattaatggaccgaacacctgacggacgtcctcaaggagttggtagagtgtatgtgtacttacaacatcctgcaggaatagaaccaacgccgacattaacactaacaggtcatgatgagttcggaagattcggaagttcacttactcctctaggtgacctagaccaggacggttacaatgacgtagcaataggtgcgccgtttggaggtgaaacacaacaaggagtagttttcgtctttccaggaggtcctggtgggttaggatcaaaactctcacaagtattacaacctctatgggcagcatcacataccccagactttttcggatctgcactaagaggaggcagggatttagatggtaacggatacccagacctaattgtaggatcatttggagttgacaaagcagtagtataccgtggcagacctattgttagcgcgagtgcaagtctcacaatttttcctgctatgttcaatccggaggaacgatcatgttccttagaaggaaacccagtagcatgtataaatttatcattctgtttaaatgcaagcggtaaacatgtagccgattccataggctttactgttgaacttcaattggattggcaaaagcaaaaaggaggagtacgacgtgcactctttctggcatccagacaagcaactctaacacaaacattattaatacaaaacggagcacgtgaagactgcagagaaatgaaaatatatcttagaaacgaatcagagttccgagataaattatcacctattcatatagcattgaatttttctttagatccccaagccccagtcgatagtcatggtctacgacctgctttacactaccaatcaaaatcgcgaattgaagataaagcgcaaatattgctagattgcggagaagataatatatgtgtcccggacctacaactcgaagtattcggtgaacaaaaccacgtatacttaggcgacaaaaatgccctaaacctaactttccacgcacaaaacgtaggagaaggtggagcctacgaggctgaactaagagtcacagccccacctgaagcggaatattccggattagtaagacatcccggcaatttttcatcactatcttgtgattatttcgcagttaatcaatcccgcctgctagtctgcgacctgggtaacccaatgaaagcaggagcaagcctatggggagggttaagattcaccgttccacatctaagggatactaagaaaaccatccagtttgactttcagattctttctaaaaatctaaacaattcccaatcagatgttgtaagttttagattatccgtagaagcacaagcacaagtaacattaaatggcgtctcaaaaccagaagcagtattatttccagtatcagattggcatccaagagatcaaccacaaaaagaagaagacctcggacccgctgtccatcatgtttatgaattaattaatcaaggtccttcatcaatatctcaaggtgtccttgaattatcttgtcctcaagcactggagggacaacaacttctatacgttactcgcgtcacaggattaaattgtacaactaaccaccctataaatcccaagggattagaattagaccctgaaggctcgttacatcatcaacagaaaagagaagcacctagtagaagcagtgcatcgagtggcccacaaatcttaaaatgtcctgaagccgaatgtttcaggctaagatgtgaactaggacccttgcaccaacaagaaagtcaatcattacaactacatttccgagtatgggcgaagacgttcctacaaagggaacatcaaccattttccttacaatgtgaagcagtatataaagcattaaagatgccttatagaatattaccccggcaattaccacaaaaagagagacaagtagccactgccgttcagtggacgaaagcagaaggatcatatggggtaccattatggataattattttagcaatactatttggtctactactattaggactcttaatatatatactttataaattaggtttctttaaaagaagtcttccttacggaactgctatggaaaaagcacaactcaaaccacccgcaactagcgacgcataa

SEQ ID NO: 3708 - RNA, 1401 nt, synthetic construct
  misc_feature 1..1401: note = BAG54537 variant
  source 1..1401: mol_type = other RNA
atgttatcactacgccaaagaatgatgcacgctagatttagaaatccactatcaagacaaccagcaagaccatcataccgacaaggctataacggacgccccaacgtagaaggaaaagttttaccaggctcaaatggaaaacccaatggacaaagaataatcaacggacctcaaggaaccaaatgggtagtagacctagatcgaggcctcgtactaaacgcagagggacgatatttacaagactcacacggcaacccattaagaattaaattaggaggcgacggaagaacaatagtagacctagaaggaacaccagtcgtatcccctgacggcttaccactatttggacaaggaagacacggaacaccactagcaaacgcacaagacaaacctattctatcattaggaggaaaaccacttgtaggattagaagtaataaaaaaaacaacacatccaccaacaacaacaatgcaacccaccacaacaaccaccccattaccaaccacaacaacaccaagaccaacaacagcaaccacaagaagaacaaccaccagaagaccaacaactactgtacgaactacaacaagaacaacaacaacaacaacaccaaaaccaacaactccaatacccacctgcccacctggaaccctagaacgacacgatgacgacggaaacttaataatgtcctcaaacggaataccagaatgctacgcagaagaagacgaattttccggactagaaacagatacagcagtcccaactgaagaagcatatgtaatatacgatgaagactatgaattcgaaacatcaagaccacccacaaccacagaaccatcaaccacagcaacaactcccagagtaataccagaagaaggagcaatatcttcattccccgaagaagaatttgacttagcaggacgaaaacgatttgtagcaccctacgttacttacctcaacaaagacccatcagcaccctgctcactaactgacgctttagatcacttccaagtagattcactagacgaaattatacccaacgatctaaaaaaatcagacctacccccacaacacgcaccacgaaacataaccgtcgttgcagtagaaggctgccattcattcgtaatagtagattgggacaaagcaaccccaggagatgtcgtgacaggatacctagtatatagcgctagttacgaagacttcatccgaaataaatggtccacacaagcatcatcagtaacccacctaccaatagaaaatctaaaacccaacaccagatactacttcaaagtgcaagctcaaaacccacacggatacggacctatttcaccatccgtttcattcgtcacagaatcagataacccacttctagtagttagaccaccaggtggagaaccaatataa

SEQ ID NO: 3709 - RNA, 471 nt, synthetic construct
  misc_feature 1..471: note = BAG58437 variant
  source 1..471: mol_type = other RNA
atggaagaacaaagaaacgaagaaatacaatcattcatatactcactaaaacaaatgctactaaacgtagaagcaaactcagcaaaagtacaagaagacctagaagcagaattccaaagcctattctcactactagaagaactaaaagaaggaatgctaatgaaaataaaacaagacagagcatcacgaacctacgaactacaaaaccaactagcagcatgcacaagagcactagaaagctcagaagaactattagaaacagccaaccaaacactacaagcaatggactcagaagacttcccacaagcagcaaaacaaataaaagacggagtaacaatggcaccagcattcagactaagcctaaaagcaaaagtaagcgacaacatgagccacctaatggtagacttcgcacaagaaagacaaatgctacaagcactaaaattcctaccaggagaaagaggaacacactaa

SEQ ID NO: 3710 - RNA, 921 nt, synthetic construct
  misc_feature 1..921: note = BAH14721 variant
  source 1..921: mol_type = other RNA
atgatattcgaagaacatggatttagaagaacaacaccaccaacaacagcaacaccgataagacatagaccaagaccatatcccccaaatgtaggacaagaagcattaagccaaacaacaataagttgggcaccatttcaagatacatcagaatacatcatatcatgtcacccagtaggtacagatgaagaaccattacaatttagagtacctggaacatcaacaagtgcaacattaacaggactaacaagaggagcaacatataatataatagtagaagcattaaaagaccaacaaagacataaagtaagagaagaagtagtaacagtaggaaattcagtaaacgaaggattaaaccaaccaacagatgattcatgttttgatccatatacagtaagtcattacgcagtgggtgacgaatgggaaagaatgagtgaatcagggttcaaattactatgccaatgtttaggatttggatcaggtcattttagatgcgatagctcaagatggtgccatgataatggagtaaattataaaataggagaaaaatgggacagacaaggagaaaatggacaaatgatgtcatgtacatgtttgggaaatggaaaaggagaatttaaatgcgatccacatgaagcaacatgttatgacgacggaaaaacatatcacgtaggagaacaatggcaaaaagaatatctaggagcaatatgctcttgcacatgctttggaggacaaagaggatggagatgtgataactgcagaagaccaggaggagaaccaagtccagaaggaacaacaggccaatcatataaccaatatagccaaagataccatcaaagaacaaatacaaatgtaaactgcccaatagaatgttttatgcctttagatgtacaagcagatcgagaagactcaagagaataa

SEQ ID NO: 3711 - RNA, 1920 nt, synthetic construct
  misc_feature 1..1920: note = BAG61560 variant
  source 1..1920: mol_type = other RNA
atggaaaaaattctattttacctctttctcataggcatagcagtaaaagcacaaatttgccccaaacgatgcgtctgccaaatcttatctccaaacctagccacattatgcgcaaaaaaaggtttattatttgtacccccaaatatagatcgtagaacagtagaactaagacttgcagacaacttcgttactaacataaaaagaaaagatttcgcaaatatgacttcgctagtagacctcacactatctcgcaacacaatatcattcataacaccacacgcattcgcagacctcagaaatttacgctcactccacctcaactcaaaccgactaacaaaaataacaaatgacatgttcagcggactaagcaatttacatcatttaatactaaacaacaatcaacttacactcatatcctcgacagccttcgacgacgtctttgcccttgaagaactagacctatcctacaataacctagaaactataccatgggacgcagtagaaaaaatggtatctctacacacattatcattagatcataatatgatcgacaatataccaaaaggcacgttttcacacttacacaaaatgacaagactagacgtcacttcaaacaaacttcaaaaactcccacccgacccactattccaacgtgctcaagtactagcaacaagcggaataataagcccttcaacattcgcactatcttttggcggaaaccccctacactgcaattgcgaactactctggcttagacgactatccagagaatatgatctcgaaacctgcgcatcaccacccctcctaacaggaagatacttttggtcaatacccgaagaagaattcctttgcgaaccccctctaataacacgccatacacatgaaatgcgagtattagagggtcaacgagctaccctacgatgcaaagcaagaggtgacccagaacccgctattcactggatatctccagaaggaaaacttatctcaaatgcaactagatcattagtttatgacaatggaaccctagacatcctaattaccacagtaaaagatactggagcattcacatgtatagcaagcaacccagcaggcgaagcaacacaaatagtagatttacacataataaaactccctcatcttttaaattcaaccaaccacatacatgaacctgacccaggttcctccgacatatcaacatccacaaaatccggttctaacacctcttcctcaaatgacggaataacttccctaacagcaacgagagtcgtaggctgcatacaattcacaacagaacaagattacgtaagatgtcacttcatgcaatctcaatttttaggcggaaccatgataataatcatagggggcattatagtagcatctgtacttgtattcataatcatacttatgataagatataaagtatgcaataacaacggtcaacacaaagtaacaaaagtttccaacgtttattcacaaacaaacggagcacaaattcaaggatgctccgtaaccctaccacaatcagtatctaaacaagccgtcggtcacgaagaaaacgctcaatgttgtaaagcaacatccgacaacgtcatacaatcatcagaaacatgctcttcacaagactcagccaccacaacctcagctcttcccccttcttggacatcatccacatccgtatcccaaaaacaaaaaagaaaaacaggaaccaaaccatcaactgaaccacaaaacgaagcggtaacaaacgtcgaatctcaaaatacaaacagaaataactcaaccgccttacaactagcatcacgtccccccgattctgtaacagaaggaccaacctcaaaaagagcacacataaaaccaaacgccttactcactaacgtagaccaaatagtacaagaaacacaacgactggaattaatctaa

SEQ ID NO: 3712 - RNA, 1014 nt, synthetic construct
  misc_feature 1..1014: note = BAG61984 variant
  source 1..1014: mol_type = other RNA
atgatatttgaagaacacggattcagaagaacaacaccaccaaccacagcaacacccataagacacagaccaagaccctatccaccaaatgtaggcgaagaaatacaaataggacacataccaagagaagacgtagactatcacctatatccacacggtccaggactaaatccaaatgcatcaacaggacaagaagcactatcacaaacaacaatatcatgggctccatttcaagacacaagtgaatatataatatcatgtcatccagtaggaactgatgaagaaccactacaatttagagtcccaggaacatcaacatcagcaacactcacaggactaactagaggagcaacatataacataatagttgaagcactcaaagaccaacagagacacaaagtaagagaagaagtagtaacagtaggaaatagtgtaaacgaaggattaaatcaaccaacagacgattcatgcttcgacccatatacagtatcacattatgcagtaggagacgaatgggaacgcatgagtgaatcaggatttaaactattatgtcaatgcttaggatttggaagcggtcatttcagatgcgatagtagcagatggtgccacgacaatggagtaaactataaaataggagaaaaatgggatagacaaggtgaaaatggacaaatgatgtcatgtacatgtttaggaaatggaaaaggagaatttaaatgtgacccacatgaagcaacatgttatgacgatggaaaaacctaccacgtaggagaacaatggcaaaaagaatacctaggagctatttgctcttgcacatgctttggaggacaaagaggatggagatgtgacaattgtagaagaccaggaggagaaccaagcccagaaggaacaacaggacaatcatataaccaatactcacaaagatatcatcaaagaacaaatacaaatgtaaattgcccaatagaatgttttatgccattagatgtacaagcagatagagaagactcaagagaataa

SEQ ID NO: 3713 - RNA, 3045 nt, synthetic construct
  misc_feature 1..3045: note = BAG62013 variant
  source 1..3045: mol_type = other RNA
atgcgagtcacctgggcacctccgccaagtatcgacttaaccaatttcttagtaagatactcacccgtgaaaaatgaagaagatgtagctgaactaagtatttctccatcagacaatgccgtagtactcacaaacctacttccaggcacagagtacgtagtaagtgtcagctcagtatatgaacaacatgaatcaacccctctccgtggaagacagaaaactggtctagattcccctaccggtatcgacttctccgatatcaccggaaacagctttacagtacattggattgcaccgagagcaacaataacaggataccgaataagacatcacccagaacacttttcaggtagaccaagggaagatagagttccacattcccgtaattctataaccttaacaaatttaacaccaggaacagaatatgtcgtctcgatagtggccctcaacggtcgagaagagtcaccactactcattggacaacaatcaacagtaagtgacgtacccagagacttagaagttgtagcagccaccccaacatcattacttatttcttgggatgctcccgcagttacagtcaggtattatcgaataacctacggagaaacaggcggaaattccccagttcaagaatttacagttccaggctcaaaatcaacagcaacaataagcggactgaaaccaggcgtcgattatacaatcacagtttatgcagtaaccggaagaggagattcacccgcatcatcgaaaccaataagcataaactatagaactgaaatagataaacctagtcaaatgcaagttactgacgttcaagataactcaatatccgtaaaatggttaccgtcatcttcacccgtaacaggataccgcgtaaccacaacacccaaaaacggtccaggacctaccaaaacaaaaacagccggacctgatcaaacagaaatgacaatagaaggactacaacccaccgttgaatacgtcgtatcagtttacgcacaaaaccccagtggagaatcacaaccattagttcaaacggctgtaacaacaatacccgcaccaacagacctaaaattcacccaagtaactccaacctctctatctgcacaatggacaccaccaaacgtacaattaacagggtacagagtaagagttacgcccaaagagaaaactggaccaatgaaagaaataaacctagcgcctgattcatcttctgttgtagtatctggtcttatggttgctacaaaatatgaagtatcagtttacgcgttaaaagacacactcacatcaagaccagcacaaggtgttgtcacaaccttagaaaacgtaagcccacccagacgtgcaagagttactgacgcaactgaaacaacaataacaatttcctggagaaccaaaaccgaaacaatcacaggctttcaagttgatgcggtgccagccaacggccaaacacctattcaacgaacaattaaacccgacgtcagatcttacactataacaggattacaaccaggaacagattataaaatatatctatatacactaaacgataatgcaagatcatcaccagttgtcatagacgcttcaacggccattgatgcaccatcaaatcttcgcttcttagcaacaacaccaaacagtttattagtaagctggcaaccgcctcgcgctaggataactggttacataatcaaatacgaaaaacctggtagtccaccaagagaagtagtacctcgaccgagaccaggtgtaacagaagctacaatcacaggattagaaccaggaacagaatatacaatttatgtcatagcattgaaaaataatcaaaaatccgaaccattaataggcagaaagaaaaccgatgaattaccacagctagtaacactaccccatccaaacttacatggccccgaaattttagatgtaccctcaacagtacagaaaacacccttcgtaacacatcctggttacgataccggaaatggaatccaattgcccggaactagcggacaacaacccagtgtaggtcaacaaatgatcttcgaagaacacggatttaggagaacaacccctcccacaacagcaacccccattagacaccgtcccagaccctatcctccaaacgtcggtgaagaaatacaaattggacacataccaagagaagatgttgattatcacttatacccacatggccctggtttaaacccaaatgcatcaaccgggcaagaagctctatcacaaacaacaataagctgggcgccatttcaagatacatcagaatacataatatcatgccacccagtaggaacggatgaagaaccactacaatttagagtccctggaacctctacatcagcaactttaacaggtcttactagaggggccacgtataatatcatagttgaagcactaaaagatcaacaaaggcacaaagtacgtgaagaagtagtaacagtaggaaatagtgtaaatgaaggattaaaccaacctacagatgactcttgttttgacccatacacagttagtcattatgcagttggtgacgaatgggaacgaatgtctgagtccggatttaaactattatgccaatgcttaggattcggaagcggacatttccgatgcgattcttcgagatggtgtcatgacaatggagtcaattacaaaataggagaaaaatgggacagacaaggcgagaatggacaaatgatgtcatgcacttgcctaggaaatggaaaaggagagttcaaatgcgacccacatgaagcaacttgttacgacgacggaaaaacttatcacgtaggagaacaatggcaaaaagaatatttaggagcaatatgcagttgtacgtgcttcggaggacaacgaggttggcgatgcgataattgtagaagaccaggaggagaaccatctcctgaagggaccactggtcaatcttataatcaatattcacaaagataccatcaacgtacaaacacaaacgtaaattgcccaatcgaatgttttatgccactagatgtccaagcagaccgagaagactcaagagaataa

SEQ ID NO: 3714 - RNA, 2685 nt, synthetic construct
  misc_feature 1..2685: note = BAG62178 variant
  source 1..2685: mol_type = other RNA
atgcgtgtaacttgggccccaccacccagtatagatctaactaactttttagtaagatattcaccagtcaaaaatgaagaagacgtagccgaactatcaatttcaccctcagataacgctgtagtactaacaaatcttctcccaggtacagaatatgtcgtatcagtctcatcagtatatgaacaacatgaatcaactccgctacgaggaagacaaaagacaggtttagactcaccaactggtatagattttagtgacataacagcaaactcctttacagttcattggattgcaccaagagcaacaataactggctacagaataagacatcaccctgaacactttagtggaagaccaagagaagatagagtaccacattcaagaaatagtataactcttaccaatctaactcccggaaccgaatacgtagttagcatagtagccctaaacggacgagaagaatctccattactaataggtcaacaatctactgtttcagacgtaccacgagatttagaagtcgtagctgccacaccaacatcattactaatctcctgggatgcaccagcagttacagtaagatactacagaataacatacggagaaacaggaggtaatagtcctgtacaagagttcacagtaccaggttctaaatcaacagcaacaatttccggactaaaaccaggagtcgactataccataacagtatatgcagtaacaggtagaggcgattcaccagcgtcatccaaacctatttccataaattacagaaccgaaatcgataaaccctctcaaatgcaagttacagatgttcaagacaattccatttcagttaaatggttaccttctagttcgccagtcacaggatatagagttacaacaactcctaaaaatggaccaggaccaacaaaaaccaaaactgctggaccagaccaaacagaaatgacgatagaaggtttacacccaaccgtagaatatgtcgtatcagtctatgcccaaaatccttctggagaatcccaacctctagtacaaacagctgtaacaacaattccggcaccaacggacttaaaatttacacaagtaacccccacatcacttagtgctcaatggactccaccaaatgtacaactaacgggatatagagttagggtcacacccaaagagaaaaccggacccatgaaagaaattaatctagcgccagactcaagcagtgtagttgtatccggcctaatggtagcaacaaaatatgaagtaagtgtttatgcacttaaagacacccttacatcacgcccagcacaaggggtggttaccacattagaaaatgtctctcccccacgtagagctagagtaacagatgctacagaaactactatcactatatcttggagaaccaaaaccgaaacaatcacaggattccaagtagatgccgtacctgcgaatggacaaacaccaatacaaagaactataaaaccagatgtgagatcatacacaataacgggattacaacccggcaccgattataaaatatatttgtacactctaaatgataatgctcgatcctctccagtagtaatagatgcatccaccgcaatcgatgctccatcaaacctaagattcttagcaacaacgcctaactcactcttagttagttggcaaccaccaagagctcgaataaccggatatattataaagtatgaaaaacctggttccccaccgagagaagtagtcccaagaccacgcccgggcgtaactgaagcaaccataactggattggaaccaggtactgaatacacaatctacgtcattgctctcaaaaataaccaaaaatcagaacctctaattggacgaaagaaaacaggacaagaagccttatcacaaacaacaataagctgggctcctttccaagatacaagtgaatacataatctcctgccatccagtaggaactgatgaagaaccgttacaattccgggtaccaggtacctccacaagtgcaactctgacaggtctgacgagaggggccacttacaatataatagttgaagcattaaaagatcaacaaagacataaagtaagagaagaagtcataacggtaggtaattctgttaatgaagggttaaatcaacccaccgatgattcatgttttgatccatatactgtttcacactatgcagtaggagatgaatgggaaagaatgtcagaatcaggatttaaattattatgccaatgcctaggatttggatcaggacacttcagatgtgactcctcaagatggtgccatgacaatggagtaaactataaaataggcgaaaaatgggatagacaaggagaaaatggccaaatgatgtcatgcacatgcttaggaaatggaaaaggagaatttaaatgcgacccccatgaagcaacatgctatgatgatggaaaaacatatcacgtaggagaacaatggcaaaaagaataccttggagccatatgctcatgtacctgcttcggaggtcaaaggggatggcgatgcgataattgtagaagaccaggaggtgaaccatcccccgaaggaacaacaggtcaatcatataatcaatactcccaaagatatcaccaaagaactaataccaatgtaaactgccctatagaatgtttcatgcctttagacgttcaagcagatagagaagatagtcgcgagtaa

SEQ ID NO: 3715 - RNA, 1152 nt, synthetic construct
  misc_feature 1..1152: note = BAH12351 variant
  source 1..1152: mol_type = other RNA
atggcatcagcattcagactatcactaaaaccaaaagtatcagacaacatgacacacctaatggtagacttttcacaagaaagacaaatgctacaaacactaaaattcctaccagtaccaaaagcaccagaaatagaccctgtcgaatgcctagtagcagacaacagtgtaacagttgcatggagaatgcccgaagaagataataaaatagaccacttcatactagaacacagaaaaacaaattttgacggtctaccaagagtaaaagacgaaagatgttgggaaataatagataatataaaaggaactgaatacaccttaagcggactaaaattcgactcaaaatatatgaattttagagtaagagcatgcaacaaagcagtagcaggagaatacagcgatccagtaacattagaaacaaaagcattaaacttcaacctagacaactcatcaagccacctaaacttaaaagtagaagacacctgcgtagaatgggacccaacaggaggaaaaggacaagaatcaaaaattaaaggaaaagaaaacaaaggatcagtacacgtaacaagcctaaaaaaacacacctcaggaacaccatccccaaaaagaacatccgtaggaagccgacctcctgcagtaagaggatcaagagacagattcacaggagaaagttatacagtactaggcgacacagcaatagaaagtgggcaacattattgggaagtaaaagcccaaaaagactgcaaaagctattcagtaggtgttgcatacaaaacacttggaaaatttgaccaactaggaaaaacaaatacaagttggtgtatacacgtcaacaactggttacaaaacaccttcgcagcaaaacacaataacaaagtaaaagcattagatgtaacagtcccagaaaaaataggagtattctgcgatttcgacggaggacaactgtcattttatgacgcaaacagtaaacaattactatattccttcaaaacaaaattcacacaaccagtattaccaggattcatggtatggtgtggaggcctatcactatcaacaggaatgcaagtaccatcagcagtaagaacactacaaaaatcagaaaacggaatgacaggatcagccagttcattaaacaatgtagtaacccaataa

SEQ ID NO: 3716 - RNA, 441 nt, synthetic construct
  misc_feature 1..441: note = BAH14175 variant
  source 1..441: mol_type = other RNA
atgccaccatcaaaaccacacccaccagtagtaggaaaagtaacacaccactcaatagaactatactgggacctagaaaaaaaagcaaaaagacaaggaccacaagaacaatggttcagattctcaatagaagaagaagacccaaaaatgcacacatacggaataatatacacaggatacgcaacaaaacacgtagtagaaggactagaaccaagaacactatacagatttagactaaaagtaacatcaccatcaggagaatgcgaatactcaccactagtatcagtctcaacaacatcagaatactcagaccgaccacacagcccactatcaagatcaatggaaatgacatcaaacctagaaaaaatattctgcctatcattcggactaacaagatcaagaaacgacacaatattcaaacactgcaacaacatatgctaa

SEQ ID NO: 3717 - RNA, 2055 nt, synthetic construct
  misc_feature 1..2055: note = EAX08810 variant
  source 1..2055: mol_type = other RNA
atggcagaacatccaccactcctagatacgacgcagatattaagtagcgacatatcactattatcagctccaatagtaagcgcagacggaacacaacaagtcatcctagtacaagttaatcctggagaagcattcactataagaagagaggacggtcaatttcaatgtataaccggaccggcccaagtaccaatgatgtcaccaaatggatcagtcccaccaatatacgtaccaccaggctatgctccacaagtaatagaagacaacggcgtaagaagggttgtagtagtacctcaggcaccagaatttcacccaggttcacataccgttttacatcgtagtccacatcccccattaccagggtttattccagtcccaacaatgatgccaccaccaccaagacatatgtatagcccagtaacaggagcaggagacatgactacgcaatatatgccacaatatcaatcaagccaagtatatggtgatgtagacgcgcacagtactcacggtcgatcaaactttagagacgaaagatcatcaaaaacatatgaacgactacaaaagaaacttaaagataggcaaggaacccaaaaagacaaaatgtcatctcctccaagttcaccacaaaaatgcccttccccaatcaatgaacacaatggattaataaaagggcaaatagccggtggaataaacacaggaagcgcaaaaatcaaatcaggaaaaggtaaaggaggcacacaagtcgacacagaaatagaagaaaaagatgaagaaaccaaggccttcgaagcactgctcagcaatatagtaaaaccagtagcatcagatatacaagccagaacagtagtactgacctggagcccacctagttctctaataaatggggaaacagatgaatcaagcgttcctgaattatatggatatgaagtactaatatcatcaacgggaaaagatggtaaatataaatctgtctatgtaggagaagaaacaaatattacactaaatgacctaaaaccagctatggattatcacgcaaaagtacaagcagaatataacagtataaaaggaacaccatcagaagcagaaatattcacaacattatcttgtgaacccgacatacctaatccccctagaatcgcaaaccgaactaaaaatagcctaactcttcaatggaaagcaccttccgataatggatcaaaaatccaaaacttcgtactagaatgggatgaaggaaaaggaaatggagaattttgccaatgctacatgggaagccaaaaacaatttaaaataacaaaactatctccagccatgggatgcaaatttagattaagcgcacgaaatgattacggtacgtcaggatttagtgaagaagtattatactatacatcaggttgcgcaccaagtatgcctgcttccccagtcttgactaaggctggaataacatggctatcactccaatggtctaaaccttcaggaacaccatcagacgaaggcataagctacatattggaaatggaagaagaaacatcaggatatggctttaagcccaaatatgacggagaagatcttgcatacacagtgaaaaacctaagacgatcaacaaaatacaaatttaaagtaatagcatataatagcgaaggcaaaagcaatcccagtgaagtagtagaatttactacatgtccagacaaaccagggatacccgtaaaaccaagtgtaaaaggaaaaatacattcacactcatttaaaattacctgggatccacctaaagacaatggtggagcaacaataaataaatacgttgtagagatggcagaaggaagcaatgggaataaatgggaaatgatatattccggagcaacaagagagcacctatgcgatagattaaaccctggatgtttttatcgattacgagtatactgcatatcagacggaggacaaagcgcagtttccgaatctctattagtacaaactccagcagtaccacccggaccatgcttaccaccaagattacaaggtaggccaaaagcaaaagagatccaaacacccagcggctaa

SEQ ID NO: 3718 - RNA, 492 nt, synthetic construct
  misc_feature 1..492: note = AAG35520 variant
  source 1..492: mol_type = other RNA
atgagtgaaagtggatttaaattattatgtcaatgtttaggatttggaagtggacatttcagatgtgattcaagcagatggtgtcatgacaatggagtaaattataaaataggagaaaaatgggatagacaaggagaaaatggacaaatgatgagttgtacatgtttaggaaatggaaaaggagaatttaaatgtgatccacatgaagcaacatgttatgatgatggaaaaacatatcatgtaggagaacaatggcaaaaagaatatttaggagcaatatgtagttgtacatgttttggaggacaaaggggatggagatgtgataattgtagaagaccaggaggagaaccaagcccagaaggaacaacaggacaaagttataatcaatatagtcaaagatatcatcaaagaacaaatacaaatgtaaattgtccaatagaatgttttatgccattagatgtacaagcagatagagaagatagtagagaataa

SEQ ID NO: 3719 - RNA, 1143 nt, synthetic construct
  misc_feature 1..1143: note = AAA52471 variant
  source 1..1143: mol_type = other RNA
atgatgttctcaggatttaatgcagactacgaagcatcttcatctagatgttcatcagctagtccagcaggagactcactctcatattatcactcacccgcagactcattctcaagcatgggatcaccagtaaacgcacaagatttctgcacagatctagcagtatcctcagcaaacttcataccaacagtaacagcaatatcaacatctccagatttacaatggctagtacaaccagcattagtaagttcagtagcaccatcacaaacaagagcaccccatccatttggcgtaccagcaccatcagctggagcatattcacgcgccggagtagtaaaaacaatgacaggcggtcgagcacaatctataggaagaagaggaaaagtcgaacaattatcacctgaagaagaagaaaaacgaagaatcagaagagaaagaaataaaatggcagcagcaaaatgcagaaatagaagaagagaactaacagacacgctacaagcagaaacagatcaattagaagatgaaaaatcagcattacaaacagaaatagcaaatttactaaaagaaaaagaaaaactagaatttatattagcggcacatcgaccagcttgtaaaataccagatgatttaggattccccgaagaaatgtcagtagcctcacttgacctaacaggaggattaccagaagtagcaacaccagaatcagaagaagcattcacattaccactactaaacgatcccgaacctaaaccatcagtcgaaccagtaaaatcaatatcttcaatggaactaaaaacagaaccattcgatgactttctatttccagcatcatccagaccttcaggaagtgaaaccgcaagatcagtcccagacatggacctaagtggaagtttttacgctgccgattgggaacccttacattcaggttctctaggaatgggaccaatggcaaccgaactagaacccctctgcacaccagtagtaacctgtacaccatcatgcacagcttatacaagttcatttgtttttacatacccagaagcagactcattcccttcatgtgccgcagcccaccgaaaaggctcatcatcaaacgaaccatcatcagatagcttaagttcaccaaccttactagccttataa

SEQ ID NO: 3720 - RNA, 1296 nt, synthetic construct
  misc_feature 1..1296: note = AAG53607 variant
  source 1..1296: mol_type = other RNA
atgccaaacccacgacctggaaaaccatcagcaccatcattagcactaggaccatcaccaggagctagcccatcatggcgagcagcccctaaagcatcagacctcctaggagcaagaggaccaggaggcacatttcaaggtagagacctacgaggaggtgcacacgcatcatcttcatctttaaatccaatgccaccttcacaactacaattacctacattacctctagtaatggtagctccatctggagctagattaggcccattaccacatttacaagcattacttcaagacagaccacatttcatgcatcaactatcaacagtagatgcacatgcaagaactcccgtcctccaagttcaccccctagaatcaccagccatgatatcattaacaccaccaactaccgcaactggagtattttcactaaaagcccgtccaggactccctcccggtatcaatgttgcaagcctagaatgggtatctcgtgaaccagccctattatgtacattcccaaacccatcagcacccagaaaagattcaactttatctgcagtaccacaatcatcatatcctttattagcaaatggagtctgcaaatggcctggatgcgaaaaagtttttgaagaaccagaagactttctaaaacattgtcaagcagaccatttattagacgaaaaaggtagagcacaatgtctacttcaaagagaaatggtacaatcactagaacaacaattagtactagaaaaagaaaaattatcagccatgcaagcacacttagcaggaaaaatggcattaacaaaagcatcatctgtagcatcatcagacaaaggatcatgttgtatagtagcagcaggttctcaaggaccagtagtaccagcatggtctggaccaagagaagcacctgattcactatttgcagttcgaagacatttatggggatcacatggaaattctacttttcctgaatttctacataacatggactactttaaattccacaacatgagaccaccattcacatacgcaacacttattcgatgggctattctagaagcaccagaaaaacaaagaacattaaatgaaatatatcactggtttacacgaatgtttgctttctttagaaaccatccagcaacatggaaaaatgcaataagacacaatctatctctacataaatgtttcgttcgagttgaatctgaaaaaggagccgtatggacagtagacgaattagaatttcgaaagaaacgttcacaaagaccatcaagatgttcaaatcctacacctggaccttaa

SEQ ID NO: 3721 - RNA, 1098 nt, synthetic construct
  misc_feature 1..1098: note = AAA52639 variant
  source 1..1098: mol_type = other RNA
atgtggctaagatctcatcgacaattatgtttagcatttctattagtatgtgtactaagcgtaattttctttctacacattcatcaagactcatttcctcatggattaggattatcaatattatgtcctgatagacgattagtaacacccccagttgcaatattttgtttacctggaacagctatgggaccaaatgcatcatcatcatgtccacaacatccagcatctttatcaggaacatggacagtatatcctaatggacgatttggaaatcaaatgggacaatacgcaactttactagcactagctcaattaaatggaaggagagcctttattttaccagcaatgcatgccgcattagctcctgtatttcgaataacattacctgttttagcaccagaagtagattcaagaacaccatggagagaactacaattacacgattggatgtcagaagaatatgcagacttaagagatccatttctaaaattaagtggatttccatgttcatggacattctttcatcatctaagagaacaaataagaagagaatttacattacatgatcacttaagagaagaagcacaatctgttttaggacaactacgattaggaagaacaggagacagacctagaacatttgttggagtacacgttcgaagaggagattatttacaagtaatgccccaaagatggaaaggcgtagttggagattcagcttatttaagacaagctatggattggtttagagccagacatgaagcaccagtatttgtagtaaccagcaatggaatggaatggtgcaaagaaaatattgatacatcccaaggagatgtaacattcgcaggagatggacaagaagctacaccatggaaagattttgcactattaacacaatgtaatcatacaataatgacaataggtacatttggattctgggcagcatatttagcaggaggagatacagtatatttagcaaactttacattaccagattcagaatttctaaaaatatttaaacctgaagccgcatttctaccagaatgggttggaattaatgcagatctatcacctttatggacactagcaaaaccataa

SEQ ID NO: 3722 - RNA, 1380 nt, synthetic construct
  misc_feature 1..1380: note = EAW58359 variant
  source 1..1380: mol_type = other RNA
atggctcctctatgtccatcaccctggttacccctactaatacctgccccagcaccaggactaacagtacaattattattatcactattacttttagtaccagttcatcctcaaagattacctagaatgcaagaagatagtcccttaggaggaggttcaagtggcgaagacgaccccttaggagaagaagatctaccatcagaagaagatagtccaagggaagaagatccaccaggcgaagaagatttaccaggagaagaggacttaccaggagaagaagatctacccgaagtaaaaccaaaatcagaagaagaaggatcactaaaattagaagacttacccacagtcgaagcaccaggcgatccacaagaaccccaaaacaatgcacatagagataaagaaggtgatgatcaaagccattggagatacggaggagatcccccttggccaagagtaagcccagcatgtgctggacgatttcaatcaccagtagatatacgcccccaattagcagcattctgtccagcattgagaccattggaattattaggattccaattaccaccactaccagaattaagattaagaaacaatggacatagtgtacaattaactcttccgccgggattagaaatggctttagggccaggaagagaatatagagctttacaattacacttacattggggagcagctggaagaccaggatctgaacatacagtagaaggacaccgatttcctgcagaaatacacgtagtacacctaagtacagcttttgcaagagtagacgaagcactaggtagaccaggaggattagcagtattagcagcatttcttgaagaaggtccagaagaaaactcagcatacgaacaattattatctagattagaagaaatagcagaagaaggatctgaaacccaagtacccggactagatataagtgctctattaccttcagatttttcaagatattttcaatatgaaggatcattaacaacaccaccctgtgcacaaggtgtaatatggacagtatttaatcaaacagtaatgttatctgcaaaacaacttcacacattaagtgacacattatggggaccaggagactcaaggttacaattaaattttagagcaacacaaccattaaatggacgagttatagaagctagctttccagcaggagtagatagttcaccaagagcggcagaaccagtacaactgaacagttgcctagcagccggagatatattagctttagtctttggtctattattcgcagtaacatccgttgcattcctagtacaaatgcgacgacaacacagacgaggcactaaaggaggagtttcatacagaccagcagaagttgctgagacaggagcttaa

SEQ ID NO: 3723 - RNA, 417 nt, synthetic construct
  misc_feature 1..417: note = U19142.1 variant
  source 1..417: mol_type = other RNA
atgagctggagaggaagatcaacatatagaccaagaccaagaagatacgtagaaccaccagaaatgataggaccaatgagaccagaacaatttagtgatgaagtagaaccagcaacaccagaagaaggagaaccagcaacacaaagacaagatccagcagcagcacaagaaggagaagacgaaggagcaagcgcaggacaaggaccaaaaccagaagcagactcacaagaacaaggacacccacaaacaggatgtgaatgtgaagatggaccagacggacaagaaatggatccaccaaatccagaagaagtaaaaacaccagaagaagaaatgagatcacactatgtagcacaaacaggaatattatggttattaatgaataactgttttctaaacttaagcccaagaaaaccataa

SEQ ID NO: 3724 - RNA, 351 nt, synthetic construct
  misc_feature 1..351: note = AAH69397 variant
  source 1..351: mol_type = other RNA
atgagctggagaggaagatcaacatatagaccaagaccaagaagatacgtagaaccaccagaaatgataggaccaatgagaccagaacaatttagcgatgaagtagaaccggcaacaccagaagaaggagaaccagcaacacaaagacaagatccagcagcagcacaagaaggacaagacgaaggagcaagcgcaggacaaggaccaaaaccagaagcacactcacaagaacaaggacacccacaaacaggatgtgaatgtgaagatggaccagacggacaagaaatggatccaccaaacccagaagaagtaaaaacaccagaagaaggagaaaaacaaagccaatgctaa

SEQ ID NO: 3725 - RNA, 357 nt, synthetic construct
  misc_feature 1..357: note = AAA82746 variant
  source 1..357: mol_type = other RNA
atgaatttaagcagaggaaaaagtacatattattggccaagaccaagaagatatgtacaaccaccagaagtaataggaccaatgagaccagaacaatttagtgatgaagtagaaccagcaacaccagaagaaggagaaccagcaacacaaaggcaagatccagcagcagcacaagaaggagaagatgaaggagcaagtgcaggacaaggaccaaaaccagaagcagattcacaagaacaaggacatccacaaacaggatgtgaatgtgaagacggaccagacggacaagaaatggatccaccaaatccagaagaagtaaaaacaccagaagaaggagaaaaacaaagtcaatgttaa

SEQ ID NO: 3726 - RNA, 354 nt, synthetic construct
  misc_feature 1..354: note = AAH69470 variant
  source 1..354: mol_type = other RNA
atgtcatggagaggaagaagtacatattattggccaagaccaagaagatatgtacaaccaccagaaatgataggaccaatgagaccagaacaatttagtgatgaagtagaaccagcaacaccagaagaaggagaaccagcaacacaaagacaagatccagcagcagcacaagaaggagaagatgaaggagcgagtgcaggacaaggaccaaaaccagaagcagatagtcaagaacaaggacatccacaaacaggatgtgaatgtgaagatggaccagatggacaagaaatggatccaccaaatccagaagaagtaaaaacaccagaagaaggagaaggacaaagtcaatgttaa

SEQ ID NO: 3727 - RNA, 354 nt, synthetic construct
  misc_feature 1..354: note = AAA82748 variant
  source 1..354: mol_type = other RNA
atgtcatggagaggaagaagtacatattattggccaagaccaagaagatatgtacaaccaccagaagtaataggaccaatgagaccagaacaatttagtgatgaagtagaaccagcaacaccagaagaaggagaaccagcaacacaaagacaagatccagcagcagcacaagaaggagaagatgaaggagcaagtgcaggacaaggaccaaaaccagaagcagattcacaagaacaaggacatccacaaacaggatgtgaatgtgaagacggaccagatggacaagaaatggacccaccaaatccagaagaagtaaaaacaccagaagaaggagaaaaacaaagtcaatgttaa

SEQ ID NO: 3728 - RNA, 354 nt, synthetic construct
  misc_feature 1..354: note = AAA82749 variant
  source 1..354: mol_type = other RNA
atgtcatggagaggaagaagtacatattattggccaagaccaagaagatatgtacaaccaccagaagtaataggaccaatgagaccagaacaatttagtgatgaagtagaaccagcaacaccagaagaaggagaaccagcaacacaaagacaagatccagcagcagcacaagaaggagaagatgaaggagcaagtgcaggacaaggaccaaaaccagaagcagattcacaagaacaaggacatccacaaacaggatgtgaatgtgaagacggaccagatggacaagaagtagacccaccaaatccagaagaagtaaaaacaccagaagaaggagaaaaacaaagtcaatgttaa

SEQ ID NO: 3729 - RNA, 354 nt, synthetic construct
  misc_feature 1..354: note = AAC25989 variant
  source 1..354: mol_type = other RNA
atgtcatggagaggaagaagcacatattattggccaagaccaagaagatatgtacaaccaccagaaatgataggaccaatgagaccagaacaatttagtgatgaagtagaaccagcaacaccagaagaaggagaaccagcaacacaaagacaagatccagcagcagcacaagaaggagaagatgaaggagcaagtgcaggacaaggaccaaaaccagaagcacattcacaagaacaaggacatccacaaacaggatgtgaatgtgaagacggaccagatggacaagaaatggatccaccaaatccagaagaagtaaaaacaccagaagaaggagaaaaacaaagtcaatgttaa

SEQ ID NO: 3730 - RNA, 351 nt, synthetic construct
  misc_feature 1..351: note = AAC33676 variant
  source 1..351: mol_type = other RNA
atgagctggagaggaagatcaacatatagaccaagaccaagaagatacgtagaaccaccagaaatgataggaccaatgagaccagaacaatttagtgatgaagtagaaccagcaacaccagaagaaggagaaccagcaacacaaagacaagatccagcagcagcacaagaaggagaagacgaaggagcaagtgcaggacaaggaccaaaaccagaagcagactcacaagaacaaggacacccacaaacaggatgtgaatgtgaagatggaccagacggacaagaaatggatccaccaaatccagaagaagtaaaaacaccagaagaaggagaaaaacaaagccaatgctaa

SEQ ID NO: 3731 - RNA, 1344 nt, synthetic construct
  misc_feature 1..1344: note = AAA35657 variant
  source 1..1344: mol_type = other RNA
atggaattattaaaattaaacagatcagtacaaggtacaggaccaggtccaggagcatcactctgtagaccaggagcaccacttctaaactcatcatccgtaggaaatttatcatgtgaaccaccacgaattcgaggagctggcacaagagaattagaattagctataagaattactttatatgctgttattttcttaatgtcagtaggaggcaatatgctaataatagtagtactaggactaagcaggagactccgaacagttactaatgcttttttattatcattagcagtatcagacctattactagcagttgcatgtatgccattcacattacttccaaacctaatgggaacatttatatttggaacagtaatctgtaaagcagtttcttatttaatgggcgtttctgtatcagtatcgacattatcactagtagcgatagcattagaacgatatagtgcaatatgtcgaccattacaagctcgagtatggcaaactagatcacacgcagccagagtaattgtagctacatggttattatcaggattactcatggttccttatcccgtatacacagtagtacaacctgtaggacctagagttttacaatgtgtacacagatggccatcagcaagggttcgacaaacatggtcagtactactattactattattattcttcataccaggagtagtaatggctgtcgcatatggactaatatcaagggaattatatttaggattaagattcgatggagactctgattcagatagtcaaagtagagtaagaaatcaaggaggactacctggagcagtacatcaaaatggacgatgccgtcctgagacaggagcagttggagaagattctgatggctgttatgtacaattacctagatccagaccagcattagaactaacagcattaactgcaccaggtccaggatctggtagcagaccaactcaagcaaaactattagcaaaaaaaagagtagtacgaatgcttctagtaatagtggtattattttttttatgttggctaccagtctattctgcaaatacttggagagcatttgatggcccaggagcccatagagctttatcaggagcaccaatatcatttattcacctactatcatatgctagcgcatgcgtaaatccactagtttattgttttatgcatagaagatttagacaagcatgtttagaaacctgcgcaagatgttgccctagaccacctagagcaagaccacgagcactaccagatgaagatcctcctactccttcaatagcatccttaagtagactttcatatactacaataagtactcttggacctggataa

SEQ ID NO: 3732 - RNA, 2226 nt, synthetic construct
  misc_feature 1..2226: note = AAD22449 variant
  source 1..2226: mol_type = other RNA
atggcattgtttacaccatggaaactctcatcacaaaaacttggtttttttctagttacattcggatttatatggggaatgatgttattacatttcactattcaacaaagaacgcaaccagaatcaagctcaatgttacgcgaacaaatcttagacttatcaaaaagatatatcaaagcattagcagaagaaaatcggaatgttgtagatggaccttacgccggtgtcatgaccgcctatgacttgaaaaaaacgctcgcagtattattagataatatacttcagagaataggcaaactagagtcaaaggtagacaatcttgtagtaaatggaactgggacaaatagcacaaactccaccacagcagttccatcactcgtagcacttgaaaaaataaatgtagcagacataataaacggagcacaagagaaatgcgtattaccacccatggacggatatccacactgtgaaggaaaaataaaatggatgaaagacatgtggagatctgacccatgctatgccgattatggtgtcgacggatcaacttgttcatttttcatatatctatctgaagtcgaaaattggtgcccacaccttccctggagagctaaaaacccatatgaggaagccgatcacaatagcctcgcagaaataagaacagatttcaatatcttatacagcatgatgaagaagcacgaagaattcagatggatgagactgcgaataagaagaatggcagatgcatggatacaagcaataaaaagtttagcagaaaaacaaaatctagaaaaaagaaaacgaaaaaaagtcctagtgcacctaggattattaacaaaagaatctggatttaaaatagcagaaaccgcattctcaggcggtcccttaggagaacttgtgcaatggagcgacctaataacatcactttatctacttggacacgacataagaatatcagcaagcctagctgagctcaaagaaataatgaagaaagtagtcggaaatcgatcaggttgcccaacagttggcgacagaatagtagaattaatttacatcgacatagtaggattagcacaattcaaaaaaacccttgggccaagctgggtacattatcaatgtatgcttcgcgtattagactcttttggtacagaaccagaatttaatcacgcaaactatgcccagagcaaaggacacaaaacaccttggggaaaatggaatttaaatccacaacaattttacactatgtttccacacactcctgataattcatttctcggtttcgtagtagaacaacaccttaactcatcagacatacaccacataaacgaaataaaaagacaaaaccaatcattagtatacggaaaagtagactcattttggaaaaacaaaaaaatataccttgatatcatccatacatatatggaagtacatgcaactgtttatggatcatcaacaaaaaacataccaagctatgtaaaaaaccacggaatactatcaggtcgggatttacaattcctactcagagaaacaaaactattcgtgggattaggcttcccatatgaaggaccagccccacttgaagcaatcgcaaacggatgtgccttcttaaatccaaaattcaatccaccaaaatcaagcaaaaatactgacttcttcattggaaaaccaacacttcgcgaattaacatcacaacacccatatgctgaagttttcataggacgaccacacgtatggacagtagacctaaacaatcaagaagaagttgaagatgcagtaaaagcaattttaaatcaaaaaatagaaccatacatgccatatgaatttacttgcgaaggaatgctgcaaagaataaacgcattcattgaaaaacaagacttctgtcatggacaagttatgtggccaccattatcagcactgcaagtaaaactagcagagccaggacaatcatgcaaacaggtatgccaagaatcccaattaatatgcgaaccatcattttttcaacatctaaacaaagataaagacatgttaaaatataaagtaacatgccaaagctctgaactcgcaaaagacatattagtaccaagttttgaccctaaaaataaacattgcgtatttcagggagacctattactattttcatgtgcaggagcacatccaagacatcaacgggtatgtccttgcagagatttcataaaaggacaagtagcactctgtaaagactgcctgtag

SEQ ID NO: 3733 - RNA, 1743 nt, synthetic construct
  misc_feature 1..1743: note = EAX11770 variant
  source 1..1743: mol_type = other RNA
atggcaggaacagtacgaacagcatgcctagtagtcgcaatgcttctatctttagacttcccaggacaagcacaaccaccacccccaccaccggacgcaacatgtcatcaagtaagatcatttttccaacgtttacaaccaggtcttaaatgggttccagaaacaccagtaccaggcagcgatctacaagtatgcttaccaaaaggaccaacatgttgttcaagaaaaatggaagaaaaatatcaacttacagcacgcttaaacatggaacaactattacaatcagcaagcatggaactaaaatttttaataatacaaaatgctgcagttttccaagaagcattcgaaatagttgtacgacatgcgaaaaactacactaacgcaatgttcaaaaacaattacccatccctaactccacaagcattcgaatttgtaggtgagttcttcacagatgtctccttatacattttaggatcagacataaatgtagatgatatggtaaatgaattatttgactcactatttccagtaatctacacacaactaatgaaccccggactaccagactctgcactagatataaatgaatgccttagaggagcaagaagagacctaaaagtattcggcaacttccctaaactcattatgacacaagtatccaaatcattacaagttactagaatattcctccaagcactaaacttaggaatagaagtaataaataccactgaccacctaaaattcagtaaagactgcggaagaatgctaacaagaatgtggtactgttcttactgtcaaggcctaatgatggtaaaaccatgcggtggatactgtaacgttgtcatgcaaggttgcatggctggcgttgtagaaatagataaatattggagagaatatatattatctctagaagaattagtaaacggaatgtatcgaatatacgacatggaaaatgttctattaggtcttttctcaacaatacacgattccatacaatatgttcagaaaaacgctggcaaactaacaacaacaataggaaaactatgtgcacatagtcaacaaagacaatatagatcagcatactacccagaagatctcttcatagataagaaagtactaaaagtagcacacgtagaacacgaagaaacgctgtcatctaggcgccgagaactaatacaaaaactaaaatcatttatatctttttactctgctctcccaggatacatatgctctcactcccccgtagccgaaaacgacacattatgctggaacggccaagaacttgtagaacgctactcacaaaaagcagctagaaatggtatgaaaaatcaatttaacctacatgaactaaaaatgaaaggaccagaaccagtcgtatctcaaataatagacaaactaaaacatataaaccaattactaagaacaatgtcaatgcccaaaggacgagttttagacaaaaatctagatgaagaaggattcgaatcaggcgactgcggagacgatgaagatgaatgtataggtggaagtggagacggaatgataaaagttaaaaaccaactaagattcctcgccgaactcgcctatgatctagatgtagatgatgcacctggaaactctcaacaagcaacaccaaaagacaatgaaatttcaacattccataatcttggcaatgttcattccccactcaaattattgacatcaatggcaattagtgtagtttgctttttctttctcgtccactaa

SEQ ID NO: 3734 - RNA, 1743 nt, synthetic construct
  misc_feature 1..1743: note = AAA93471 variant
  source 1..1743: mol_type = other RNA
atggccggaaccgtaagaacagcatgcttagtagtagcaatgttactatctctagatttcccaggacaagcacaacctccaccgcctccaccagatgctacatgtcaccaagtaagatcattctttcaaagactacaaccaggactaaaatgggtaccagaaacaccagtaccaggcagcgacctacaagtatgcttaccaaaaggaccaacatgctgtagcagaaaaatggaagaaaaataccaactaacagcaagactcaatatggaacaattattacaatccgcctcaatggaattaaaattcttaataattcaaaacgcagcagtcttccaagaagcattcgaaatagtagtaagacatgctaaaaactacacaaatgcaatgtttaaaaataattatccaagtctaacaccccaagcatttgaatttgtaggtgaatttttcacagacgtaagcctatatatacttggctcagatataaacgtcgacgacatggttaatgaattatttgactccctattcccagtaatatatacacaactaatgaacccaggcctaccagactccgcactagatataaacgaatgcctaagaggagccagaagagatttaaaagtatttggcaactttcccaaactaataatgactcaagtgtctaaatcactacaagtaaccagaatctttctacaagcattaaatcttggcatagaagtaataaacaccaccgaccacctaaaattttccaaagactgtggacgaatgctcacaagaatgtggtactgctcttactgtcaaggattaatgatggtaaaaccatgcggaggatattgcaacgtagtcatgcaaggttgtatggcaggagtcgtcgaaattgataaatattggagagaatacatactttcacttgaagaattagttaacggaatgtacagaatatatgatatggaaaatgtcctactaggactattttcaacaatccacgattcaatacaatacgtacagaaaaatgcaggaaaactaacaacaaccatcggaaaactatgcgcacattcacaacaaagacaatacagatctgcatactaccccgaagatctttttatcgataagaaagtcttaaaagtagcacatgtagaacacgaagaaactctttcttctcgcagaagagaactcatccaaaaactaaaatcattcatttcattttacagcgcactccccggatacatatgtagtcactctccagtcgcagaaaatgacacattatgctggaacggacaagaacttgtcgaacgttactcacaaaaagcagccagaaatggtatgaaaaaccaatttaatttacacgaactaaaaatgaaagggcctgaaccagttgtatcacaaataatagacaaactaaaacacataaaccaactattaagaactatgtcaatgccaaaaggaagagtactagacaaaaatcttgacgaagaaggattcgaatccggagattgcggagatgatgaagacgaatgtattggcggatcaggagacggaatgataaaagtcaaaaaccaattacgcttcctagcagaactagcatacgatttagacgtagatgatgcacccggaaacagtcaacaagcaacgcccaaagacaatgaaatatcaacttttcataacctaggcaatgtacattcaccattaaaattactcacatctatggcaatcagcgtagtatgtttcttcttcctagtacattaa

SEQ ID NO: 3735 - RNA, 1743 nt, synthetic construct
  misc_feature 1..1743: note = AAH35972 variant
  source 1..1743: mol_type = other RNA
atggcaggcaccgtaagaacagcttgcctagtagtagctatgttactatctttagatttccctggccaagcacaaccacctccacccccaccagatgcaacctgccatcaagtaagatcatttttccaaagattacaacctggattaaaatgggttcctgaaacaccagtaccaggctcagacctacaagtttgtctaccaaaaggtccaacttgttgctcaagaaaaatggaagaaaaataccaacttacagccagattaaatatggaacaactacttcaaagtgcctctatggaacttaaatttttaataatacaaaatgcagcagttttccaagaagcattcgaaatagtagtaagacatgccaaaaactatacaaacgcaatgttcaaaaataattatccatcattaaccccccaagcgtttgaatttgtcggagaattctttacagatgtctcattatatatattaggatccgacataaatgtagacgacatggtaaacgaactatttgactccttattccccgtaatatatacacaactaatgaacccaggattaccagattcagcactagacataaacgaatgcctaagaggcgcaagaagagacctaaaagtcttcggaaactttcccaaactaataatgacccaagtcagcaaatcactacaagtaaccagaatatttttacaagcattaaacctaggaatagaagttattaatacaacagatcatttaaaatttagcaaagattgtggacgaatgctaactagaatgtggtattgctcatactgtcaaggtcttatgatggtaaaaccttgcggtggatattgcaatgtagtaatgcaaggctgcatggcaggagtagtagaaatagataaatactggcgagaatatatacttagcctagaagaactagtaaacggaatgtatcgcatatacgacatggaaaatgtcttattgggattattttccacaatacacgacagcattcaatacgtccaaaaaaatgcaggaaaattaaccacaaccataggaaaattatgcgcacactcacaacaaagacaatatcgattcgcatactacccagaagatttattcatagataaaaaggtattaaaagttgcacatgtagaacacgaagaaactctatcatcaagaagaagagaactaatacaaaaactcaaaagcttcatctcattttatagtgcactaccaggatacatatgtagtcactcaccagtagcagaaaacgacactttatgctggaatggacaagaactggttgaaagatactctcaaaaagcagcacgaaacggaatgaaaaatcaattcaatttacacgaactaaaaatgaaaggaccagaaccagtagtgtcacaaatcattgacaaactaaaacacattaatcaactactacgcacaatgtccatgcctaaaggcagagtactagacaaaaatttagacgaagaaggatttgaaagtggagattgtggagacgatgaagatgaatgtataggcggatcaggagatggaatgataaaagtaaaaaaccaactaagattcctagccgaattagcttacgacctcgatgtcgacgacgcacctggaaattcacaacaagcaacaccaaaagacaatgaaatatccacattccataacctaggaaacgtacattcgcccctaaaactactaacctcaatggcaatatcagtcgtctgcttttttttcttagtacactaa

SEQ ID NO: 3736 - RNA, 1683 nt, synthetic construct
  misc_feature 1..1683: note = EAW93784 variant
  source 1..1683: mol_type = other RNA
atggaatgtctttactatttcttaggctttctattactagcagctagacttccacttgacgcagcaaaaagatttcatgacgtactaggaaatgaaagaccctcagcatatatgagagaacacaatcaattaaatggatggtcatccgatgaaaatgactggaatgaaaaactatatccagtatggaaacgaggagacatgagatggaaaaactcttggaaaggcggacgagttcaagcagtcttaacctcagactctccagcactagtaggatctaacataacctttgcagtaaacttaattttcccaagatgtcaaaaagaagacgctaatggaaatatagtatatgaaaaaaactgtaggaacgaagcaggactatcagctgatccatacgtttataactggactgcctggtctgaagattccgacggagaaaatggaacaggtcaatcacaccacaatgtattccctgacggcaaaccctttccccatcaccctggatggagacgatggaacttcatatatgtatttcacacattaggccaatattttcaaaaactaggtagatgtagtgtaagagtatcagtaaacacagctaatgtaacattaggtccacaattaatggaagtaacagtatacagaagacacggtagagcatatgtacccatagcacaagtaaaagacgtatatgtcgtcacagatcaaataccagtattcgttacaatgttccaaaaaaatgacagaaattccagcgatgaaacatttctaaaagatctccctataatgttcgatgtcctaattcacgatccatcccacttcttaaactattcaacaataaactacaaatggtcattcggtgacaatacaggactatttgtttcaactaaccatactgttaaccacacatacgtattaaacggaacattctccttaaatctcacagtcaaagcagcagcccccggtccatgcccaccaccgccacctccacctagaccatcaaaaccaacaccctctttaggtccagcaggtgataatcccctagaactttcaagaattcccgatgaaaattgccaaataaatagatatggacattttcaagcaacaataacaatagtagaaggaatattagaagtaaacatcatccaaatgacagatgttttaatgcctgttccctggccagaatccagtctaatagatttcgtagtaacatgccaaggaagcattcctaccgaagtatgtacaattatatcagacccaacatgtgaaattacccaaaatacagtatgctctcccgtagatgttgacgaaatgtgcctcttaaccgttcgacgaacattcaacggatcaggaacttattgcgtaaatctaacattaggtgatgacacttcacttgcattaacatcaacattaatttcagtaccagaccgtgatccagcttcacccttaagaatggccaatagtgcacttatctcagtaggatgcctcgctatatttgtaacagtaatatcactcctagtctacaaaaaacataaagaatacaacccaatagaaaactcacctggtaacgtagtaagatctaagggtctttcagtgttcctcaatagagcaaaagcagtattcttcccaggcaatcaagaaaaagatccactactaaaaaaccaagaatttaaaggagtatcatga

SEQ ID NO: 3737 - RNA, 1719 nt, synthetic construct
  misc_feature 1..1719: note = AAH32783 variant
  source 1..1719: mol_type = other RNA
atggaatgcctatactactttctaggctttctattattagcagctcgactaccattagatgcagcaaaacgattccatgacgtactaggaaacgaacgcccatccgcttacatgagagaacacaatcaattaaacggatggtcaagcgatgaaaatgactggaacgaaaaactctatccagtctggaaaagaggagacatgagatggaaaaattcatggaaaggcggccgagtacaagcagtcttaacatcagactcacccgcactagtaggatcaaatataacattcgcagtaaatctaatttttcccaggtgtcaaaaagaagatgccaacggaaatattgtatatgaaaaaaactgtcgaaacgaagcaggattaagtgctgacccatacgtatacaattggacagcatggtctgaagattccgatggtgaaaacggtacaggacaaagtcaccataatgtctttccagatggaaaaccatttccacatcacccaggctggcgcagatggaatttcatatacgtttttcacactttgggacaatatttccaaaaacttggccgatgctctgtaagagtcagcgtaaacactgcaaacgtgacgttaggaccacaactaatggaagttaccgtttatagaagacatggaagagcatatgtacccatcgcccaagtcaaagatgtatatgtagtaacagatcaaatacctgtatttgtaactatgttccaaaaaaacgatagaaactcctcagatgaaacattcttaaaagatttaccaataatgttcgacgtactaatacatgatccaagccacttcttaaactatagtacaattaattataaatggtcatttggagacaatactggactgtttgtctctaccaaccacacagttaatcacacatacgtattaaacggtacattctcactcaacttaacagtaaaagcagcagcaccaggaccttgccccccaccacctccaccaccgagaccttcaaaaccgacaccatcactagcaacaactctcaaatcatatgactctaacacaccaggccccgcaggagataacccactcgaactatctcgaataccagatgaaaattgccaaataaatagatacggacatttccaagcaacaataactatagtagaaggaatattagaagtaaatataatacaaatgacagacgtcttaatgcccgttccttggccagaaagttcactaatcgactttgtcgtaacctgtcaaggaagtatccctactgaagtctgcaccataattagtgatcctacttgcgaaataacacaaaatactgtatgctcaccagtagacgtcgacgaaatgtgtctattaacagtaagaaggacctttaacggatctggaacctactgcgtcaacttaacattaggagatgacacatcactagcccttacctcaacattaatatcagtaccagatagagacccagcatccccactaagaatggctaatagcgcattaatatcagtagggtgtctagcaatatttgtaacagtaatatccttactcgtatacaaaaaacataaagaatacaatccaatagaaaattccccaggaaacgtagtgagaagcaaaggactatcggtatttttaaatcgagccaaagcagttttttttccaggtaatcaagaaaaagacccattactaaaaaatcaagaatttaaaggcgtctcataa

SEQ ID NO: 3738 - RNA, 621 nt, synthetic construct
  misc_feature 1..621: note = CAD43718 variant
  source 1..621: mol_type = other RNA
atggaatgcctatactacttcctaggattcctactactagcagcaagacttccactagacgcagcaaaaagattccacgacgtactaggaaacgaaagaccaagcgcatacatgagagaacacaatcaattaaacggatggtcatcagacgaaaacgactggaacgaaaaactatacccagtatggaaaagaggagacatgagatggaaaaactcatggaaaggtggaagagtacaagcagtactaacatcagactcaccagcactagtaggatcaaacataacattcgcagtaaatctaatattcccaagatgccaaaaagaagacgcaaacggaaacatagtatatgaaaaaaactgccgaaacgaagcaggactatcagcagacccatacgtatacaactggacagcatggagcgaagactcagacggagaaaacggaacaggccaatcacaccacaacgtattcccagacggaaaacccttcccacaccacccaggatggagaagatggaacttcatatacgtattccacacactagactggctattacaaacaccaaaattactattatacctatcactaaaattccaaccatcactattcttactatacaattaa

SEQ ID NO: 3739 - RNA, 621 nt, synthetic construct
  misc_feature 1..621: note = AAH11595 variant
  source 1..621: mol_type = other RNA
atggaatgcctatactactttctaggattcctattactagcagcaagactaccattagacgcagcaaaaagattccacgacgtactaggaaacgaaagaccatcagcatatatgagagaacataaccaattaaacggatggtcatcagacgaaaacgactggaatgaaaaactatacccagtatggaaaagaggagacatgagatggaaaaactcatggaaaggaggaagagtacaagcagtactaacatcagactcaccagcactagtaggatcaaacataacatttgcagtaaacctaatattcccaagatgccaaaaagaagacgcaaatggaaatatagtatacgaaaaaaattgcagaaacgaagcaggactatcagcagacccatacgtatacaactggacagcatggtcagaagactcagacggagaaaacggaacaggacaatcacaccacaacgtctttccagacggaaaaccattcccacaccacccaggatggagaagatggaatttcatatatgtattccacacactaggatggttactacaaacacccaaactactattatacttaagcctaaaattccaaccaagtctatttttactatataactaa

SEQ ID NO: 3740 - RNA, 2640 nt, synthetic construct
  misc_feature 1..2640: note = CCDS5600.1 variant
  source 1..2640: mol_type = other RNA
atgaaaatgctgactcgacttcaagtactcactctcgcacttttcagtaaaggatttctcttgtccttaggtgatcataatttcctccgaagagaaatcaaaatagaaggagacttagtattaggtggtctttttcctattaacgaaaaaggtacaggaaccgaagaatgtggacgaattaatgaagacaggggaatacaacgattagaagctatgttatttgctatagatgaaataaataaagatgactatttactaccaggtgtaaaactaggagttcacatcctcgacacatgctctagagacacatatgcactagaacaatcactagaatttgtacgtgcatcattaactaaagttgatgaagctgaatatatgtgtcctgatggatcttatgcaatacaagaaaatatacccttactcattgctggagtcattgggggatcctactcatcagtaagcatccaagtcgctaaccttctaagattattccaaatccctcaaatatcatacgccagtacatcagctaaactatcagataaaagccgatacgactattttgctagaacagtaccaccagatttctaccaagcaaaagcaatggctgaaatactaagatttttcaattggacttatgttagcacagttgcttcagaaggtgactacggcgagactggaattgaagcatttgaacaagaagcaagattgagaaatatatgtatagctactgctgaaaaagtaggtagatcaaacatacgaaaatcctacgattctgttattcgagaactccttcaaaaaccaaacgctagagtagtcgtacttttcatgcgatccgacgattctagagaactaattgccgctgcaagcagagctaatgcatcatttacctgggtcgctagtgacggttggggcgcccaagaatctataattaaaggatcagaacacgtagcctacggagcaataacccttgaattagcatcccaaccagttagacaatttgatcgctacttccaatcattaaacccttacaacaatcatcgaaacccatggtttcgagatttttgggaacaaaaatttcaatgttcattacaaaataaacgcaatcacagacgcgtttgcgacaaacacctggcaatagactcatcaaattatgaacaagaatccaaaataatgttcgtagtcaatgccgtatatgctatggcacatgcactccataaaatgcaacgaactctatgtccaaacacaacaaaattatgtgacgcaatgaagattctagatggcaagaaattatacaaagattacctgctaaaaattaatttcacagcacccttcaatcccaacaaagatgctgactcaatagtaaaattcgacaccttcggagatggaatgggaagatacaacgtatttaattttcaaaacgtcggcggcaaatactcttaccttaaagtaggacattgggctgaaacactttcattagacgtcaattcaatacactggtcacgaaattcagttcccacgtcacaatgttcagacccatgtgcaccaaatgaaatgaaaaacatgcaacccggagatgtatgctgttggatatgtataccttgtgaaccttacgaatacttagctgatgaatttacatgcatggattgcggatccggacaatggccaaccgcagatctcaccggatgctacgatttacctgaagactacataagatgggaagacgcttgggcaatcggaccagttaccattgcctgcctaggatttatgtgtacctgtatggtcgtaacggttttcataaaacataacaatactcctttagtaaaagctagcggacgagagctatgctatatattactatttggagtaggactatcatattgcatgacattcttctttatagcgaaaccctcacccgtaatatgtgcattacgtcgacttggacttggatcctcatttgcaatatgttactctgctctactaactaaaacaaactgtattgcaagaatatttgacggagttaaaaatggagcacaaaggcctaaatttatatccccatcctcacaagtattcatttgcctaggactaatacttgttcaaattgttatggtatcagtatggttaatactagaggccccaggtaccagaaggtacacactagcagagaaaagagaaacagtaatacttaaatgtaatgtaaaagattcatcaatgctaatatccttaacttatgatgtgattttagttattctttgcacagtttacgcgttcaaaacaagaaaatgtccagaaaattttaatgaagcaaaatttattggatttaccatgtataccacatgtataatctggctagcctttctacccatattttatgtaacttcatcagattatcgcgtacaaaccacaaccatgtgcatttctgtatctctttcaggcttcgtagttctaggttgcctatttgcacccaaagttcacattatactattccaaccacaaaagaatgtagtaacacatagactccatttaaatagattttcagtttcaggaacaggaacgacatatagtcaatcaagcgcatcaacttatgtcccaacagtatgtaatggtcgagaagtattagactcaacaacctcatccctttaa

SEQ ID NO: 3741 - RNA, 1947 nt, synthetic construct
  misc_feature 1..1947: note = CCDS4977.1 variant
  source 1..1947: mol_type = other RNA
atgtcgcatcacggaggcgctcctaaagcatcaacgtgggtagtggcatcaagacgatcatcaactgtgagcagagcaccagaacgacgaccagctgaagaactaaacagaactggacccgagggatactcagtaggtcggggaggccgatggagaggaacgagcagaccaccagaagcggtcgcagcaggacatgaagaattgccattatgttttgccctaaaatcacacttcgtaggagctgtgataggaagaggaggctctaaaataaaaaatatacagagcacaacaaatacaacaatacaaataatacaagaacaaccagaaagtttagtaaaaatattcggaagcaaagcaatgcagacaaaagcaaaagcggtaatagacaattttgttaaaaaactagaagaaaattataatagcgaatgcgggattgacacagcatttcaaccttctgtaggaaaagatggatcaacagacaacaatgttgtagcaggagaccgacctttgatagattgggatcaaataagagaagaaggactgaaatggcaaaaaacaaaatgggcagatctgcctccaataaaaaagaacttttataaagaaagtaccgccacaagtgcaatgagcaaagtagaagcagatagttggaggaaagaaaactttaatataacatgggatgatttaaaagatggagaaaaaagaccaataccaaacccaacgtgcaccttcgatgatgcatttcaatgttacccagaagtaatggaaaatataaaaaaagcaggtttccaaaaaccaacaccaatacaaagtcaagcatggcccatagtattacaaggtatagacctaataggagtcgcacaaacaggcacaggaaaaacattgtgctatctaatgccaggattcatacacttagtattacaaccatcattaaaaggacaaagaaacagaccaggaatgctagtattaacacccacacgagaattagcactacaggttgaaggggaatgttgcaaatactcatacaaaggtttaagatcagtctgcgtttatggcggaggaaatagagatgaacaaatcgaagaattaaaaaaaggtgttgacataataatagcaaccccaggtagactcaacgatttacagatgtcgaattttgtaaatttaaaaaacataacctaccttgtacttgatgaagcagacaaaatgctagacatggggtttgaaccacaaataatgaaaatattattggacgtaaggccagacagacaaaccgtaatgacatcagcaacatggcctcatagtgttcatcgactcgcacaatcatatctaaaagaacctatgatagtatacgtgggaacgttagatcttgtagcagtctcctcagtcaaacaaaatataattgtaacaactgaagaagaaaaatggagccatatgcaaacatttctacagagcatgtcatcgacagacaaagtcatagtattcgtaagtaggaaggcagtcgcagaccaccttagcagcgatctcatattaggaaatatcagtgttgaaagcctacacggagatagagaacaacgagaccgagaaaaagcattagaaaattttaaaacaggaaaagtacgtatactaatagctacagacttagcttcacgaggattagacgtacacgacgtcacacatgtatataattttgattttccaaggaacatagaagaatacgtgcatcggataggaaggacgggaagagccggaagaacaggtgtatcaataacaacactaacaagaaatgattggagagtggccagcgaattaataaatatattagaaagggcaaatcaatctatacccgaagaattagtaagtatggcagaaagatttaaagcacatcaacaaaaacgagaaatggagagaaaaatggaacgaccacaaggacgaccaaaaaaattccactaa

SEQ ID NO: 3742 - RNA, 1209 nt, synthetic construct
  misc_feature 1..1209: note = ACD02430 variant
  source 1..1209: mol_type = other RNA
atggcacaaaaagaaggaggaagaacagtaccatgttgttcacgaccaaaagttgctgctttaacagcaggaactctattactactaacagcgataggtgcagcaagttgggcaattgtagcagtattactaagatcagatcaagaacctctatatccagtacaagtaagtagtgcagatgccagattaatggtatttgataaaacagaaggaacttggagattactatgcagtagtagaagtaatgcaagggtagcaggactgagctgcgaagaaatgggttttctaagagcactaacacattcggaattagacgttaggactgcaggagcaaatggaacaagtgggttcttttgtgtagatgaaggaagattaccacatacacagagactattagaagtaataagtgtatgtgattgtcctagaggacgatttctagccgcaatatgtcaagattgtgggaggagaaaattaccagtagatagaatagtaggtggaagagatacaagtctaggaaggtggccatggcaagtaagtctaaggtacgatggtgcacatttatgtggaggatcattactatcaggggattgggtgctaacggcagcacattgtttcccagaacgaaatcgagtactaagtagatggagagtatttgctggagcagttgcacaagcatcacctcatggactacaattaggagttcaagcagtagtataccatggtggatacttacctttcagagatccaaactcggaagaaaatagtaatgatatagcattggttcatctatcaagtccattaccattaacagaatatatacaaccagtatgtttgccagcagcaggacaagcattggtagatggtaaaatatgtacagttacaggatggggaaatacacaatattatggacaacaggcaggagtattacaagaagcaagagtaccaataataagcaatgatgtatgtaatggagcagatttttacggaaatcaaattaaaccaaaaatgttttgtgcaggatatccagagggaggtatagatgcatgtcaaggagacagtggaggaccatttgtatgtgaagacagtataagcagaacaccaagatggagattatgtggaatagttagttggggaactggctgtgcattagcacaaaaaccgggagtatatactaaagtaagtgactttagagaatggatttttcaataa

SEQ ID NO: 3743 - RNA, 1254 nt, synthetic construct
  misc_feature 1..1254: note = AAA36013 variant
  source 1..1254: mol_type = other RNA
atggcacaaaaagaaggaggtagaacggtaccgtgttgttcgagacctaaagttgctgcattaactgctggaactctattattattgacagctatcggagcagcaagttgggctattgtagcagtgctattaagatcagatcaagaaccattatacccagtacaagtaagcagtgcagatgcaaggttaatggtatttgataaaacagaaggaacatggagattactatgtagtagcagatcgaatgcaagagtagcaggactatcatgtgaagaaatgggatttctaagagcactgacccacagcgaattagacgtaagaacagcaggagcaaatggtacatcaggatttttttgtgtcgacgaaggacgattaccccatacacaaaggttattggaagtaataagtgtatgtgattgtccgagaggaagatttctagcagctatatgtcaagattgtggtagacgaaaattgccagtagacagaatagtaggaggtagagatactagtttaggaagatggccttggcaagtatcattgagatatgatggagcacatttatgcggaggatcattattaagtggcgattgggtattgacagcagcacattgctttccagaaagaaatagagtattatctagatggagagtatttgcaggagcagtagcacaagcatcaccacatggattacaattaggagttcaagcagtagtataccacggaggatacttaccttttagagatccaaacagcgaagaaaattcaaatgatatagcacttgtacatttatcatcaccattaccactaactgaatatatacaaccagtttgtctaccagcagcgggacaagcactagtagatggaaaaatatgcacagtaacaggatggggaaatacacaatattatggacaacaagcaggggtattacaggaagcaagagtaccaataatatcaaatgatgtatgtaacggtgcagatttttacggaaaccaaataaaaccaaaaatgttttgtgctggatatcctgaaggaggaatagatgcatgtcaaggtgacagtggaggaccatttgtttgcgaagactcaataagcagaacaccaagatggaggttatgtggaatagttagttggggaacaggatgtgcattagcacaaaagccaggagtttatacaaaagtaagcgattttagagaatggatatttcaagctataaaaacacattcagaagcatcaggtatggtaacacaattataa

SEQ ID NO: 3744 - RNA, 2940 nt, synthetic construct
  misc_feature 1..2940: note = BAG62073 variant
  source 1..2940: mol_type = other RNA
atggaattagccgctttatgccgatggggtttactattagctctattaccacccggagcagcaagcacacaagacaattatctttcaacagacgtaggatcatgtaccttagtttgccccttacacaaccaagaagtaaccgccgaagacggtacccaaagatgcgaaaaatgttcaaaaccctgtgcacgagtttgttacggattaggaatggaacacctacgcgaagtaagggcagttacttcagcaaatatacaagaatttgcaggttgcaagaaaatatttggttccctagctttcctaccggaatcttttgatggagacccagcatctaatactgcaccactacaacctgaacaactccaagtattcgaaactctagaagaaatcaccggatatttatatatttcagcatggccagattcactgccagatctatcagtattccaaaatttacaagtaattagagggagaatactacataatggagcatacagcctaacgttacaaggtctaggaatatcatggttaggattgcgatcattaagagaattaggaagtggtttagcactaattcatcacaacacccatttatgctttgttcacacagttccatgggatcaactatttagaaatccgcaccaagctctattacacaccgcaaatagaccagaagatgagtgtgtgggtgaaggtttggcttgccaccaattatgcgcgcgaggccattgttggggacctggtccaacacaatgcgtaaattgttcccaatttttaagaggacaagaatgcgttgaagaatgccgcgtactccaaggactcccaagagaatacgtaaatgcaagacactgcctcccgtgtcatcctgaatgccaaccccaaaacggttcagtcacatgttttggaccagaagcagaccaatgtgtagcctgtgcccattacaaagatccaccattctgcgtagcaagatgcccttcaggtgttaaaccagacctaagttatatgcctatatggaaatttccagacgaagaaggtgcatgtcaaccatgtcctataaattgcacgcactcatgcgtagatttggatgacaaaggctgcccagcagagcaaagggcatcaccattgacgtcaataataagcgcagttgtaggaatattactcgtagttgttctaggagttgtttttggaatattaattaaacgtagacagcagaaaattagaaagtataccatgcgaagattattacaagaaactgagctagttgaacctttaacaccttctggagcaatgcccaatcaagcccaaatgagaatactgaaggaaacagaacttcgaaaagtaaaagttcttggatctggtgcatttggcactgtttataaaggaatatggataccagatggagaaaacgtaaaaataccggtagcgattaaagtacttagagaaaacacatcacctaaagcaaacaaagaaatattagacgaagcgtacgtaatggccggtgtcggatcaccctacgtaagtagattacttggaatctgtcttacaagtaccgtacaattagttacacaattaatgccttatggatgtttacttgaccatgttcgagagaatcgaggtagattaggatcacaagatctactaaactggtgtatgcaaattgctaaaggaatgtcttatctcgaagatgttagattagtccatagagacctagccgcaagaaacgttctagtaaaaagtcctaatcacgtaaaaataacagattttggattagcacgtcttttagatatagatgaaacagaatatcatgctgacggtggcaaagtacctatcaaatggatggcgctcgagagcattttaagacgacgtttcacacatcaaagcgatgtatggtcatacggtgtgacagtatgggaattaatgacatttggagcaaaaccttatgatggcatacccgctcgagagataccagacttattagaaaaaggagaacgattaccacaaccacctatttgtactatagacgtatatatgataatggttaagtgttggatgatagacagtgaatgtagaccaagatttagagaattagtttcagagttctcaagaatggcacgtgatccacaacgatttgtggtaatacaaaatgaagacttaggacctgcaagtccactagattcaacattttatagatcacttctcgaagatgatgatatgggagaccttgtagatgctgaagaatacttagtaccacaacaaggtttcttttgtcctgatccagcacccggagcaggaggtatggtacatcaccgacatagaagcagtagcacaagatcaggaggaggcgatcttacacttggacttgaacccagtgaagaagaagcacctagaagtccgctagcaccaagtgaaggcgcgggtagtgatgtctttgatggggatttaggtatgggagcagcaaagggacttcaatcacttcctacacatgatccatctccgttacaaaggtatagtgaagatccaacggtaccactaccatcagaaacagatggatatgtagcacccttaacatgtagcccacaaccagaatacgtcaatcaacccgacgtaaggccccaaccaccatcaccaagagaaggtcccttaccagctgcaagacctgctggtgcaactttagaaagacctaaaacattaagtccagggaaaaacggggtagtaaaagacgtatttgcatttggaggagcagtagaaaatccagaatatctgacgccccaaggtggcgcagcaccccaaccacatccacccccagcatttagtccagcattcgacaatctgtactactgggaccaagatccaccggaaaggggcgctccaccaagtacctttaaaggcacaccgaccgcagaaaaccctgaatatttaggacttgatgtgcctgtgtaa

SEQ ID NO: 3745 - RNA, 264 nt, synthetic construct
  misc_feature 1..264: note = CCQ43016 variant
  source 1..264: mol_type = other RNA
atgatgagaatgaaaacattcgtaatgatacacttccacctaatgaacggaggaaaagcaaaactatactcaagaccacacgcaaaactactaccagaacaaagagtaacagacaaaacaggagcaccagtagaatggccaggacaaacacaatgctcaacagaaacacaaacactagcagcaatgccagcacaagcagtaatgagagtaacatgcacagtagtagacatgcacaaatcagaatgcgcaccagcacaaacataa

SEQ ID NO: 3746 - RNA, 3768 nt, synthetic construct
  misc_feature 1..3768: note = AAI67147 variant
  source 1..3768: mol_type = other RNA
atggaattagctgcattatgtcgttggggccttttattagcactgttaccacccggtgcggcaagtacccaagtatgtacaggaactgatatgaaattaagactacccgcatcacctgaaacacatctagacatgctaagacatctatatcaagggtgtcaagttgtacagggtaatttagaacttacttacctacctacaaacgcctcgctaagttttctacaggacatacaagaagtccaaggctacgtattaattgcccataaccaagtacgacaagtgccgctacaaagactacgcattgtacgtggaacacaattatttgaagacaattatgcactagccgtattggataatggtgacccactaaataatactacacccgtgactggagctagtcccggtggtctcagagaactacaattacggtcacttactgaaattctcaaaggaggagtcctcattcaaaggaatccacaactatgctaccaagatactattctatggaaggatatctttcataaaaataaccaattagcactaacactaattgatacaaatcgaagtagagcctgtcacccatgttcccctatgtgtaaaggtagccgatgctggggtgaatcgtcagaagactgccaatcactgaccaggaccgtttgcgcaggcggttgtgccagatgcaaaggtccgctccctactgactgttgccatgaacaatgtgccgcaggatgtaccggaccgaaacattcagattgccttgcctgtcttcactttaatcactcaggaatatgtgaactgcactgtccggctctagtaacgtataatacagatacatttgaaagtatgcctaacccggagggacgctatacttttggtgcctcctgtgtaaccgcttgtccatacaattatctttcaacagatgttggctcatgtacattagtttgtcctttacataatcaagaagtaacagcggaagatgggacacaaagatgcgaaaaatgctcgaaaccatgtgcaagagtttgttacggattaggaatggaacatctaagagaagtaagagcagttacatctgcaaatatacaagagtttgctggatgtaagaaaatattcggttctctcgccttcctaccagaatcatttgacggtgatcccgcttctaacactgcgccactacaaccggaacaattacaagtattcgaaacattagaagaaatcaccggttatctatatatctcggcttggccagatagtttacccgatttaagtgtattccaaaatcttcaggttatacgtggtagaatattgcataacggagcatactccctaacgttacaaggactaggtatttcatggttaggactacgttccttaagagaattaggatcaggtttggctttaatacaccacaacacacacttatgtttcgttcatacagtgccatgggatcaattatttagaaatccccatcaagcgcttcttcatacagcaaatagacctgaagatgaatgtgtaggagaaggtctagcatgccatcaattatgtgctagaggccattgttggggaccaggccctacgcaatgcgtaaactgttctcaatttttaagagggcaagaatgtgtggaagagtgcagagtgttgcaaggtttaccaagagagtatgttaatgctcgccattgtttaccatgtcatccagaatgtcagccacagaatggatctgttacatgctttggacccgaagcggatcaatgtgtagcatgcgcccattacaaagatccacctttttgcgtggcacgatgcccaagtggtgttaaaccagatctatcatacatgcctatatggaaattcccggatgaagaaggggcatgtcaaccctgtccaataaattgcactcactcatgtgttgaccttgatgataaaggatgtcctgctgaacaaagagcttcaccgttgacttcaataatatctgccgtggttggaatactcttagttgtagtactgggagtagtatttggcatattaattaaacgtaggcaacagaaaatcagaaaatatacaatgaggagattactgcaagaaactgagctagtcgaaccattgactccatcaggcgcaatgcctaatcaagcgcaaatgagaatacttaaagaaacagaactaaggaaagtaaaagtccttggatctggggcatttggcaccgtatacaaaggaatatggattcctgatggagaaaatgtaaaaataccagttgccattaaagtactcagagaaaatacttcacccaaagccaataaagaaatattagatgaggcttatgtaatggccggagttggatcaccttacgtaagtagacttctcggaatatgcctgacatccactgtacaattagttactcaattaatgccttacggctgccttttagatcatgtcagagaaaatagaggaagattaggttcacaagacctcttgaattggtgtatgcaaattgctaaagggatgagctacttggaagatgttcggcttgtacatcgcgacctagctgcgagaaatgtcttagtgaaatcacctaatcacgtaaaaataacggacttcggactagctagactcctcgatatagacgaaacagaatatcatgcagatggaggaaaagttccaataaaatggatggcattggaatctattttaagaagacgattcactcatcaatcagatgtctggtcatatggagttaccgtatgggaacttatgacatttggtgcaaaaccatatgatggtattcctgcacgagaaatccccgatttactagaaaaaggtgaaagactaccccaaccacctatatgtacaatagatgtatacatgattatggttaaatgttggatgatagattcagaatgccgtccaagatttagagagctagtaagcgagttctcacgaatggcccgggaccctcaaagatttgtagttattcaaaatgaagacttaggaccagcttcacccctagattcaacgttttatagaagtcttctagaagacgacgacatgggagatcttgtagacgcagaagaatatttagttccacaacaaggcttcttttgcccggatccagcacccggagctggcggcatggttcatcacagacatcgatcaagttcaactcgatcaggaggcggagatttaacattaggtctagaaccttctgaagaagaagctcctagatcacccttagctccaagcgaaggagcgggttctgatgtatttgatggggatcttgggatgggtgcagccaaaggattacaatccctccccacacacgatccatccccattacaaagatattctgaagacccaactgtaccattaccatccgaaacagatggctacgtagcaccactaacctgtagcccacaaccagaatatgttaatcagccagatgtacgacctcaaccaccttctcctagagaaggccctctcccagctgcccgaccagctggagctacgctagaaagacctaagaccctctctcctggcaaaaacggagtagtaaaagacgtttttgcatttggaggggcggtggaaaatccagaatatctaacccctcaaggaggagctgcacctcaaccacatcctcctccagcattttccccagcatttgacaatctatactattgggaccaagatccacccgaaagaggagcaccaccctcaacctttaagggaacacccacagccgaaaatcctgaatatcttggactagatgttccagtttaa

SEQ ID NO: 3747 - RNA, 1260 nt, synthetic construct
  misc_feature 1..1260: note = AAD56009 variant
  source 1..1260: mol_type = other RNA
atggaattagccgccctctgtagatggggattattattagcattactaccaccaggtgccgcttcaactcaagtatgtacaggaacagacatgaaactaagacttccagcttcaccagaaacacacttagatatgctaagacacttatatcaaggatgtcaagtcgtacaaggaaatctagaattaacatacttacctacaaatgcatcactatcatttctacaagatatccaagaagtacaaggctatgtattaatcgcacacaatcaagtacgacaagtcccactacaaagattaagaatagtaagaggaacacaactattcgaagacaactatgcactagccgtccttgacaatggagatcctttaaacaacacaacccccgtaacaggagcatcaccaggcggacttagagaattacaactaagatcactaacagaaattttaaaaggtggagttttaatccaaagaaatccacaattatgctatcaagataccattttatggaaagatatctttcacaaaaacaatcaattagcactaacgcttatagatacaaatagatcaagagcatgtcatccatgtagtccaatgtgcaaaggatcacgatgctggggcgaatcatccgaagattgccaatccttaaccagaaccgtttgcgctggaggatgcgcaagatgtaaaggaccacttccaacagactgttgtcatgaacaatgcgcagcaggatgcacaggaccaaaacattcagactgtttagcttgtttacacttcaatcacagtggaatttgcgaacttcactgcccagcattagtaacttataatacagatacctttgaatctatgccaaatccagaaggaagatacacattcggagcatcatgtgttactgcttgtccatataactacttatcaaccgacgtaggttcctgtacattagtatgtccactccataatcaagaagttacagccgaagacggaacacaaagatgcgaaaaatgttctaaaccttgcgcaagaggaacacattcattaccaccaagaccagcagctgtaccagttccactaagaatgcaacccggtccagcccatccagtactatcatttttaagaccatcatgggacctcgtatctgctttctattccctaccattagcacccctaagtcccacctcagtacccatatcaccagtatcagtaggaagaggtccagatcctgatgctcatgtagctgtagatctatcaagatatgaaggataa

SEQ ID NO: 3748 - RNA, 546 nt, synthetic construct
  misc_feature 1..546: note = U70863.1 variant
  source 1..546: mol_type = other RNA
ggaagtcatagtatgagatatttctttacaagtgtaagtagaccaggaaggggagaaccaagatttatagcagtaggatatgtagatgatacacaatttgtaagatttgatagcgatgcagcaagccaaagaatggaaccaagagcaccatggatagaacaagaaggaccagaatattgggatggagaaacaagaaaagtaaaagcacacagtcaaacacatagagtagatctaggaacattaaggggatattataatcaaagtgaagcaggaagtcatacagtacaaagaatgtatggatgtgatgtagggagtgactggagatttttaagaggatatcatcaatatgcatatgatggaaaagattatatagcattaaaagaagatttaagaagttggacagcagcagatatggcagcacaaacaacaaaacataaatgggaaacagcacatgtagcagaacaattaagagcatatctagaaggaacatgtgtagaatggttaagaagatatttagaaaacggaaaagaaacattacaaagaaca

SEQ ID NO: 3749 - RNA, 543 nt, synthetic construct
  misc_feature 1..543: note = AH009136.2 variant
  source 1..543: mol_type = other RNA
agtcatagtatgagatatttctttacaagtgtaagtagaccaggaagaggagaaccaagatttatagcagtaggatatgtagatgacacacaatttgtaagattcgattcagatgcggcaagtcaaagaatggaaccaagagcaccatggatagaacaagaaggaccagaatattgggatggagaaacaagaaaagtaaaagcacactcacaaacacatagagtagatttaggaacattaagaggatattataaccaaagtgaagcaggaagtcatacagtacaaagaatgtatggatgtgacgtaggatcagactggagatttttaagaggatatcaccaatacgcatacgatggaaaagattatatagcactaaaagaagatttacggtcatggacagcagcagatatggcagcacaaacgacaaaacataaatgggaagcagcacatgtagcagaacaattaagagcatatctagaaggaacatgcgtagaatggttaagaaggtatctagaaaacggaaaagaaacattacaaagaaca

SEQ ID NO: 3750 - RNA, 705 nt, synthetic construct
  misc_feature 1..705: note = AAG09781 variant
  source 1..705: mol_type = other RNA
atgttaagagtaccagaaccaagaccgggagaagcaaaagctgaaggagcagcaccaccaacaccatcaaaaccactaacaagtttccttatccaagacatactaagagacggagcacaaaggcaaggaggaagaacatcatcacaaagacaaagagatccagaaccagaaccagaaccagaaccagaaggaggaagatcaagagcaggagctcaaaacgaccaactatcaacaggaccaagagcagcaccagaagaagcagaaacactcgcagaaacagaaccagaaagacacctaggatcatacctactagatagtgaaaacacatcaggagcattaccaagactaccacaaacaccaaaacaaccacaaaaacgctcaagagcagcattctcacacacacaagtaatagaactagaaagaaaattctcacaccaaaaatacttatcagcaccagaaagagcacacctagccaaaaatctaaaactaacagaaacacaagtaaaaatatggttccaaaacagaagatacaaaacaaaaagaaaacaattaagctcagaattaggagacttagaaaaacactcatcacttccagcactaaaagaagaagcattctcaagagcatcattagtatcagtatacaacagctacccatactacccatacctatactgcgtaggatcatggtcaccagcattctggtaa

SEQ ID NO: 3751 - RNA, 942 nt, synthetic construct
  misc_feature 1..942: note = BAG37303 variant
  source 1..942: mol_type = other RNA
atggcaagctttagaaaactaacactatcagaaaaagtaccaccaaaccacccaagcagaaaaaaagtaaactttttagacatgtccctagacgacataataatatacaaagaactagaaggtacaaacgcagaagaagaaaaaaacaaaagacaaaatcactctaaaaaagaatcaccatcacgacaacaatcaaaagcacacagacatagacacagaagagattactcaaggtgcagaagtaacagcgaagaaggaaatcacgacaaaaaaccatcacaaaaaccatcaggattcaaatcaggacaacatccactaaacggacaaccactaatagaacaagaaaaatgctcagataactacgaagcacaagcagaaaaaaatcaaggacaatcagaaggaaaccaacaccaatcagaaggaaacccagacaaaagcgaagaaagccaaggacaaccagaagaaaaccaccattcagaaagaagtagaaaccatcttgaaagatccttaagtcaaagcgacagatcacaaggacaactgaaaagacatcacccacaatacgaaagatcacacggacaatacaaaagatcacacggacaatcagaaagatcacacggccacagcgaacgatcacacggacactcagaaagatcacacggccactcagaaagatcacacggacactcaaaacgatcaagatcacaaggagacctagtagacacacaatcagatctcatagcaacacaaagagacttaatcgcaacacaaaaagatttaatagcaacacaaagagacctaatagcaacacaaagagatttaatagtaacacaaagagatttagtagcaacagaaagagacctcataaatcaaagcggaagaagccacggacaatcagaaagacatcaaagatacagcacaggaaaaaacacaataacaacataa

SEQ ID NO: 3752 - RNA, 942 nt, synthetic construct
  misc_feature 1..942: note = AAI28135 variant
  source 1..942: mol_type = other RNA
atggcatcattcagaaaactaacactatcagaaaaagtaccaccaaaccatccaagcagaaaaaaagtaaacttcctagacatgagcttagacgacataataatatataaagaactagaaggaacaaacgcagaagaagaaaaaaataaaagacaaaaccatagtaaaaaagaaagcccatcaagacaacaatcaaaagcacacagacacagacataggagaggatacagcagatgcagaagcaactcagaagaaggaaaccacgacaaaaaaccatcacaaaaaccaagcggatttaaatcaggacaacacccactaaacggacaaccactaatagaacaagaaaaatgtagcgacaattacgaagcacaagcagaaaaaaaccaaggacaaagtgaaggaaatcaacaccaaagcgaaggcaacccagacaagtcagaagaatcacaaggacagcccgaagaaaaccaccacagcgaacgatcaagaaaccatctagaaagatccctatcacaaagtgatagatcacaaggccaattaaaaagacaccatccacaatacgaacgatcacacggacaatacaaaagaagccatggccaatcagaaagatcacacggtcacagcgaaagatcacatggccattcagaaagatcacatggccactcagaaagatcacacggacacagcaaaagatcaagaagccaaggagacctagttgatacacaatcagatctaatagctacacaaagagacctaatagcaacacaaaaagacctaatagcaacacaaagagacctaatagcaacacaaagagacctaatagtaacacaaagagatttagttgcaaccgaacgagacttaataaaccaatcaggacgatcacacggacaaagcgaaagacatcaaagatatagcacaggaaaaaacacaataacaacataa

SEQ ID NO: 3753 - RNA, 384 nt, synthetic construct
  misc_feature 1..384: note = 12543784 variant
  source 1..384: mol_type = other RNA
atgataaaaaaaaacctaaaaaaactaggaatagaagaaacatacctaaacataataaaagccatatacgacagaccaacagcatcaatacaaaaaacagaaaacctatcaacaaaaacaggaacatcacaagaataccacctatcaccactatggttctacatagtactagaaatactagcatcaacaataagacaagaaaaaaacctaaaagacatacacacagaaaaagaagaagtaaaactatcactattcgcagacgcaatgatactatacctcaaaaaaccaaacgactcaacacgaaaactactagaactaataaaaaaaatacactcatcatgccgaataaaaataaacatacacttcgccttctgctcacaataa

SEQ ID NO: 3754 - RNA, 1926 nt, synthetic construct
  misc_feature 1..1926: note = AAA63226 variant
  source 1..1926: mol_type = other RNA
atggcaaaagcagcagcaatagggatagatctaggtacaacatattcatgtgttggagtattccaacatggaaaagtagaaataatagcaaacgatcaaggaaacagaacaacgccatcttatgtagcattcacagatactgaacgactgatcggagacgctgccaaaaaccaagttgcactaaatccacaaaacacagtatttgacgcaaaaagactaattggaagaaaattcggtgacccagtagtacaaagcgatatgaaacactggccgttccaagtaatcaacgatggagacaaaccaaaagtccaagtatcatacaaaggtgaaacaaaagcattctaccctgaagaaattagttcaatggtattaactaagatgaaagaaatagcagaagcatatctaggatacccagtaacaaatgcagtcataactgttcctgcatacttcaatgactcccaacgacaagcaacaaaggacgcaggagtaatagctggtttaaatgtcttaagaataataaatgaaccaacagcggccgcaatagcttacggacttgatagaacgggaaaaggagagagaaatgtactcatatttgacctaggaggaggaacattcgatgtatcaatattaactattgatgacggaatatttgaggtcaaagcaacagcaggagatacacacttgggaggggaagatttcgataatcgattggtaaaccatttcgtggaagaatttaaaagaaaacataagaaagatataagccaaaataaaagagctgttcgaaggttaagaacagcatgcgagagagccaaaagaacattaagttcatcaacacaagcaagcctagaaatagactctctttttgaaggaatagatttttatacaagtattacacgcgcacgattcgaagaactatgttccgatctatttcgcagtaccctagaaccagttgaaaaagctctaagagacgcaaaactagacaaagcacaaatacatgatttagtattagtaggaggatcaacacggataccaaaagtacaaaaacttctccaggatttctttaatggaagagatctcaacaaatcaataaatccagatgaagcagttgcatatggagcagcggttcaagcagctatactaatgggagacaaaagcgagaacgttcaagatttactattattggatgttgcaccactgtcattaggactagaaacagctggaggagtcatgacagctttaattaaaagaaactcaacgatacccacaaaacaaacacaaatatttaccacatattcagacaatcaaccaggtgttttaatacaagtatatgaaggggaaagagcaatgacaaaagacaataacctcctcggacgatttgaattatcaggaatacccccagccccaagaggagtccctcaaatagaagttacttttgatatagatgctaatgggatactgaatgtaacagctaccgataaaagtacaggaaaagcaaacaaaataacaataacaaacgataaaggacgactaagcaaagaagaaatagaaaggatggtacaagaagctgaaaaatataaagcagaagacgaagtacaaagagaaagagtatctgctaaaaatgcattagaatcatacgcattcaatatgaaaagcgcagtagaagacgaaggacttaaaggaaaaataagtgaagcagataaaaagaaagtattagacaaatgtcaagaagtaatatcatggcttgatgcaaataccttagcagaaaaagatgaatttgaacataaaagaaaagaattagaacaagtatgcaatccaattataagtggtttatatcaaggcgcaggaggcccagggccagggggatttggagctcaaggacctaaaggaggaagtggatcagggcctacaatagaagaagttgactaa

SEQ ID NO: 3755 - RNA, 1926 nt, synthetic construct
  misc_feature 1..1926: note = AAA63227 variant
  source 1..1926: mol_type = other RNA
atggcaaaagcagcggcaatcggaatagacttaggaaccacatacagctgtgttggagtatttcaacacggaaaagtagaaataatagcaaacgatcaaggaaatagaacaacaccaagctacgtagcattcacagatacagaacgactgataggagatgctgcaaaaaatcaagtggcattaaatccacaaaatacagtctttgatgcaaaaagactaatagggagaaaatttggtgatcctgtagtacaaagcgatatgaaacattggccattccaggtaataaacgacggagataaaccaaaagtacaggtcagctacaaaggagaaacaaaagcattttaccctgaggaaataagtagtatggttctaacaaaaatgaaagaaatcgcagaagcatatctaggctatccagtcacaaacgcagtcataacagtaccagcatactttaacgactcacaaaggcaagcaacgaaagatgcaggagtcatagcagggcttaatgtcttaagaattataaatgaaccaacagcagcagcaatagcatatggacttgatagaacgggaaaaggagaaaggaatgtcctaatattcgacttaggaggaggaacttttgacgtaagtatacttacaattgacgatggaatatttgaagtaaaagcaacagccggagatacccacctaggaggagaagactttgataacagattagtaaaccatttcgtagaagaattcaaacgaaaacacaaaaaagatatctcacaaaataaaagagccgtaagaagattaagaacggcatgtgaaagagcaaaaagaacattaagtagtagcacacaggcaagcctagaaattgacagtctatttgaaggaatcgatttttatacatcaataacacgagcaagatttgaagaactatgctcagacctctttagatccacattagaacccgttgaaaaagcactaagagacgcaaaattggataaagctcaaatacatgacttagtattagtaggaggtagcacaagaataccgaaagttcaaaaattactgcaagacttttttaatggaagagatttaaacaaatcgataaatccagatgaagcagtcgcctacggagccgctgtgcaagcagctattctaatgggagataaaagcgaaaatgttcaagacttattattattagacgtagcaccattatcattagggttggaaacagcaggaggggtaatgacagcactaataaagagaaattcaaccataccaacaaaacaaactcaaatatttacaacatattctgataatcaaccaggagtattaatacaagtttacgaaggagaaagagcaatgactaaagataataatttattaggtagatttgaattaagtggaataccaccagccccaagaggagtaccacaaatagaagtaactttcgacattgatgcaaacggaatcctaaacgtcacagcgactgataaatcaacaggaaaagctaataaaatcacaataacaaacgataaaggaagattatcaaaagaagaaatcgaacgaatggtacaagaagctgaaaaatacaaagcagaagacgaagttcagagagaaagagtttcagctaaaaacgcattagaatcatacgcatttaacatgaaatcagcagtagaagatgaaggactaaaaggaaaaataagtgaagcagataaaaaaaaagtgctagacaaatgccaagaagtaataagctggctagatgcaaatacactagcagaaaaagacgaattcgaacacaaacgaaaagaattagagcaagtatgcaatcccattatatcaggattataccaaggagcgggaggaccagggccaggtggctttggcgcacaaggaccaaaaggagggtctggatccggtccaaccattgaagaagtagactag

SEQ ID NO: 3756 - RNA, 627 nt, synthetic construct
  misc_feature 1..627: note = AAI21098 variant
  source 1..627: mol_type = other RNA
atggcattaggacaaaaattattcataacaatgtcaagaggagcaggaagattacaaggaacattatgggcattagtattcctaggaatattagtaggaatggtagtaccatcacccgcaggaacaagagcaaataatacattattagatagtagaggatggggaacattattaagcagaagtagagcaggactagcaggagaaatagcaggagtaaactgggaatcaggatatttagtaggaataaaaagacaaaggagactatactgtaacgtaggcataggatttcacttacaagtattaccagatggaagaataagcgggacacatgaagaaaatccatacagtttattagaaataagcacagtagaaagaggagtagtaagtttattcggagtaagaagtgcattattcgtagcaatgaatagcaaaggaagactatatgcaacaccatcattccaagaagaatgcaaattcagagaaacattattaccaaataattataacgcatatgaaagtgatttatatcaaggaacatatatagcattaagtaaatatggaagagtaaaaagaggaagtaaagtatcaccaataatgacagtaacacactttctaccaagaatataa

SEQ ID NO: 3757 - RNA, 1569 nt, synthetic construct
  misc_feature 1..1569: note = BAA74724 variant
  source 1..1569: mol_type = other RNA
atgccacgagcgccacgatgtcgagctgtaagatcattattaagatcacattatagagaagtcttaccattagctacttttgtcagaagattaggaccccagggttggaggttagtacaaagaggcgatccagcagcgtttagagcattagtcgctcagtgtttagtatgcgtgccatgggatgcaagaccgccccctgctgcacccagctttaggcaagtatcatgtttaaaagaattagtagcaagagtattacaaagactttgtgaaagaggcgctaaaaatgtattagcttttggttttgccttattagacggagccagaggagggccaccagaagcatttacaacaagtgtaagaagttacctaccaaatacagtaacagatgcattaagaggatcaggtgcatggggactattattaagaagagtaggagatgacgtattggtacatttactagcaagatgcgctctattcgtattagttgccccaagctgcgcatatcaagtatgtggaccaccattataccaattaggcgctgcaactcaagctagaccaccaccacacgccagtgggccaagacgtagacttggttgtgaacgagcctggaaccactcagtaagagaagcaggagtcccattaggattacctgcaccaggagccagaagacgaggtggaagtgcatcaagatcattaccactaccaaaaagacctcgacgtggcgcagctccagaaccagaacgaactcctgtaggacaaggaagctgggcacacccagggcgaaccagagggccaagtgatcgaggattttgtgttgtaagtccagcaagaccagccgaagaagcaacgtcattggaaggagcattaagtggaacgagacattctcatccttcagtaggacgtcaacatcatgcaggaccacccagtacttctagaccaccaagaccatgggacaccccatgtccacctgtttacgcagaaaccaaacattttctatactcgtctggagataaagaacaattaagaccaagttttctactttcaagtttaagaccaatattaacgggtgcccgtagattagtagaaactatatttttaggctcatctccaggatgccaaggtttacctgctggatgtccagcctgcccttcagctacaggaaaatgtggaccatgtttttggagctgtttaggaacaactagatcagcaccaacaggatgtagttcaagaagaactgcacgctgtgaattacgatcaccacaacaacctgtaagtgttccaggcagatccccaagagcattatggcgacctcctagaagaagaactcaaacaccagtagcatggtgttcatgctcagcatcaaccgctccattagcaggagttcgactaagagcaggacttcctgctcctgcaggagcaccaagaccactcggattacaagcacaaagaagaaggtttttacgtaatacaaagaaattcattagtttaggaaaacatgcaaaactgtcactacaagaactaacatggaaaatgtcagtaagagattgtgcatggttaagacgttcacca

SEQ ID NO: 3758 - RNA, 1680 nt, synthetic construct
  misc_feature 1..1680: note = BAA23606 variant
  source 1..1680: mol_type = other RNA
atgcgactacacagactacgagcaaggttatcagcagttgcttgcggattactactacttcttgttagaggacaaggtcaagattcagcctcacccattagaactacacacactggacaagttttaggaagtcttgtacacgtaaaaggagcaaatgcaggagtacagacatttctaggtataccatttgccaaaccaccattaggaccattacgatttgctccaccggaacctcccgaaagttggtcaggcgtcagggacggaactacacatccagcaatgtgcctacaagatctaacagcagtagaaagcgaatttctctcacaatttaatatgacttttccatcagattcaatgtcagaagactgtttatatctttcaatatataccccagcacattctcacgaaggatcaaatcttccagttatggtatggatacatggaggtgcattagtcttcggaatggcaagcctatatgatggttcaatgcttgcagcattagaaaacgtagtagttgtcataatacaatacagactcggcgttttaggatttttctcaacaggagataaacatgccacaggtaattggggatatctagaccaagtagctgcactacgttgggtccaacaaaatatagcacactttggaggaaatcctgatcgagtaacaatatttggtgaatcagcaggaggaacttcagtatcatcattagtagtatctccaatatcacaaggattatttcatggagcaattatggaatcaggagttgcattactaccaggactaatcgcaagtagcgccgatgttatctctactgtagtagcaaacctatctgcatgcgaccaagtagactcagaagcattagttggatgtctaagaggaaaatcaaaagaagaaatactagcaataaacaaaccgttcaaaatgataccaggagtagtagatggagtatttctaccaagacatccacaagaactccttgcatctgcagactttcaacccgttccttctatagttggtgtaaacaataacgagtttggatggcttatacctaaagtcatgagaatatatgacactcaaaaagaaatggatagagaagcaagtcaagcagcactacaaaaaatgctaacattgttaatgttaccaccaactttcggtgatttactacgagaagaatacattggagataacggagacccccaaacattacaggcacaatttcaagaaatgatggcagattcaatgtttgtaatacccgcattacaagtagcacatttccaatgttcaagagcaccagtttatttttacgaatttcaacaccaaccctcatggcttaaaaatatccgaccccctcatatgaaagcagaccacggagacgaattaccatttgtatttagatccttctttggaggtaattatattaaattcacagaagaagaagaacaattatcaagaaaaatgatgaaatactgggccaatttcgccagaaacggaaatccaaatggagagggattaccacattggccactatttgatcaagaagaacaatatctacaacttaacctacaacccgcagtaggtagagcacttaaagcccaccgattacaattctggaaaaaagcattaccacaaaaaatacaagaactagaagaacctgaagaaagacatacagaattataa

SEQ ID NO: 3759 - RNA, 1740 nt, synthetic construct
  misc_feature 1..1740: note = AAH65269 variant
  source 1..1740: mol_type = other RNA
atgaacaaactatacataggaaacttatcagaaaacgcagcaccctcagacctagaatcaatcttcaaagatgcaaaaatacccgtatcaggcccattcctagtaaaaacaggatacgcatttgtagactgccctgacgaatcttgggccctcaaagcaatagaagccctttctggaaaaatagaactacatggcaaacctatagaagttgaacactcagttcccaaacgacaacgaataagaaaattacaaatcagaaacatcccaccacacctacaatgggaagtattagattcattattagtacaatacggagtcgtagaatcatgcgaacaagtaaacacagattcagaaaccgctgtagtaaacgtcacctactcatcaaaagaccaagcaagacaagcactcgacaaactaaatggcttccaactagaaaacttcaccttaaaagtagcatatatacccgacgaaatggcagctcaacaaaatccattacaacaaccccgcggaagaagaggactaggacaaagaggtagttccagacaaggatcaccaggatcagtaagtaaacaaaaaccttgtgacctaccattaagactactagttcctacacaattcgtaggcgcaattataggtaaagaaggagccactatcagaaatataacaaaacaaacacaatcaaaaatagacgtccacagaaaagaaaacgcaggcgcggcagaaaaatcaataacaatactaagtacaccagaaggaacctcagccgcatgcaaatccatcctcgaaataatgcacaaagaagcacaagacataaaatttacagaagaaataccactaaaaatattggcacataacaatttcgtaggacgtctaatcggaaaagaaggccgaaatttaaaaaaaatagaacaagatactgatacaaaaataacaataagccccttacaagaactaacactgtacaatccagaacgcacaataacagtcaaaggaaatgtagaaacatgtgcaaaagccgaagaagaaataatgaaaaaaataagagaatcatatgaaaatgacatagcatcaatgaacctccaagcacacctaatccccggattaaacttgaatgccctcggattatttccaccaacgagcggaatgcctccaccaacaagtggacccccatcagctatgacaccaccatatccacaattcgaacaaagcgaaaccgaaactgtacatctatttatcccagcacttagcgtaggtgcgataatcggcaaacaaggtcaacatatcaaacaattatctcgcttcgcaggagcctcaataaaaatagctcccgccgaagcacccgacgccaaagtccgtatggtaataataacaggaccacccgaagcacaatttaaagctcaaggaagaatatacggtaaaatcaaagaagaaaattttgtcagtccaaaagaagaagtaaaactggaagcccacataagagtaccttcatttgcagcaggacgagtaataggaaaaggaggaaaaactgtaaatgaattacaaaatctatcatcagccgaagtagtagtacctagagaccaaacacccgacgaaaatgatcaagttgtagtaaaaataacaggacatttttatgcatgccaagttgcccaaagaaaaatacaagaaatactaacacaggtaaaacaacaccagcaacagaaagcactacaaagtggaccaccacaatcaagaagaaaatag

SEQ ID NO: 3760 - RNA, 537 nt, synthetic construct
  misc_feature 1..537: note = AAA63207 variant
  source 1..537: mol_type = other RNA
atgcactcatcagcactactatgctgcctagtactactaacaggagtaagagcatcaccaggacaaggaacacaatcagaaaactcatgcacacacttcccaggaaacctaccaaacatgctaagagacctaagagacgcattctcaagagtaaaaacattcttccaaatgaaagaccaactagacaacctactcctaaaagaatcactactagaagacttcaaaggatacctaggatgccaagcactatcagaaatgatacaattctacctagaagaagtaatgccacaagcagaaaaccaagacccagacataaaagcacacgtaaactcactaggcgaaaacctaaaaacactaagactacgactaagaagatgccacagattcctaccatgcgaaaacaaatcaaaagcagtagaacaagtaaaaaacgcattcaacaaactacaagaaaaaggaatatacaaagcaatgtcagaattcgacatattcataaactacatagaagcatacatgacaatgaaaataagaaactaa

SEQ ID NO: 3761 - RNA, 1143 nt, synthetic construct
  misc_feature 1..1143: note = AAB17170 variant
  source 1..1143: mol_type = other RNA
atggcattcgtatgcttagctataggatgcttatacactttcctaatatccacaactttcggatgcacatcttcatcagataccgaaatcaaagtaaatccaccacaagactttgaaatcgtagacccaggatacttaggatacctatacttacaatggcaaccaccattatcgctcgaccatttcaaagaatgcacagtcgaatacgaattaaaatatagaaatataggttcagaaacctggaaaacaataataacaaaaaatttacattataaagacggatttgacttaaacaaaggaatagaagctaaaatacacacattactaccctggcaatgcacaaacggatcagaagtccaatcatcatgggcagaaacaacatactggatatcaccacaaggcataccagaaacaaaagtacaagacatggattgcgtatactacaactggcaatacctactatgctcatggaaacccggaataggagtactacttgatacaaactacaacttattctactggtatgaaggactagaccacgcactacaatgtgtagattacataaaagccgacggtcaaaacataggatgccgcttcccatatctagaagcatcagactacaaagacttctacatatgcgtaaatggatcttcagaaaacaaacctattcgctcatcatactttacattccaactacaaaacatcgtcaaaccacttcccccagtatacctaacattcactcgagaatcatcttgcgaaataaaactaaaatggtccataccattaggaccaatacctgcaagatgcttcgactacgaaatagaaatacgagaagacgacacaacactagtaacagcaacagtagaaaatgaaacatacacattaaaaacaacaaacgaaacacgacaactctgcttcgtagtaagaagcaaagtaaacatctattgctccgacgacggaatatggtcagaatggtcagacaaacaatgctgggaaggagaagatctctctaaaaaaacactactaagattctggctaccattcggttttattctaatattagtaatattcgtaaccggactactattaagaaaaccaaacacatacccaaaaatgatcccagaatttttctgcgacacataa

SEQ ID NO: 3762 - RNA, 819 nt, synthetic construct
  misc_feature 1..819: note = AAA67527 variant
  source 1..819: mol_type = other RNA
atggacagctacctattaatgtggggactactaaccttcataatggtaccaggatgccaagctgaactatgcgacgacgacccacccgaaataccacacgcaaccttcaaagcaatggcatacaaagaaggaacaatgttaaactgtgaatgcaaaagaggattcagacgaataaaatccggatcactatacatgctatgcacaggaaactcatcacactcaagttgggacaaccaatgccaatgcacatcatcagcaacacgaaacacaacaaaacaagtaacaccacaaccagaagaacaaaaagaaagaaaaacaacagaaatgcaatcaccaatgcaaccagtagatcaagcatcactaccaggacattgcagagaacccccaccatgggaaaacgaagcaacagaaagaatatatcacttcgtagtaggacaaatggtatactaccaatgcgtacaaggatacagagcactacacagaggcccagccgaatcagtatgtaaaatgacccacggaaaaacaagatggacacaaccacaactaatttgcaccggagaaatggaaacatcacaattcccaggagaagaaaaaccacaagcaagtccagaaggaagaccagaaagtgaaacaagttgcctagtaaccacaacagatttccaaatacaaacagaaatggcagcaacaatggaaacctcaatattcacaacagaataccaagtagcagtagcaggatgcgtattcttactaataagtgtactcctattatcaggactaacatggcaaagaagacaaagaaaaagcagaagaacaatataa

SEQ ID NO: 3763 - RNA, 1656 nt, synthetic construct
  misc_feature 1..1656: note = AAA59143 variant
  source 1..1656: mol_type = other RNA
atggctgcaccagcattatcctggagattaccattattaatattacttttaccacttgcaacatcttgggcaagtgcagcagtaaacggaaccagtcaattcacatgtttctacaactcaagagcaaatatttcttgcgtatggtcacaagacggtgcattacaagatacttcatgtcaagttcatgcctggccagacagaagaagatggaatcaaacttgcgaactactaccagtaagccaagcatcatgggcatgcaatctaatattaggagcaccagactcacaaaaactaacaaccgttgatatagttacattaagagttttatgtagagaaggagtcagatggcgtgtaatggccatacaagattttaaacccttcgaaaatttaagactaatggcaccaatatcactccaagtagtccacgtagaaacccatagatgtaatattagctgggaaatttcacaagcatctcattacttcgaacgacatttagaatttgaagcaagaacattatccccaggtcacacatgggaagaagcaccactacttaccttaaaacaaaaacaagaatggatatgcttagaaacattaacacccgacacacaatatgaatttcaagtacgagtaaaaccattacaaggagagttcacaacatggtccccttggtcacaacctttagccttcagaacaaaaccagcagcactaggaaaagatactataccatggctaggtcatcttctagtcggactttcaggagcatttggatttataatcctcgtatatctattaatcaactgtcgtaatactggcccatggttaaagaaagttctaaaatgcaacaccccagatccatcaaaattcttttctcaactgtcctctgaacatggaggagatgtacaaaaatggttatcaagtccctttccaagttctagtttttcaccaggtggacttgctccagaaatttcacctttagaagtactagaaagagataaagttactcaactattattacaacaagataaagtacctgaaccagcttccctttcgtcaaaccatagtttaacttcatgttttacaaatcaaggatacttcttctttcatttaccagatgcattagaaatagaagcatgtcaagtttattttacatacgatccttactctgaagaagatccagacgaaggagtagccggagctccaactggatcatctccacaaccactacaaccattatccggcgaagatgatgcatattgcaccttcccttcaagagacgatctcttactattttctccatctctattaggaggaccatcacctccatcaacagctccaggaggaagtggtgccggagaagaaagaatgccacctagtttacaagaacgagtaccaagagattgggatccacaacctttaggacctccaacacctggagtaccagatctagttgactttcaacctccacctgaattagtcttaagagaagctggtgaagaagttccagatgccggaccaagagaaggagtttcattcccatggagcagacctccaggacaaggagaatttcgagcactaaatgcacgacttccactcaacactgatgcatatctatccttacaagaactacagggccaagacccaacccacttagtataa

SEQ ID NO: 3764 - RNA, 1110 nt, synthetic construct
  misc_feature 1..1110: note = AAA59145 variant
  source 1..1110: mol_type = other RNA
atgttaaaaccctcattaccatttacatccctactatttctacaactcccattactaggagtaggactaaatacaactatattaactccaaacggaaatgaagacacaacagcagatttctttcttacaacaatgcccactgactcactctcagtatcaacactaccattaccagaagtacaatgcttcgtattcaacgtagaatacatgaactgcacatggaactcctcatcagaaccccaaccaaccaatctaaccttacactactggtataaaaactctgacaacgacaaagtacaaaaatgttcacattacttattttccgaagaaataacctcaggatgtcaattacaaaaaaaagaaatacacctataccaaacattcgtagtacagctacaagacccaagagaaccaagaagacaagccacacaaatgctaaaactacaaaacttagtaataccatgggcaccagaaaacttaacattacacaaattatcagaatcacaactagaactaaactggaacaaccgtttccttaatcactgcctagaacatctagtacagtacagaacagactgggatcactcatggacagaacaatctgtagattacagacacaaattctccctcccatcagtagacggacaaaaaagatacacatttcgcgtaagatctagattcaacccattatgcggatccgcacaacactggtccgaatggtcacacccaatacactggggctcaaacacctcaaaagaaaatccattcctattcgcactagaagccgtagtaatatcagtcggatcaatgggattaataatatccctattatgcgtatacttttggttagaacgaacaatgccaagaataccaaccctaaaaaatctagaagatctagttacagaataccacggaaatttttccgcttggtccggcgtatcaaaaggcctagcagaatcattacaacccgattactcagaaagactatgtttagtatccgaaattcctccaaaaggaggagcacttggagaaggccccggagcatcaccctgcaaccaacactccccctactgggcccctccatgctacaccctaaaacctgaaacataa

SEQ ID NO: 3765 - RNA, 405 nt, synthetic construct
  misc_feature 1..405: note = AAA74469 variant
  source 1..405: mol_type = other RNA
atgagaatgctactacacctatcactactagcactaggagcagcatacgtatacgcaataccaacagaaataccaacatcagcactagtaaaagaaacactagcactactatcaacacacagaacattactaatagcaaacgaaacactaagaataccagtaccagtacacaaaaaccaccaactctgcacagaagaaatattccaaggaataggaacactagaatcacaaacagtacaaggaggaacagtagaaagactattcaaaaacctatcactaataaaaaaatacatagacggacaaaaaaaaaaatgcggagaagaaagaagaagagtaaaccaattcctagactacctacaagaattcctaggagtaatgaacacagaatggataatagaatcataa

SEQ ID NO: 3766 - RNA, 555 nt, synthetic construct
  misc_feature 1..555: note = AAH06487 variant
  source 1..555: mol_type = other RNA
atggtaagaaaactaaaatttcacgaacaaaaattattaaaacaagtagatttcttaaactgggaagtaacagatcacaatctacatgaattaagagtactaagaagatatagattacaaagaagagaagactatacaagatacaatcaattaagtagagcagtaagagaactagcaagaagactaagagacttaccagaacgagaccaatttagagtaagagcaagcgcagcactactagataaattatacgcactaggattagtaccaacaagaggaagcctagaattatgcgatttcgtaacagcaagttcattctgtagaagaagattaccaacagtattactaaaactaagaatggcgcaacatctacaagcagcagtagcattcgtagaacaaggacatgtaagagtaggaccagatgtagtaacagatccagcatttttagtaacacgatcaatggaagactttgtaacatgggtagacagcagcaaaataaaaagacatgtattagaatataacgaagaaagagacgatttcgatctagaagcataa

SEQ ID NO: 3767 - RNA, 3150 nt, synthetic construct
  misc_feature 1..3150: note = AAH08786 variant
  source 1..3150: mol_type = other RNA
atgggatctagaacacctgaatctccactacacgccgtacaattaagatggggacctagacgacgaccacccctattaccattacttttattactccttccgccgcctccaagagtaggaggttttaacctagatgcagaagcacccgcggtattaagcggaccaccaggttcgttctttggtttttctgtagagttctatcgtccaggaaccgatggcgtatcagtactggttggagctccaaaagcaaatacctcacaacccggagtcttacaaggaggagcagtctatctatgtccctggggagcatcacccacccaatgcacacctatagagttcgactcgaaaggatcacgactattagaaagttctctatcttcatcggaaggcgaagaaccagtagaatacaaaagtttacagtggtttggagcaacagttagagcccacggcagttcaatacttgcatgtgccccattatattcttggagaactgaaaaagaaccgctaagtgatcctgtaggaacctgttatttaagtactgataattttacacgtatactagaatatgccccatgtcgatctgatttttcttgggcagcaggtcaaggatattgccaaggtggtttttcggcagagttcactaaaacagggagagtagttttaggaggtccaggttcatacttttggcaaggacaaatattgtctgcaacacaggaacaaatagccgaatcatattatccagaatatctcattaacttagtacaaggtcaattacaaacaagacaggcatcaagcatatatgatgattcttatttgggatatagtgtagcggtaggtgaatttagtggcgatgatactgaagattttgtggcaggcgtcccaaagggcaatctaacttacggttatgtaacaatactaaacggatcagatattcgctcactatacaatttctcaggagaacaaatggccagttattttgggtatgctgttgcggcaaccgacgtcaatggagatggattagatgacttacttgtaggggccccactattaatggacaggacgccagatggtaggccgcaagaagttggtagggtatatgtgtatctacaacacccagctggtatagaacctacaccaacactcacattaacaggacacgatgaatttggcagatttggatcatccttaacaccactaggagatttagatcaagacggatataacgatgttgctataggagctccttttggaggtgaaacacaacaaggtgtagtatttgtatttcctggaggtcctggaggattaggttcaaaaccatcacaagtactacaaccattatgggcagcaagccatacaccagactttttcggatcagcgctgcgcggaggaagagatctagatggtaatgggtatccggatttaatagtaggatctttcggtgtagataaggcagtcgtttatagaggacgcccaatagtctcagcatccgcctcactcactatttttccagccatgttcaatcccgaagaaagatcatgttctctagaaggcaaccctgtagcctgtatcaatttatctttttgtctaaatgcctcgggtaaacacgttgcagatagcataggatttactgtagaattacaattagattggcagaaacaaaaaggaggagtaaggagagctttattcttagcaagtagacaagcaactctaacacaaacccttttaatacaaaatggagccagagaagattgtagagaaatgaagatatatttaaggaatgaatctgaatttagggataaacttagtccaatacatattgccttaaacttctcactagatccacaagctcccgttgattctcacgggcttcggccagcgctacactaccaaagcaaaagtcgaatagaagataaagctcaaatactattagactgcggagaagataacatatgcgtaccagatctgcaactcgaagtctttggcgaacaaaaccatgtctatctgggagataaaaacgcccttaatctaaccttccatgcacaaaacgtcggtgaaggaggtgcatatgaagcagaattgagagtcaccgcccctcctgaagctgaatattcaggtctagtacgacaccctggtaatttctcatcactctcctgtgactattttgctgttaatcaaagtcgtctattagtttgtgatctaggaaaccccatgaaagcaggagcgagtctttggggtgggttaagatttacagtacctcatcttcgagatacaaagaaaaccatccaatttgattttcaaatactatctaaaaatttgaacaactcacagagtgatgtagtatcattcagactatccgtagaagcacaagctcaagtaactcttaacggagtttcaaaaccagaagcagtattattcccagtatcagattggcatccaagagaccaacctcaaaaagaagaggatttgggcccagcagtacatcatgtctatgaactgatcaaccaaggcccttctagcatctcccaaggcgtactagaactttcttgcccacaagcactagaaggacaacaattactatacgttacacgagtaacaggactcaattgtacaactaatcaccccataaatccaaaaggattagaattagatccggaaggaagtttacatcaccaacagaaaagagaagctccaagtagatcttccgcaagttccggccctcaaatattaaaatgcccagaagctgaatgtttcaggctacgttgtgagctaggaccattacatcaacaagaatcacaatctttacaactgcactttagagtatgggctaaaactttcttacaacgtgaacaccaacccttttccttacaatgcgaagccgtttataaggctttgaaaatgccttatagaattttaccaaggcaactaccccaaaaagaaagacaagtcgccactgcggttcagtggaccaaagccgagggatcttacggcgtccctctttggattataatactggccattttattcggacttcttttactaggactactaatatatattttatataaattaggatttttcaaaaggtcacttccttacggtacagctatggaaaaagcgcaactcaaaccaccagcaactagcgacgcataa

SEQ ID NO: 3768 - RNA, 2397 nt, synthetic construct
  misc_feature 1..2397: note = AAH20057 variant
  source 1..2397: mol_type = other RNA
atgaatctacaaccaatattctggataggtctaatatcatcagtttgttgtgtatttgcacaaacagatgaaaatagatgcctgaaagctaatgcaaaatcatgtggagaatgtatacaagcaggacccaactgtggatggtgtacaaacagtacatttctccaagaaggcatgccaacatcagcaagatgtgatgacttagaagctctaaagaagaaaggttgcccaccagatgatatagaaaacccaagaggaagcaaagacatcaagaaaaacaaaaacgttaccaacagaagtaaaggcactgccgaaaaattaaaaccagaggatataacacaaatacaaccacagcaattagttctaagactcagatcaggagagccacaaacattcaccctaaaattcaaaagagccgaagattatccaatagatctatattatttaatggatttaagctatagcatgaaagatgacttagagaacgttaaatctctaggaacagacctaatgaatgaaatgagaaggataacatcagattttagaataggctttggatcattcgttgagaaaacagttatgccatatataagcactacccctgcgaaattaagaaatccatgcacaagcgaacaaaattgcacttcaccctttagttataaaaatgtactatcactaacaaataaaggtgaagtatttaatgagctagtgggaaaacaacgaatatcaggaaacttagacagtccagaaggaggattcgatgcaataatgcaagtcgccgtatgtggaagtttaataggatggagaaatgtcactaggctattagtattttctacagacgcaggctttcattttgctggggacggtaaattaggaggaattgtactaccaaacgatggacaatgccacttagaaaataatatgtacacaatgtcacattattacgattatccatcgatagcgcacctagtacaaaaactaagtgaaaataatatacaaacaatatttgctgttactgaagaatttcaaccagtgtataaagaactaaagaacttaataccaaaatcagctgtgggcaccctatctgcaaattccagcaacgttatacaacttataatagacgcatataatagccttagtagtgaagtaatattagaaaacggaaaattaagtgaaggagtcacaatctcatacaaatcttactgtaaaaatggagtcaatggtacaggcgaaaatggaaggaaatgtagcaacataagtatcggcgatgaagtacaatttgaaataagtataaccagtaataaatgcccaaagaaagatagcgattcatttaaaataaggcctcttgggtttactgaagaagtagaagtaatattacaatatatatgtgaatgtgaatgtcaatcagaaggtattccagaaagtccgaaatgtcatgaaggaaatggaaccttcgaatgtggagcatgccgttgtaatgaaggtagagttggtcgacattgcgaatgttcaacagatgaagtaaactcagaagacatggatgcctattgtcgaaaagagaatagtagtgaaatatgttctaataatggagaatgtgtatgcggacaatgcgtatgcaggaaaagagataatactaatgaaatatacagtgggaaattttgtgaatgtgataatttcaattgcgatagatctaatggattaatatgtgggggaaacggggtatgtaaatgcagggtatgtgaatgcaatccaaactatacaggttcagcctgcgattgttctttagatacaagcacttgtgaagcatcaaacggccaaatatgcaatggaagaggaatttgcgaatgcggtgtatgtaaatgcacagacccaaaatttcaaggacaaacctgtgaaatgtgtcaaacatgcttaggagtatgtgcagaacacaaagaatgtgtacaatgcagagcatttaataaaggagaaaagaaagatacatgtactcaagaatgttcttattttaatataacaaaagttgaaagtagagacaaattaccacaacccgtacagccagatccagtaagtcattgtaaagaaaaagacgtagacgattgctggttttactttacgtactcagtaaatggaaacaacgaagtaatggttcacgtcgtcgaaaatccagaatgtcctacaggtccagatataataccaatcgtagcaggagtagttgcaggaatagtattaatcggactagcactattactgatatggaaattgctgatgataatacacgatagaagagaatttgctaaattcgaaaaagagaaaatgaatgcaaaatgggatacaggtgaaaatcccatctataaatcagcggtaacaactgtagtaaatccaaaatacgaaggaaaataa

SEQ ID NO: 3769 - RNA, 2367 nt, synthetic construct
  misc_feature 1..2367: note = AAA36122 variant
  source 1..2367: mol_type = other RNA
atgggaatagaattactatgtttattctttctttttctaggtcgtaatgatcacgtacaaggcggatgtgcgttaggaggagctgaaacctgtgaagattgcttactgataggtcctcaatgtgcttggtgtgcacaagaaaatttcacacacccatcaggagtcggagaacgatgcgatacaccagcaaatttattagcaaaaggatgtcaactaaacttcattgagaacccggtatcacaagtcgaaatcctaaaaaacaaaccattatcagtaggacgacaaaaaaactccagcgatatagtacaaatagcgccgcaatcactgattttgaaattaagacctggcggtgcacaaacactacaagtacacgtaagacaaactgaagattacccagtagatctatattacctaatggatttatcagcatcaatggatgatgatttaaacacaataaaagaattaggttctaggttatcaaaagagatgtcaaaactaacttctaattttagacttggatttggatccttcgtagaaaaacccgtatcaccatttgtcaaaaccacaccagaggaaatagcaaatccttgctctagcatcccttacttttgtttaccaacattcggattcaaacatatattaccattaaccaatgatgcagaaagattcaatgaaatagttaaaaatcaaaaaataagtgcaaatatagatacaccggaaggaggttttgatgcaataatgcaagcagccgtctgcaaagaaaaaatcggctggagaaacgactcattacatctactagtctttgtatctgatgcagactcccactttggaatggactcaaaactagcaggaatcgtcattccaaatgacggattatgccacctagattctaaaaatgaatattctatgtcaacagtattagaatacccaacaattggacaactaattgacaaattggttcaaaataatgttttattaatatttgccgtaactcaagaacaagtacatctatacgaaaactatgcaaaattgataccaggcgcaacagttggactacttcaaaaagattcaggaaacatactacaactaattatatcagcttacgaagaactacgatctgaagtagaattagaagtactaggagacacagaagggttaaatctatcattcactgcaatctgcaataatggtacattatttcaacatcaaaaaaaatgttcacatatgaaagttggagataccgcatctttttctgttacagtaaacattccacactgtgaacgtcgctccagacatataataataaaacccgtaggtctaggagacgcgttagaactgttggtgagtcctgaatgcaactgtgactgccaaaaagaggtagaagttaactcatctaaatgtcatcatggtaatggatcatttcagtgcggcgtttgcgcatgtcaccccggtcatatgggcccaagatgtgaatgtggtgaggacatgctaagtacagattcctgcaaagaagctccagatcatccatcctgttcaggaagaggtgattgttattgtggacaatgcatatgccacctatcaccttatggaaatatttatggaccttattgtcaatgtgacaattttagttgtgtcaggcataaaggcctactatgtggaggaaatggagattgtgactgtggagaatgtgtatgtagatcaggatggacaggcgaatattgcaattgcactacttcaacagacagctgtgtatcagaagatggagtattatgctcaggaagaggagattgtgtatgtggtaaatgtgtatgtacaaatccaggagcatcaggtcccacttgtgaaagatgtccaacttgtggagatccttgtaacagcaaaagatcctgtattgaatgtcatctatcagcagctggacaagcaagagaagaatgtgttgataaatgtaaactcgcaggagctacaatatcagaagaagaagacttctcaaaagatggtagcgtcagttgctctttacaaggagaaaatgaatgcctaataacattcttaatcaccacagataacgaaggaaaaacaattattcattcaataaatgaaaaagattgtccaaaaccaccgaacatacccatgataatgctaggagtatctttagcaatcttattaataggagtagttttactatgcatatggaaattattagtttcctttcatgaccgcaaagaagtagcgaaatttgaagcagaaagaagcaaagcaaaatggcagaccggtacaaacccattataccgaggtagcacctccacttttaagaatgtaacatataaacaccgagaaaaacaaaaagtagacttaagtacagattgttaa

SEQ ID NO: 3770 - RNA, 786 nt, synthetic construct
  misc_feature 1..786: note = EAW71937 variant
  source 1..786: mol_type = other RNA
atgtgggacttagtattatcaattgcactatcagtaggatgtacaggtgctgtaccattaatacaatcaagaatagtaggaggatgggaatgtgaaaaacattcacaaccatggcaagtagccgtatatagtcatggatgggcacattgtggaggagtattagtacatccacaatgggtattaacagccgcacattgtttaaagaaaaatagccaagtatggttaggaagacacaacttattcgaaccagaagatacaggacaaagagtaccagtaagtcatagctttccacatccattatataatatgtcattattaaaacatcaatcactaagaccagacgaagacagttcacacgatctaatgctattaagattatcagaaccagcaaaaataacagatgtagtaaaagtattaggattaccaacacaagaaccagcattaggaacaacatgctacgcatcaggatggggatcaatagaaccagaagaatttttaagaccaagatctttacaatgtgtatcattacatctattatcaaatgacatgtgtgccagagcatattcagaaaaagtaacagaatttatgttatgtgcaggattatggacaggaggaaaagacacatgcggaggagattcaggaggaccgctagtatgtaatggagtactacaaggaataacatcatggggcccagaaccatgtgcactaccagaaaaaccagcagtatacacaaaagttgtacattatagaaaatggataaaagacacaatagcagcaaatccataa

SEQ ID NO: 3771 - RNA, 672 nt, synthetic construct
  misc_feature 1..672: note = EAW71938 variant
  source 1..672: mol_type = other RNA
atgtgggacttagtattatcaatagcattaagtgtaggatgtacaggagcagtacccttaatacaaagcagaatagtaggaggatgggaatgcgaaaaacattcacaaccatggcaagtagcagtatacagtcacggatgggcacactgtggaggagttttagtacatccacaatgggtactaacagcagcacactgtctaaaaaaaaattcacaagtatggttaggaagacataacttattcgaaccagaagacaccggacaaagagtaccagtaagtcattcatttccacatccattatacaatatgtcactattaaaacatcaaagtctaagaccagatgaagattcaagtcacgatctaatgttattaagattatcagaaccagcaaaaataacagacgtagtaaaagtactaggactaccaacacaagaaccagcattaggaactacatgttatgcatcaggatggggatcaatagaaccagaagaatttttaagaccaagatcactacaatgcgtatcactacacttattaagcaacgatatgtgtgcacgagcatattcagaaaaagtaacagaattcatgctatgtgcaggactatggacaggaggaaaagacacatgcggagtatcacacccatactcacaacacctagaaggcaaaggataa

SEQ ID NO: 3772 - RNA, 189 nt, synthetic construct
  misc_feature 1..189: note = BAF98781 variant
  source 1..189: mol_type = other RNA
atgtcactattaaaacatcaatcactaagaccagatgaagacagctcacacgatctaatgctattaagattaagcgaaccagcaaaaataacagatgtagtaaaagtactaggactaccaacacaagaaccagcattaggaacaacatgttacgcaagcggatggggaagcatagaaccagaagaataa

SEQ ID NO: 3773 - RNA, 735 nt, synthetic construct
  misc_feature 1..735: note = BAG62239 variant
  source 1..735: mol_type = other RNA
atgggaacattatggggatgtccaggagcaccaccagtaggcgcacattcatgtccactaccaaaagaagtatcaagaacactaggatcaggagaaggaatggccgtatcacacagaaacaatagtggaatgttaccaccaggaagcctattaagaaattcacaagtatggctaggaagacataatttatttgaaccagaagacacaggaagaagagtacccgtcagtcattcttttccacatccattatacaatatgagtttattaaaacatcaaagtctaagaccagatgaagatagctcacatgatctaatgctattaagactaagcgaaccagcaaaaataacagatgtagtaaaagtactaggtttaccaacacaagaaccggcattaggcacaacctgttacgcatctggatggggaagtatagaaccagaagaatttttaagaccaagatcactacaatgcgtaagcctacatttactctcaaacgatatgtgcgcaagagcatattcagaaaaagtaaccgaatttatgctatgcgcaggattatggacaggaggaaaagacacatgtggaggagatagcggaggaccattagtatgcaatggagtattacaaggaataacatcatggggaccagaaccatgtgcattaccagaaaaaccagcagtatacacaaaagtagtacattacagaaaatggataaaagacacaatagcagcaaatccttaa

SEQ ID NO: 3774 - RNA, 786 nt, synthetic construct
  misc_feature 1..786: note = AAA74454 variant
  source 1..786: mol_type = other RNA
atgtgggacctagtactatcaatagcactatcagtaggatgtacaggagcagtaccattaatacaatcaagaatagtaggaggatgggaatgtgaaaaacattcacaaccatggcaagtagcagtatacagccatggatgggcacactgtggaggagtattagtacatcctcaatgggtattaacagcagcacattgtctaaaaaaaaattcacaagtatggctaggaagacataatttatttgaaccagaagacactggacaaagagtaccagtatcacattcattcccccatccattatataatatgtcactattaaaacatcaatcattaagacccgatgaagattcatcacatgacttaatgctattaagattatcagaaccagcaaaaataacagacgtcgtcaaagtactcggattaccaacccaagaaccagcactaggcacaacatgttacgcatcaggatggggaagtatagaaccagaagaattcttaagaccaagaagtttacaatgtgtatcattacatttactatcaaacgatatgtgtgcaagagcatatagtgaaaaagtaacagaattcatgttatgtgcaggactatggacaggaggaaaagatacatgcggaggtgattcaggaggaccattagtatgcaacggagtactacaaggaataacatcatggggaccagaaccatgtgcattaccagaaaaacctgcagtatacacaaaagtagtacattacagaaaatggataaaagatacaatagcagcaaatccataa

SEQ ID NO: 3775 - RNA, 150 nt, synthetic construct
  misc_feature 1..150: note = AAR10469 variant
  source 1..150: mol_type = other RNA
atgtgggacttagtattaagcatagcattaagcgtaggatgtacaggaatagcaagatcaggatgggtaggaacaacatgcttaagcttaaaaacacaagcaagaggaagcttaagcgcaacagcaagccatacaagaagcacaatataa

SEQ ID NO: 3776 - RNA, 543 nt, synthetic construct
  misc_feature 1..543: note = AAR10468 variant
  source 1..543: mol_type = other RNA
atgtgggacctagtactaagcatagcattaagcgtaggatgtacaggagcagtaccactaatacaaagcagaatagtaggaggatgggaatgcgaaaaacatagtcaaccatggcaagtagcagtatactcacacggatgggcacactgtggaggagtattagtacatccacaatgggtactaacagcagcacactgtctaaaaaaaaattcacaagtatggctaggaagacataacttattcgaaccagaagacacaggccaaagagtaccagtaagccatagttttccacatccattatacaatatgtcactactaaaacatcaatcattaagaccagatgaagattcatcacacgatttaatgctattaagattatcagaaccagcaaaaataacagatgtagtaaaagtactaggactaccaacacaagaaccagcattaggaacaacatgttatgcaagcggatggggaagcatagaaccagaagaatgcacaccaggaccagatggagtagcaggaagtccagacgcatgggtataa

SEQ ID NO: 3777 - RNA, 765 nt, synthetic construct
  misc_feature 1..765: note = EAW71943 variant
  source 1..765: mol_type = other RNA
atggcaacagcaggaaatccatggggctggttcttaggatatctaatattaggagtagcaggatcattagtatcaggatcatgttcacaaataataaacggagaagattgttcaccacattcacaaccttggcaagcagcattagtaatggaaaatgaattattctgttcaggagtacttgtacatccacaatgggtattatcagcagctcattgttttcaaaatagttatacaataggattaggactacattcattagaagcagatcaagaaccaggatcacaaatggtagaagcatcattatcagtacgacacccagaatataatagaccattattagcaaatgacctaatgctaataaaattagacgaaagtgtatcagaatcagatacaatacgatcaatatcaatagcaagtcaatgcccaacagcaggaaactcatgtttagtatcaggatggggattattagcaaatggaagaatgccaacagtattacaatgtgtaaatgtaagcgtagtatcagaagaagtatgttcaaaattatatgatcccttatatcatccatcaatgttttgtgcaggaggaggacaagatcaaaaagattcatgtaatggagattcaggaggaccattaatatgtaacggatatttacaaggattagtatcatttggaaaagctccatgtggacaagtaggtgtaccaggagtatatacaaatttatgtaaatttactgaatggatagaaaaaacagtacaagctagttaa

SEQ ID NO: 3778 - RNA, 228 nt, synthetic construct
  misc_feature 1..228: note = AAX30051 variant
  source 1..228: mol_type = other RNA
atggcaacagcaggaaatccatggggatggtttttaggatatttaatattaggagtagcaggaagtttagtatcaggatcatgttcacaaataataaatggagaagattgtagtccacattcacaaccatggcaagcagcattagtaatggaaaatgaattattttgttcaggagtattagtacatccacaatgggtattaagtgcagcacattgttttcaaaaataa

SEQ ID NO: 3779 - RNA, 588 nt, synthetic construct
  misc_feature 1..588: note = AAL14782 variant
  source 1..588: mol_type = other RNA
atggcaacagctggaaatccatggggatggttcttaggatatctaatactaggagtagcaggatcattagtaagcggatcatgttcacaaataataaacggagaagattgctccccacattcacaaccatggcaagcagccctagtaatggaaaatgaattattctgttcaggagtcttagtacatccacaatgggtactatcagcagcacactgtttccaaaactcatacacaataggactaggactacattcattagaagcagaccaagaaccaggatcacaaatggtagaagcatcactatcagtaagacacccagaatacaacagaccattactagctaacgatttaatgttaataaaattagacgaatcagtatcagaatcagatacaataagatcaatatcaatagcatcacaatgcccaacagcaggaaattcatgtctagtatcaggatggggactactagcaaatggagaattaacaggagtctgcttaccatcaagccgaagatcatccgcacaatctagaggtttaacacaatcatcagcatcacaagcagaatgcttaccatgttgttccgcataa

SEQ ID NO: 3780 - RNA, 480 nt, synthetic construct
  misc_feature 1..480: note = AAL14781 variant
  source 1..480: mol_type = other RNA
atggcaacagcaggaaatccatggggatggtttttaggatatttaatattaggagtagcaggatcattagtaagcggatcatgttcacaaataataaatggagaagattgtagtccacattcacaaccatggcaagcagcattagtaatggaaaatgaattattttgttcaggagtattagtacatccacaatgggtactaagtgcagcacactgttttcaaaatagttatactataggactaggattacattcattagaagcagatcaagaaccaggaagtcaaatggtagaagcaagtttaagtgtaagacatccagaatataatagaccattattagcaaatgatttaatgttaataaaattagatgaatcagtaagtgaatcagatacaataagaagtataagtatagcatcacaatgtccaacagcaggaaattcatgtttagtatcaggatggggattattagcaaatggataa

SEQ ID NO: 3781 - RNA, 765 nt, synthetic construct
  misc_feature 1..765: note = AAD21580 variant
  source 1..765: mol_type = other RNA
atggcaacagcaggaaatccatggggatggtttttaggatatttaatattaggagtagcaggatcattagtatcaggatcatgttcacaaataataaacggagaagattgttctccacattcacaaccatggcaagcagcattagtaatggaaaatgaattattttgtagtggagtattagtacatccacaatgggtactatcagcagcacactgttttcaaaattcctatacaataggattaggattacattcattagaagcagatcaagaaccaggatcacaaatggtagaagcatcattaagtgtaagacacccagaatataatagaccactattagcaaacgacttaatgttaataaaattagatgaatcagtatcagaatcagatacaataagatcaatatcaatagcatcacaatgtcccacagcaggaaattcatgtttggtaagtggatggggtttattagcaaatgggagaatgccaacagtattacaatgtgtaaatgtaagtgtagtaagtgaagaagtatgctcaaaattatatgatccattatatcatccaagcatgttttgcgcaggaggtggacatgaccaaaaagattcatgtaatggagattcaggaggaccattaatatgtaatggttatctacaaggactagtatcatttggaaaagcaccatgtggacaagtaggagtaccaggagtatatacaaatctatgtaaatttacagaatggatagaaaaaacagtacaagcatcataa

SEQ ID NO: 3782 - RNA, 2673 nt, synthetic construct
  misc_feature 1..2673: note = AAC83230 variant
  source 1..2673: mol_type = other RNA
atgtcacaaggcatactatcaccacccgcgggactactaagcgacgacgatgtcgtagtatccccaatgttcgaatcaacggcagcagatctcggatcagtagtaagaaaaaatctattatcagattgctctgtagtatcaacctcattagaagataaacaacaagtaccatcagaagacagcatggaaaaagtgaaagtatacttacgagtcagaccattactaccttcagaactagaacgacaagaagaccaaggatgcgtaaggatagaaaatgtagaaactttagtactacaagctccaaaagatagcttcgcattaaaatccaatgaacgtggaataggccaagctacgcacagatttacattttcacaaatattcggaccggaagtcggtcaagcctcattttttaatttaacagtaaaagaaatggtaaaagacgttctcaaaggccaaaactggttaatttatacctacggagttactaactccggtaaaacacacaccattcagggcactataaaagacggtggaatcctgccaagaagtcttgcattaatattcaattccttacaagggcaattacatccgacacctgatctaaagccattactatcaaatgaagtaatatggctcgactcaaaacaaataagacaggaagaaatgaagaaactgagcctacttaatggaggactacaagaagaagaattaagcacttcattaaaacgctccgtatatatagaaagtagaataggtacatcaacctcctttgacagcggaatagcaggactctcgtcaatcagccaatgcacttcctcaagccaactagatgaaacatcacatcgatgggcacaacccgacacagcacctttacccgtaccagctaacattcgattctccatttggatatctttcttcgaaatatacaacgaactgttatatgatttactagaacctccatctcaacaaagaaaacgacaaacactaagattatgcgaagaccaaaacggtaatccctacgtaaaagatctaaattggatacacgtacaagatgcagaagaagcctggaaactactaaaagtagggcgaaaaaatcaatcattcgcctccacacatttaaatcaaaactcaagcagatcacactcaatattctcaataaggatcctccatctccaaggggagggtgatatagtcccaaaaataagtgagctaagtctatgcgatcttgcagggagtgaaagatgtaaagaccagaagagcggagaaagattaaaggaagccggaaatattaatacctccttacacaccttaggtagatgtatagcagcacttagacagaatcagcaaaacagaagcaaacaaaacttagttccatttcgtgattccaaattaacaagagtattccaaggattttttacaggaagaggacgaagttgcatgatagtcaacgtaaatccatgcgcttcaacatatgatgaaactttacatgttgctaaattttccgcaatagcatctcaactagttcatgcacctcccatgcaattagggttcccttctctacattcattcataaaagaacacagtctacaagtatcccctagtttagaaaagggagctaaagctgacaccggtttagatgacgacatagaaaacgaagcagacatttctatgtatggaaaagaagaactgctgcaagtcgtggaagcaatgaaaactcttctactaaaagaaagacaagaaaaactacaattagaaatgcatttaagagatgaaatctgcaatgaaatggttgaacaaatgcaacaaagagaacaatggtgttcagaacatctagatacacaaaaagaattattagaagaaatgtacgaagaaaaattaaatatcctcaaagaatcattaaccagcttttaccaagaggaaatacaagaacgcgatgaaaaaatagaagaattggaagcgcttctacaagaggcaagacaacaatcagtagcacatcaacaatcaggaagtgaactagccctaagacggtcacaaagactagcagccagcgcctcaacacagcaacttcaagaagtaaaagcgaaattacaacagtgtaaagcagaattgaattcgacaacagaagaactacacaaatatcaaaaaatgttagaaccgcctccctccgccaaaccattcactatagacgtagacaaaaagctagaagaaggacaaaaaaatatcaggttactaagaacggaacttcaaaaattaggagaaagcctccaatcagcagagagagcatgctgtcatagcacaggagcaggaaaactaaggcaagcgttaacaacatgcgacgatattctaataaaacaagaccaaacattagcagaattacaaaacaacatggtattagtaaaacttgacctaaggaaaaaagcagcatgtatagcagaacaataccacactgtattaaaactccaagggcaagtttcagcaaaaaaaagattagggaccaatcaagagaatcaacaacccaaccaacaacctccaggaaagaaaccatttctaagaaacttattacctagaacacctacctgtcagagctcaacagactgcagtccatatgccaggatcctaagaagccgacgaagcccactattaaaatcgggtccgttcggaaaaaaatattaa

SEQ ID NO: 3783 - RNA, 1113 nt, synthetic construct
  misc_feature 1..1113: note = AAH34621 variant
  source 1..1113: mol_type = other RNA
atggcaataacattagaagaagcaccatggctaggatggctcctagtaaaagcactaatgagattcgcattcatggtagtaaacaacctcgtagctataccatcatatatatgttacgtaataattctacaaccactaagagtactagattcaaaaagattctggtatatagaaggaataatgtacaaatggctattaggaatggtagcgtcatggggatggtacgccggatataccgtaatggaatggggcgaagatataaaagctgtaagtaaagacgaagcagtaatgctcgtaaaccaccaagcaaccggagatgtatgtaccctaatgatgtgcttacaagacaaaggattagtagtagcacaaatgatgtggttaatggatcatatcttcaaatatacaaactttggaatagttagcctcgtacatggagacttttttataagacaaggaagatcataccgtgaccaacaattactattactaaaaaaacacttagaaaataactacagatccagagacagaaaatggatagtattattccctgaaggaggattcttaagaaaaagaagagaaacatcacaagcattcgccaaaaaaaataacctaccatttctaactaacgtaacattacccagaagtggagcaacaaaaataatattaaacgcactagtcgcacaacaaaaaaatggatcaccagcaggtggagacgcaaaagaactagattcaaaatcaaaaggactacaatggataatagatacaacaatagcatacccaaaagctgaaccaatagacatacaaacatggatactaggatatagaaaaccaaccgtcacacatgtacattacagaatattcccaatcaaagacgtaccactagaaacagacgatctaacaacatggctataccaaagattcgtagaaaaagaagacctactatcacacttctatgaaacaggagcatttccaccatcaaaaggccacaaagaagcagtatcaagagaaatgacactatcaaatttatggatattcctaatacaatcattcgcattcctctccggatacatgtggtataacataatacaatacttctatcactgcctattctaa

SEQ ID NO: 3784 - RNA, 2178 nt, synthetic construct
  misc_feature 1..2178: note = AAH14924 variant
  source 1..2178: mol_type = other RNA
atggctatggacagctctttacaagccagattatttccaggattagccataaaaatacaacgaagcaacggattgatccactcagccaacgtccgaactgtaaatctagaaaaatcttgtgtctcagtagaatgggcagaaggaggagccacaaaaggaaaagagatagatttcgatgacgtcgcagcaatcaatccggaattactacaattattacctttacatcccaaagacaatttaccactccaagaaaatgtcacaatacaaaaacagaaaagaagatcagtaaacagtaaaataccagcaccgaaagaaagtttaagatcaagatcgacacgaatgtcaacagtaagcgaactaagaataacagcacaagaaaacgacatggaggtcgaactaccagcggcagcaaattctagaaaacaatttagcgttccaccagcacccacgagaccaagctgccctgccgtagccgaaatcccattaaggatggtatcagaagaaatggaagaacaagtacactccataagaggctcgagttctgcaaacccagtaaactcagtacgaagaaagagctgtcttgttaaagaagtcgagaaaatgaaaaacaaaagagaagaaaagaaagcccaaaacagcgaaatgagaatgaaaagagcacaagaatatgacagcagctttcccaattgggagttcgcaagaatgataaaagaatttcgagcaacactagaatgtcatccattaactatgactgatccaatagaagaacatagaatatgtgtatgcgtacgaaaaagaccattgaataaacaagaactagccaagaaagaaatagacgtaataagcattccatcaaaatgcttattactcgtgcatgagccgaaattaaaggtagacttaacgaaatatctcgaaaaccaagcattttgtttcgattttgccttcgacgaaacagccagtaatgaagtagtatatagatttaccgcacgacctttagttcaaacaatctttgaaggaggaaaagcaacatgctttgcatatggccaaacgggaagcggaaagacccacacaatgggtggggacctatcaggaaaagcccaaaacgcaagcaaaggaatttatgcgatggcaagcagggacgtctttttattaaagaatcaaccatgctacagaaaactaggactagaagtatatgttacattctttgaaatatataatggaaaattatttgacctattaaacaagaaagctaaattacgagtgctagaagacggaaaacaacaagtacaagttgtcgggctacaagaacatctcgtcaatagtgctgatgacgttataaaaatgatagacatgggatcagcatgtagaaccagcggccaaacatttgcaaactcaaactcaagcaggtcacatgcatgcttccaaataatactcagggcaaaaggaagaatgcatggaaaattttccctagtagaccttgctggcaatgaaagaggtgccgatacctcatcagcagataggcaaactagaatggaaggagcagaaataaataaatcattacttgcactaaaagaatgcatacgagcactaggccaaaacaaagcacacactccctttagagaatcaaaattaactcaagtattaagagactcctttataggagaaaattcacgaacatgtatgatagcaaccatatccccaggaatatctagctgtgaatacacattgaatacactaagatatgcagacagagttaaagaattatcaccacactcaggaccatcaggcgaacaactaatacaaatggaaaccgaagaaatggaagcctgctcaaacggagcattaatacccggaaacctatcaaaagaagaggaagaattaagttctcaaatgtcaagtttcaacgaagcaatgacacaaattagggaactggaagaaaaagcaatggaagaactaaaagaaataatccaacaagggccagattggttggaactttcagaaatgacagaacaacccgattacgacctagaaacatttgtaaacaaagcagaaagtgctctagcacaacaagcaaaacatttttcagcactaagagatgtaataaaagcactaagacttgcaatgcaattggaagaacaagcatcacgtcaaatatcaagcaaaaagcgaccacaataa

SEQ ID NO: 3785 - RNA, 342 nt, synthetic construct
  misc_feature 1..342: note = AAH62223 variant
  source 1..342: mol_type = other RNA
atgaacttctacctactactagcatcatcaatactatgcgcactaatagtattctggaaatacagaagattccaaagaaacacaggagaaatgtcatcaaactcaacagcactcgcactagtaagaccatcatcatcaggactaataaactcaaacacagacaacaacctagcagtatacgacctatcaagagacatactaaacaacttcccacactcaatagcaagacaaaaaagaatactagtaaacctatcaatggtagaaaacaaactagtagaactagaacacacactactatcaaaaggattcagaggagcatcaccacacagaaaatcaacctaa

SEQ ID NO: 3786 - RNA, 2583 nt, synthetic construct
  misc_feature 1..2583: note = AAA56833 variant
  source 1..2583: mol_type = other RNA
atgggcccatggggctggaaattaagatggactgttgctttattactcgccgctgcgggaactgcagtgggagatcggtgtgaaagaaatgaatttcaatgccaagatggtaaatgtatatcgtataaatgggtatgcgacggatcagcagaatgccaagacggtagtgatgaaagtcaagaaacttgcttatcagtaacatgtaaatcaggagacttttcatgtggaggaagagtaaatcgatgcattccacaattttggagatgtgacggacaagttgattgtgataatggatcagatgaacaaggatgtccaccaaaaacatgttcacaagatgaatttagatgccatgacggaaaatgtataagccgccagtttgtttgcgattcagatagagattgtcttgacggatcagatgaagctagttgcccagtgcttacatgtggaccagcatcatttcaatgcaattcctcaacctgtataccacaattatgggcatgtgataatgatccagactgcgaagacggaagtgatgaatggccccaaagatgtagaggcttatacgtattccaaggagactctagtccatgctcagctttcgaatttcactgtcttagtggagaatgtattcattcaagctggagatgtgatggaggaccagattgtaaagacaaatctgatgaagaaaattgtgcagtcgcaacatgtcgaccagatgaatttcaatgtagtgatggtaattgcatacatggatcaagacaatgcgatagagaatacgattgcaaagatatgagtgatgaagtaggatgtgtcaatgtaaccctatgtgagggaccaaacaaatttaaatgtcatagtggagaatgcataacacttgataaagtatgcaacatggcaagagactgcagagactggtctgacgaaccaataaaagaatgtggaacgaacgaatgcttggataataatggcggatgttcacacgtatgtaatgatctaaaaatcggatatgagtgtttatgtccagatggttttcaattagtcgcacagagaagatgcgaagatatcgatgaatgccaagatccagatacgtgttcacaattatgtgtaaacctggaaggaggctacaaatgtcaatgtgaagaaggatttcaattagacccacatactaaagcatgtaaagctgtaggaagcatagcatatttattctttactaatcgacatgaagtaagaaaaatgacattagatagatcagaatatacatctttaatacctaatttaagaaatgttgtagcactagataccgaagtagcatcaaacagaatatattggtcagatttaagtcaaagaatgatatgctcaactcaacttgatcgagcacatggtgtatcttcatatgacaccgtaatctcaagagacatacaagcaccagatggcttggctgtagactggatacattcaaacatatactggacagattcagtacttggtacagtatcagtagcagatacaaaaggtgtaaaaagaaaaacattatttcgagaaaacggttcaaagcccagagcaatagtagtagaccctgtacatggatttatgtattggacagattggggaacaccagcgaaaataaagaaaggaggattaaacggagttgatatctactcacttgtaacagaaaatattcagtggccaaatggaataacattagatcttctgtcagggagattatactgggtagacagcaaattacattcaatatcatcaatcgacgtaaacggaggtaatagaaaaactatactcgaagacgaaaaacgactggcacatccattttcattggcagtattcgaagataaagtattttggacagatataattaatgaagctatattttcagccaatagattaaccggaagcgatgttaacctacttgcagaaaacttgctaagtccagaagacatggtactatttcataatcttacgcaacctcgaggggtaaactggtgtgaacgaacgacacttagtaatggaggttgtcaatatttatgcctgccggctccacaaataaatcctcactcaccaaaatttacttgcgcatgtcccgatggcatgttattagctagagatatgcgaagttgcctgacagaagcagaagctgcagtagcaacccaagaaacgtccaccgtgagactcaaagtatcaagtacagctgtaagaacccaacacacgacaacaaggccagtaccggatacgagtagactaccaggagctacaccaggattaacaactgtagaaatagtcacaatgagtcaccaagcattaggcgatgtcgcaggacgaggtaatgaaaagaaaccctccagtgtaagagctttaagtatagtattaccaattgttttgttagtatttctttgcctaggagtcttcctactatggaaaaattggagattgaaaaacattaacagtatcaattttgataaccctgtatatcagaaaacaaccgaagatgaagttcatatatgtcataatcaagatggatatagttacccaagtaggcaaatggtatctttagaagatgatgtagcataa

SEQ ID NO: 3787 - RNA, 1302 nt, synthetic construct
  misc_feature 1..1302: note = CAA70989 variant
  source 1..1302: mol_type = other RNA
atggtatggaaagtagccgtattcctatctgtagctctaggaataggagcagtcccaatagacgacccagaagacggaggcaaacactgggtagtaatagtagccggttcaaacggatggtacaactatagacaccaagcagacgcctgtcacgcataccaaataattcacagaaacggaataccagacgaacaaatagtagtaatgatgtacgacgacatagcatacagtgaagacaacccaacaccaggaatagtaataaacagacctaacggaacagatgtatatcaaggagtaccaaaagactatacaggagaagacgtaacaccccaaaatttcctagcagtattaagaggagatgcagaagcagtaaaaggaattggatcaggaaaagtactaaaatcaggaccacaagaccatgtattcatatactttactgaccacggatcaacaggaatattagtatttcccaacgaagatctacacgtaaaagacctaaacgaaacaatacactacatgtataaacataaaatgtatagaaaaatggtattctacatagaagcatgcgaatcaggatcaatgatgaatcatcttccagacaacataaacgtatacgctacaacagcagccaacccaagagaatcatcatacgcatgctactatgatgaaaaacgatcaacatacctaggagattggtactcagtaaactggatggaagactcagatgtagaagacctcaccaaagaaaccttacacaaacaataccacctagtaaaaagccacacaaacacatcacacgtaatgcaatatggaaataaaacaatttcaaccatgaaagtaatgcaattccaaggaatgaaaagaaaagcctcatcaccagtaccactaccaccagtaacacacttagatttaacaccatcacccgatgtaccacttacaataatgaaaagaaaactaatgaacactaacgacctggaagaatctagacaattaacagaagaaatacaaagacacctagacgcaagacacctaatagaaaaatcagtaagaaaaatagtatcactactagcagcatcagaagcagaagtagaacaattactatcagaaagagcacccctcacaggacactcatgctatccagaagcactattacacttcagaactcactgcttcaactggcacagcccaacatacgaatatgcactccgacatttatatgtattagtaaacctatgtgaaaaaccataccctctccacagaatcaaattatcaatggaccatgtatgcctcggccactactaa

SEQ ID NO: 3788 - RNA, 1797 nt, synthetic construct
  misc_feature 1..1797: note = AAL36991 variant
  source 1..1797: mol_type = other RNA
atgacaccaatagttacagtattaatttgtctaggattatcattaggcccaagaacgcatgttcaaacaggaacaattccaaaacctactctatgggcagaacctgattcagttataacacagggatcaccagttacattatcatgtcaaggctcactagaagctcaagaatatagactttaccgcgaaaaaaaaagtgcaagttggattacccgaatacgaccagaactggtcaaaaacggacaattccatataccatctatcacatgggaacatacaggacgatatggttgtcaatattactctcgagcaagatggtcagaactatcagatccattagttttagtaatgacaggcgcttatccaaaacctacactttcagcacaacccagtccagtagtaacaagtggaggtagggttaccttacaatgtgaaagtcaagtagcatttggaggatttatactatgtaaagaaggagaagaagaacatccacaatgcctaaattcccaaccccacgcaagaggttcatcacgtgctatattttcagtaggcccagtttctcctaatcgtagatggtcacaccgatgctatggatatgacttaaactcaccatatgtatggtcatcaccatcagatctacttgaactattagtaccaggtgtttctaaaaaaccatcactatctgtacaaccaggacccgtagttgctccaggagaaagcttaaccttacaatgtgtgtcagatgtaggatatgatagatttgttttatataaagaaggagaaagagatttacgacaacttcccggacgccaaccacaagctggattatcacaagcaaattttacattaggacctgtttcaagatcatatggaggtcaatatagatgttatggagcacataatctatcatcagaatgttctgcaccaagtgatcctttagatatactaataactggacaaatacgaggaacaccattcataagtgtacaacctggcccaacagtggcatcaggagaaaatgttacactattatgccaatcatggagacaatttcacacttttctcctcacaaaagccggtgcggcagacgctccacttcgtctaagaagtatacatgaatacccaaaataccaagctgaatttccaatgagtccagtcacgtcagcacacgcaggaacatacagatgctacggatcattaaatagcgatccctatcttctaagccatccatcagaaccattagagctagttgtatctggaccaagcatgggaagctcaccaccacctactggtcccatatcaacaccagcaggacccgaagatcaacctctaacacctacaggatcagaccctcaaagtggattaggaagacatttaggcgtcgttataggtatattagtagcagtagtactactcctacttttattactactcttatttttaattttaagacaccgaagacaaggaaaacattggacatccacacaaagaaaagcagactttcaacatccagctggtgcagttggaccagaaccaacagatagaggcctacaatggagatcttcaccagctgccgacgcacaagaagaaaatctttatgcagcggttaaagacacccaacctgaagacggagtagaaatggatacacgagctgcagcatccgaagctccacaggatgtaacgtacgcacaattgcattcattaactcttagaagaaaagcaaccgaaccccccccatctcaagaacgagaacccccagccgaaccaagcatatatgcaacactggcaatacattaa

SEQ ID NO: 3789 - RNA, 498 nt, synthetic construct
  misc_feature 1..498: note = CCDS6385.2 variant
  source 1..498: mol_type = other RNA
atggcactattagcattactattagtagtagcattaccaagagtatggacagatgcaaatctaacagcaagacaaagagatccagaagattcacaaagaacagacgaaggagataacagagtatggtgccatgtatgtgaaagagaaaatacatttgaatgccaaaatccaagaagatgtaaatggacagaaccatattgcgtaatagcagcagtaaaaatattcccaagatttttcatggtagcaaaacaatgctcagcaggatgcgcagcaatggaaagaccaaaaccagaagaaaaaagatttctattagaagaaccaatgccatttttctacctaaaatgctgtaaaataagatattgcaacctagaaggaccaccaataaactcatcagtattcaaagaatatgcaggatcaatgggagaatcatgtggaggactatggctagcaatactactattattagcatcaatagcagcaggattatcattatcataa

SEQ ID NO: 3790 - RNA, 375 nt, synthetic construct
  misc_feature 1..375: note = AAA68873 variant
  source 1..375: mol_type = other RNA
atgtcactagaacaaaaatcacaacactgcaaaccagaagaaggactagacacacaagaagaagcactaggactagtaggagtacaagcagcaacaacagaagaacaagaagcagtatccagctcatcaccactagtaccaggaacattaggagaagtaccagcagcaggatcaccaggaccattaaaatcaccacaaggagcatcagcaataccaacagcaatagacttcacactatggagacaatcaataaaaggatcatcaaaccaagaagaagaaggaccatcaacatcaccagacccagaatcagtattcagagcagcactatcaaaaaaagtagcagacctaatacacttcttactactaaaatactaa

SEQ ID NO: 3791 - RNA, 957 nt, synthetic construct
  misc_feature 1..957: note = AAH02455 variant
  source 1..957: mol_type = other RNA
atgttactaggacaaaaatcacaaagatataaagcagaagaaggactacaagcacaaggagaagcaccaggactaatggacgtccaaataccaacagcagaagaacaaaaagcagcaagtagctcaagtacactaataatgggaacattagaagaagtcactgactcaggatccccatcaccaccacaatcaccagaaggagcaagctcatcattaacagtaacagattcaacactatggagccaaagcgatgaaggaagttcaagtaatgaagaagaaggaccatctacatcaccagatccagcacacttagaaagtttattccgagaagcactggacgaaaaagtagccgaattagtaagatttctattaagaaaataccaaataaaagaaccagtcactaaagcagaaatgctagaaagcgtaatcaaaaactataaaaatcactttccagatatatttagcaaagcatcagaatgtatgcaagtaatattcggaatagatgtaaaagaagtagacccagcaggacactcatacatattagtgacatgtctaggtctatcatacgatggactactaggagacgaccaaagtacaccaaaaacaggtttactaataatagtactaggaatgatactaatggaaggaagcagggcaccagaagaagcaatatgggaagcattaagtgtaatgggactatatgacggacgagaacactcagtatattggaaattaagaaaattactaacacaagaatgggtacaagaaaattatctagaatacagacaagcaccaggcagtgatccagtaagatatgaatttctatggggcccaagagcactagcggaaacaagctacgttaaagtattagaacatgtcgtaagagtaaacgcgagagtgagaataagttatccatcattacatgaagaagcattaggagaagaaaaaggagtgtaa

SEQ ID NO: 3792 - RNA, 1290 nt, synthetic construct
  misc_feature 1..1290: note = AAH04479 variant
  source 1..1290: mol_type = other RNA
atggaaacacaattcagaagaggcggactaggatgtagtccagcctccataaaaagaaaaaaaaaaagagaagatagtggagattttggattacaagtaagtacaatgttttcagaagacgattttcaatcgacagaacgagcaccatatggacctcaactacaatggagtcaagacctaccaagagtacaagtatttagagaacaagcaaacttagaagatagatcaccaagaagaacgcaaagaataactggaggagaacaagtactctggggtcccataacacaaatatttccaacagtaagaccagctgatctaacaagggtaataatgccattagaacaaagatcacaacactgcaaaccagaagaaggactacaagcacaagaagaagacctaggtttagtaggcgcacaagcattacaagccgaagaacaagaagcagcatttttcagctcaactctaaatgtcggaacactagaagaattacccgccgctgaatctccaagcccaccccaatctccacaagaagaaagcttcagtccaacagctatggacgcaatattcggatcactaagtgatgaaggtagcggaagccaagaaaaagaaggcccaagtacatcacccgacctaatagatccagaatcattctcacaagatatcttacatgataagataatagatttagtacaccttttgttaagaaaatacagagtaaaaggattaataacaaaagctgaaatgttaggatcagtaataaaaaattacgaagattatttcccagaaatattcagagaagcatctgtatgtatgcaattattatttggaattgatgtaaaagaagtagacccaacaagtcattcatacgtattagtaacttcgttaaacctatcatatgatggaattcaatgcaatgaacaatcaatgccaaaatctggattactaataatagtattaggagtaatttttatggaaggaaactgcataccagaagaagtgatgtgggaagtattatcaataatgggagtatatgcaggacgagaacattttttatttggagaaccaaaaagactactaacacaaaattgggtacaagaaaaatacctagtatacagacaagtaccaggcacagatccagcttgctatgaattcctatggggaccgagagcacacgccgaaacatcaaaaatgaaagtattagaatatatcgcaaacgccaacggaagagatccaacatcataccccagtttatatgaagacgcactaagagaagaaggggaaggagtataa

SEQ ID NO: 3793 - RNA, 1110 nt, synthetic construct
  misc_feature 1..1110: note = EAW99421 variant
  source 1..1110: mol_type = other RNA
atgccaagagcacctaaaagacaacgatgtatgcccgaagaagatctacaatcccaatcagaaactcaaggtcttgaaggagctcaagcaccactagctgtagaagaagacgcaagctcatcaacatcaacatcaagcagcttcccatctagtttcccctcatcatcatcatcatcatcctcatcttgctatcctctaataccatcaactcccgaagaagtatcagcagatgatgaaacaccaaatccacctcaatctgcacaaatagcatgctcatcaccaagtgtagtagccagtcttcccttagatcaaagcgacgaaggatcatcaagccaaaaagaagaatcaccatcaacattacaagtcctacccgactcagaatcactcccacgatcagaaatagacgaaaaagttacagatctagtacaatttttattattcaaataccaaatgaaagaaccaataacaaaagcagaaatattagaatcagtaattaaaaattacgaagatcactttccattattattttcagaagcatcagaatgcatgctattagtcttcggaatagatgttaaagaagtagaccctactggacattcctttgttctagtaacttcattaggattaacctacgacggcatgctatcagacgtacaatcaatgccgaaaacaggaatactaatactaatactatcaataatattcatagaaggttattgtactccagaagaagtaatatgggaagccttaaacatgatgggactatacgatggaatggaacacttaatatacggtgaaccaagaaaactactaacacaagattgggtacaagaaaactatctagaatacaggcaagtaccaggatcagatcccgctcgatacgaatttctttggggaccaagagcacacgcagaaataagaaaaatgtcattattaaaattcttagcaaaagtaaacggatcagatccaagatcatttcccttatggtacgaagaagcattaaaagatgaagaagaaagagcacaagacagaatagcaaccacagacgataccactgcaatggcatcagcatcatcatcggcaacaggatcattctcttacccagaatag

SEQ ID NO: 3794 - RNA, 945 nt, synthetic construct
  misc_feature 1..945: note = AAH03408 variant
  source 1..945: mol_type = other RNA
atgccactagaacaacgatcacaacactgcaaacctgaagaaggattagaagcacaaggagaagcactaggcttagtaggagctcaagcacctgcaacagaagaacaagaaacagctagtagctcaagtacattagtcgaagtaacactaagagaagtaccagccgcagaatcaccatcaccaccacacagcccacaaggagcatcaacactcccaacaacaataaactacacactatggtcacaaagtgacgaaggaagctcaaatgaagaacaagaaggaccctcaacatttccagacctagaaacatcattccaagtagcattaagcagaaaaatggcagaattagtacatttcctactactaaaatacagagccagagaaccatttacaaaagcagaaatgctaggatcagtaataagaaacttccaagatttcttcccagtcatattctcaaaagcatcagaatacctacaactagtatttggtatagaagtagtggaagtagtaagaataggacatttatacatattagtaacatgcctaggactaagctacgacggtctattaggagacaaccaaatagtccccaaaacaggacttttaattattgtactagcaatcatagcaaaagaaggagactgcgcaccagaagaaaaaatatgggaagaattatccgtactagaagcatccgacggaagagaagattcagtattcgcacatcccagaaaactactaactcaagatttagtacaagaaaactacttagaatatagacaagtaccaggatcagacccagcatgctatgaattcctatggggaccaagagcattagtagaaacatcatacgtaaaagtactacaccacttattaaaaatatcaggcggaccacacatatcatatccaccattacacgaatgggcattcagagaaggagaagaataa

SEQ ID NO: 3795 - RNA, 930 nt, synthetic construct
  misc_feature 1..930: note = AAA03229 variant
  source 1..930: mol_type = other RNA
atgagtctagaacaaaggagcttacactgtaaacctgaagaagcattagaagcacaacaagaagcactaggactagtatgcgtacaagcagccacatcatcatcatcaccactagtattaggaacattagaagaggttccaacagcaggatcaacagacccaccacaaagcccacaaggtgcatcagcatttcctacaacaataaactttacaagacaaagacaacctagtgaaggaagttcatcaagagaagaagagggaccttcaacaagttgtatattagaatcactatttagagcagtaataacaaaaaaagttgcagatttagtaggatttctattactaaaatacagagcaagagaaccagtaacaaaagcagaaatgctagaatcagtaataaaaaattataaacactgctttccagaaatatttggaaaggcatcagaatcactacaactagtcttcggaatagatgtaaaagaagctgatccaacaggacattcatacgtactagtaacatgtctaggactaagttacgatggattactaggagacaaccaaataatgccaaaaacgggattcttaataatagtactagttatgatagcaatggaaggaggacacgcaccagaagaagaaatatgggaagaactatcagtaatggaagtatatgacggaagagaacacagcgcatatggagaacccagaaaacttctaacacaagatctagtacaagaaaaatatttagaatacagacaagtaccagattcagatccagctagatatgaattcctatggggacctagagcactagcagaaacaagttatgtaaaagtactagaatatgtaataaaagtatcagcaagagtaagatttttctttccaagtctaagagaagcagcattaagagaagaagaagaaggagtataa

SEQ ID NO: 3796 - RNA, 945 nt, synthetic construct
  misc_feature 1..945: note = AAA17729 variant
  source 1..945: mol_type = other RNA
atgccactagaacaaagaagccagcactgtaaaccagaagaaggactagaagcaagaggagaagcactaggattagttggagctcaagccccagccaccgaagaacaacaaacagcaagcagctcatcaacactagtagaagtaacattaggagaagtaccagcagctgacagtccatcaccaccacactcaccccaaggagcatcatcattcagcacaacaataaattacactctatggagacaatcagatgaaggatcaagcaaccaagaagaagaaggcccaagaatgtttccagatctagaaagcgaattccaagcagcaatatcaagaaaaatggtagaattagtacacttcctactactcaaatacagagcacgcgaaccagtaacaaaagcagaaatgttagaatcagtactaagaaactgccaagactttttcccagtaatattttcaaaagcctcagaatacctacaattagtctttggaatagaagttgtcgaagtagttcccatatcacacctatacatattagtaacatgcttaggcctatcatatgacggattactaggagataaccaagtaatgccaaaaacaggactactaataatagtattagcaataatagcaatagaaggcgattgtgcaccagaagaaaaaatatgggaagaattaagcatgttagaagtcttcgaaggaagagaagactctgtattcgcacacccaagaaaactattaatgcaagatttagtccaagaaaattacctagaatacagacaagtaccaggatcagacccagcatgttacgaattcttatggggaccaagagcactaatagaaacatcttacgtaaaagtattacatcacacactaaaaattggaggagaaccacacatatcatacccacctctacacgaaagagctctaagagaaggagaagaataa

SEQ ID NO: 3797 - RNA, 945 nt, synthetic construct
  misc_feature 1..945: note = AAA17446 variant
  source 1..945: mol_type = other RNA
atgccactagaacaaagatcacaacactgtaaacctgaagaaggacttgaagcaagaggagaagcattaggattagtgggagcacaagcacctgctacagaagaacaagaagcagcaagtagtagtagtacactagtagaagttacattaggagaagtacctgccgctgaaagcccagatccaccacaaagtccacaaggagccagttcactaccaacaacaatgaattatccactatggagtcaaagttatgaagatagtagcaatcaagaagaagaaggtccaagtacattccccgatttagaaagtgaattccaagctgcattaagtcgaaaagtagctgaactagtacatttcttattactaaaatatagagcaagagaaccagtaacaaaagcagaaatgttaggatcagtagtaggaaattggcagtatttttttccagtaatattttcaaaagcaagcagttcattacaattagtatttggaatagaattaatggaagtagacccaataggacacctatatatattcgcaacatgtttaggactatcatacgacggactacttggagataatcaaataatgccaaaagcaggactattaataatagtactagcaataatagctagagaaggagattgtgcaccagaagaaaaaatatgggaagaactatcagtattagaagtatttgaaggaagagaagattcaatattaggagacccaaaaaaactattaacacaacactttgtacaagagaattacttagaatatagacaagtaccaggaagtgacccagcatgttacgaatttttatggggaccaagagcactagttgaaacttcatatgtaaaagtactacatcatatggttaaaataagcggaggaccacatataagttaccctccattacacgaatgggtattaagagaaggagaagaataa

SEQ ID NO: 3798 - RNA, 954 nt, synthetic construct
  misc_feature 1..954: note = EAW99410 variant
  source 1..954: mol_type = other RNA
atgagtagcgaacaaaaaagtcaacattgtaaaccagaagagggagtagaagcacaagaagaagcacttggacttgtaggagcacaagcacctacgacagaagaacaagaagcagctgtaagcagttccagtcctttagtaccaggaacacttgaagaagtacctgcagcagaatcagccggaccaccacaatcaccacaaggagcatcagcattgccaacaacaataagttttacatgctggaggcaaccaaacgaaggatcaagttcacaagaagaagaaggaccaagcacaagcccagatgcagaatcactctttagagaagcattaagtaataaagtagacgaattagcacactttcttttaagaaaatatagagcaaaagaactcgtcacgaaagcagaaatgttagaaagagtaataaaaaactataaaagatgctttccagtaatatttggaaaagcatcagaatcactaaaaatgatattcggaatagatgttaaagaagtagacccagcttcaaacacatacacattagtaacatgtttaggactaagctatgatggactgctaggaaacaatcaaatatttccaaaaacaggattattaattatagtattaggaacaatagcaatggaaggagatagcgcatcagaagaagaaatatgggaagaactaggagtaatgggagtatatgacggaagagaacatacagtatatggagaaccaaggaaattattaacacaagattgggtacaagaaaattatctagaatacagacaagtaccaggaagcaatccagcgcgatatgaatttttatggggcccacgagcactagcagaaacaagctatgtaaaagttctagaacatgtagtaagagtaaatgcaagagtaagaatagcatacccttctttaagagaagcagcattgttagaagaagaggaaggagtataa

SEQ ID NO: 3799 - RNA, 954 nt, synthetic construct
  misc_feature 1..954: note = AAA68871 variant
  source 1..954: mol_type = other RNA
atgtcaagtgaacagaaaagtcaacactgtaaaccagaagaaggagtagaagcgcaagaagaagcattaggtctagtaggagcgcaagcaccaacaacagaagaacaagaagcagcagtaagctcaagttcaccactggtaccgggaacattagaagaagtgccagcagcagaaagcgcaggaccaccacaaagtccacaaggagcctcagcactaccaacaacaataagtttcacatgttggagacagcccaatgaaggatcaagctcacaggaagaagaaggaccgagtacaagtccagatgcagaaagcctatttagagaagcattaagcaataaagtagacgaattggcacattttctattaagaaaatatagagcaaaagaattagtaacaaaagcagaaatgctagaacgagtaattaaaaactataaaagatgctttccagttatatttggaaaagcaagtgaaagtctaaaaatgatatttgggatagatgtaaaagaagtagatccagcaagcaatacatatacacttgtaacatgtctaggattatcgtatgatggactactaggaaataatcaaatatttccaaaaacaggactattaataatagtattaggaacaatagcaatggaaggagatagtgcatcggaagaagaaatatgggaagaattaggagtaatgggagtatatgacggaagagaacacacagtatatggagaaccaagaaaattattaacacaagattgggtacaagaaaattatcttgaatatagacaagtaccaggaagtaatccagccaggtatgaatttttatggggaccaagggcattagcagaaacaagttatgtaaaagtattggaacatgttgtaagagtaaatgctagagtacgaatagcttatccaagcctaagagaagcagcattattagaagaagaagaaggagtataa

SEQ ID NO: 3800 - RNA, 954 nt, synthetic construct
  misc_feature 1..954: note = AAY27261 variant
  source 1..954: mol_type = other RNA
atgagtagtgaacaaaaatcacaacactgtaaaccagaagaaggagtagaagcacaagaagaagcactaggtttagtaggagcacaagcacccacgacagaagaacaagaagcagcagtgagctcaagctcacccttagtacccggcacgctagaggaagtaccagcagcagaaagcgcaggaccaccacagagtccacaaggagcatcagcactaccaacaacaataagctttacttgttggaggcaaccaaacgaaggatcatcatcacaagaagaagaaggaccaagtaccagtccagatgcagaatcattatttagagaagcactaagcaataaagtagatgaactagctcattttctcttaagaaaatacagagcaaaagaattagtaacaaaagcagaaatgctagaaagagtaataaaaaactataaaagatgctttccagtaatatttggaaaagcatcagaatcactaaaaatgatattcgggatagatgtaaaagaagtagacccaactagtaacacatatactttagtgacatgtctaggattatcatacgatggattattaggaaacaatcaaatattcccaaaaacaggactactaataatagtactaggaacaatagcaatggaaggagactcagcttcagaagaagaaatatgggaagaactaggagtaatgggagtatatgacggaagagaacacacagtctatggcgaaccaagaaaattactaacacaagactgggtacaagaaaactatctagaatatagacaagtaccaggatcaaatcctgcaagatatgaatttctatggggaccacgagcactagcagaaacatcatatgtaaaagtattagaacatgtagtaagagtgaacgcgagagtacgaatagcatatccatctctaagagaagcagcattactagaagaagaagaaggagtataa

SEQ ID NO: 3801 - RNA, 945 nt, synthetic construct
  misc_feature 1..945: note = BAF82126 variant
  source 1..945: mol_type = other RNA
atgccattagaacaaagatcacaacactgtaaaccagaagaaggactagaagcaagaggtgaagcattaggactagtaggagcacaagcaccagcaactgaagaacaggaagcagcatcatcatcatcaacattagttgaagtaacattaggagaagtaccagcagcagaatcaccagatccaccacaatcaccacaaggagcaagctcattaccaactacaatgaattacccactatggtcacaatcatatgaagattcatcaaatcaagaagaagaaggaccctctacttttccagacctagaatcagaattccaagcagcactatcaagaaaactagcaaaattagtacatttcttactattaaaatacagagcaagagaaccagtaacaaaagcagaaatgttaggaagcgtagtaggaaattggcaatacttttttccagtaatattctcaaaagcatcagattcattacaattagtattcggaatagaactaatggaagtagacccaataggacatgtatatatatttgcaacctgcttaggattaagctatgacggacttttaggagataaccaaataatgccaaaaactggatttctaataataatattagccataatagcaaaagaaggagactgcgcaccagaagaaaaaatatgggaagaactgtcagtattagaagtattcgaaggaagagaagatataattttcggagaccctaaaaaattattaacacaatactttgtacaagaaaattatttagaatatagacaagtaccaggatctgacccagcatgttacgaattcttatggggaccaagagcattaatcgaaacaagttacgtaaaagtactacaccacatggtaaaaataagtggcggtccccgaatatcttaccctctattacacgaatgggcattaagagaaggtgaagaataa

SEQ ID NO: 3802 - RNA, 945 nt, synthetic construct
  misc_feature 1..945: note = AAA19006 variant
  source 1..945: mol_type = other RNA
atgccactagaacaaagatcacaacattgtaaaccagaagaaggactagaagcaagaggagaagcattaggattagtaggagcacaggctccagctacagaagaacaagaagcagcatcatcctcatccactttagtagaagtcacattaggagaagtaccagcagcagaatcaccagacccaccacaatcaccccaaggcgccagcagcctaccaacaacaatgaattaccctctatggagccaatcatatgaagactcatcaaaccaagaagaagaaggaccatcaacatttcccgatttagaatcagaattccaagcagcattatcaagaaaagtagcaaaattagtacatttcttattactaaaatatagagcaagagaaccagtaacaaaagctgaaatgctaggcagtgtagtaggaaattggcaatactttttcccagtaatattctcaaaagcatcagatagtctacaactagtatttggaatagaattaatggaagtagaccccataggacatgtatatatatttgcaacatgcttaggattatcatatgacggattattaggagataaccaaataatgccaaaaacaggattcttaataattatactagcaataatagcaaaagaaggagattgcgcacccgaagaaaaaatatgggaagaactaagtgtattagaagtattcgaaggaagagaagactcaattttcggagacccaaaaaaactactaacacaatattttgtacaagaaaattacctagaatacagacaagtaccaggatcagatccagcatgctacgaattcttatggggtccaagagcattaatcgaaacatcatatgtaaaagtacttcatcatatggtaaaaatatcaggaggaccaagaatatcatacccacttctacacgaatgggcactcagagaaggcgaagaataa

SEQ ID NO: 3803 - RNA, 945 nt, synthetic construct
  misc_feature 1..945: note = CAG46567 variant
  source 1..945: mol_type = other RNA
atgccattagaacaaagaagtcaacactgtaaaccagaagaaggattagaagcaagaggagaagctctaggattagtaggagcacaagcaccagcaacagaagaacaagaagcagcatcctcatcatcaacactagtagaagtaacattaggagaagtaccagcagcagaatcacctgacccaccacaaagtccacaaggagcgtcatcactaccaacaacaatgaattatccactatggtcacaatcatatgaagattcaagtaaccaagaagaagaaggaccatcaacatttccagatttagaaagcgaattccaagcagcactaagtagaaaagtagcaaaattagtacatttcttattattaaaatatagagctagggaaccagtcacaaaagcagaaatgttaggaagtgtcgtaggaaattggcaatactttttcccagtaatattttcaaaagctagtgattcattacaattagtatttggaatagaattaatggaagttgatccaataggacacgtctatatatttgcaacatgtttaggactatcatatgacggactactaggagataaccaaataatgcccaaaacaggatttttaataataatactagcaataatagcaaaagaaggtgattgcgcaccagaagaaaaaatctgggaagaactatcagtattagaagtattcgaaggaagagaagattcaatattcggagaccctaaaaaactattaacacaatactttgtacaagaaaactacttagaatatagacaagtaccaggaagtgacccagcatgttacgaattcttatggggacctagagcattaatagaaacatcatacgtaaaagtattacatcatatggtaaaaatatcaggcggaccaagaataagttacccactattacatgaatgggcattcagagaaggagaagaataa

SEQ ID NO: 3804 - RNA, 948 nt, synthetic construct
  misc_feature 1..948: note = AAA68877 variant
  source 1..948: mol_type = other RNA
atgtcactagaacaaagaagcccacactgtaaacctgatgaagacttagaagcacaaggagaagatttaggattaatgggagcacaagaaccaaccggagaagaagaagaaacaacatcatcatcagattcaaaagaagaagaagtatcagcagcaggatcctcaagtccaccacaatcaccacaaggaggagcatcatcatcaatatcagtatattacacactatggagccaattcgatgaaggatcatcatcacaagaagaagaagaaccatcaagctcagtagacccagctcaattagaatttatgttccaagaagccttaaaattaaaagtagcagagctagtacactttttattacataaatacagagtaaaagaaccagtaacaaaagcagaaatgctagaatcagtaatcaaaaactataaaagatattttccagtaatattcggaaaagcatcagaatttatgcaggtaatattcggaacagatgtaaaagaagtagacccagctgggcactcatacatattagtaacagcactgggattatcatgcgactcaatgttaggagatggacactcaatgccaaaagctgcattgctaataatagtgctaggagtaatattaacaaaagataattgcgcaccagaagaagtaatatgggaagcactaagcgtaatgggtgtatacgtcggaaaagaacatatgttttatggagaaccaagaaaattactaacacaagattgggtacaagaaaattatttagaataccgacaagtacccggttcagatccagcccactatgaatttctatggggatcaaaagctcatgcagaaacatcatacgaaaaagtaataaactatttagtaatgcttaacgcaagagaacctatatgctatccaagtctatatgaagaagtactaggagaagaacaagagggagtataa

SEQ ID NO: 3805 - RNA, 1044 nt, synthetic construct
  misc_feature 1..1044: note = AAI01309 variant
  source 1..1044: mol_type = other RNA
atgccaagaggacaaaaatcaaaactaagagcaagagaaaaacgaagacaagccagaggaggattagaagacttaatagacgcactcgatatattagaagaagaagaagaaagcccaccaagcgcatcagcatgtctaaaagacgtattccaaagttcattagacggcgcctcaaacaatcctcacggactaagagaagcccaaagcacatcaacatccgccacagcagcatcacacacaagacacccagaaggtgtaaacgaccaaatggaagaaagacccatatgcacacaagacctagaagcaacagattcattccctagaggaccagtagacgaaaaagtaataatactcgtacattatctactatacaaatatcaaatgaaagaaccaataacaaaagcagacatgctaaggaatgtcacacaaatgtcaaaaagccaattcccagtaatactatctagagcatcagaacacctagaactaatatttggactagacctaaaagaagtagaaccaaacaaacacatatatgttctagtaaacaaactagatctaggatgtgacgcaaaactaagtgatgaaacaggagtaccaaaaacaggcttacttatgacagtactagggataatattcacaaatggaaactgcgtcgcagaagaagaagtatggaaagtattcaatacaatgggcctatacgacggaatagaacacttcatgtttggagaacctagaaaactattaacaaaagacttagtaaaagaaaactacttagaataccaacaagtaccaaactcagacccaccaagataccaattcttatggggaccaagagcccatgcagaaacatcaaaaatgaaagtattagaatttctagcaaaagtaaatgacacagcaccatcagagttctcaaactggtatactgaagcactacaagatgaagaagaaagagcacgagcaagagttgcagcaaaagcaagagtaagcgcaacagcaggagcaagatcaaaagtaaaaagctcaaaatcctcacaactacaataa

SEQ ID NO: 3806 - RNA, 975 nt, synthetic construct
  misc_feature 1..975: note = CCDS43927.1 variant
  source 1..975: mol_type = other RNA
atgtcccaagaccaagaaagcccaagatgcacacacgatcaacacctacaaacattctcagaaacacaatcattagaagtagcacaagtatcaaaagcattagaaaaaacactactatcatcatcacaccccctagtccccggaaaactaaaagaagccccagcagcaaaagcagaatcacccctagaagttccacaatcattttgttcatcatcaatagcagtaacaacaacatcatcatcagaatcagacgaagcatcctcaaaccaagaagaagaagacagcccatcatcatcagaagacacaagcgatccaagaaacgtaccagcagacgcattagaccaaaaagtcgcattcttagtcaacttcatgctacacaaatgccaaatgaaaaaacctataacaaaagcagacatgttaaaaataataataaaagacgacgaatctcacttctcagaaatactcctaagagcatcagaacacttagaaatgatatttggattagacgtagtagaagtagacccaacaacacactgctacggactattcataaaactaggattaacatacgacggaatgctatcaggagaaaaaggcgtcccaaaaacaggattattaataatagtattaggagtaattttcatgaaaggaaaccgagccacagaagaagaagtatgggaagtcctaaacctaacaggagtctactcaggaaaaaaacacttcattttcggagaaccacgaatgctaataacaaaagacttcgtaaaagaaaaatacctagaataccaacaagtagcaaactctgacccagcaagatacgaattcctatggggaccacgagccaaagcagaaacatccaaaatgaaagtattagaattcgtagcaaaagtacacggatcatacccacattcattcccttcacaatatgcagaagcactcaaagaagaagaagaaagagcacgagcgcgaatataa

SEQ ID NO: 3807 - RNA, 1011 nt, synthetic construct
  misc_feature 1..1011: note = CCDS59524.1 variant
  source 1..1011: mol_type = other RNA
atgccaagaggacaagcaagcaaaagacgagccagagagaaaagaagacaagccagaggagaagatcaatgcctaggaggagcgcaagcaacagctgcagaaaaagaaaaactaccatcatcatcatcaccagcatgccaatcaccaccacaaagtttccccaatgctggaataccccaagaaagccaaagagcaagctacccaagttcaccagcatcagcagtaagtctaacatcatcagatgaaggcgcaaaaggccaaaaaggagaatcaccaaactctttccacggaccatcatcatcagaatccacaggaagagacctactaaatacaaaaactggagaattagtacaatttctattaaacaaatacataagaaaagaaccaataacaagagaagcaatgttaaaagtaataaatagaaaatacaaacaacactttccagaaatacttaggagatcaacagaaaatgtagaagttgtattcggtctatacctaaaagaaatggacccatcaagacaaagctatgtattagtaggaaaattagattttccaaatcaaggatcattatcagacggaggaggattccccttaagcggactactaatggtactgctaagcaccatattcatgcacggaaacagagcaacagaagaagaaatgtgggaatgcctaaacgctctaggaatgtataaaggaagaaaacactttatatacggagaaccacaagaattagttacaaaagacctagtcagagaaggatatctagaatatcaacaagtcccaagctccgacccacctagatacgaatttctatggggaccaagagccagagcagaaacatcaaaaatgaaagtactagaatttgtagcaaaattaaacgacacagtagcaagtacatacaaatcaagatacgaagaagcactaagagaagaagaagaacaagcaagggcaagggcagtagcaagagactcagcaagagccagagcaagcagatcattccaaccctga

SEQ ID NO: 3808 - RNA, 1044 nt, synthetic construct
  misc_feature 1..1044: note = AAC23616 variant
  source 1..1044: mol_type = other RNA
atgccaagaggtcaaaaatcaaaactaagagcaagagaaaaacgcagaaaagcaagagaagaaactcagggattaaaagtcagacacgcaacagcagcagaaaaagaagaatgtccatcaagctctccagttttaggagacacacctacatcatcaccagcagcaggcataccacaaaaaccacaaggagcaccacctacaacaacagcagcagcagccgtatcatgcacagaatcagacgaaggagcaaaatgccaaggagaagaaaacgcatccttctcacaagcaacaacatcaacagaatcatcagtgaaagaccctgtagcatgggaagcaggaatgctaatgcatttcatcctcagaaaatacaaaatgagagaacccataatgaaagcagacatgctaaaagtcgtagacgaaaaatacaaagatcacttcacagaaatattaaacggagcatcaagaagattagaattagtattcggcctagacctaaaagaagacaacccatcatctcacacatacacgttagtatcaaaactaaatctaaccaatgatggaaacttatcaaatgactgggatttcccaagaaacggactattaatgccactactaggagtaatattcctcaaaggaaactcagcaacagaagaagaaatatggaaattcatgaacgtactaggagcatacgacggagaagaacacctaatatacggagaaccaagaaaatttatcacacaggacctagtacaagaaaaatacctaaaatacgaacaagtacccaactcagacccaccaagataccaattcctatggggaccaagagcatacgcagaaacaacaaaaatgaaagtactagagttccttgcaaaaatgaacggagcaacaccaagagacttcccctcacattacgaagaagcattaagagacgaagaagaaagagcccaagtaagatcaagcgtaagagcaagaagaagaacaaccgcaaccacattcagagcaagaagcagagcaccatttagcagatcatcacacccaatgtaa

SEQ ID NO: 3809 - RNA, 960 nt, synthetic construct
  misc_feature 1..960: note = AAD10635 variant
  source 1..960: mol_type = other RNA
atgccaagaggacaaaaatcaaaattaagagcaagagaaaaaagacgaaaagcaagagatgaaacaagaggactaaacgtaccacaagtaacagaagcagaagaagaagaagcaccatgctgcagctcaagtgtaagtggaggagcagcctcaagttctccagcagccggaataccacaagaaccgcaaagagcgccaacaaccgcagcagcagcagcagcaggagtatccagcacaaaatcaaaaaaaggagcaaaatcacaccaaggagaaaaaaatgcatcaagctcacaagcaagtacaagcacaaaatcaccatcagaagacccattaacaagaaaatcaggaagcctagtacaattcctactatacaaatataaaataaaaaaatcagtaacaaaaggagaaatgttaaaaatagtaggaaaaagattccgtgaacacttcccagaaatactaaaaaaagcatcagaaggactatcagtcgtattcggactagaattaaacaaagttaacccaaacggacacacatacacattcatagataaagtagatttaacagacgaagaatcattattaagttcttgggatttcccgagaaggaaactactaatgcccttactaggagttatattcctaaacggaaattcagcaacagaagaagaaatatgggaattcctaaacatgttaggagtatatgatggggaagaacactcagtctttggcgaaccatggaaactcattacaaaagacctagtacaagaaaaatatttagaatacaaacaagtaccatccagcgacccaccaagatttcaatttctttggggaccaagagcatatgcagaaacgagcaaaatgaaagtattagaatttttagcaaaagtaaatggaacaacaccatgtgcatttccaacgcactatgaagaagcactaaaagatgaagaaaaagcaggagtatga

SEQ ID NO: 3810 - RNA, 1041 nt, synthetic construct
  misc_feature 1..1041: note = AAD10636 variant
  source 1..1041: mol_type = other RNA
atgcccagaggacaaaaaagcaccctacacgcaagagaaaaaagacaacaaaccagaggacaaacccaagaccatcaaggagcccaaataacagccaccaacaaaaaaaaagtatcattctcaagtccactaatactaggagcaacaatacaaaaaaaaagcgcaggaagatcacgaagcgcactaaaaaaaccccaaagagcactatcaacaacaacaagcgtagacgtatcatacaaaaaatcatacaaaggagcaaactcaaaaatagaaaaaaaacaatccttttcacaaggcttaagctcaacagtacaatcacgaacagatccactaataatgaaaacaaacatgctagtacaattcctaatggaaatgtacaaaatgaaaaaaccaataatgaaggccgacatgctaaaaatagtacaaaaatcacataaaaactgcttccccgaaatcctgaaaaaagcatctttcaacatggaagtagtattcggagtagacttaaaaaaagtagactcaaccaaagactcgtacgtactagtaagcaaaatggacctaccaaacaacggaacagtaacaagaggaagaggattcccaaaaacaggactactattaaacttactaggagtaatattcatgaaaggaaactgtgcaacagaagagaaaatatgggaattcctaaacaaaatgcgaatatacgacggaaaaaaacacttcatattcggagaaccaagaaaactaataacacaagacttagtaaaattaaaatacctagaatacagacaagtacccaacagtaacccagcaagatatgaattcctatggggacctagagcccatgccgaaacttcaaaaatgaaagtcctagaattctgggcaaaagtaaacaaaaccgtaccatcagcattccaattctggtatgaagaagcactaagagacgaagaagaaagagtacaagccgcagcaatgctaaatgacggatcatcagcaatgggaagaaaatgctcaaaagcaaaagcctcatccagcagccatgcataa

SEQ ID NO: 3811 - RNA, 1041 nt, synthetic construct
  misc_feature 1..1041: note = AAC23619 variant
  source 1..1041: mol_type = other RNA
atgcccagaggccaaaaatcaaaactaagagcaagagaaaaacgacaaagaacaagaggacaaacacaagacctaaaagtaggacaacccacagcagcagaaaaagaagaaagtccatcctcatcaagcagcgtactcagagacacagcatcatcatcactagctttcggaatcccacaagaaccacaaagagaaccaccaacaacaagtgcagcagcagcaatgagttgtaccggaagtgacaaaggtgatgaaagtcaagatgaagaaaatgcgagtagctcacaagcctcaacatcaactgaaagatcactaaaagacagcttaaccagaaaaacaaaaatgctagtccaattcttactatataaatacaaaatgaaagaaccaacaacaaaagcagaaatgctaaaaataataagcaagaaatacaaagaacacttcccagaaatatttagaaaagtatcacaaagaaccgaattagtattcggactagcattaaaagaagtaaaccctacaacacatagttacatattagtaagcatgctaggaccaaacgacggcaaccaatcatcagcatggacattaccaagaaacggactattaatgccactacttagcgtaatattcttaaatggtaattgcgccagagaagaagaaatatgggaatttctaaacatgctaggaatatacgacggaaaaagacacttaatattcggagaaccacgaaaactaataacccaagacctagtacaagaaaaatatctagaataccaacaagtaccaaacagcgacccaccaagataccaatttctatggggacccagagcacacgccgaaacaagtaaaatgaaagtattagaatttctagcaaaagtcaacgataccaccccaaacaatttcccattactatacgaagaagcattaagagacgaagaagaaagagcaggagcacgacccagagtagcagcaagaagaggaacaacagcgatgacaagtgcatacagcagagcaacatcaagcagttcatcacaaccaatgtaa

SEQ ID NO: 3812 - RNA, 828 nt, synthetic construct
  misc_feature 1..828: note = CCDS65233.1 variant
  source 1..828: mol_type = other RNA
atgacctcagcaggagtattcaacgcaggcagcgacgaaagagcaaactcaagagacgaagaatacccatgctcatcagaagtatcaccatcaacagaatcaagttgttcaaacttcataaacataaaagtaggattactagaacaatttctactatacaaattcaaaatgaaacaaagaattctaaaagaagacatgctaaaaatagtaaacccaagataccaaaaccaattcgcagaaatacaccgaagagcctcagaacatatagaagtagtcttcgcagtagacctaaaagaagtaaacccaacatgccacttatacgacctagtatcaaaactaaaactaccaaacaacggaagaatacacgtaggaaaagtactaccaaaaacaggattactaatgacattcctagtagtaattttcctaaaaggaaactgcgcaaacaaagaagacacctggaaattcctagacatgatgcaaatatacgacggtaaaaaatactacatatacggagaaccaagaaaactaataacacaagatttcgtaagactaacatacttagaataccaccaagtaccatgcagctatccagcacactaccaattcctatggggacccagagcatacactgaaacatccaaaatgaaagtactagaatacctagcaaaagtaaatgacatagcaccaggagcattctcatcccaatatgaagaagcactacaagacgaagaagaatcaccctctcaaagatgctcaagaaactggcactactgctcaggacaagactgcctaagagcaaaattctcatcattctcacaaccatactaa

SEQ ID NO: 3813 - RNA, 1224 nt, synthetic construct
  misc_feature 1..1224: note = AAH67286 variant
  source 1..1224: mol_type = other RNA
atgcctagaggacataaaagtaaacttaggacatgtgaaaaaagacaagaaacaaatggccaaccacaaggactaacagggccacaagcaacagcagaaaaacaagaagaatcccactcatcaagcagtagctcaagagcatgcttaggagattgcagaagatcatccgatgcatcaataccacaagaatcacaaggagtaagtccaacaggatcacctgacgcagtagttagttacagtaaatcagatgtagcagcaaatgggcaagacgaaaaatcaccatcaacatcacgagatgcatcagtaccacaagaaagtcaaggagcaagtccaacaggctccccagacgcaggagtatcaggatcaaaatacgatgtagcagcaaatggtcaagatgaaaaaagtccaagcaccagccacgacgtctcagttccacaagaatcccaaggcgcaagcccaaccggaagcccagacgcaggagtcagcggaagcaaatacgatgtagcagcagaaggagaagatgaagaatctgtatcagcaagtcaaaaagcaataatatttaaacgtctatcaaaagacgcagtaaaaaaaaaagcatgcacactagcacaatttctccaaaaaaaattcgaaaaaaaggaatcaatactaaaagcagatatgctaaaatgcgtaagacgagaatataaaccctattttccacaaatacttaatagaacaagtcaacatttagtagtagcattcggagtagaactaaaagaaatggactcaagcggagaatcatatacattagtaagcaaactaggattaccatcagaaggaattctcagcggagataacgcacttcccaaatccggactattaatgtctcttttagtagtaatattcatgaacggcaattgtgcaacagaagaagaagtatgggaatttttaggattacttggaatctatgacggaattttacatagtatatacggagatgcaagaaaaataataactgaagatctagttcaagacaaatatgtagtatacagacaagtatgcaatagtgatcccccttgctatgaatttctatggggaccacgagcatacgcagaaacaacaaaaatgagagtattaagagtgctagcagatagcagcaatacatctccaggtctatatccacacctatatgaagatgcacttatagatgaagttgaacgagcattaagattaagagcataa

SEQ ID NO: 3814 - RNA, 3429 nt, synthetic construct
  misc_feature 1..3429: note = CCDS35417.1 variant
  source 1..3429: mol_type = other RNA
atgggtgacaaagatatgcctactgccggaatgccatcacttttacaaagttcttccgaatcaccccaatcctgcccagaaggtgaagactcacaatcacctctacaaataccacagtcttccccagaaagcgatgatacattatacccattacaatccccgcaatcacgttctgaaggtgaggacagctccgatcccttacaaagaccgcccgaaggcaaagactcacaatctccattacaaatacctcaatcttcaccagaaggagatgacacacaatctcccttacaaaattcgcaatcttccccagaagggaaagattccctatcccccttagaaatcagccagtccccacccgaaggtgaagatgtacaatctccactacaaaaccctgcatcctccttcttttcttcagctttattatcaatcttccaaagctctcccgaatcaactcaatccccatttgaaggcttcccccaatccgttctccaaataccagttagcgccgcatcatcttccacacttgtctctatcttccaatcatccccagaatctacacaatccccatttgaaggattcccccaatcaccattacaaataccggtatcacgatctttttcctcaactttattatcaatctttcagtcatctcccgaacgcacacaatctaccttcgaaggattcgctcaatcacctcttcaaataccagtctcaccgagttcttcatctactcttttaagccttttccaatccttctccgaaaggactcaatcaacatttgaaggttttgctcaatcctccctgcaaatcccagtctccccttctttttcatctaccctagtcagtttgttccaatcatcacctgaacgcacgcaatccaccttcgaaggcttcccgcaaagcccattacaaatcccagtctcatcctcttcgtcttcaacccttctctcgctatttcaatcttctccagaacgcacacactccacattcgaaggttttcctcaatcccttctacaaatacccatgacttcttccttttcatccactttactttcaatatttcaatcatcaccagaaagcgcacaatcaacattcgaaggctttccccaatcacccctccaaataccaggatcacccagcttttcatctacactcctttcattattccaatcatcaccggaacgaactcactcaacattcgaaggatttccacaatctccacttcaaatacccatgacctccagcttctcttcaaccttgctctccatcttacaatcatcacctgaaagcgcccaatccgcattcgaaggatttccacaatcccctctacagatacctgtatcctcatccttttcatatacgcttttaagcctgttccaatcttcgcccgagagaacccattcaacttttgaagggttcccacaatcaccactccaaatacccgtttcctcctcatcatcctcctcaacactacttagtctcttccaatcaagccctgaatgtactcaatccacttttgaaggattcccacaatctccattacaaataccccaatcacctccagaaggtgaaaacactcactcacctttacagatcgtaccttcactgccagaatgggaggatagcctatcacctcactactttccacaatcaccaccacagggagaagacagtttatcaccacattactttccgcaatctccaccccaaggagaggattccctatcaccccattatttcccccaatcccctcaaggagaagattctctaagtccacattattttccacaatcacctccacaaggcgaagattctatgtctccactgtatttccctcaatcaccactacaaggtgaagagttccaatcatcccttcaatcaccagttagcatctgctcatcttccacaccaagctctctaccacaatcattccccgaaagctcacaatcccctcccgaaggacctgtccaatcaccattacactcaccccaatcacccccagaaggaatgcactctcaatcacctttacaatccccagaatcagcacctgagggcgaagactcactatctcctctacaaattcctcaaagccctttagagggagaagactcgttatcgtcattacacttccctcaatctcctcctgaatgggaagactctctatccccactacactttccccaattcccacctcagggtgaagatttccaatcctctctacaatcgccagtatcaatctgttcatcaagcacttcactatctttacctcaatcattccccgagtctcctcaatcgccacctgaaggtcccgcccaatctccactacaacgaccagtatccagcttcttctcatataccctagcttcactattacaatcgtcccacgaatcaccacaatctccacctgaagggcccgctcaatctccactacaatcacccgtttcatcctttccctcttcaacctcatcctccctaagtcaatcctcaccagtttcatctttcccatcttctacctcaagttcactatcaaaatcctctccagaatctccattacaatctcccgtcatatctttttcatcctcgacatccttatctccattctccgaagaatcctcatcacccgtcgacgagtatacatcatcttccgacacacttctagaatccgattccctcactgattcagaatccttaatcgaatcagaaccactctttacatacaccttagacgaaaaagtagacgaattagccagattccttttattaaaatatcaagtaaagcagccaataactaaagcagaaatgctcactaatgtaatctcacgctatactggctacttcccagtcatcttcagaaaagctagagagttcatagaaatcctcttcggtatttctttacgcgaagttgaccccgacgattcttatgtctttgttaataccctagacctcacatcggaaggatgtctatccgacgaacaagggatgtcacaaaatcgactccttattctaatcctatcgataatctttatcaaaggcacatatgcctcagaagaagtaatatgggatgtattatcagggattggagttcgagcaggtagagaacactttgccttcggagaaccacgagaattgttaacaaaagtctgggtgcaagaacactaccttgaataccgcgaggtccctaactcttcccctcccagatacgaatttctctggggtccccgagctcatagtgaagttataaagagaaaagttgtcgagttccttgccatgctcaaaaacactgtccccatcacattcccttcctcctacaaagacgcattaaaagatgtggaagaaagagcccaagccatcatcgacactactgatgactccaccgcaaccgaatcagcttccagctctgtaatgtccccttctttctcgtccgaatag

SEQ ID NO: 3815 - RNA, 1122 nt, synthetic construct
  misc_feature 1..1122: note = AAF07210 variant
  source 1..1122: mol_type = other RNA
atgccaccagtaccaggagtaccatttagaaatgtagacaacgactcaccaacctcagtagaactagaagactgggtagacgcacaacatcccacagatgaagaagaagaagaagcctcatcagcatcttcaactttatatctagtattctcaccatcttcattctcaacatcatcctcattaatattaggaggaccagaagaagaagaagtaccatcaggagtaataccaaaccttacagaatcaataccatcctcaccaccacaaggtccaccacaaggaccatcacaatcacctctatcaagctgctgctcatcattttcatggtcttcattcagcgaagaatcaagttcacaaaaaggagaagatacaggcacctgtcaaggactacccgattcagaatcatcattcacctatacactagacgaaaaagttgcagaattggtcgagttcctactactcaaatacgaagcagaagaaccagtcacagaagcagaaatgttaatgatagtaatcaaatataaagattacttcccagtaattctaaaacgagcaagagaattcatggaattattatttggattagcattaattgaagtaggcccagatcacttttgcgtatttgcaaacacagtaggtttaacagatgaaggatctgatgatgaaggtatgcccgaaaactcattactaataataattttatcagttatattcataaaaggaaactgtgcctcagaagaagtcatctgggaagtacttaatgcagtaggagtatatgcaggaagagaacactttgtatacggagaaccaagagaactattaacaaaagtatgggtacaaggacattacctagaataccgagaagtcccacactcctcaccaccttactacgaattcctatggggcccaagagcacactcagaatcaataaaaaaaaaagtattagaatttctagcaaaactaaacaacacagtaccaagttcattcccaagctggtataaagacgcactaaaagacgtagaagaacgagttcaagcaacaatagacactgcagacgatgccacagtaatggcatcagaatcattatcagtaatgtcatcaaacgtatcattctcagaataa

SEQ ID NO: 3816 - RNA, 1932 nt, synthetic construct
  misc_feature 1..1932: note = AAM08355 variant
  source 1..1932: mol_type = other RNA
atgctcctaccctgccattgggtcctagatgcaacattttcagatggatcattaggtcaatgggtaaaaaatacatgtgcaacttatgcattatcaccagtcgttcttccaccacaaccacaacctcgaaaaaaagccacagataaagattactcagcatttcatctcggccacctaagagaagttcgactatttttaagaggtggaacctcagaccaacgaatggactcactcgtattatgcccaacatattttaaactgtggagaacactaagtggatcaccaggacttcaactaagtgatctacactttggttcccaaccagaaggaaaattttcattacgacgcgcagtatctgtgaaacaaagagaagaacctcaagactggcctttaaacgaaaaaagaacactatggaaagactcagatttacccacttggagaagaggaaccggatataccttaagtttacctgccgtatctcctggcaaaagactatggggagaaaaagctggatctctaccagaaagtgaaccactattcacatatacattagatgaaaaagttgataaattagtacaattcttattgctaaaatatcaagcaaaagaacctctaacaagagcagagatgcaaatgaacgtaattaatacatatacaggatactttccaatgatatttagaaaagcaagagaatttatagaaatattatttggaatttcattaacagaagtagacccagatcatttctacgtctttgtaaacacactagacctaacatgtgaaggatcattgtcagacgaacaaggaatgccacaaaatcgattattaatactaatattatcagtaatatttataaaaggaaattgcgcctcagaagaagtaatatgggaagtcctaaacgccataggaccatggtctgcactagctggattcgccgatgttctttctagattagcattatgggaatcagaaggaccagaagccttctgtgaagaaagcggtttaagatccgccgaaggttcagtattagatctagcaaatccacaaggattagctggtcatagacaagaagacggaagaagaggactaacagaagcaagcccacaacaaaaaaaaggtggagaggatgaagacatgccagccgccggaatgcccccacttccacaaagtccacctgaaataccgccgcaaggacccccaaaaatttcaccccaaggtccacctcaatctccaccacaatcaccactagattcttgctcatcaccccttttatggactagactagatgaagaatcatcaagcgaagaggaggacacggcgacctggcacgcattgccagaatctgaatctctaccaaggtatgcactcgacgaaaaagtagctgaactcgtacaattcctattactaaaataccaaacaaaagaaccagtaaccaaagcagaaatgctcactacagtaattaaaaaatataaagattactttccaatgatattcggaaaagctcatgaattcatagaattaatattcggtattgctctcacagacatggatcccgacaatcactcttattttttcgaagatactttagatctcacatacgaaggatctctaatagatgaccaaggaatgccaaaaaactgtctcctaattctcatattaagtatgatatttataaaaggttcctgcgtaccagaagaagtcatctgggaagtactatcagccataggacctattcaacgtccagcacgagaagttctagaatttttatcaaaactcagttcaataataccttctgcttttccatcatggtatatggatgcccttaaagatatggaagatagagctcaagcaataattgacacaactgatgatgccacagcaatggcatcagcatcaccttcagtaatgagcaccaatttctgtcctgaataa

SEQ ID NO: 3817 - RNA, 2337 nt, synthetic construct
  misc_feature 1..2337: note = AAG23757 variant
  source 1..2337: mol_type = other RNA
atggcacaaaaaatggattgtggcgctggacttttgggattccaagcagaagcatcagtagaagattcagcattactaatgcaaaccttaatggaagcaatacaaataagtgaggcaccaccgacaaatcaagcaaccgcagccgcaagtcctcaatcaagtcaacctccaacagccaatgaaatggcagatattcaagtttctgcagcagcagcaagacctaaatcagcgttcaaagtccaaaacgcaaccacaaaaggaccaaatggcgtatacgacttttcgcaagcgcataacgccaaagatgtacccaatacccaacctaaagcagcatttaaatcacaaaatgccacgccaaaagggccaaacgccgcatatgacttttcacaagcagctacaacaggtgaactcgcagcaaataaatcagaaatggccttcaaagctcaaaatgcaacaacaaaagtaggcccaaacgcaacctacaacttttcacaatcacttaacgctaatgatctagcaaacagccgacctaaaacaccatttaaagcgtggaatgatacaacaaaagcaccaactgcagatacacaaactcaaaatgtaaatcaagcaaaaatggcaacaagtcaagcagacatagaaacagatccagggatttccgaaccagacggggcaacagcacaaacatctgctgatggatctcaagcacaaaacctagaatcacgaacaattataagaggaaaacgtacacgaaaaattaataatcttaatgtagaagaaaattcttcaggtgaccaaagacgagcaccactagccgcaggaacatggcgatctgcacccgttccagtaacaacacaaaacccccctggagctcctccaaatgtactatggcaaactccactagcctggcaaaacccctccggctggcaaaatcaaacagcacgacaaactcctccagcaagacaaagcccccctgcacgacaaactcctccagcatggcaaaatcctgttgcctggcaaaatcctgtgatatggcccaacccagtaatatggcaaaatccagttatatggccaaacccgattgtctggccaggcccagtagtatggccaaatccattggcatggcaaaatccaccaggatggcaaacaccaccaggatggcaaacaccacccggctggcaaggtcctcccgattggcaaggccctcctgattggccattaccaccagattggcccttaccacctgattggccattacctacagattggccacttccaccagattggatccccgctgattggccaatccctccagattggcaaaatttacgtccctcccctaatcttcgaccttcaccaaactcaagagcatcacaaaatcccggtgctgcacaacccagagacgttgcattactacaagagcgagctaataaactcgtaaaatatctaatgctaaaagattacaccaaagttccaataaaacgatcagaaatgcttagagatataataagagaatatacagatgtatatccagaaataatagaaagagcctgctttgtactcgaaaaaaaattcggaatacaattaaaagaaatagataaagaagaacatctttatatattaataagtactcccgaaagcttagcaggtatattaggcactacaaaagatacacctaaactaggacttttacttgttatactaggtgtaatattcatgaacggaaatcgcgccagcgaagcagtactatgggaggcattaaggaaaatgggtttaagaccaggagttagacatccactactgggtgatttacgaaaattattaacttatgaatttgtaaaacaaaaatatcttgattacagaagagtaccaaattcaaaccctcctgaatatgaatttctgtggggattaagatcatatcatgaaacgtctaaaatgaaagtactcagattcatagcagaagtacaaaaaagagaccctagagactggacagcacaattcatggaagcagctgatgaagcattagatgcactagacgcagccgcagcggaagcagaagcaagagcagaagcacgtacacgaatgggaataggtgatgaagcggtatcaggtccttggtcctgggatgatatagaatttgaattacttacttgggatgaagaaggagatttcggcgacccatggtcacgtataccattcaccttttgggcaagatatcatcaaaatgcacgctcacggtttcctcaaacattcgctggtccaataataggccctggtggaacagcctcagcaaactttgcagcaaatttcggggcaattggttttttttgggttgaataa

SEQ ID NO: 3818 - RNA, 1821 nt, synthetic construct
  misc_feature 1..1821: note = AAD28598 variant
  source 1..1821: mol_type = other RNA
atgtcagatacttcagagtcgggagctggattaacaagattccaagcagaagctagtgaaaaagattcatcaagtatgatgcaaactttactaacagtaacacaaaatgtagaagttccagaaacacctaaagcatcaaaagctctagaagtaagtgaagatgtcaaagtaagtaaagcaagcggagtcagtaaggcaactgaagtatcaaaaactccagaagcacgcgaagcacctgcaacgcaagccagctctactacacaactaactgacacacaagtattagccgctgaaaataagagtttagcagcagatacgaaaaaacaaaacgccgatccacaagctgtaacaatgccagcaacagaaacaaaaaaagtttcacatgttgcagatactaaagtaaatacaaaagcacaagaaacagaagcagcaccatctcaagcgccagccgatgaacctgaaccagaaagtgccgcagcacaatcccaagaaaatcaagacacaagaccaaaagtaaaagccaaaaaagccagaaaagtcaaacaccttgacggcgaagaagacggaagcagcgaccagtcacaagcaagtggcacaacaggaggaagaagagtatctaaagcactcatggcttcaatggcacgacgagctagcagaggaccaattgctttctgggcacgacgagcaagtcgaacaagattagcagcatgggcacgacgagccctcttaagtttaagatcacctaaagcgagaagaggaaaagctagaagaagggcagcaaaactacaatcaagccaggaaccagaagcacctccaccaagagatgtagcactgttacaaggaagagcaaatgacttagtaaaatacttactagcgaaagaccaaaccaaaataccaattaaaagatcagacatgttaaaagatataataaaggaatatactgacgtatatcctgaaataatagaaagagctggctacagcctagaaaaagtatttggaatacaactaaaagaaattgataaaaatgatcatttatatatactgttaagcacactagaaccaacagacgctggaatattaggcacaactaaagactccccaaaactaggactattaatggtactactttcaataatctttatgaatggcaacagatcatccgaagccgtaatatgggaagtactaagaaaattaggtctaagacctggaatacatcatagtctatttggagacgtaaaaaaactaataactgatgaatttgtaaaacaaaaatacttagattatgccagagtcccaaacagcaatccaccagaatatgaattcttttggggattacgatcatattacgaaacgagcaaaatgaaagtactaaaatttgcctgtaaagttcaaaaaaaagatccaaaagaatgggctgcacaatatagagaagcaatggaagcagacctaaaagcagcagccgaggcagctgcagaagcaaaagcaagagcagaaataagagcaagaatgggtattggcttaggttcagaaaatgcagcaggaccatgtaactgggatgaagctgatataggaccatgggcaaaagcgagaatacaagcaggagcagaagcaaaagcaaaagctcaagaaagcggctcagcatcaacaggtgcatcaaccagcactaataattcagcaagtgctagtgcatcaacaagcggtggtttttcagctggggcaagcttaacagctaccttaactttcggactgttcgcaggattaggaggtgccggagcaagtacaagtggatcaagtggtgcatgtggattttcatataaataa

SEQ ID NO: 3819 - RNA, 2226 nt, synthetic construct
  misc_feature 1..2226: note = AAH63838 variant
  source 1..2226: mol_type = other RNA
atggcagaaggtagtttttctgtacaatctgaaagctatagtgtagaagatatggatgagggatcagatgaagtaggagaagaagaaatggtagaagggaatgattatgaagaatttggagcatttggaggatacggaaccttaacaagctttgatattcatatattaagggcatttggaagcttaggccctggactaagaattttatcaaacgaaccatgggaattagaaaatccagtcctagcccaaacattagttgaagcgttacaattggaccctgaaacattagctaatgaaacagcagccagagcggctaatgtagcaagagccgcagcatcaaatagggcagcaagggcggctgctgcagccgccagaacagcatttagtcaagtggtagccagccatcgagtagcaaccccccaagtaagcggtgaagatacacagcccaccacttatgctgctgaagcacaaggtccaacaccagaaccacctttagcctctccgcaaacaagccaaatgttagtaacgtcaaaaatggcagcacccgaagcaccagctaccagtgcacaaagccaaacagggagtccagctcaagaagcagcaacagaaggaccatcatccgcatgcgcattcagccaagcaccatgtgcgagagaggtagacgctaatagacctagtactgcatttttaggacaaaatgatgtattcgattttactcaacccgctggcgtaagtggaatggcgtttccaagaccaaaacgaccggcacctgcacaagaagccgcaacagaaggaccaagcgctgcaagcggagtcccacaaacaggcccaggaagagaagtagctgcaaccagaccaaaaacaacaaaatcaggaaaagcattagcaaaaactagatgggttgaaccacaaaatgttgtagcggcagcagcagcaaaagcaaaaatggctacatcaattcctgaaccagaaggtgcagcagcagcaactgcacaacactctgcagaaccctgggcaagaatgggcggaaaaaggaccaaaaaatcaaaacatctagatgatgaatacgaatctagcgaagaagagcgagaaacacctgctgtcccaccaacttggagagcatcccagccctcattaactgtaagagcacaattagcgcctagaccaccaatggcacccagaagccaaataccatcacgacacgtactttgtttgcctcctcgaaacgttactttattacaagaaagagcaaataagttagttaaatacttaatgattaaagattacaaaaaaataccaattaaaagagcagatatgttaaaagatgtaatacgagaatatgatgaacattttcctgaaattatagaaagagcgacatacacactcgaaaaaaaattcggaattcacttaaaagaaatagacaaagaggaacacttatatatattagtatgcacacgcgatagctctgctaggctactcggaaaaaccaaagatacccctagactaagcctacttctagttattttaggagtaatatttatgaatggaaatagggcaagtgaagcagtattatgggaagctctcagaaaaatgggtcttcgaccaggtgtacgacatccttttttaggagatctaagaaaactaatcacagacgattttgtaaaacaaaaatatcttgaatataaaaaaattcccaactcaaatccaccagagtatgaatttctctggggattaagagcaagacatgaaacttcaaaaatgagggtactacgattcattgcgcaaaatcaaaatagagatccaagagaatggaaagctcattttttagaagctgttgatgacgcattcaaaacaatggatgtcgacatggctgaagaacacgctcgagcacaaatgagagctcaaatgaacataggtgatgaagctctcattggaagatggtcatgggacgacattcaagttgaattattaacatgggatgaagacggagattttggagacgcatgggctagaataccatttgctttttgggcaagatatcatcagtacattttgaatagcaatagagcaaatagaagggcaacttggagagctggagtaagtagcggtactaatggaggagcatctacttcagtattggacggtccgtcaacaagcagcacgataagaacaagaaatgcagcaagagcaggagcttcatttttctcttggatacaacacagataa

SEQ ID NO: 3820 - RNA, 1122 nt, synthetic construct
  misc_feature 1..1122: note = CAG33449 variant
  source 1..1122: mol_type = other RNA
atgccaccagtaccaggagttccctttagaaatgtagataacgattcaccaacatcagtcgaactagaagactgggtagatgcacaacacccaactgatgaagaagaagaagaagcatcaagtgcatcatcaacattatatctagtgtttagtccatcttcattctcaactagctcatcactaatactaggaggtccagaagaagaagaagtaccatcaggagtcataccaaacttaacagaatcaataccaagcagcccaccacaaggcccaccacaaggaccaagccaaagtccactaagctcatgttgtagtagttttagttggtcatcattcagtgaagaatcatcaagccaaaaaggagaagacacaggaacatgtcaaggactaccagattctgaatcatcatttacatatacactagacgaaaaagtagcagaattagtagaattcctattactaaaatacgaagcagaagaaccagtaacagaagccgaaatgttaatgatcgtaataaaatacaaagactactttcctgtaatactaaaaagggcaagagaattcatggaattattattcggacttgcactaatagaagtaggtccagaccacttttgtgtatttgccaacactgtaggactaacagatgaaggaagcgacgatgaaggaatgcctgaaaattcattattgataataatattaagtgtaatattcattaaaggaaattgtgcatcagaagaagtaatttgggaagtattaaacgcagtaggagtatatgcaggaagagaacactttgtatatggagaaccacgagaattattaacaaaagtatgggtacaaggacattacctagaatatagagaagtaccacattcatcacccccatactatgaatttctttggggacctagagctcattctgaaagtataaaaaaaaaagtattagaattcctagcaaaactaaacaacacagtaccatcatcatttccatcatggtacaaagacgcattaaaagatgtagaagaacgagtacaagcaacaatagacacagctgacgatgcaacagtaatggcaagcgaatcactatcagtaatgtctagcaatgtatcattttcagactaa

SEQ ID NO: 3821 - RNA, 2874 nt, synthetic construct
  misc_feature 1..2874: note = AAM08354 variant
  source 1..2874: mol_type = other RNA
atgtccttagtctctcaaaattcgcgtagaagaagacgtagggtagcaaaagcaacagcacacaatagttcatggggagaaatgcaagcgccaaatgcccccggactaccagcagacgtacctggcagtgatgtaccacaaggcccatcagactcacaaatattacaaggactatgtgcgagcgaaggcccatctactagcgttctaccaacatcggccgagggaccaagtactttcgtacctcctacaatatcagaagcatcttcggcatctggacaacccactataagtgaaggccctggcacttccgtacttccaactccaagcgagggattatctacaagcggaccaccaacaataagcaaaggattatgtacttcagtaactttagcagcaagcgaagggagaaacacatcaagaccgccaacaagctcagaagaaccttccacttctgtcccacctactgcatcagaagtaccctcaacatctttacccccgactccaggagaaggaacaagtacaagtgtgccacctacagcttatgaaggacccagtacatcagtagtaccgacacccgatgaaggaccatccacaagtgtactacccacaccaggagaaggaccaggaacaagtgtaccattagcagcaaccgagggcttatctacaagtgttcaggcaacgccagacgaaggcccaagtacaagcgtaccacctactgcgactgagggtttatctactccagtacccccaacaagagatgaaggcccttcaacttcagttccagcaacaccgggagaaggaccaagtacatcagtacttccagcagcaagcgatggtcagtcaataagtttagtccctacaaggggcaaaggatcatcaacttccgtaccacctacagctactgaaggattgtcgacatcagtacaacctacagctggtgaaggatcatcaacttctgttccacccacaccaggaggaggtctgagcacatccgtgcctcctactgctaccgaagaactaagcacaagcgtacctcccacaccaggtgaaggtccaagtactagcgtattacccatcccaggtgaaggattatcgacatctgtgccaccaacagcttccgatggatcagacacgtctgttccaccaacaccaggcgaaggcgcaagtacattagtacaaccaacggctcctgatggtccaggatccagtgtcctcccaaacccaggcgaaggcccgagcaccctcttttctagtagcgcatcagtagatcgcaaccccagtaaatgcagtctagtgttgccaagcccacgagtgacaaaggcttccgtcgactctgatagcgaaggcccaaaaggcgcagaaggaccaatcgaatttgaagtcttgagagattgtgaatctccaaattcaatatctatcatgggtttaaacaccagtcgtgtcgcaatcacattaaaaccacaagatccaatggaacaaaacgtcgcagaattattacagtttttactggtaaaagaccaaagtaaatatcctataagagaaagcgaaatgagggaatacattgtaaaagaatacagaaatcaattcccagaaatactccggcgagctgctgcccacttagaatgtatctttcgctttgaattacgcgaactcgaccccgaagctcatacttacatactacttaataaattgggaccagtcccatttgaaggattagaagaatcacctaatggtcccaaaatgggactattaatgatgattttaggacaaatatttctaaatggtaatcaagcaaaagaagccgagatatgggaaatgctctggcggatgggagtacaaagagaaagaagattgagtatatttggaaaccccaaaagattattgtcagtagaatttgtatggcaaagatatctagattatcgaccagtaacagattgtaaaccggtagaatatgaatttttctggggacctagatctcatctcgaaactacaaaaatgaaaatcctaaaatttatggctaaaatatataacaaagaccctatggattggccagaaaaatacaacgaagcgttggaagaagacgctgccagagcattcgctgagggatggcaagcactacctcatttcaggcgcccattctttgaagaagcagcggctgaagtaccatcaccagattcagaagttagctcatattcatcaaaatatgcaccacacagttggcccgaatcgagattagaaagcaaagcaagaaagttggttcaactatttctattaatggattcaacaaaactacccattcccaagaaaggaatattatattacataggaagggaatgttcaaaagtctttccagacttattaaacagagctgctagaactttaaatcacgtatacggaacagaacttgtagtgttagatccaagaaaccacagttacaccctatataatcgaagagaaatggaagaaactgaggaaatagtcgattctccaaacagacccggtaataatttcttaatgcaagtactgtcatttatttttataatgggtaatcatgctagggaatcagctgtatgggcattcttaagaggattaggagtacaagcaggccgaaaacatgtaattacatgcaggtatctatcacaaaggtacattgattctctaagagttcctgatagcgacccagttcaatacgagttcgtttggggacctcgagccaggttagagacatcgaaaatgaaagcgttacgatacgtagcaagaatacaccgtaaagaaccccaagattggccacaacaatacagagaagcgatggaagacgaagcaaaccgagcagatgtgggacatagacaaatctttgtccacaactttagataa

SEQ ID NO: 3822 - RNA, 1572 nt, synthetic construct
  misc_feature 1..1572: note = AAH93964 variant
  source 1..1572: mol_type = other RNA
atgagtctagttagccaaaatgcgagacattgctcagcagaaataacagcagattacggcgacggacgaggagagatacaagcaacaaacgcatcaggaagtccaacatcaatgttagtagttgatgcaccacaatgcccacaagcacctataaatagtcaatgtgttaatacttcacaagcagtgcaagacccaaatgacctagaagtactaatagatgaacaatccagaagattaggagcacttagagttcacgaccccttagaagatagatcaatcgcattagtaaactttatgaggatgaaatcccaaacagaaggatcaatacaacaatctgaaatgttagaatttttaagagaatattcagaccaattcccagaaatattacgacgtgcatcagcacacttagatcaagtattcggactaaatctgagagtaatcgatccacaggcagatacatataatttagtatcaaaacgagggtttcaaattaccgatcgaatagccgaaagcctagacatgccaaaagcatccctcttagccctagtactcggacatatattactaaatggaaatagagcaagagaagcatcaatatgggacttactattaaaagtcgacatgtgggataaaccgcaaagaataaataatttattcggtaacacaagaaatttattaaccacagactttgtatgtatgagatttttagaatattggccagtatatggaacaaatcctctagagttcgagttcttatggggaagtagagcacatagagaaataacaaaaatggaagccctaaaattcgtatcagacgcccatgacgaagaaccatggtcttggccagaagaatataataaagctctagaaggcgacaaaactaaagaaagatcactgacagcaggactagaattttggagcgaagacacaatgaatgacaaagcaaatgacctagtacaattagcaatcagcgtgacagaagaaatgttacccatacaccaagacgaactattagcacatacaggaaaagaatttgaagacgtatttccaaacatactaaatagagcaacactaatactagacatgttctacggattaagtttgatagaagtagacacatcagaacatatatacttattagtccaacaaccagaatcagaagaagaacaggtaatgctcgaaagcctaggaagaccgacacaagaatacgtaatgccaattctaggactaatattcttaatgggaaacagagtaaaagaggcaaacgtatggaatctattaagacgatttagtgtagacgtaggaagaaaacatagtatcaccagaaaattaatgcgtcaaagatacttagaatgtagacctttaagctactctaatcctgtcgaatacgaactcttatggggtcctagagcacatcacgaaaccataaaaatgaaagtactagagtatatggcaagactatatcgaaaaagaccacaaaactggcctgaacaatacagagaagcagtagaagacgaagaagcaagagcaaaatcagaagcaacaataatgtttttcttagatccaacctag

SEQ ID NO: 3823 - RNA, 924 nt, synthetic construct
  misc_feature 1..924: note = CCDS3269.1 variant
  source 1..924: mol_type = other RNA
atgttacaaacaccagaatcaagaggtctacctgtaccacaagccgaaggagaaaaagatggaggacacgatggagaaacaagagcaccgacagcaagtcaagaaagacctaaagaagaactaggagcaggaagagaagaaggggcagcagaacctgcattaactagaaaaggagcaagggctttagctgcaaaggcattagcaagaagaagggcatatagaagattaaatagaacagtagcagaactagtacaatttttattagtcaaagataaaaaaaaatctccaataactagaagtgaaatggtaaaatatgtaataggagatctaaaaatattgttccctgacataatagcaagagcagcagaacatttaaggtatgtatttggattcgaattaaaacaatttgatagaaaacatcatacatatatactaataaataaattaaaaccattagaagaggaagaagaagaagacctaggcggggatggaccaagattaggattattaatgatgatattaggactaatatatatgagaggaaatagtgcaagagaagcacaagtatgggaaatgctaagaagactaggagtacaacccagtaaatatcattttttattcggatatccaaaaagattaattatggaagattttgtacaacaaagatatctaagttatagaagagtaccacacacaaatccaccagaatacgaattttcatggggaccaaggtcaaatctagaaataagtaaaatggaagtattaggatttgtagcaaaattacataaaaaagaaccgcaacactggccagtacaatatagagaagcattagcagatgaagcagatagagcgcgagcaaaagcaagagcagaagcaagtatgcgagcaagagcatctgcacgtgcgggaatacatttatggtaa

SEQ ID NO: 3824 - RNA, 660 nt, synthetic construct
  misc_feature 1..660: note = AAD31314 variant
  source 1..660: mol_type = other RNA
atgccaagaggaagaaaatcaagaagaagaaggaatgcaagagcagcagaagaaaatagaaataacagaaaaatacaagcaagcgaagcatcagaaacgccaatggcagcaagcgtagtagcaagcacaccagaagacgatttatcaggaccagaagaagacccaagcacaccagaagaagcaagtacaacaccagaagaagcatcaagtacagcacaagcacaaaaaccaagcgtaccaagaagcaatttccaaggaacaaaaaaaagcctactaatgagcatactagcactaatattcataatgggaaacagtgccaaagaagcattagtgtggaaagtattaggaaaattaggaatgcaaccaggaagacaacattcaatattcggagatcccaaaaaaatagtaacagaagaattcgtaagaagaggatatctaatatacaaaccagtaccaagaagcagtccagtagaatatgaatttttttggggaccaagagcacacgtagaaagtagtaaattaaaagtaatgcactttgtagcacgagtgagaaatagatgtagtaaagactggccatgtaactatgactgggattcagacgatgacgcagaagtagaagcaattttaaatagtggagcaagaggatactcagcaccataa

SEQ ID NO: 3825 - RNA, 3750 nt, synthetic construct
  misc_feature 1..3750: note = CCDS73700.1 variant
  source 1..3750: mol_type = other RNA
atgagccaattaagcaaaaatttaggtgattcatcacctcctgcagaagcccccaaaccacccgtgtactctcgacctacagttcttatgagagcacccccagcctcttcaagagccccacccgttccttgggacccacccccgattgacttacaagctagcttagcagcttggcaagctccacaacctgcttgggaagctccccaaggacaactacctgccccggtagtaccaatgactcaaccaccagctctcggaggtccgattgtacccgctccacccctaggtggacccatgggaaaaccacctacacccggtgttttaatggttcatccaccacctcccggcgccccaatggcacaacctcccactcccggcgtactaatggttcatccatcagcccctggcgcacccatggcacatcctcctcctcccggtacaccaatgtcacacccgccccctccgggaactcctatggcacatcctccccctccaggaacaccaatggcgcatccacctcctccggggacgcctatggtgcatccaccccctcctggaactcctatggcacaccctccaccacccggcacaccaatggcacatcccccacctccaggtacaccaatggctcatccacctccaccaggaacgcccatggcacatcccccacccccaggaaccccaatggctcaacctcccgcccccggagtactcatggcgcaaccactgacacctggagtcttaatggtacaaccagcagctcctggggcacccatggtacaaccaccccctgcagcaatgatgacacaaccacaaccttcgggcgcgccaatggcaaaaccaccaggtcccggagttcttatgatccacccgcctggagcaagagcacccatgacacaaccgcccgcatcgggcgcccccatggctcaaccagccgcgccaccagcccaaccaatggcaccacccgcacaacccatggcctcatgggccccacaggcacaacctctaattttacaaattcaatcacaagtcataagagctcctcctcaagtaccgcaagggcctcaagctcctccggcccagctagcaacccctcccggatggcaagcaacttccccagggtggcaagcaactcaacaaggttggcaagcaacaccactgacatggcaaacaacacaagtaacttggcaagcacccgctgtaacatggcaagtccctccaccaatgaggcaaggaccaccacctataagacctggtccacctcccattagacccgggcccccaccagtcagacaagctcctcctcttatcagacaagctcctcccgtaataagacaagcgccccctgttataagacaagcaccacctgttatccgccaagctccagccgtaattagacaagcacctcctgtcattcgtcaagcaccacccgttatacgacaagcaccacccgtaatacgacaggctccaccactaataagacaagctccccctcctattcgccccgctccacaagtattagctacacaaccaccattatggcaggctttaccacctccaccaccactacgtcaagcaccacaagctaggttaccagccccacaagtccaagcagcaccacaagttccaactgctcccccagcgacacaagtaccggcagcaccccctgcaggaccacaagtcccccaacctgtattacccgccccgctgtctgctcctctatcagctccccaggctgttcattgtccatctataatctggcaagcacccaaaggccaaccaccagtcccacacgaaatacctacttcaatggagttccaagaagtccaacaaacacaagcactagcatggcaagcacaaaaagctcctacacatatttggcaaccgctacctgcacaagaagcacaacgacaagcaccaccattagtacaactcgaacaacccttccaaggagcccctccatcacaaaaagccgtacaaattcaactcccaccacaacaagcacaagcatccggcccacaggcagaagtacccacactacccctccaaccttcatggcaagcacctccagccgttctccaagcacaaccaggaccaccagtagctgcagctaattttcccttaggatccgctaaaagtttaatgacaccgtctggtgaatgcagagcctcttccatagatcgccgcgggtctagcaaagaacgaagaacatcctctaaagaaagacgagcccctagtaaagatcgaatgatattcgcggcaaccttctgcgcacctaaagcagtaagcgccgcaagagcacatttacctgccgcatggaaaaatttacctgcaaccccggaaacatttgcaccgtcatcctccgtatttccagcaacatcccaattccaaccagcttctcttaatgcatttaaaggaccctccgccgcctcggaaacccctaaatctcttccttacgcacttcaagacccatttgcatgtgtagaagcattaccagcagtaccctgggtaccccaacctaacatgaacgcatctaaagcctcacaagcagtaccaacttttctaatggcaacagcagctgctccacaagctacagctaccacacaagaggcctcaaaaacatcggtcgaaccacccaggagatcaggaaaagcaactcgtaaaaagaaacatctagaagcacaagaagattctagaggacataccctagcattccacgattggcaaggacccagaccatgggaaaatttaaacctctcagactgggaagtacaaagtccaatccaagtaagtggcgattgggaacatccaaacacaccaagaggattgtcaggctgggaaggtccatcaacatccagaatactatctggctgggaaggacccagtgcatcatgggctttaagcgcatgggaaggaccttcgacatcacgagctctaggcttatcagaatcacctggatcatccctaccagtggtagtttcagaggtagcctccgtttctccaggttcctcagcaacacaagataattccaaagtagaagcacaacctttatcacctttggacgaaagggcgaatgcattagttcaattcctccttgtcaaagatcaagctaaagtaccagtacaacgttcggaaatggtaaaagttattctaagagaatataaagatgagtgcttagatattattaacagagcaaataataaactcgaatgtgcatttggctaccagctaaaagaaattgacactaaaaaccatgcgtatattattataaacaaattaggttaccatacaggaaatttggtagcttcttaccttgacagacctaaattcggtttactaatggtagtattatccctcatcttcatgaaaggaaattgcgtacgcgaagacctcatttttaactttctattcaaattgggtttggacgtacgcgaaacaaacggtctttttggtaacactaagaaactgataacagaagtttttgtaagacaaaaatatttagaatataggcggattccttatacagaaccagcagaatacgaatttctttggggacccagagcatttttagaaacatccaaaatgctcgtcttaaggtttctagccaaactacataagaaagacccacaatcatggcctttccactacctagaagcactcgcggaatgtgaatgggaagacaccgatgaagacgaaccagacacaggcgacagcgcacacggtcctacctctcgacctccccctcgttaa

SEQ ID NO: 3826 - RNA, 282 nt, synthetic construct
  misc_feature 1..282: note = AAC39608 variant
  source 1..282: mol_type = other RNA
atgaaactactaatggtactaatgctagcagcactatcacaacactgctacgcaggatcaggatgcccactactagaaaacgtaatatcaaaaacaataaacccacaagtatcaaaaacagaatacaaagaactactacaagaattcatagacgacaacgcaacaacaaacgcaatagacgaactaaaagaatgcttcctaaaccaaacagacgaaacactatcaaacgtagaagtattcatgcaactaatatacgactcatcactatgcgacctattctaa

SEQ ID NO: 3827 - RNA, 363 nt, synthetic construct
  misc_feature 1..363: note = AAH67220 variant
  source 1..363: mol_type = other RNA
atgaaactattaatggtactaatgctagcagcactatcacaacactgctacgcaggatcaggatgcccactactagaaaacgtaatatcaaaaacaataaacccacaagtatcaaaaacagaatacaaagaactactacaagaattcatagacgacaacgcaacaacaaacgcaatagacgaactaaaagaatgcttcctaaaccaaacagacgaaacactatcaaacgtagaagtattcatggtaatatcattctcatcatacaaattattcaaatcaccagaccaaggacaagtaggatcatcattcctaacagacaacgcaaaagcaacatcagaacaagcattctcatacataggataa

SEQ ID NO: 3828 - RNA, 357 nt, synthetic construct
  misc_feature 1..357: note = AAA19238 variant
  source 1..357: mol_type = other RNA
atgccaagagaagacgcacacttcatatacggatacccaaaaaaaggacacggacactcatacacaacagcagaagaagcagcaggaataggaatactaacagtaatactaggagtactattactaataggatgctggtactgcagaagaagaaacggatacagagcactaatggacaaatcactacacgtaggaacacaatgcgcactaacaagaagatgcccacaagaaggattcgaccacagagactcaaaagtatcactacaagaaaaaaactgcgaaccagtagtaccaaacgcaccaccagcatacgaaaaactatcagcagaacaatcaccaccaccatactcaccataa

SEQ ID NO: 3829 - RNA, 1482 nt, synthetic construct
  misc_feature 1..1482: note = EAW93427 variant
  source 1..1482: mol_type = other RNA
atgttacctagatgggaattagctctctatttattagcttcactaggctttcatttttattcattctatgaagtatacaaagtatcaagagaacatgaagaagaacttgaccaagaatttgaacttgaaacagacacactatttggtggtcttaaaaaagatgcaacagatttcgaatggtcattttggatggaatggggaaaacaatggttagtatggctattattaggacacatggtagtatcacaaatggcaacattactagcccgcaaacatagaccatggatattaatgttatatggaatgtgggcatgttggtgtgttttaggaactccaggagtagctatggtattactccacaccacaatatcattttgtgtcgcacaattccgatctcaattattaacatggttatgttctttattattactatccacattaagactacaaggagtagaagaagtcaaaagacgatggtataaaacagaaaatgaatattatcttttacaatttacattaacagtaagatgtttatattatacatcattttctttagaattatgttggcaacaattaccagctgcaagtacatcttattcattcccatggatgctagcttatgtattttactatcccgttttacataatggaccaattctatcattttcagaatttataaaacaaatgcaacaacaagaacatgattcattaaaagcatccctttgtgtattagctctaggcctaggaagattattatgttggtggtggttagcagaactaatggcacatctaatgtatatgcacgctatatattcctcaataccactacttgaaacagtatcatgctggactttaggaggtttagccctagcacaagtattattcttctatgttaaatatctcgtattatttggtgttccagccttactaatgcgactagacggccttacaccacctgcactacccagatgcgtatcaacaatgttttcctttacaggaatgtggcgctattttgatgtaggtctacataactttctcataagatacgtatacataccagtaggaggatcacaacatggactcttaggtacactattttcaacagcaatgactttcgcttttgtatcatattggcatggaggatacgattatttatggtgttgggcagcattaaattggttaggagtaacagtagaaaacggagtccgacgacttgttgaaacaccatgtatacaagactctcttgcaagatatttttcacctcaagcaagacgtagattccatgctgcattagcatcttgttctacatctatgttaatattaagtaatctagtatttttaggtggtaatgaagtaggcaaaacttactggaacagaatatttatacaaggatggccatgggtaacactatcagtattaggatttctttattgttatagtcatgtaggtatagcatgggcacaaacttacgcaacagattaa

SEQ ID NO: 3830 - RNA, 954 nt, synthetic construct
  misc_feature 1..954: note = AAD41349 variant
  source 1..954: mol_type = other RNA
atggcagttcaaggttcacaaagaagactactaggatctttaaattccacaccaacagcaataccacaactaggactagcagcaaaccaaacaggagcacgatgtttagaagtttcaatatctgacggactatttttatcattaggtctagtctcattagtagaaaacgctttagtagtcgcaaccatagccaaaaacagaaacctacactcaccaatgtattgtttcatctgctgcctagcactatcagacctattagtttccggatctaacgtcttagaaacagcagtaatattactactagaagcaggagcattagtcgcaagagcagctgtcttacaacaattagataacgtaatagatgttataacctgttcatctatgttatcatcactatgtttcttaggtgccatagcagtagatagatacatatctatattttacgctctaagatatcattcaatagtaaccctacctcgagccagacgtgcagtagcagcaatatgggtagcatcagtagtattttcaactctattcatcgcatactatgaccacgtagcagtattactatgcttagtagtattctttttagcaatgctagtactaatggcagttctatatgtacatatgttagcacgtgcatgtcaacatgctcaaggaatagctcgtctacacaaaagacaacgaccagttcatcaaggctttggacttaaaggtgcagtaacattaacaatactactaggaattttctttctatgctggggaccatttttcctacacttaacactaatagtattatgtccagaacacccaacttgtggatgtatattcaaaaattttaacctttttctagcactaataatatgtaacgcaataatagatccactaatctacgcattccattcacaagaactaagacgcacattaaaagaagtattaacatgttcatggtaa

SEQ ID NO: 3831 - RNA, 954 nt, synthetic construct
  misc_feature 1..954: note = AHC09522 variant
  source 1..954: mol_type = other RNA
atggcagtacaaggctcacaaagacgtttattaggatcattaaattctacacctactgcaataccacaactaggattagcagcaaatcaaactggagcaagatgtttagaagtatcaatatccgatggactatttttatcattaggcctagtatccttagttgaaaatgctctagtagtagcaacaatcgctaaaaatcgcaatctccacagcccaatgtactgttttatatgttgtttagcattatcagatttattagtttcaggatcaaatgtattagaaacagcagtaatattactactagaagcaggcgcattagtcgcaagagcagcagtattacaacaactagataatgtaatagatgtaataacttgttcatcaatgctctcttcattatgctttttaggagctatagcagtagacagatacatatctattttctatgcattaagatatcactcaatagtaacacttcccagagcaagacgagcagtagccgcaatatgggttgcatcagtagtattttcaacactatttatagcttattatgatcatgttgccgtactattatgtctagtagtatttttcttagcaatgctagtattaatggcagtactatatgtacatatgctcgccagagcatgtcaacatgctcaaggaatcgcaagattacataaaagacaaagaccagtacaccaaggattcggtttaaaaggagcagtcacattaactattcttttaggaatattctttttatgttggggacctttctttctacacctaacattaatagtattatgtccagaacatccaacatgtggctgtatatttaaaaactttaatttatttttagcccttataatttgcaatgccataatagacccactaatctatgcttttcattcacaagaattaagaagaacactaaaagaagtattaacatgttcttggtaa

SEQ ID NO: 3832 - RNA, 954 nt, synthetic construct
  misc_feature 1..954: note = AHC09804 variant
  source 1..954: mol_type = other RNA
atggccgtacaaggatcacaacgacgactacttggctctctaaattctacaccaacagcaataccacaactaggactagctgcaaatcaaaccggtgcaagatgtctagaagtatcaatatcagacggattatttttatcattaggcttagtttcattagttgaaaacgctctagtagtagcaacaatagctaaaaatagaaacttacattcaccaatgtactgtttcatatgctgcctcgcattatcagacctattagtatcaggttcaaacgtactagaaactgcagttatactactactagaagcaggagccctagtagcaagagcagcagtactacaacaactagataatgtaatagatgttattacatgttcatccatgttatcatctctatgtttcctaggagcaatagccgtagatagatatatatcaatattttatgcactaagataccattcaatagtaacactaccacgagcaagacaagccgttgcagcaatatgggtagcatccgttgtattttcaacactatttatagcatactatgaccacgtagctgtactcttatgtctagtagtatttttcttagcaatgctagtacttatggcagtcttatacgtacatatgcttgctcgtgcttgccaacatgcacaaggaatagcaagattacataaacgtcaacgacccgtccaccaaggatttggattaaaaggtgcagtaacattaacaatattacttggaatattctttttatgttggggaccattcttcttacacttaacacttatcgttttatgtccagaacacccaacatgcggctgtatattcaaaaactttaatctatttctagcactaattatatgcaacgcaataatagatcctctaatatacgcattccattcacaagaactaagacgaacccttaaagaagtcctaacctgttcatggtaa

SEQ ID NO: 3833 - RNA, 954 nt, synthetic construct
  misc_feature 1..954: note = BAE94313 variant
  source 1..954: mol_type = other RNA
atggctgtacaaggatcacaaagaagattactaggatcactaaattcaacaccaacagcaataccacaattaggactagcagcaaaccaaactggagcaagatgtctagaagtatcaatctcagacggactatttctatcattaggattagtatccctagtagaaaacgccttagtagtagccacaatagctaaaaacagaaaccttcactcacccatgtattgtttcatatgttgcttagcactatctgacttattagtctcaggatcaaacgtactagaaacagcagtaatattattattagaagcaggagcattagtagcaagagcagctgtcctacaacaactagacaacgtaactgacgtaataacctgctcctccatgctatcatcactatgctttctaggagccatagcagtagaccgatacatctcaatattctacgcactaagatatcactcaatagtaacccttcccagagcaagacgagcagtagccgcaatatgggtagcatcagtagtattctcaacattatttatagcatactatgatcatgtagccgtattattatgcctagttgtatttttccttgcaatgctagtattaatggcagttttatatgtacacatgttagcaagagcatgtcaacacgcacaaggaatagcaagactacataaaagacaaagaccagtacatcaaggatttggattaaaaggcgcagtaacactaacaatattactaggcattttctttttatgttggggtccattctttctacacttaacacttatagtactttgcccagaacacccaacatgtggatgcatatttaaaaattttaacctattcctagcattaatcatatgtaatgctataatagacccattaatatatgccttccactcacaagaactaagaagaacactcaaagaagtcttaacatgttcctggtaa

SEQ ID NO: 3834 - RNA, 954 nt, synthetic construct
  misc_feature 1..954: note = AHC09531 variant
  source 1..954: mol_type = other RNA
atggccgtacaaggatcccaaagaagacttctcggatcattaaattctacaccaactgcaataccacaactaggactagctgcaaatcaaacaggagccagatgtttagaagtatcaatatctgacggactatttctatcactaggattagtatcattagtcgaaaacgcattagtagttgctacaatagccaaaaaccgcaaccttcactcaccaatgtattgtttcatatgttgtcttgccttatctgaccttctagtctcaggatcaaatatgttagaaactgcagtcatcttattattagaagcaggagccctagtagccagagcagctgtattacaacaacttgataatgtaatagatgtaataacttgttcttctatgttatcatctttatgtttccttggagcaattgctgtagatagatacatatccatattttatgctttaagatatcattcaatagtaaccctaccaagagcacgacgagcagtagcagctatatgggtagcatcagtagtattttcaactctatttatagcttattatgatcacgtagcagtactactatgtttagtagtatttttcctcgcaatgctagtattaatggcagtactatatgtacacatgttagcaagagcatgtcaacatgcacaaggaattgcccgactacataaaagacaaagaccagttcatcaaggattcggactaaaaggagcagtaacattaacaatactattaggcatattcttcctatgttggggaccattctttttacatctaacattaatagttctatgtccagaacatccaacatgtggatgtatatttaaaaactttaatctatttttagccctaataatatgtaacgcaataatagaccctctaatatacgcattccattctcaagaattacgacgtacattaaaagaagtacttacatgttcatggtaa

SEQ ID NO: 3835 - RNA, 954 nt, synthetic construct
  misc_feature 1..954: note = BAE94311 variant
  source 1..954: mol_type = other RNA
atggcagtacaaggatcacaacgaagactattaggctcactaaattccacaccaacagccataccacaattaggactagcagcaaatcaaacaggagcacgatgcttagaagtctcaatatcagacggactattcttatcactcggactcgtatctctagtagaaaacgctctagtagtagcaacaattgctaaaaatcaaaacctacactcaccaatgtactgcttcatatgctgcctagcactatcagacctattagtatcaggatcaaatgtactagaaacagcagtaatattactactagaagcaggagcacttgttgcccgagcagcagtattacaacaattagataacgtaatagatgtaataacatgctcatccatgctatcatcactatgctttttaggtgcaatagctgtagatagatacatatcaatattctacgcactaagataccattcaatagtaactctaccaagagctagacaagcagtagccgcaatatgggtagcatcagtcgtattctcaacactattcatagcttattacgaccacgttgccgtattattatgcctagttgtattctttttagccatgctagtcttaatggcagttctatacgtacacatgttagcaagagcatgccaacacgcacaaggaatagcaagactacacaaaagacaaagaccagtacaccaaggattcggactaaaaggcgcagtcacactcacaatattactaggaatattctttctatgttggggaccatttttcctacacttaacattaatagtattatgccccgaacaccctacatgcggatgtattttcaaaaacttcaacctattcctagccctaataatatgtaatgcaataatagacccactaatatacgctttccactcacaagaattaagaagaacactaaaagaagtactaacatgctcatggtaa

SEQ ID NO: 3836 - RNA, 954 nt, synthetic construct
  misc_feature 1..954: note = BAE94309 variant
  source 1..954: mol_type = other RNA
atggctgtacaaggctcacaaagacgcctattaggatcactaaattcaacacctactgcaattccacaactcggactagcagcaaatcaaacaggagctagatgtctagaagtatctatatctgatggtctatttttatctttaggcctagtatcattagtagaaaacgccctagtagtagcaacaattgctaaaaaccgtaacctacattccccaatgtactgtttcatatgttgtttagcactatcagatttattagtttcaggatccaatgtactagaaacagccgttatattattattagaagctggagctctagtagcaagagcagcagtcttacaacaacttgacaatgtaatagatgtaataacatgttcatcaatgttatcatctctttgtttcttaggagcaatagcagtagatagatacatatcaatattttacgctctaagataccattctattgtaacactaccacgagcaagacaagcagtaggagctatatgggttgcatcagtagtattttctactttatttatagcatactatgatcatgtagcagtcttattatgtctcgtagtattctttttagcaatgcttgttttaatggcagtactatatgtacatatgcttgcaagagcatgccaacatgcacaaggaatagctagactccataaacgacaaagaccagttcatcaaggatttggattaaaaggcgcagttacacttacaatactattaggaatattctttctatgttggggtccattctttctacaccttacactaatagttttatgtccagaacacccaacatgtggatgtatatttaaaaattttaatttatttttagcattaataatatgtaacgcaataatagacccattaatatacgcatttcattcacaagaattaagacgtacattaaaagaagtcttaacatgttcctggtaa

SEQ ID NO: 3837 - RNA, 954 nt, synthetic construct
  misc_feature 1..954: note = BAE94308 variant
  source 1..954: mol_type = other RNA
atggcagtacaaggatctcaaagaagactactaggatcattaaattcaacacctacagcaataccacaattaggactagctgctaaccaaactggagcaagatgccttgaagtctcaatatcagatggtctattcctatcattaggattagtttctttagtagaaaacgcattagttgtcgcaacaatagctaaaaatagaaacttacattcacctatgtactgcttcatctgctgtttagcactatcagacctcttagtatctggttcaaatgtattagaaacagcagtaatacttttactcgaagcaggagcattagtagcacgagcagcagtactacaacaattagacaatgtaaccgacgtaataacatgttcttcaatgttatcatcattatgctttttaggagcaatagcagtagatagatacatatcaatattttatgcactacgctatcattcaatagtaactctaacacgagcccgcagagcagtagcagccatatgggttgcatcagtagtattctcaacattattcatagcatactacgaccatgtagcagtactattatgtctagtcgtattctttctagcaatgttagtcttaatggcagtactctacgtacacatgctagcaagagcatgtcaacatgcacaaggaatagcaagattacacaaaagacaaagacccgtacaccaaggatttggactaaaaggtgcagtaacactcacaatactactcggcatattctttttatgctggggaccatttttcctacacttaacattaatagtactctgtccagaacatcccacatgcggatgcatatttaaaaacttcaacctatttctagcattaataatatgtaatgctattatagatccacttatatatgcatttcactcacaagaactaagaagaacattaaaagaagtactaacatgttcatggtaa

SEQ ID NO: 3838 - RNA, 954 nt, synthetic construct
  misc_feature 1..954: note = BAE94307 variant
  source 1..954: mol_type = other RNA
atggcagtccaaggatcacaaagaagactattaggatcactaaactcaactccaacagcaataccccaactaggattagctgcaaatcaaacaggagcaagatgtctagaagtatcaatctctgatggactatttctttcattaggtctagtttcactcgtagaaaacgcattagttgtagcaacaatcgctaaaaacagaaacttacattcaccaatgtattgtttcatatgctgcttagcactatccgacctcctagtatccggatctaatatgctagaaacagcagttatcttactacttgaagcaggagcattagtagcaagagcagcagtattacaacaattagacaatgtaatagatgttataacatgttcatccatgttatcatctttatgtttcttaggagcaatagctgtagatagatatatatctatattttacgcattacgatatcattcaatagtaatattacctagagcacgacgagcagtagcagcaatatgggttgcatcagtagtattttcaacattatttatagcatactatgatcatgtcgctgtcttattatgtctagtagtctttttcttagcaatgttagtattaatggctgtactatatgtacacatgttagcaagagcttgtcaacatgcacaaggcatagcaagattacataaacgccaaagaccagtacatcaaggatttggattaaaaggagcagttacccttacaatattattaggaattttctttttatgctggggaccattctttttacatctaacattaatagtcttatgcccagaacatcctacatgcggatgcatatttaaaaacttcaatctatttctagcactaataatatgtaatgctataatcgaccctttaatatacgctttccactcacaagaactaagacgaacacttaaagaagtacttacatgttcatggtaa

SEQ ID NO: 3839 - RNA, 951 nt, synthetic construct
  misc_feature 1..951: note = BAE94306 variant
  source 1..951: mol_type = other RNA
atggcagtccaaggatcccaacgaagattactaggatctttaaatagcacaccaacagcaatacctcaattaggattagctgcaaatcaaacaggtgcaagatgtctagaagtatcaatatctgacggtctatttttatcattaggacttgtttcccttgttgaaaatgctttagtagttgcaactatagccaaaaatagaaacttacattctcccatgtattgtttcatatgttgtctagcattatcagacttacttgtatcaggatcaaatgttctagaaactgcagtaattttacttctagaagcaggagctcttgtagcaagagccgctgttttacaacaacttgataacgtaatagatgtaataacatgctcatctatgctatcatctctttgtttcctaggagctatcgcagtcgacagatacatatcaatttatgcattaagataccattcaatagttacattaccacgagctagacaagcagtagcagcaatatgggtagcatcagttgtattttcaacattatttatagcatattatgatcacgttgctgtattattatgtttagtagtatttttcctagcaatgttagttttaatggcagtattatatgtacatatgctagcaagagcatgccaacatgcacaaggaattgcaagattacacaaaagacaacgtccagtacatcaaggatttggacttaaaggcgcagtcacattaacaatattacttggaatattcttcctatgttggggaccattcttcttacatttaacactcatagttttatgtccagaacatccaacatgcggttgtatatttaaaaactttaatttatttttagcactaataatatgcaatgcaataatagatccacttatatatgcattccattcacaagaattaagaagaacactaaaagaagtattaacatgctcatggtaa

SEQ ID NO: 3840 - RNA, 954 nt, synthetic construct
  misc_feature 1..954: note = AAQ62977 variant
  source 1..954: mol_type = other RNA
atggcagttcaaggttcacaaagaagattactaggatctctaaactcaacacccacagcaataccacaacttggactagcagcaaaccaaacaggcgcaagatgcttagaagtatcaatatcagacggattatttctttctctaggtctagtatcactcgtagaaaatgccctagtagtagccacaatagctaaaaatcgcaatctacactcaccaatgtactgtttcatttgttgcctagcactatcagatttattagtatcaggatcaaatgtattagaaactgcagtaatattactactcgaagcaggagccctagtagcaagagcagcagttctacaacaactagacaatgtaatagatgtaataacatgttcatcaatgttatcatctctatgcttcctcggagcaatagctgtagaccgatacatatccatattctacgcattaagataccattcaatagttacactacctagagcacgcagagcagtagccgcaatatgggttgcctcagtagtattctcaactttattcatagcatactatgaccatgtagcagtactactatgtttagtagtattcttcttagcaatgttagtattaatggcagtactttatgtacatatgttagcaagagcatgtcaacatgcacaaggaatcgcaagactacacaaaagacaaagacccgtacaccaaggattcggactaaaaggagcagtaacactaacaattctactaggaatattctttttatgttggggaccattctttttacatctaacactaataatactttgccctgaacacccaacatgtggatgcatatttaaaaactttaatctattcttagcattaataatatgcaacgcaataatcgaccctctaatatacgcattccactcacaagaattaagaagaactctaaaagaagtactcacatgctcatggtaa

SEQ ID NO: 3841 - RNA, 954 nt, synthetic construct
  misc_feature 1..954: note = AAQ62975 variant
  source 1..954: mol_type = other RNA
atggcagtacaaggatctcaacgacgactattaggatcactaaattctacaccaaccgcaattccacaactaggtttagccgcaaatcaaacaggtgcaagatgtctagaagtatcaatatcagacggactatttttatctttaggtttagtatcattagtagaaaatgctctagtagtcgcaacaattgccaaaaacagaaatttacactcaccaatgtactgcttcatatgctgtttagcactatcagacttattagtatcaggttcaaacgtattagaaactgcagtaatcctattactagaagcaggagcattagtagcaagagcagttgtactccaacaacttgataatgttatagatgtaataacatgttcatcaatgctctcatctctctgttttctaggtgctatagctgtagacagatatatatcaatattttatgcactacgataccattccatagtaacactacctagagcaagacgagctgtcgcagcaatatgggtagcatccgttgtatttagcacactatttatagcatactatgatcacgtagcagtactcctatgcctagtcgttttcttcctagcaatgttagtattaatggcagttctatatgtacatatgttagcaagagcatgtcaacatgcacaaggaatagcaagattacataaaagacaaagaccagtacatcaaggatttggacttaaaggtgcagtaacattaacaatactattaggaatattctttttatgctggggaccatttttcctacatctaaccctaatagtcttatgcccagaacacccaacatgtggatgtatatttaaaaacttcaatctatttttagcactaattatatgtaacgcaattatcgacccactaatatacgctttccattcacaagaactaagacgaacactaaaagaagttttaacatgttcttggtaa

SEQ ID NO: 3842 - RNA, 954 nt, synthetic construct
  misc_feature 1..954: note = AAQ62974 variant
  source 1..954: mol_type = other RNA
atggcagtacaaggatcacaacgacgactactaggatcactaaactctacacccacagcaataccccaactaggactagccgcaaaccaaacaggagcaagatgtctagaagtatcaatatcagacggcttattcctctcattaggattagtatcattagtagaaaacgccctagtagtagccacaattgccaaaaaccgaaatctacattcaccaatgtactgcttcatatgctgtttagcactatccgacttattagtatctggttcaaatgtactagaaacagcagtaatactactattagaagcaggagctctagtagcacgagcagccgtattacaacaactagataatgtaatagatgtaataacatgttcatctatgttatcatcactatgtttcctcggagcaatagcagtcgaccgatacatatcaatattttacgcccttagatatcattcaattgtaacattaccaagagctagacgagcagttgctgcaatatgggtagcttctgttgtcttttcaacattattcatagcatactacgaccatgtcgcagtattactatgcttagtagtattctttttagcaatgctcgtactaatggcagtattatacgtacatatgctagcaagagcatgtcaacacgcacaaggcatagcaagattacacaaaagacaaagaccagttcaccaaggatttggactaaaaggtgcagtaacattaactatcttattaggtatatttttcctatgttggggaccattctttctacatttaacactcatagttttatgcccagaacacccaacatgtggatgtatatttaaaaactttaatttatttttagcactaattatatgcaacgcaattatagacccattaatttacgcattccactcacaagaattaagaagaacactaaaagaagtattaacaagatcatggtaa

SEQ ID NO: 3843 - RNA, 954 nt, synthetic construct
  misc_feature 1..954: note = AAQ62973 variant
  source 1..954: mol_type = other RNA
atggcagtacaaggctctcaaagacgtttattaggatcactaaattcaacaccaacagcaataccacaattaggtttagccgctaatcaaacaggtgcaagatgtcttgaagtatcaatatcagatggactatttttatcattaggccttgtaagtctagttgaaaatgcattagtagttgcaacaattgctaaaaatcgtaacctacattcaccaatgtattgttttatctgttgcctagcattatcagacctattagtatccggttcaaatgtattagaaaccgcagtaatattattacttgaagcaggagctttagtagcaagagcagcagtattacaacaattagacaatgtaatagatgtaataacatgttcatcaatgttatcatctctttgtttccttggagcaatagcagtagacagatacatttcaatattttatgcattacgctatcattcaatagtaaccttaccaagagcaagacgagcagtagctgcaatctgggtagcttcagtagtattctcaacactatttattgcatattatgaccacgtagctgtattactttgtctagtagttttctttctagcaatgttagtactaatggcagtactatatgtacatatgctagcaagagcatgtcaacatgcacaaggaatagcaagattacacaaacgtcaaagaccagtacatcaaggatttggattaaaaggcgcagtaacattaacaatattactaggaatattctttttatgctggggcccattctttttacacctaacattaatcgtattatgtccagaacatccaacatgtggctgtatatttaaaaattttaacttatttttagctttaataatatgtaatgcaataattgatccacttatatatgcctttcattcacaagaattaagacgaatgctaaaagaagtattaacatgttcatggtaa

SEQ ID NO: 3844 - RNA, 954 nt, synthetic construct
  misc_feature 1..954: note = AAQ62972 variant
  source 1..954: mol_type = other RNA
atggcagtacaaggatcacaaagaagactattaggctcactaaactcaactccaactgcaataccacaattaggacttgcagcaaatcaaacaggagccagatgtctagaagtctcaatatcagacggactattcctatcactaggcttagtatcattagttgaaaatgcattagtagtagccacaatagctaaaaatagaaatctacactcaccaatgtattgctttatatgctgcctagcattatcagaccttctagtatctggatcaaatgttttagaaacagcagtaattttattacttgaagcaggagcactcgtagcaagagcagcagtattacaacaactagacaatgtaatagacgtaataacatgctcatctatgttatcatccctatgcttcctaggagcaatagcagtagatagatacatatcaatattctatgccctacgataccactcaatagtaacattaccaagagccagacgagcagtagcagcaatatgggtagcatccgtagttttctctaccttatttatagcatactacgaccacgtagcagtactattatgtctagtagtatttttccttgcaatgttagttttaatggccgtcctatatgtccacatgttagcctgggcatgtcaacacgcacaaggcatagcaagattacacaaacgtcaaagaccagtacatcaaggcttcggactaaaaggagcagtaacattaacaatattattaggaatcttcttcctatgctggggaccattcttcctacacctaacattaattgtactatgtccagaacatccaacatgcggatgcatatttaaaaactttaacttatttttagcattaataatatgtaacgcaataatagacccattaatatatgcattccactcccaagaactaagaagaacattaaaagaagtattaacatgctcatggtaa

SEQ ID NO: 3845 - RNA, 954 nt, synthetic construct
  misc_feature 1..954: note = AAQ62971 variant
  source 1..954: mol_type = other RNA
atggccgtacaaggatcccaaagacgattacttggatcattaaattctacaccaacagcaataccccaactaggattagcagcaaaccaaactggagcaagatgtctagaagtatcaatatctgacggattatttctatcactaggcctagtatcactcgtagaaaacgcattagtagtagcaacaatagccaaaaacagaaatctccattccccaatgtactgctttatatgctgtttagcattatcagatctattagtatccggctcaaacgtactcgaaacagcagtaatattattacttgaagctggagcattagtagcaagagctgcagtactacaacaacttgacaatgtaatagacgtaattacatgctcatcaatgctatcatcattatgctttttaggagctattgcagtagatagatacatctctatattctatgcactaagataccattcaatagtaacattaccacaagcaagacgagcagttgcagcaatatgggtagcctcagtagtattttctactctttttatagcatattatgatcatgtagcagtactactctgcctagtagtattcttcctagcaatgctagtattaatggcagtactatacgtacacatgttagcaagagcatgtcaacatgcacaaggaatagccagactacacaaaagacaaagaccagtacaccaaggattcggattaaaaggagccgtaacactaaccatcttattaggaatatttttcctatgttggggaccatttttcttacatttaacactcatagtattatgtccagaacacccaacatgcggatgcatatttaaaaacttcaacctcttcctagcattaatcatatgtaatgcaataatagatcccttaatatacgccttccactcacaagaattaagaagaacactaaaagaagtactaacatgctcttggtaa

SEQ ID NO: 3846 - RNA, 954 nt, synthetic construct
  misc_feature 1..954: note = AAQ62970 variant
  source 1..954: mol_type = other RNA
atggcagtacaaggatcacaaagaagactactaggatcactaaactcaacaccaaccgcaattccacaactaggtttagcagcaaatcaaacaggagcaagatgtctagaagtctctatatcagatggactatttctatctttaggtttagtatctctcgtcgaaaacgccttagtagtagcaacaattgccaaaaacagaaatcttcattctccaatgtattgtttcatatgctgtctagcactattagacttactcgtatcaggatcaaatgtattagaaacagcagtcatattactattagaagctggagccctagtagcacgagcagcagttcttcaacaactcgataatgtcatagatgtaataacatgttcatctatgctatcatctctatgtttcttaggagcaatagcagtagatagatacatatcaatattttacgctttaagataccattcaatagtaactttaccacgagcaagacgagcagtagcagcaatatgggtagcatcagttgtcttttctactttatttatagcatattatgaccatgttgcagtacttctatgtttagttgtatttttcttagcaatgttagtactaatggcagtattatacgtacatatgctcgcaagagcatgtcaacatgcacaaggaattgcacgcttacataaaagacaaagaccagtccaccaaggatttggattaaaaggagcagtaacactaacaatcctactaggaatattctttctatgttggggacctttctttttacaccttacactaatagtattatgtccagaacacccaacatgcggatgcatatttaaaaattttaatctatttctagcactaattatatgtaacgctatcatagacccactaatatacgcatttcattcacaagaactccgaagaacacttaaagaagtactaacatgctcatggtaa

SEQ ID NO: 3847 - RNA, 954 nt, synthetic construct
  misc_feature 1..954: note = AAQ62969 variant
  source 1..954: mol_type = other RNA
atggctgtacaaggaagtcaaagaagattactcggatcactcaattcaacccctacagcaataccacaattaggattagcagcaaaccaaaccggagcaagatgcttagaagtatccatatcagacggactattactatctctaggattagtaagtctagtagaaaatgcattagtcgtagcaactatagccaaaaacagaaatctccattcaccaatgtactgttttatatgttgtttagcattatcagacttattagtatctggatctaatgtccttgaaacagcagtcatacttctacttgaagcaggagcattagttgcaagagccgcagtattacaacaattagacaatgtaatagacgtaataacttgttcatcaatgctatcatctttatgctttctaggagccatagccgtagatagatatatatcaatattttatgcactaagatatcactctatagtaactttaccaagagcccgacgtgcagttgcagcaatatgggtagcatcagttgtattttccacactattcatagcttattatgaccacgttgcagtattactatgtctagttgtattcttcctagcaatgttagtattaatggcagtattatacgtccatatgttagctcgagcatgtcaacacgcacaaggaatcgcaagactacataaaagacaaagacctgtacatcaaggatttggattaaaaggagcagttacactaacaattttactaggaatatttttcttatgttggggtccattctttttacatctaactttaattgtactatgcccagaacatccaacatgcggatgcatatttaaaaactttaatttatttttagcactaataatatgcaatgcaataatagatcccttaatatacgcatttcactcacaagaattacgacgaacattaaaagaagtactaacatgttcatggtaa

SEQ ID NO: 3848 - RNA, 954 nt, synthetic construct
  misc_feature 1..954: note = AAO21073 variant
  source 1..954: mol_type = other RNA
atggcagtacaaggttcacaaagaagactactcggttcattaaacagcacacctaccgccataccacaactaggattagcagcaaatcaaacaggagctagatgtttagaagtctctatatctgatggactatttttatcactaggtctagtctccctagtagaaaatgctctagtagtagcaacaatagctaaaaaccgtaacctccactcaccaatgtactgttttatttgttgtttagcattatcagacttattagtatcaggatcaaacgtacgagaaactgcagtcatattattattagaagcaggagccctagtagcacgagcagcagtattacaacaattagacaacgttatagacgtaataacatgttcatcaatgttatcatctctctgtttcttaggagctatagcagtagatagatatatatccatattttacgcactacgatatcattcaatcgtaactctaccaagagctcgcagagcagtagcagcaatatgggtagcttcagttgtattttcaacattatttatagcatactatgaccatgtcgccgtccttctatgtttagtcgtatttttcttagcaatgctagtactaatggcagttttatatgtacatatgctagcaagagcatgtcaacatgcacaaggaatagcaagattacataaaagacaacgaccagtacaccaaggatttggattaaaaggagcagtaacattaacaatattattaggaattttcttcttatgttggggaccattctttctacacttaacactaatagttctatgtccagaacacccaacatgtggatgtatttttaaaaattttaatttatttttagcactaataatatgtaacgcaataattgacccactaatttacgcatttcattcacaagaattaagaagaactttaaaagaagtactcacatgttcatggtaa

SEQ ID NO: 3849 - RNA, 954 nt, synthetic construct
  misc_feature 1..954: note = AHC09567 variant
  source 1..954: mol_type = other RNA
atggcagtacaaggatcccaacgacgattactaggatcactaaattcaactccaaccgctataccccaattaggactagctgctaatcaaactggagcacgatgccttgaagtctctatctctgatggattatttttatcattaggtctagtctctcttgtagaaaacgccctagtagtcgctacaatagctaaaaatagaaatttacattctccaatgtactgttttatatgctgtctagcactaccagatttattagtttctggatcaaatgtattagaaacagcagtaatactactacttgaagcaggagcattagtcgcaagagcagctgtactacaacaactagacaatgtaatagacgtaattacatgctcaagtatgctatcatcattatgtttcttaggagcaatagcagttgatcgatatatatctatattttacgcattaagatatcattcaatagttacactaccaagagcaagacgagcagtagcagctatatgggtagcttctgtagtattttcaacactatttatagcatactatgatcatgtagctgtattactatgtttagtagtattctttttagcaatgctagtactaatggcagtactatatgtacatatgcttgcaagagcatgtcaacatgcacaaggaattgcacgactacataaaagacaaagaccagtacatcaaggctttggattaaaaggagcagtaacattaacaatcttattaggaattttctttttatgttggggtccattctttttacacctaacacttatagttttatgtccagaacatccaacatgcggctgtatatttaaaaatttcaatttatttttagcattaataatatgcaatgcaataattgatcctttaatatatgcatttcactcacaagaactaagaagaacattaaaagaagtattaacatgttcatggtaa

SEQ ID NO: 3850 - RNA, 954 nt, synthetic construct
  misc_feature 1..954: note = AHC09812 variant
  source 1..954: mol_type = other RNA
atggcagtacaaggatcacaacgacgactattaggatcattaaattcaacaccaacagcaataccccaattaggactagcagcaaatcaaaccggagcaagatgcttagaagtatctatatccgacggactatttctatcattaggattagtatccctagtagaaaacgcattagtcgtagcaacaatagccaaaaatagaaatctacactcaccaatgtactgttttatatgttgtttagcattatcagacctattagtatcaggttcaaatgtactagaaacagcagttatactcttattagaagctggagcattagtagctagagcagccgtactacaacaattagataatgtcatcgatgtaataacatgctcatcaatgctatcatctttatgcttcttaggtgcaatagcagtagacagatacatatcaatcttctatgcattacgataccattcaatagtcacattaccaagagcaagacgagcagttgcagcaatatgggtagcatcagtagtattctcaacactattcatagcatattatgatcacgtagcagtactactatgcttaatggtatttttcctcgcaatgctagttctaatggcagttttatatgtacacatgctagcaagagcctgccaacacgcacaaggaatagcaagactacacaaaagacaaagaccagtacaccaaggattcggtttaaaaggagcagtaacactaacaatcctattaggaattttcttcctatgctggggaccattctttttacatttaacactaatagtcctatgcccagaacacccaacatgcggctgtatcttcaaaaactttaatttatttttagcactaataatatgtaacgccataatcgacccactaatatacgcatttcattcccaagaattaagaagaaccttaaaagaagtactcacatgctcatggtaa

SEQ ID NO: 3851 - RNA, 954 nt, synthetic construct
  misc_feature 1..954: note = AHC10192 variant
  source 1..954: mol_type = other RNA
atggcagtacaaggatcacaaagaagactattaggatcactaaactcaacacccaccgcaataccacaacttggactcgcagcaaatcaaacaggcgccagatgccttgaagtatcaatatctgacggactattcctatcattaggtctagtctctctagtagaaaatgccctagtcgtagcaacaatagctaaaaatagaaatctacactcacctatgtactgcttcatatgctgcctagcattatcagacttattagtctcaggatcaaacgtattagaaacagcagtaatactactactagaagcaggagctctagtagcaagagcagcagtattacaacaactagacaacgtaatagatgttatcacatgctcatcaatgttatcctctttatgttttctcggagcaatagcagtagacagatatatatcaatattctatgcattaagataccattcaatagtaaccttaccaagagcaagacgagcagttgcagccatatgggtagcatcagtagtattctcaacactatttatagcatattacgaccacgtagccgtactactatgtctagtagtattcttcttagcaatgctagttttaatggccgtactatatgtacatatgttagcaagagcatgccaacacgcacaaggaacagcaagactccataaaagacaaagaccagtacaccaaggattcggactaaaaggagcagtcacattaacaatactactaggaatattcttcctctgctggggtccattctttttacatctaacattaatagtactatgtccagaacacccaacatgcggatgcatatttaaaaactttaacctatttttagcactaataatatgcaatgctataatagatccactaatatatgctttccattctcaagaactaagaagaacattaaaagaagtactaacatgctcatggtaa

SEQ ID NO: 3852 - RNA, 954 nt, synthetic construct
  misc_feature 1..954: note = AHC09641 variant
  source 1..954: mol_type = other RNA
atggcagtccaaggatcacaaagaagactgctaggatcacttaattccactccaacagctattccacaattaggattagcagcaaatcaaacaggagcaagatgtctagaagtatcaatatccgatggtttatttctctcactaggtctagtttctctagtagaaaacgctctagttgtagccacaatagctaaaaacagaaacctacactcaccaatgtactgctttatttgttgtttagcactatcagatcttctagtttcaggatcaaacgtattagaaacagcagtaatacttttattagaagcaggagcattagtcgcaagagcagcagtactacaacaacttgataacgtaatagatgtaattacatgttcatcaatgttatcttcactatgtttcttaggagcaatagcagtagatcgatacatatcaatattttacgctctacgataccattcaactgtaactctaccaagagctagacgagcagtagcagcaatatgggtagcatcagtagtattctcaacactatttatagcctattatgaccacgtagctgttttattatgtttagtagtatttttcctagcaatgttagtactaatggcagtactatatgtacatatgttagcaagagcatgtcaacatgcacaaggaatagcacgattacataaaagacaacgtccagtacaccaaggatttggactaaaaggagcagtaacattaacaattttattaggaatattcttcttatgttggggaccatttttcctacacttaacattaatagtactatgtccagaacaccctacatgtggatgcatttttaaaaatttcaatttatttttagcattaattatatgcaacgcaataattgatccactaatatacgcattccattcacaagaattacgtagaacattaaaagaagtactaacatgttcatggtaa

SEQ ID NO: 3853 - RNA, 954 nt, synthetic construct
  misc_feature 1..954: note = AHC10044 variant
  source 1..954: mol_type = other RNA
atggcagtacaaggctcacaaagaagattacttggatcattaaattcaacaccaacagccattccccaactaggattagcagcaaatcaaacaggagcaagatacttagaagtatcaatatctgacggactatttctatctctaggtctagtatctctagttgaaaacgcattagtagtcgctactatagccaaaaatagaaacctacattccccaatgtattgcttcatttgctgtttagcactatcagatctattagtatcaggatcaaacgtattagaaaccgcagtaatactattactagaagcaggagcacttgtagcaagagcagcagtactacaacaactagataatgtaatagatgtaataacatgctcatcaatgttatcctccctatgcttcctaggagccatagcagtagatcgttatatctcaatattttacgcattaagataccattcaatagtaacattaccaagagccagacgagcagtagcagcaatatgggtagcatcagtagtattctcaacactatttatagcatactacgaccacgtagcagtcttattatgcctcgtagtattctttctagcaatgctagtcctaatggcagtactatacgtacatatgttagcacgtgcatgccaacacgcacaaggaatagcacgcttacacaaaagacaaagaccagtacatcaaggatttggattaaaaggagcagtaacactaacaatactattaggaatattcttcctatgttggggaccattctttcttcatttaacactaatagtactttgcccagaacacccaacatgcggatgtatattcaaaaacttcaacttatttttagcactaataatatgcaacgcaataatagacccattaatatacgcattccactctcaagaattacgacgtacattaaaagaagtattaacctgctcctggtaa

SEQ ID NO: 3854 - RNA, 954 nt, synthetic construct
  misc_feature 1..954: note = AHC09532 variant
  source 1..954: mol_type = other RNA
atggcagtacaaggatcacaaagacgcttactaggatccttaaattcaacaccaacagcaataccccaattaggtttagcagcaaatcaaacaggagccagatgtttagaagtatcaatatcagacggtttatttttatcactaggcttagtatccctagttgaaaatgccctagtactagcaacaattgccaaaaacagaaatttacactcaccaatgtattgtttcatatgctgtttagcattatcagatcttctagtttcaggatcaaatgtactagaaactgcagtaatacttctacttgaagccggtgcacttgtagcacgagcagcagtacttcaacaattagataatgtaatagatgtaattacatgttcatcaatgttatcttcattatgctttttaggagcaatagcagtagatcgatatatatctatattttacgcattaagatatcattccatagtaacactacccagagcaagacgagcagtagccgctatatgggtagcatcagttgtattttcaacactatttatagcatactatgatcatgttgctgtacttttatgtttagtcgtattctttttagcaatgctagtattaatggcagtactttatgtacatatgttagcacgagcatgtcaacatgcacaaggaattgcaagattacataaacgacaaagaccagtacatcaaggatttggccttaaaggagcagtaaccctaacaatactattaggtatattctttctatgttggggtcctttctttttacacctaacactaatagtcctatgtccagaacatcctacttgtggatgtatttttaaaaattttaatttatttcttgcattaataatatgcaacgctataatagatccattaatatatgctttccattcacaagaactccgaagaacattaaaagaagtcttaacttgctcatggtaa

SEQ ID NO: 3855 - RNA, 954 nt, synthetic construct
  misc_feature 1..954: note = AHC11042 variant
  source 1..954: mol_type = other RNA
atggcagttcaaggatcccaaagaagattactaggatcattaaactccacaccaactgcaattccacaactaggattagcagcaaatcaaacaggagcaagatgtttagaagtatctatatcagacggtctatttctatctttaggtctagtctctctagtagaaaacgcacttgtagtagcaacaatagccaaaaaccgaaatctacactcaccaatgtattgtttcatttgctgtttaccactatcagatctcctagtttcaggatcaaatgtactagaaacagcagtaatattattattagaagcaggagccctagtagcacgtgcagctgtcttacaacaattagacaatgtaatagatgtaataacatgttcatcaatgttatcatcattatgtttcttaggagccatagccgtagacagatacatatcaatcttctatgctctaagataccattcaatagtaacacttcctagagccagacgtgcagttgcagcaatatgggtagcttctgtagtcttttcaacactatttatagcctattatgaccatgtagcagtattactatgtttagtagtattctttcttgcaatgttagttctaatggcagtattatatgtacatatgttagcacgagcatgccaacacgcacaaggaatagcaagactacataaacgacaaagaccagtacaccaaggatttggattaaaaggagcagtaacattaacaatattactaggaattttctttctctgttggggaccattctttcttcatcttacattaatagtactatgtcccgaacaccctacatgcggatgcatatttaaaaactttaatttatttttagcactcataatatgtaacgcaataattgacccactaatttacgcttttcattcacaagaactaagacgaacacttaaagaagtactaacatgttcatggtaa

SEQ ID NO: 3856 - RNA, 954 nt, synthetic construct
  misc_feature 1..954: note = AHC10733 variant
  source 1..954: mol_type = other RNA
atggcagtacaaggatcacaaagaagattattaggatcactaaattccacacctacagcaataccacaattaggactagcagcaaatcaaacaggagcccgctgcttagaagtatctatatcagacggactatttctttctctaggattagtatctctagtagaaaacgctctagtcgtagcaacaatagctaaaaacagaaatctacattcaccaatgtactgtttcatctgctgtctagcactttctgatctattagtttcaggatcaaatgtattagaaacagcagtaatattactattagaagcaggagctctagtagcaagagcagcagtacttcaacaactagataatgtaatagatgtaataacatgctcatctatgttatcttccttatgcttcctaggagcaatagcagtcgacagatatatttctatattctacgcattaagatatcattcaatagttacattaccaagagctcgacgagcagtagcagcaatatgggtagcatcagtagtattttccacattatttatagcttattatgaccatgtagccgtactcctctgcttagtagtatttttcttagcaatgctcgtattaatggcagttctatatgtacatatgttagcaagagcatgtcaacatgcacaaggaatagcacgattacataaaagacaaagaccagtacatcaaggatttggattaaaaggagcagtaacccttacaatattattaggaatattctttctatgttggggaccattctttctacatttaacacttatagtattatgtccagaacatcccacatgtggatgtatatttaaaaatttctctttatttctagcattaattatatgcaacgcaataattgatccactaatatacgccttccattcacaagaattacgtagaaccttaaaagaagtacttacatgctcatggtaa

SEQ ID NO: 3857 - RNA, 954 nt, synthetic construct
  misc_feature 1..954: note = AHC10696 variant
  source 1..954: mol_type = other RNA
atggcagtacaaggatcccaaagaagattattaggttcccttaactctacaccaacagcaatcccacaactaggactagcagcaaatcaaacaggagcaagatgcttagaagtatccatatctgacggactatttctatctctaggcctagtatccctagtagaaaacgcattagtagtagctaccatagccaaaaatagaaatctacattccccaatgtattgctttatatgttgcttagcattatctgacctattagtatcaggatcaaatgtactagaaactgcagtcatactactattagaagcaggagctctagtagcaagagcagcagtattacaacaattagacaatgtaatagatgtaataacttgctcatctatgttatcatcattatgcttcctaggagcaatagcagtcgacagatatatatctatattttatgcactacgttatcactcaattgtaacattaccaagagcaagacgcgcagtagcagcaatatgggtagcatcagtagtattctcaacattatttatagcatattatgatcacgtagcagtactactctgcctagttgtattcttcttagctatgttagtcctaatggcagtattatatgtacatatgctagctcgagcatgtcaacatgcacaaggaatagcaagattacataaaagacaaagaccagtacatcaaggattcggattaaaaggcgcagtaacattaaccatcttattaggaatattctttctatgctggggccctttcttcttacacctaacactaatagtactatgtccagaacatccaacatgtggatgcatttttaaaaattttaacttatttttagcactaataatctgtaacgcaataatagacccactaatacatgcattccattcacaagaacttagaagaacattaaaagaagtacttacctgttcatggtaa

SEQ ID NO: 3858 - RNA, 954 nt, synthetic construct
  misc_feature 1..954: note = AHC09527 variant
  source 1..954: mol_type = other RNA
atggcagttcaaggttcacaaagaagattattaggctcattaaattcaacaccaactgcaataccccaacttggactcgcagctaatcaaacaggtgcaagatgtctagaagtatcaatatcagatggattatttctatctctaggtctagtatctttagtagaaaacgcattagttgttgccacaatagccaaaaacagaaacttacactcaccaatgtattgcttcatatgctgtttagcattatcagacctattagtttcaggatcaaatgtactagaaacagcagtcatccttctattagaagcaggcgctctagtagcaagagcagcagtacttcaacaattagataatgtcatagatgtaataacatgttcctcaatgttatcctccttatgtttcctaggcgcaatagccgtagatagatacatatcaatattttacgcactaagatatcattctatagtcacattacccagagcaagacgtgcagttgcagcaatatgggtagcatcagttgtattttcaactttatttatagcttattacgaccatgttgcagtattactatgtctagtagtatttttcctagcaatgttagtactaatggcagttctatatgtacatatgttagcaagagcatgtcaacatgcccaaggtattgcacgactacataaaagacaacgaccagtacatcaaggatttggactaaaaggcgcagtaacattaacaatattacttggaatattcttcctatgttggggaccctttttcttacaccttacattaatagttctatgtccagaacaccctacttgtggatgtatatttaaaaattttaacttatttctagcactcattatatgtaatgcaataattcaccctctaatatacgcattccattcacaagaactaagaagaacactaaaagaagtattaacctgttcctggtaa

SEQ ID NO: 3859 - RNA, 954 nt, synthetic construct
  misc_feature 1..954: note = AHC10869 variant
  source 1..954: mol_type = other RNA
atggcagttcaaggatcacaaagaagattattaggttcactaaactcaaccccaacagcaataccacaactaggtttagcagcaaaccaaaccggagcaagatgcctagaagtttcaatatctgatggactctttttatctctaggcctagtttccctagttgaaaacgccctagtcgttgcaacaatagctaaaaacagaaacctacactcacccatgtactgctttatctgctgtctagcattatcagacctcctagtatcaggatcaaatgtactcgaaacagcagtcatattactactagaagcaggagcattagttgcaagagcagcagtattacaacaactagacaacgtaatagatgtaataacatgttcctcaatgctttcatcactatgcttcttaggagcaatagcagtagatagatatatatctatattctacgcattaagataccattccatagtaaccctaccacgtgcacgtagagcagtagcagcaatatgggtagcatcagtagtattctcaacactattcatagcttactatgatcacgtagcagtattattatgtctagtagtatttttcctagccatgttagtattaatggcagtattatatgttcatatgttagcaagagcttgtcaacatgcacaaggaatagcaagactacacaaaagacaacatccagtacaccaaggattcggtctaaaaggagcagtaacattaacaatattacttggaatattcttcctatgctggggaccattctttttacatttaactttaatagtactatgtccagaacacccaacatgtggatgtatatttaaaaacttcaatttatttttagcattaataatatgcaatgctataatagacccactaatatacgctttccattcacaagaactaagaagaacactaaaagaagtactcacatgctcatggtaa

SEQ ID NO: 3860 - RNA, 954 nt, synthetic construct
  misc_feature 1..954: note = AHC11615 variant
  source 1..954: mol_type = other RNA
atggctgtacaaggatcacaaagaagattactcggatcacttaactcaacaccaacagctataccacaattaggactagccgcaaaccaaacaggagctagatgcctagaagtatctatatcagacggattatttctatcattaggattagtatcattagtagaaaatgctctagtcgtagcaacaatagctaaaaaccgcaatttacactcaccaatgtattgctttatctgttgtcttgctctatcagatttattagtatctggttcaaatgtactagaaacagcagttatactattattagaagctggtgccctagtagcaagagcagcagtattacaacaactagacaatgtaatagacgtcataacatgctcatcaatgttatcatcattatgttttctaggcgcaatagcagtagacagatacatatcaatattttatgcattaagatatcactcaatagtaacattacctagagcccgcagagcagttgcagctatatgggttgcatcagtagtattctctacactattcatagcatactatgatcacgttgcagtactactatgcttagtagtattctttttagctatgttagtactaatggcagtactatatgtacacatgctagccagagcatgtcaacatgcacaaggaatagctagattacataaaagacaacgtccagttcatcaaggatttggtttaaaaggtgcagtaactttaacaatcttattaggaatattctttttatgttggggacctttctttctacatctaactctaattgtcttatgtcctgaacatccaacctgtggatgtatatttaaaaactttaatttatttttaacactaataatatgcaatgccataattgacccactaatatacgcctttcactcacaagaattaagacgaacattaaaagaagtactaacatgttcatggtaa

SEQ ID NO: 3861 - RNA, 954 nt, synthetic construct
  misc_feature 1..954: note = AHC09535 variant
  source 1..954: mol_type = other RNA
atggcagtacaaggatcacaaagacgactattaggatctctaaattcaacaccaacagcaataccacaattaggattagcagcaaatcaaaccggagcaagatgcctagaagtctctatatctgacggcctattcctatcactaggcctagtatccttagtagaaaacgcattagtagtagctaccatagctaaaaaccgaaatttacactcaccaatgtactgctttatatgttgtcttgcattatcagacctattagtttcaggctcaaatgtactagaaaccgcagtaatattactactagaagcaggagctctagtagcaagagcagcagtattacaacaactagacaatgtcatagatgtcattacatgttcatctatgctctcatcattatgtttcctaggagcaatagcagtagatcactacatatctatattctatgcattaagatatcactcaatagtcacactaccccgagcacgcagagcagttgcagctatatgggtagcctcagtagtattctcaacactattcatagcatattatgaccatgtagcagtcctattatgcttagttgtattctttctagcaatgctagtattaatggcagtactatatgtacacatgttagcaagagcctgtcaacatgcacaaggcatagcacgactacacaaacgacaacgtccagtacaccaaggctttggactaaaaggtgcagtaacattaacaatattattaggaatattctttctatgttggggaccattctttctacatttaacattaatagtactatgcccagaacatccaacttgcggatgtatatttaaaaactttaatctatttctagcacttataatatgcaacgcaataatagaccctttaatttacgctttccactcccaagaactaagaagaacactaaaagaagtcttaacatgttcatggtaa

SEQ ID NO: 3862 - RNA, 954 nt, synthetic construct
  misc_feature 1..954: note = AHC11840 variant
  source 1..954: mol_type = other RNA
atggcagttcaaggatcacaaagacgattattaggctcattaaattccacaccaactgcaataccacaactaggacttgccgcaaatcaaactggagcaagatgcttagaagtctccatatcagacggtttatttctatcattaggcctagtatctctagttgaaaatgcattagtagtagcaacaatagccaaaaaccgaaatttacattcaccaatgtattgtttcatttgctgtctagcactatcagatctattagtatcaggatcaaatgtattagaaacagccgtaatattactactagaagctggagctctagtagcacgagcagcagtattacaacaattagataatgtaatcgatgtcattacttgttcatccatgctttcatcactatgttttctaggagcaatagcagtagacagatatatatcaatattttatgctttaagatatcattcaatagtaactctaccaagagcaagacgagccgttgcagcaatatgggtagcatcagtagtattttcaacactattcatagcttactatgaccatgttgctgtattactatgtctagtagtattctttctagcaatgctagttttaatggctgtattatatgtacatatgctagcaagagcatgccaacatgcacaaggaatagcaagattacataaaagacaaagacccgtacatcaaggatttggacttaaaggagctgttaccctaacaatactactaggaatcttctttctatgctggggaccattctttttacatctcacattaatagtactatgtccagaacatcctacatgtggatgcatatttaaaaattttaatttatttttagcactaattatatgcaacgcaataatagacccactaatatacgcttttcataaccaagaattaagacgaactctaaaagaagttctaacatgttcatggtaa

SEQ ID NO: 3863 - RNA, 954 nt, synthetic construct
  misc_feature 1..954: note = AHC09665 variant
  source 1..954: mol_type = other RNA
atggcagttcaaggttcacaaagaagattattaggatcattaaattcaacaccaactgcaataccacaattaggattagccgcaaatcaaaccggagctagatgtctagaagtatctatatcagacggactatttctatccctaggtttagtatcattagtagaaaacgccttagtagttgctacaatagctaaaaatagaaatcttcattcaccaatgtactgctttatatgctgtttagcactatctgacctattagtatcaggatcaaatgtcctagaaacagccgtaatactattattagaagcaggcgctttagttgctcgagcagcagtattacaacaactagacaacgttatagatatgataacatgttcatctatgctatcctctctatgttttcttggagctatagcagtagacagatacataagcatattttatgcattaagataccattcaatagtaacattaccaagagctagacgagcagtagctgcaatatgggtagcatccgtagtattctcaacactttttatagcatattatgatcatgtagcagtattattatgtttagtagtattctttctagcaatgctagttcttatggcagtactatatgtacatatgttagcaagagcatgtcaacatgcacaaggaatagcaagattacataaaagacaacgaccagtacaccaaggatttggactaaaaggcgcagtaaccctaacaattttactaggaatattctttctatgctggggaccctttttcctacacctaacactcatagttctatgtccagaacacccaacatgtggctgtatttttaaaaattttaatctatttttagcattaataatatgtaacgccataatagaccccttaatttacgcattccactcacaagaattaagacgaacactaaaagaagtattaacttgttcatggtaa

SEQ ID NO: 3864 - RNA, 954 nt, synthetic construct
  misc_feature 1..954: note = AHC11324 variant
  source 1..954: mol_type = other RNA
atggcagtacaaggatcccaacgtagattactaggatcattaaactcaacaccaacagcaatacctcaactaggcttagccgcaaaccaaacaggagcacgatgcttagaagtatcaatatcagatggactatttttatctttaggattagtatcattagtagaaaatgcattagtagtagcaacaatagctaaaaacagaaacctacattccccaatgtattgttttatctgttgccttgcattatccgatctattagtatcaggatcaaacgttctagaaacagcagtcattctattactagaagcaggagcattagtagctagagcagcagtattacaacaattagacaatgtaatagacgtaataacttgttcatcaatgctatcttctttatgctttctaggagcaattgcagtagacagatacatatccatattttatgctctcagatatcactcaatagttacattaccccgagcaagacgagctgtagccgccatttgggtagcatctgtagtattctcaacattatttatagcttattatgatcatgttgctgtactactatgtctagtagtattctttttagcaatgcttgtcctaatggctgtcctttacgtacacatgttagcaagagcatgccaacacgcccaaggaatagctagacttcataaaagacaaagaccagtacatcaaggttttggactaaaaggagcagttacactaactatattactaggaatattctttttatgctggggaccattctttttacatctaacactaatagtattatgcccagaacatccaacatgtggttgcatttttaaaaattttaacctattcttagcattaatcataagaaatgctataatagatcctttaatatatgcctttcattctcaagaattaagaagaacattaaaagaagtattaacttgttcttggtaa

SEQ ID NO: 3865 - RNA, 954 nt, synthetic construct
  misc_feature 1..954: note = AHC09521 variant
  source 1..954: mol_type = other RNA
atggcagtacaaggatcacaaagaagattacttggatcattaaattcaactcccacagcaataccccaattaggtttagcagctaatcaaacaggcgctagatgtttagaagtatctatatcagatggattatttctatctttaggattagtatcacttgttgaaaacgctctagttgttgcaacaatagctaaaaatcgtaatttacactctccaatgtactgcttcatatgctgcttagcattatcagaccttctagtatcaggttcaaatgtactagaaacagcagtaatacttttattagaagcaggagcattagtagcaagagcagcagtactacaacaattagataatgttatagacgttataacatgttcatcaatgttatcatcactatgtttcttaggagcaatagcagtagatagatatatatctatattttatgctctacgctatcattcaatagtaacattaccatgggctcgtagagcagtagcagccatctgggtagcatcagtcgtattttcaacactctttatagcttactatgatcatgtagcagtattattatgtctcgttgttttctttctcgcaatgcttgtattaatggcagtattatatgtacatatgttagccagagcatgccaacatgctcaaggaatagcaagattacataaacgtcaaagaccagttcatcaaggatttggactaaaaggtgctgttaccctaacaatattactaggaatattctttttatgttggggaccattctttctacatttaacacttatagtactatgtccagaacatcccacatgtggatgcatatttaaaaattttaatttatttctagctttaataatatgtaatgcaataatagatccactaatatacgcatttcattcccaagaattaagacgaacactcaaagaagtattaacatgttcatggtaa

SEQ ID NO: 3866 - RNA, 954 nt, synthetic construct
  misc_feature 1..954: note = AHC11794 variant
  source 1..954: mol_type = other RNA
atggcagtacaaggttcacaaagaagactattaggatcattaaattcaacaccaacagcaataccacaactcggtctagcagcaaatcaaactggtgcaagatgtttagaagtatcaatttcagacggattatttctatccttaggattagtatcattagtagaaaatgcattagtagtagctacaatagccaaaaaccgtaacttacactctccaatgtattgcttcatatgttgtttagctctatcagacttattagtatcaggatccaatgtactcgaaactgcagtaattttattattagaagcaggagcattagttgccagagcagccgtattacaacaactagataatgttatagatgtcattacatgttcatcaatgctatcatcattatgctttttaggagccatagccgtagatagatatatatcaatattttatgcattaagatatcactcaatagtaacattacctagagctcgtagagcagttgcagcaatttgggtagcatcagtagtattttctacactattcatagcatattatgaccatgtagccgtactactatgtttagtagtatttttcttagcaatgctagttttaatggcagtcctatatgtacatatgttagctagagcatgtcaacacgcccaaggaatcgcacgtctacataaaagacaaagacccgtacatcaaggatttggattaaaaggagcagtaacacttacaatattacttggaatatttttcctatgttggggcccattctttctccatttaacattaatagtattatgtccagaacaccctgaatgtggttgtatatttaaaaactttaatttatttctagcattaataatttgtaacgcaataatagacccactaatatatgcattccactcacaagaattaagacgaaccttaaaagaagtattaacctgttcctggtaa

SEQ ID NO: 3867 - RNA, 954 nt, synthetic construct
  misc_feature 1..954: note = AHC10874 variant
  source 1..954: mol_type = other RNA
atggcagtacaaggatcccaaagaagattattaggatcattaaactcaacaccaacagcaataccacaactaggactagcagcaaatcaaacaggagcaagatgcttagaagtctccatatccgacggtctattcctatccctaggattagtatcattagttgaaaacgccctagtagtagcaacaatagccaaaaacagaaatttacactcaccaatgtactgttttatatgctgtttagcattatcagaactattagtctccggctcaaatgtactagaaacagcagtaatattattactagaagcaggagccctagtagcaagagcagcagttctacaacaattagataacgtaatagacgtaataacatgctcctcaatgctttcatcactatgttttctaggagcaatagcagtagacagatatatatcaattttctacgcactacgataccactcaatagtaacattacctcgagcacgtagagcagtagcagcaatatgggtagcatccgtagtattctcaacattattcatcgcatattacgaccacgtagcagttctactatgcttagtagtatttttcttagcaatgctagtattaatggcagttttatacgttcatatgttagcaagagcatgtcaacacgcacaaggcatagcaagattacacaaaagacaacgaccagtacaccaaggcttcggactaaaaggcgcagtaacattaacaatattacttggaatattcttcctatgctggggaccattctttctacacttaacactaatagtattatgcccagaacacccaacatgcggttgtatatttaaaaactttaacttattcttagcattaataatatgtaacgctataatagatcctttaatatatgcctttcactcacaagaattacgaagaactctaaaagaagtactaacctgctcatggtaa

SEQ ID NO: 3868 - RNA, 954 nt, synthetic construct
  misc_feature 1..954: note = AHC09597 variant
  source 1..954: mol_type = other RNA
atggcagtacaaggctctcaaagaagattattaggatcactaaactctaccccaacagcaataccacaattaggactagcagcaaaccaaactggagcaagatgtttagaagtatcaatttcagacggtctttttctatcattaggacttgtatctttagttgaaaatgcattagtagtagcaacaatcgccaaaaacagaaatcttcattcaccaatgtactgttttatttgttgtctagcattatcagatctcctagtttccggatcaaatgtactagaaactgcagtaatattattacttgaagccggtgcattagtagcaagagcagcagtattacaacaattagacaatgtaattgatgttataacatgttcatctatgctatcatccctttgctttttaggagcaattgccgttgatagatacatatcaatattttatgctttatgttaccattcaatagttacactacccagagcaagacgagcagtagcagccatatgggtagcatcagtagttttctctaccctattcatagcttattatgatcatgttgcagtattattatgtttagtagtattctttttagcaatgttagtattaatggcagtactatatgttcatatgctagccagagcatgtcaacatgcacaaggaatagcaagactacataaaagacaacgaccagtacatcaaggatttggtcttaaaggagccgtcacattaacaatattattaggaatcttctttttatgttggggtccattctttttacatttaacactaatagttttatgtcctgaacatcccacatgtggatgtatttttaaaaattttaatctatttttagcattaataatatgtaacgcaataatagatccattaatatatgcatttcattctcaagaattaagaagaacattaaaagaagtacttacatgttcatggtaa

SEQ ID NO: 3869 - RNA, 1665 nt, synthetic construct
  misc_feature 1..1665: note = CCDS816.1 variant
  source 1..1665: mol_type = other RNA
atgactgccccaggagcagcaggacgttgtcctccaacaacatggctaggatcacttttattattagtctgtctactagcatcacgttctattacagaagaagtttcagaatattgctctcatatgataggatctggacatctccaatcactacaaagattaatagactcacaaatggaaacctcttgtcaaataacattcgaatttgtggaccaagaacaactaaaagacccagtttgttacctaaaaaaggcttttctattagtacaagacataatggaagataccatgcgatttagggataacacaccgaatgccatagcaatagtacaattacaagaattatcactaagactaaaatcctgtttcaccaaagattatgaagaacatgataaagcatgcgtaagaaccttttatgaaacacctctacaactactagaaaaagtaaaaaacgtttttaatgaaaccaaaaacttattagataaagactggaacattttttccaaaaattgcaataattcatttgccgaatgttcctcacaagatgtcgtaactaaacccgattgtaattgtctctatccaaaagccataccaagctccgacccagcctcggtatcaccacaccaaccactagctccttctatggctcccgtagcaggtctaacatgggaagactccgaaggtacggaaggatcatcactactcccaggagaacaaccacttcatacagtagacccaggatcagcaaaacaacgtccaccccgatctacatgtcaatctttcgaaccacctgaaacacctgtagtaaaagactcaacaataggaggatctccacaaccacgccccagtgtaggtgcctttaaccccggcatggaagacatactagactcagccatgggaacaaattgggtacccgaagaagcttctggcgaagcatctgaaatccctgttccacaaggaacagaattatcaccatcgagacccggcggaggatcaatgcaaactgaaccagcaagaccaagtaacttcctaagcgcatcatctccacttccagcctctgcaaaaggacaacaaccagcagatgtaacaggaactgcattacctcgagttggaccagtaagaccaacaggacaagattggaaccatactcctcaaaaaactgatcatccctccgccttattaagagacccaccagaaccaggctcacctagaatatcatctttacgtcctcaaggactatctaacccatccaccctatcagcacaaccacaattatctcgctctcactcttcaggatcagtactaccattaggagaattagaaggaagaagatccacaagagatcgtagatcacctgcagaaccagaaggtggaccagcttccgaaggcgcagcaagaccacttccaagattcaattctgtaccacttacagatactggccacgaacgacaatcagaaggatcattctcaccacaacttcaagaaagtgttttccacttactagtaccatctgtaatcctagtattattagcagtaggaggattattattttatagatggagacgaagaagtcaccaagaaccacaacgagcagatagcccacttgaacaaccagagggttcaccattaacacaagacgatagacaagtagaattaccagtataa

SEQ ID NO: 3870 - RNA, 1893 nt, synthetic construct
  misc_feature 1..1893: note = EAW85719 variant
  source 1..1893: mol_type = other RNA
atggcactgccaactgcaagaccacttttaggatcatgtggaacaccagcactaggaagccttttatttttattattttctctaggatgggtacaaccatcaagaacactagcaggtgaaacaggacaagaagccgcacctctggatggtgtattagccaatccaccaaatataagctcattatccccacgacaattactcggatttccatgtgctgaagtatcaggattatctactgagagagtacgtgaattagcagttgcacttgcccaaaaaaatgtaaaattaagtactgaacaactaagatgcttagctcacagactaagtgaaccaccggaagatttagatgcattgcccttagacttactcctatttttaaatccagatgctttctcaggcccacaagcttgtacaagattcttctccagaataaccaaagccaacgtagacttactccctagaggcgcgcctgaaagacaacgattattacccgccgcattagcctgctggggagtcagaggatcattactatcagaagcagatgtcagagctttaggaggattagcctgtgatttaccaggaaggtttgtcgcagaatcagctgaagttttactaccccgacttgtctcatgtcctggacctttagatcaagatcaacaagaagcagctagagcagcattacaaggaggaggacctccatatggtccaccctcaacatggagcgtaagtacaatggatgccctaagaggactgttgccagttttaggacaacccataataagatccataccacaaggaatagttgcagcatggagacaaagatcttcaagagacccatcatggcgacaaccagaacgtacaattctaagaccaagattccgaagagaagtagaaaaaacagcctgtccatctggtaaaaaagcacgagaaatagatgaaagtctcatattctataaaaaatgggaattagaagcatgtgtagatgctgcactattagctacacaaatggatagagtaaacgcaataccattcacatatgaacaacttgacgtattaaaacataaattggacgaactctatccacaaggctatccagaatccgtaatccaacatctcggatacctctttctcaaaatgtcacctgaagacatacgaaaatggaacgtaacttcattagaaacattaaaagcactattagaagtaaataaggggcacgaaatgtcaccacaagcaccaagaagaccattacctcaagttgcaacactaatagaccgctttgtcaaaggaagaggccaattagataaagatacattagacacattaaccgcattctaccctggttatctttgctcactctcaccagaagaactatctagcgtacccccaagctccatatgggccgtacgaccacaagatttagatacatgtgaccctagacaactagatgtactctatccaaaagctagacttgcattccagaatatgaatggatctgaatatttcgtcaaaatacaatctttcttaggcggtgccccaactgaagatctcaaagcattgtcacaacaaaatgtatcaatggatcttgccacatttatgaaactaagaactgatgcagttttacctctaactgttgcagaagttcaaaaactattaggtccacacgtagaaggattaaaagctgaagaacgacatagaccagttagagattggattctacgtcaacgtcaagatgacctagacacattaggactgggactacaaggtggtattccaaatggataccttgtattagacttatcaatgcaagaagctctttcaggaacaccatgtctcttaggcccaggacctgtattaaccgtgttagcacttttactcgcatcgaccctagcataa

SEQ ID NO: 3871 - RNA, 1515 nt, synthetic construct
  misc_feature 1..1515: note = CCDS46865.1 variant
  source 1..1515: mol_type = other RNA
atggaagctttaagagtacaaatgttcatgccttgctcgttcgaaagtctatacctttcatcagcagaacacccaggagcatcaaaaccaccaatctcaagcagcagtatgacctcaagaatcctactacgccaacaactaatgagagaacaaatgcaagaacaagaaagacgtgaacaacaacaaaaacttcaagccgcacaatttatgcaacaaagagtccccgtctcccaaacacccgcaataaacgtaagcgtcccaactacattaccatctgcaactcaagtaccaatggaagtactaaaagtccaaacacacctagaaaatccaactaaataccatatacaacaagcacaacgacaacaagtaaaacaatacctatcaacaacactagcaaataaacatgccaaccaagtattatctttaccatgccccaatcaacccggagaccacgtaatgccaccagtaccaggtagctcagcaccaaattcacctatggcaatgttaacgctaaactcaaattgcgaaaaagaaggattctacaaatttgaagaacaaaacagagcagaaagtgaatgccccggaatgaacacccacagcagagcttcatgcatgcaaatggatgacgtaatagatgacataatttccctagaaagtagttacaacgaagaaatactaggattaatggaccctgcactacaaatggcaaacacattaccagtatccggaaatctaatcgatttatacggaaatcaagggctacctcccccaggactaacaatatcaaactcttgcccagcaaaccttccaaatataaaacgagaactaaccgaaagcgaagcacgagcactagctaaagaaagacaaaaaaaagacaaccacaatttaatcgaaagaagacgtagattcaacattaatgaccgaattaaagaattaggcacactaataccaaaatcaaacgatccagacatgagatggaacaaaggcacaatactcaaagcatccgtagattatataagaaaactccaaagagaacaacaacgcgccaaagaactagaaaaccgacagaaaaaattagaacacgcaaatagacatttattactaagaatacaagaactagaaatgcaagcaagagcacacggtctatcactaataccatcaacaggactatgttcgccagacttagtaaacagaataataaaacaagaaccagtcctagaaaactgttctcaagacctactacaacaccacgccgatctaacatgcacaaccactctggaccttacagacggaacaataacctttaacaacaatctaggcacaggaacagaagctaaccaagcatacagtgtaccaacaaaaatgggaagtaaacttgaagacatcttaatggacgatacactctcaccagtaggcgtaacagaccccctactatccagtgtatcaccaggagcaagcaaaacatcctcacgaagatcatcaatgtcgatggaagaaacagaacacacttgctaa

SEQ ID NO: 3872 - RNA, 1260 nt, synthetic construct
  misc_feature 1..1260: note = CCDS2913.1 variant
  source 1..1260: mol_type = other RNA
atgctagaaatgttagaatacaatcactaccaagtacaaacccaccttgaaaacccaacaaaatatcacatacaacaagcacaaagacaacaagtcaaacaatacttatccacaacactggccaataaacatgcaaaccaagtactatcattaccatgccctaaccaaccaggagaccacgtaatgcccccagtaccaggatcatcagcaccaaactcaccaatggcaatgctaacactaaatagcaactgcgaaaaagaaggattctataaatttgaagaacaaaacagagccgaatccgaatgccctggaatgaacacccattcaagagcatcatgtatgcaaatggacgacgtaatagacgatataatttccctcgaatcctcttacaacgaagaaatactcggacttatggaccctgcactacaaatggcaaatacactaccagtcagcggcaacctaatagatttatatggaaaccaaggactaccaccaccaggactaacaatatcaaattcatgcccagcaaacttacccaacatcaaaagagaattaacagcatgtatattcccaacagaaagtgaagcaagagccctagctaaagaacgacaaaaaaaagataatcacaatctaatcgaacgaagacgcagattcaacataaacgacagaataaaagaactaggcacattaatccccaaaagcaacgacccagacatgagatggaacaaaggtacaatattaaaagcatctgtcgactacataagaaaactccaaagagaacaacaaagggccaaagaactcgaaaatagacagaaaaaattagaacacgcaaacagacacctactactaagaatacaagaactagaaatgcaagcaagagcacacggcctatcactcataccaagcacaggactatgctcaccagacctagtaaatagaataataaaacaagaaccagtactagaaaactgcagccaagatctactacaacatcatgcagacctaacttgcactacaacactagatctaaccgacggaaccataacattcaacaacaatctaggaaccggaacagaagcaaaccaagcatactccgtaccaacaaaaatgggttcaaaattagaagacatactaatggatgacaccctatcaccagtaggagtaacagacccactactatcatcagtatcacctggcgcatccaaaacatcatccagacgatcatcaatgagcatggaagaaacagaacatacatgctag

SEQ ID NO: 3873 - RNA, 1581 nt, synthetic construct
  misc_feature 1..1581: note = XM_005264754 variant
  source 1..1581: mol_type = other RNA
atgcaatcagaaagcggcatagtacccgatttcgaagtaggagaagaattccacgaagaacccaaaacctactacgaactaaaatcacaaccactaaaatctagctcttcagcagaacatcccggtgcaagtaaaccaccaatctcctcctcatccatgacatcacgaatattactaagacaacaattaatgcgcgaacaaatgcaagaacaagagagaagagaacaacaacaaaaactacaagccgcacaatttatgcaacaaagagtaccagtatcacaaacaccagccatcaatgtatcagtaccaaccaccctaccctctgcaactcaagtaccaatggaagtcttaaaagtacaaacccacttagaaaacccaacaaaataccacatacaacaagcacaacgccaacaagtaaaacaatatctatcaaccacattagccaacaaacatgcaaaccaagtactctccctaccctgcccaaaccaaccaggagaccacgtcatgccaccagtaccaggatcaagtgctccaaactcaccaatggcaatgctcaccctaaactccaattgcgaaaaagaaggattttataaattcgaagaacaaaacagagcagaatccgaatgtcccggaatgaatacacactccagagcaagttgtatgcaaatggacgatgtcatcgacgacataatatcactagaatcatcttataatgaagaaatattaggactaatggacccagcactacaaatggcaaacacacttccagtatcaggaaacctcatagacctatatggaaaccaaggactccccccaccaggccttacaatatctaactcatgcccagcaaaccttccaaatattaaacgagaacttacagcatgtatattcccaacagaatctgaagcaagagctctcgcaaaagaacgacaaaaaaaagacaaccataacctaatagaacgtagacgaagatttaatatcaacgaccgaataaaagaattaggaacactaataccaaaatctaacgaccccgatatgcgatggaacaaaggaacaatcttaaaagcttccgtagattacatccgtaaactacaaagagaacaacaacgagcaaaagaactagaaaacagacaaaaaaaactagaacacgcaaatagacacttattattaagaatacaagaactcgaaatgcaagcaagagcccacggattatcattaattccatcaacaggactatgctccccagaccttgtcaatagaataataaaacaagaaccagtactcgaaaactgctctcaagacctactccaacaccacgccgacctcacatgtacaaccacattagacctaacagatggaacaattacattcaacaacaacttaggaacaggcacagaagcaaatcaagcatactccgtaccaaccaaaatgggatccaaactagaagacatactcatggatgacaccttatcacctgtcggagtcacagatccattattatcctcagtatctccaggagcatcaaaaacatcaagcagacgatcctcaatgtcaatggaagaaacagaacacacatgttaa

SEQ ID NO: 3874 - RNA, 1065 nt, synthetic construct
  misc_feature 1..1065: note = BAG52140 variant
  source 1..1065: mol_type = other RNA
atggcaccagcagcttggttacgaagtgcagcagcaagagcacttctaccacctatgttattactattactacaaccaccaccactactagcaagagcattaccaccagatgtccaccacttacatgcagaaagaagaggaccacaaccttggcacgcagcattaccaagttctcccgcaccagccccagcaacacaagaagcaccaagaccagcatcatcattaagaccccctagatgtggagtaccagatccttcagatggattatcagcaagaaatcgacaaaaacgaatattaagatttccatggcaattagtacaagaacaagtaagacaaacaatggcagaagcactaaaagtatggtcagacgttactcctttaacatttaccgaagtacatgaaggcagagcagatataatgatagattttgcaagatactggcatggagatgatcttccatttgatggtcctggaggtatattagcacatgcattctttccaaaaactcatagagaaggagatgttcattttgattatgatgaaacctggacaatcggtgatgatcaaggaacagatttattacaagtagcagcccatgaatttggacatgtactaggtttacaacataccactgcagcaaaagcattaatgtcagctttttatacatttagatacccattatcattatcacctgatgattgtagaggagtacaacatctttatggacaaccatggcctacagttacatcaagaacaccagcattaggacctcaagcaggaattgatacaaacgaaatagcaccattagaacctgacgcacctccagatgcatgtgaagcctcatttgatgcagtaagtactataagaggagaattatttttctttaaagcaggatttgtatggagattaagaggaggacaattacaaccaggttatcctgcattagcatcacgacactggcaaggactaccttcaccagtagatgcagcatttgaagacgcccaaggtcacatatggtttttccaaggtacaacaggtgtatcaacaccagcacctggtgtataa

SEQ ID NO: 3875 - RNA, 804 nt, synthetic construct
  misc_feature 1..804: note = AAV40839 variant
  source 1..804: mol_type = other RNA
atgagattaacagtactatgtgcagtatgcctattaccaggatcattagcattaccattaccacaagaagcaggaggaatgtcagaactacaatgggaacaagcacaagactacctaaaaagattctacctatatgactcagaaacaaaaaacgcaaactcactagaagcaaaactaaaagaaatgcaaaaatttttcggattaccaataacaggtatgttaaatagcagagttatagaaataatgcaaaaaccaagatgcggagtaccagacgtagccgaatactcattatttccaaactcaccaaaatggacaagtaaagttgtaacatacagaatagtatcatacacacgagacttaccacacataacagtagacagactagtatcaaaagcattaaacatgtggggaaaagaaataccattacactttagaaaagtcgtctggggaacagcagacataatgatcggattcgcaagaggcgcacacggagactcatatcccttcgacggaccaggaaacacactagcacacgcatttgcaccaggaacaggattaggaggagacgcccatttcgacgaagacgaaagatggacagacggatcaagtctaggaataaatttcttatacgcagcaacacatgaattaggacacagtctaggaatgggacactcaagtgacccaaacgcagtaatgtacccaacatacggaaacggagatccacaaaatttcaaactcagtcaagacgacataaaaggaatacaaaaactatacggaaaaagatcaaacagccgaaaaaaataa

SEQ ID NO: 3876 - RNA, 3768 nt, synthetic construct
  misc_feature 1..3768: note = J05582.1 variant
  source 1..3768: mol_type = other RNA
atgacccctggaactcaatctccgtttttcttacttctactactaacagtcctcactgtggttactggctcaggacacgcaagctccactccaggcggagaaaaagaaacatcagccacacaacgaagttccgtaccatcatcaacagagaaaaatgcagtgagtatgacatcttctgtattaagctcacattcacccggtagtggcagctctactacacaaggtcaagatgttactttagcaccagcgaccgaacccgccagcggtagcgcagcaacatggggtcaagatgttaccagtgttcccgttacacgtcccgccttaggctcaaccaccccaccagctcacgatgtaacctcagcacccgataataaaccagctccagggagtactgcaccacccgcacatggagtaacatctgcacccgatacgagacccgcaccaggatccaccgctcctcctgctcacggagttacttctgcccctgatacaagaccagctccaggaagcacagcaccacccgcacacggtgtaacatccgcaccagacacccgcccagccccaggttcaaccgcaccccctgctcatggagtcacaagtgccccagacacaagaccagctccaggctctacggctcctcctgcccacggagttacctcagcgccagatacccgacctgctcctggtagcaccgcccctccagctcatggagttacatctgcaccagatactagaccggcacctggttcaacggcaccccctgcacatggcgtaacatccgcaccagataccagacctgctcctggatcaacagctccccctgcacacggagtcacatcggcccctgacacgagaccagcacctggatctacagcccctccagcacatggagttacttccgctcctgacacaagaccagcaccaggcagtaccgcgccgccagcgcatggtgttacatcagctcccgatacacgacccgcaccaggctctacagcaccacccgcacacggtgtaacctcagctcctgatacgagaccagctcccggaagtactgcgccacccgctcacggggtaacatcagcccctgacacaagaccagctccaggatctactgcaccccctgctcatggagtaacttcagctccagataccagacccgcacctggctcaaccgcaccccctgcacacggtgtcacatctgcccctgacactagacctgctccaggaagcacagcaccaccagctcacggtgtaacatcagctccagatactcgacctgcacctggaagtacagcacctcctgcccacggcgtaacttcagcacctgatactcgacccgcgcccggtagtaccgcaccccctgcccacggcgtgacttccgcacccgatactcgacctgcacctggctctacagccccaccagcgcatggagtaacctctgctcccgatactcgccctgctccaggttctacagccccacccgctcacggagttacatctgcaccagatactcgacccgcccctggatcaacagccccacccgcccatggtgtcacaagtgcaccagatacgcgtcctgcaccaggatcaaccgcaccgcctgcacacggtgtaacaagcgcacctgacactagacctgcacctggatcaacagctccgccggctcatggagttacatctgcacctgatactcgccctgctcccggctccacagcacctccagcccatggagtcacttccgctcctgatacaagaccagcaccaggatcaactgcacctccagcccatggtgtaaccagcgcaccagacaccagacccgcacctggatcaaccgcacctcccgctcatggagtaacctccgctcctgatacaaggcccgctccaggaagtacagctcctccagctcatggagtaacaagcgcacccgatactagaccagctcccggctccactgcccctccagctcacggcgtaacaagcgctcctgacactaggcctgcacccggctcaaccgctccgccagcgcacggtgttacttctgccccagatacccgaccagcacctggtagcacggcccctccagctcatggtgtaacatcagcccccgataccagaccagcacccggatccaccgcccctccagcgcacggagtcacatcagctccagatacacgccctgcaccaggttctacagcaccacccgcacatggtgtcacatcagctccagacacccgtcctgctcctggctctactgcaccaccagctcacggcgtcacaagcgcacctgacacacgacctgctccaggctccactgctcccccagcacacggagtaacatctgcgcctgacactagacccgcccccggttcaacagcacctccagcacacggggtcacatcagcacccgacaccagaccagcaccaggtagtacagcacctcccgctcatggagtaacttcagcacctgatactagacccgctccaggctccacagcacctccagcccatggcgtaacctctgctcccgatactagaccagcaccaggctctaccgcacctccagcgcacggcgttacttcagcaccagatacaagaccagcacctggatctacagcaccacccgctcacggtgtaacatcagcacctgacacacgacctgcacctggttccactgcaccaccagcccacggtgtaacatcagcaccagacacaaggcctgcaccgggttctacagcacctcccgcacacggagtaacaagcgcaccagacacaagaccggcacctggatctaccgcacctccagcacatggagtaacttcagccccagataatagacccgcactaggttccactgcaccacccgtacataatgttacaagcgcaagcggaagtgcatcaggtagtgcttcgactttagtacataatggcaccagtgcacgcgcaactaccacaccagcctccaaatcaacaccattttccataccttcccaccattctgatactccaaccacacttgcatcccattcgactaaaacagatgcttcttctactcaccatagttccgttccacctcttacatcgtcaaatcactccaccagtccccaactttcgactggtgtttctttcttctttttatcctttcacatttcaaatttacaatttaactcaagtcttgaagatccttccacagactattaccaagaacttcaacgagatatatccgaaatgtttcttcaaatttataaacagggaggatttcttggactatctaatataaaatttcgtcctggctcagttgttgtccagttaactttagcttttcgagaaggaactataaacgttcacgatgttgaaacccaattcaatcagtataaaaccgaagcagcttctcgctataacttaaccatatcagacgtatctgtttcagacgtaccatttcctttctccgcacagtctggtgccggagttccaggctggggaattgctctattagtactcgtctgtgttctcgttgctctagcaattgtatatttaattgcactagcagtttgtcaatgtagaaggaaaaactacggtcaactagatatcttccctgctcgagatacctatcacccaatgtcagaatatcccacttaccacactcacggaagatatgtacctccgtcttctaccgaccgctctccatatgaaaaggtatccgccggaaacggaggatcatctttaagttacacaaatcctgctgtagctgctgcatctgcaaatctgtaa

SEQ ID NO: 3877 - RNA, 2136 nt, synthetic construct
  misc_feature 1..2136: note = NM_032853 variant
  source 1..2136: mol_type = other RNA
atgatggcagatgcaaaatatgtactctgtcgatgggaaaaacgattatggccagccaaagtactcgccagaacagcaacatcaactaaaaataaacgtcgaaaagaatactttttagcagtccaaatactaagccttgaggagaaaataaaagtaaaatcaaccgaagtagaaatattagaaaaatcacaaatagaagccattgcaagcagccttgcaagccaaaatgaagttccagcagcacccttggaagaattagcatatagaagatctctaagagttgctctagatgtattatcagaaggatcaatctggagccaagaatcatcggcaggtacaggtagagcagacagaagtttaagaggaaaacctatggaacacgtcagttccccttgcgattcaaatagtagcagtctaccgagaggtgatgttttaggtagttcacgaccacacagaagacgaccttgcgtacaacaaagcctatcttcgtcttttacttgcgaaaaagatccagaatgtaaagtagatcacaagaaaggacttagaaaatcagaaaatcctaggggaccattagtattaccagccggtggtggggcacaagacgaaagtgggtcaagaatccaccacaaaaactggactttagcatcaaaacgaggaggaaattcagcacaaaaagcatctctatgtctaaatggttcgtcattaagtgaagatgatactgaacgagacatgggatcaaaaggcggatcctgggcagcaccaagcctaccttcaggagtaagagaagatgatccatgcgcaaacgctgaaggacatgacccaggactaccattaggatcattaactgccccaccggcacctgaaccatcagcatgtagtgaaccaggcgaatgtccagcaaagaaaagacccaggttagatggatcccaaagaccacccgcagtacaattagaaccaatggcagcaggagccgcacctagtccagggccaggtccaggaccaagggaaagcgtcactccacgatcaacggcaagactaggaccacccccatcgcacgcgtctgcagatgcaaccagatgcttaccctgccccgactctcaaaaattggaaaaagaatgccaatcttcagaagagtctatgggtagtaattcaatgagatcaatattggaagaagatgaagaagatgaagaaccaccacgtgtactactatatcacgaaccaaggtcctttgaagttggcatgctagtatggcataaacataagaaatatcctttttggcccgctgtagtaaaatcagttcgacaaagagacaagaaagcatcagtattatatatagaaggacatatgaatccaaaaatgaaaggattcacagttagtttaaaatctttaaaacattttgactgtaaagaaaaacaaacactgttaaatcaagcacgagaagatttcaatcaagacataggatggtgcgttagcttaataactgactatagagtaagattaggctgtggatcatttgctggatcttttcttgaatattatgctgccgatataagctatccagtaaggaaatcaattcaacaagacgttttaggaacaaaattaccacaattaagtaaaggaagtcccgaggaaccagtagtaggttgtcctctaggtcaaagacagccatgtcgaaaaatgttacccgaccgcagtagagcagccagagacagagcaaatcaaaaattagtagaatatatagttaaagcaaaaggcgcagaatcacatttaagagcgatattgaaatctagaaaaccgagtagatggttacaaacattcttaagttcaagccaatacgtaacatgtgtagaaacttatctagaagacgaaggtcaactagatctagtggtaaaatacctacagggagtttatcaagaggttggcgcaaaagtattacaaagaacaaatggcgacagaatacgtttcatattagatgttttattgccggaagcaataatatgcgcaataagcgcagtcgatgaagttgattataaaactgctgaagaaaaatatattaaaggacccagcttatcatacagagaaaaagaaatattcgataatcaactccttgaagaacgaaacagaagaagacgatga

SEQ ID NO: 3878 - RNA, 438 nt, synthetic construct
  misc_feature 1..438: note = AAD44697 variant
  source 1..438: mol_type = other RNA
atgacagtacacaacctatacctattcgacagaaacggagtatgcctacactactcagaatggcacagaaaaaaacaagcaggaataccaaaagaagaagaatacaaactaatgtacggaatgctattctcaataagatcattcgtctcaaaaatgtcaccattagacatgaaagacggattcctagcattccaaacatcaagatacaaattacactactacgaaacaccaacaggaataaaagtagtaatgaacacagacctaggagtaggaccaataagagacgtactacaccacatatactcagcattatacgtagaactagtagtaaaaaacccactatgcccactaggacaaacagtacaatcagaactattcagatcaagactagactcatacgtaagatcattaccattcttctcagcaagagcaggataa

SEQ ID NO: 3879 - RNA, 1395 nt, synthetic construct
  misc_feature 1..1395: note = AAH02712 variant
  source 1..1395: mol_type = other RNA
atgcccagttgttcaacatcaaccatgccaggaatgatatgtaaaaaccccgatctagaatttgacagtttacaaccctgtttttacccagacgaagacgatttctatttcggaggtcctgatagtacaccacctggagaagacatatggaaaaagtttgaattattaccaacaccaccattaagtccaagcagaggatttgcagaacatagctcagaacctccatcatgggtaacagaaatgctattggaaaatgaactatggggtagccctgcagaagaagatgcatttgggttgggcggactaggaggacttacaccaaatccagtcatactacaagactgtatgtggagcggatttagtgctagagaaaaattagaaagagcagtgagcgaaaaattacaacatggacgaggaccaccaacagcaggtagtactgcacaaagtcctggagcaggagcagcatcaccagcaggaaggggacatggaggagcagcaggagcaggaagagcaggtgcagcattacctgcagaattagcccatcctgcagccgaatgtgttgatcccgcagtagtatttccattccctgtaaacaaaagagaaccagcaccagtaccagctgcaccagcaagcgcccctgcagccggaccagccgtagcatcaggcgcaggaatagcggcaccagcaggtgcacctggtgtggcaccaccaagaccaggaggaagacaaacatcaggaggagatcataaagcattaagtacaagtggagaagataccttaagtgatagtgacgatgaagatgacgaagaagaagatgaagaagaagaaatagacgtagttacagtagagaaacgaagaagttcaagtaataccaaagcagtaacaacatttactataacagtaagaccaaaaaatgcagccttaggacctgggagagcacaatctagtgaattaatacttaaaagatgcttaccaatacatcaacaacataattatgctgctccaagtccatatgtagaaagcgaagacgcaccgccacaaaaaaaaataaaatctgaagcatcaccacgaccattaaaatccgtaataccaccaaaagctaaaagcttatcaccaagaaactcagatagtgaagattcagaaagaagaagaaatcataatatactcgaaagacaaagaaggaatgatctaagatcttcatttttaacattaagggatcatgtacctgaactagtaaaaaacgaaaaagcagcaaaagttgtaatattaaaaaaagcaacagaatatgtacactcattacaagcagaagaacaccaattattactagaaaaagaaaaactccaagcaagacaacaacaattattaaaaaaaatagaacatgctcgaacatgctaa

SEQ ID NO: 3880 - RNA, 3132 nt, synthetic construct
  misc_feature 1..3132: note = AAC78645 variant
  source 1..3132: mol_type = other RNA
atgccactactggaaggatcagttggagtagaagatctagtccttctcgagccgttagtcgaagaatcattattaaaaaacctacaacttcgatatgaaaataaagaaatatacacctacattggaaatgtagtaatatcagtaaatccataccagcaacttccaatttacggcccagaatttatagcaaaatatcaagattatacattttacgaattaaaacctcatatatatgctttagcaaatgtggcctatcaaagcttacgagacagggatcgtgatcaatgtatcttaattacaggagagtcaggaagtggaaaaactgaagcatcaaaattagtaatgtcttatgtagcagcagtatgtggaaaaggagaacaagtaaattcggtaaaagaacaactccttcaatcaaacccggtactagaagcattcggaaatgcaaaaacaatacgtaacaacaattcgtccagattcggtaaatacatggatatagaattcgattttaaaggatcaccactaggaggtgtaatcaccaactatttattagaaaaatcaagacttgtaaaacaactgaaaggcgaaaggaattttcacatcttttatcaactattagcaggagcggacgaacagttattaaaagcactcaaacttgaacgcgacacaacaggatatgcttacttaaatcatgaggtaagccgagtagacggaatggacgatgcaagctcctttcgagcagtgcaatcggcaatggccgttataggattctcagaagaagaaataagacaagtcctagaggtaacatccatggtattaaaacttgggaatgtacttgtagcggacgagttccaagcaagcggaataccagcctccggtatacgcgacggacgcggagtaagagaaattggagaaatggtgggacttaatagtgaagaggtggaaagggcactatgttcaagaacaatggaaacagcaaaggaaaaagtcgtaactgcattaaatgtaatgcaggcacaatatgcgcgagatgcattagcaaaaaatatctactcacgactattcgattggatagtcaatagaattaatgaatctatcaaagttggaattggagaaaaaaaaaaagtaatgggagttttagatatctatggtttcgaaatattagaagataatagcttcgaacaattcgttataaactactgtaacgaaaaactacaacaggtcttcattgaaatgaccctgaaagaagaacaagaagaatataaaagagaaggaataccatggactaaagtggattatttcgataacggaatcatatgtaaattaatcgaacacaatcagagagggatacttgcaatgctagacgaagaatgcttaagacccggggtagtatcagactcaacatttttagcaaaattaaaccaattattttcaaaacacggccattatgaatcgaaagtaacccaaaacgcacaaagacaatatgatcataccatgggattatcatgtttcagaatatgtcactatgccgggaaagtgacatacaatgttacttcattcatagataaaaataatgatttactattccgagaccttttgcaagcaatgtggaaagcacaacatccactattaagatccctattccctgaaggaaatccaaaacaagcaagtctaaaacgaccaccaacagcaggagcacaatttaagtcttctgtagccatattaatgaaaaatctatactccaaaagcccaaactacattagatgtattaaaccaaacgaacaccaacaaagaggacagtttagttcagatctggtcgcgacccaagctagatatttgggattactagaaaatgttagagtaagaagagctggatacgcacatagacaagggtacggaccattcttagaacggtacagattgctatcccgatcaacatggccacattggaacgggggcgatcgagaaggagtagagaaagtcctaggggaattaagcatgtctagcggtgaactagcgttcggaaaaacaaaaatattcatcagaagtccaaaaacactattctacctagaagagcaaagaagattaaggctgcaacaacttgctacacttattcagaaaatatatcgaggttggagatgcagaacacactaccaacttatgagaaaaagtcaaatattgatatcaagttggtttcgcggcaatatgcaaaaaaaatgctatggaaaaattaaagccagtgtactactaatacaagcattcgtaaggggttggaaggcaagaaaaaattaccgaaaatacttccgctcagaagccgcactcactttagcagattttatatataaatcaatggtacaaaaatttcttcttggattaaaaaacaacttgcccagcacaaatgtacttgacaaaacctggccagctgcaccatataaatgcctatcaacagctaaccaagaactgcaacaactattctaccaatggaaatgtaagcgattcagagatcaattatctcctaaacaagtagaaatattgagggaaaaattatgtgctagcgaattgtttaaaggaaaaaaagcatcatacccgcaatcggtgccgatacctttctgcggagattacattggactacaaggaaacccaaaattacaaaaacttaaaggaggagaagagggtccagtacttatggcagaagcggtcaaaaaagtaaacagaggcaacggaaaaacttcatcaagaatacttctactaacaaaaggccacgtaattttaaccgacacaaaaaaaagtcaagcaaaaattgtaataggactcgataacgtagcgggtgtaagcgttacatcattaaaagatggactattttcattacatctatcagaaatgagcagcgtaggctcgaaaggtgattttctgctggtatcagaacacgttatagaacttttaacaaaaatgtacagggcggtgcttgatgcaacacaaagacaactaactgtcacagtgacagaaaaattttcagttcggttcaaagaaaattcagtagcagtaaaagtagtacaaggccctgccggtggagataattcaaaactaaggtacaaaaaaaaaggaagccactgtttagaagtaacagttcaataa

SEQ ID NO: 3881 - RNA, 3411 nt, synthetic construct
  misc_feature 1..3411: note = AAH53558 variant
  source 1..3411: mol_type = other RNA
atggctaaaatggaagttaaaacttcactgttagataacatgattggagtaggcgatatggtacttctagaacctttaaatgaagagacatttatcaataatctcaagaaaagatttgatcattcagaaatttacacttacataggatcagtagtaatttcagtcaacccataccgcagtcttcctatctactctccagaaaaagtagaagaatacagaaatagaaatttttacgaattatcaccacatatattcgcactttcagatgaagcctatagatctctcagagaccaagataaagaccaatgtatactcataacaggagaaagcggcgctggaaaaaccgaggcttcaaagctagtcatgtcatatgtggcagccgtatgtgggaaaggcgcggaagtcaaccaagtgaaagaacaattattacaatcaaatcctgtactagaagcctttggtaatgcaaaaacagtacgaaacgataattcatcacgatttgggaaatatatggatatagaatttgactttaaaggagatccactaggcggtgtaatttcaaattacttattagaaaaatcacgagtcgtaaaacaaccacgaggagaacggaactttcatgtattctatcaactacttagcggagcgtcagaagaactactaaacaaactaaaactagaacgtgatttttcaagatataattacctatcactagactccgcaaaagtcaacggagtcgacgatgcagcaaatttccgaacagtccgtaatgcaatgcaaatagtagggtttatggaccatgaagcagaaagtgtattagcagtggttgctgctgtcctcaaactaggaaatattgaatttaaaccagaaagtcgagtaaacggactagacgaatctaaaataaaagataaaaacgaattaaaagaaatatgcgaattaacaggcatcgaccaatcagtactagaaagagccttcagtttcagaacagtggaagcaaaacaagaaaaagtatctactacattaaatgtagcccaagcgtactacgcaagagacgccctcgcgaaaaacttatacagtagactattttcatggttggtaaacagaatcaacgaaagcattaaagcacaaaccaaagtacgcaagaaagtcatgggagtattagatatctacggcttcgaaatattcgaggataactcatttgaacaatttattataaactactgtaatgaaaaactacaacaaatatttatagaattaactctaaaagaagaacaagaggaatacatacgagaagatatagaatggactcatatagattattttaacaacgcaataatttgcgacctgatagaaaataacacaaacggtatattagcaatgttagacgaagaatgcctcagaccaggaaccgttaccgatgaaacattcttagagaaattaaatcaagtatgtgcaacacatcaacacttcgaatcacgaatgagtaaatgtagcagatttctcaatgatacatcattaccgcattcgtgtttcagaatccaacattatgcaggaaaagttctataccaagtagaaggattcgtcgacaaaaacaacgacctattatacagagatctatcacaagcaatgtggaaagccagtcatgccctaataaaatcactatttcccgaaggaaatcctgcgaaaattaacttaaaacgaccacccacagctggaagtcaatttaaagcatcagtagccacattaatgaaaaacttacaaacgaaaaatccaaactatataagatgtatcaaaccaaatgacaagaaagctgcacatatattcaacgaagcattagtctgccaccaaattagatatctaggtcttctcgaaaatgtaagagttcgcagagctggttatgcatttagacaagcatacgaaccatgtctagaacgatacaaaatgctctgtaaacaaacttggccgcattggaaaggtccagcgagatcaggagtagaagttcttttcaatgaattagaaatccccgtagaagaatattcatttggcagatccaaaatattcatacgaaatccaagaacattattcaaattagaagatctaaggaaacaaagattagaagatttggcaactttgatacagaaaatatacagagggtggaaatgccgtacacatttcctcctcatgaagaaatcacaaattgtaatcgctgcatggtataggcgatatgcccaacaaaaacgataccaacaaactaaatcaagcgcattagtaatacaaagctatatcagaggttggaaagcaagaaaaatattaagagaattaaaacaccagaaaagatgtaaagaagcagtaacgaccattgccgcatactggcatggaacacaagccagacgtgaacttagaagattaaaagaagaagcaagaaataaacacgccatcgccgtgatatgggcatactggctgggcagtaaagcgcgacgagaactaaaaagactaaaagaagaagccagaagaaaacatgccgtagcagtaatatgggcctattggctaggactaaaagtaagaagagaatatcgaaaattctttagagcaaacgctggaaagaagatatacgagtttactcttcaaagaatcgttcaaaaatacttcttagaaatgaaaaataaaatgccatccctatcacccatcgataaaaattggccttcccgaccatatttgttcttagactcaacccacaaagaactaaagcgtatttttcatctatggagatgcaagaaataccgcgatcaatttacagatcaacaaaaactaatatatgaagaaaaactagaagcgtcagaactcttcaaagacaaaaaggctttatacccaagcagcgttggacaaccattccaaggtgcatatctagaaatcaacaaaaacccaaaatataagaaactcaaagacgcgatcgaagagaaaataataatagccgaagtagtaaacaaaataaaccgcgcaaatggtaaatcaacaagccgtatctttcttttaacaaataacaacctattattagcagatcagaaaagtggtcaaataaaaagtgaagtacccctagtagacgtcacgaaagtaagcatgagttcacaaaacgacggattcttcgctgtgcacctcaaagagggaagtgaagcagcttcaaaaggagactttttattctcatcagatcatttaatagagatggcaactaaactttatcgaacaacattaagtcaaaccaaacaaaaattaaatatcgaaatcagcgatgagttcttagtccaatttcggcaagataaagtatgcgtcaaattcattcaaggaaaccagaaaaacggaagtgtcccaacatgtaaaagaaagaataatcgactacttgaagtagccgtaccctga

SEQ ID NO: 3882 - RNA, 3192 nt, synthetic construct
  misc_feature 1..3192: note = CCDS42226.1 variant
  source 1..3192: mol_type = other RNA
atggctttacaagtcgaattagtaccaacaggagaaataattagagtagtacaccctcacagaccttgcaaactagcacttgggtcagatggtgtacgtgtaacaatggaatccgcactaacggcaagagatcgcgtaggtgtacaagattttgtacttctagagaactttacttctgaagcagcctttatcgaaaatctccgacggcgatttagagaaaatttaatctatacatacataggaccagttttagtaagcgtcaatccataccgcgatctccaaatatattcaagacaacatatggaaaggtatcgaggggtatctttttatgaagtacccccacatctatttgcagtagctgataccgtatatcgcgcactacgcactgaacgaagagaccaagcagttatgatttcaggagaaagtggtgcggggaaaactgaagcaacaaaaaggctattacaattttatgcagaaacatgtcctgctcctgaacgaggcggcgcagtccgtgaccgccttctccaatcaaaccctgtattagaagcctttggcaatgcaaaaactctaagaaatgataatagttcaagatttggaaaatatatggacgtccagtttgattttaagggtgcaccagtaggagggcacatcttatcttatctccttgaaaaatctagagtagtacatcaaaaccatggtgaaagaaatttccatatattttatcaacttctagaagggggcgaagaagagacattaagaagactaggattagaacgtaacccacaatcctatctgtatctagtaaaaggacaatgtgccaaagtttctagtattaatgacaaatcagattggaaagtagttcgcaaagccctaacagtaattgacttcacagaagatgaagtagaagatttactatctatcgtagctagcgtactacatttaggaaacatccactttgcagcaaatgaagagagtaacgcacaagtaactacagagaatcaactaaaatatctaactagattactcagcgttgagggatcaacactaagagaagctctcacccacagaaaaataattgcaaaaggagaagagttattatcaccattaaatctcgaacaagcagcatacgcacgcgacgcattagcgaaagccgtatatagccgaacatttacatggttggtaggcaaaattaatagaagtctcgcctcaaaagatgtagaaagcccctcatggagatcaactacagtattaggactattagacatctacggattcgaagtatttcaacataactcattcgagcagttctgtatcaattattgtaatgaaaaattacaacaactttttattgaactaacattgaaatcagaacaagaagaatatgaggcagaagggatagcatgggaaccagtgcaatatttcaacaataaaataatatgcgatctagtagaagaaaaattcaagggtattatatcaatactagacgaagaatgtctacgcccgggcgaagcaaccgatctaacatttttagaaaaattagaagacactgtcaaacatcatccacatttcttaacacacaaacttgcagaccaacgcacaagaaaatctttaggacgcggagaatttaggttactacattatgcaggagaagtaacttactcagttaccggatttttggataaaaataatgatctcctattcagaaacttaaaagaaacaatgtgctccagtaaaaacccaataatgagccaatgttttgatagatcagaactgagcgataagaaacggccggaaaccgtggcaacacaatttaaaatgtctttgctccaattagtagaaatattacagagcaaagaacctgcatatgttagatgtataaaacctaatgacgcaaaacaaccaggtcgattcgatgaagtattaataaggcatcaagtaaaatatttagggctactagaaaatctacgcgttaggagagcaggattcgcatatagacgaaaatacgaggctttcctgcaacgatacaaatcattatgtccagaaacatggccaacatgggcgggtagaccacaagatggggtagcagtgctcgtgagacacttaggatacaaaccagaagaatacaaaatgggacggacgaagatttttatccgttttccaaaaacattatttgccacagaagacgcattagaagtacgtcgacaaagtttagctacaaaaatacaagcggcatggagaggattccactggagacagaaattcttaagagttaaaagatctgctatatgtattcaatcttggtggcgaggtacactcggaagaagaaaagcagctaaaaggaagtgggccgctcaaacaattagacgactaattagagggtttgtattaaggcatgctccaagatgtcctgaaaacgcattctttctagatcacgttcgcactagctttctactaaacctacgaagacaactaccgcaaaacgtcctagatacatcatggcctacacccccaccggccctaagggaagccagtgaattgctaagagagctgtgtatcaaaaatatggtatggaagtattgtagaagtatatccccagaatggaaacaacaattacaacagaaagctgtagcgtcagaaatttttaaaggtaagaaagataactatccccaaagtgttccaagactgttcataagcacaagattaggaacagacgaaatatctccgcgtgttctacaagcactcggaagcgaacctatacaatatgctgtaccagttgtaaaatacgacagaaaaggatataaacctcgttcacgacaactattattaacgcccaacgctgtcgtaatagtcgaagatgcaaaagtaaaacaaaggatcgattatgccaacctcactggcatctcagtgagctcactttcagattcgctttttgtacttcatgttcaaagggccgacaataaacaaaaaggagacgttgtattacaaagtgaccatgtcattgaaactctgactaaaacagcactttctgcaaatagagtcaatagtataaatatcaatcaaggctcaataacattcgcaggcggtcctggtagagacggcacaatcgattttacacccggatcggaattattaataacaaaagccaaaaacggtcacttagcagttgtagcacccagactaaactcacgataa

SEQ ID NO: 3883 - RNA, 3021 nt, synthetic construct
  misc_feature 1..3021: note = AAI46764 variant
  source 1..3021: mol_type = other RNA
atggctgaacaagaatcgttagagttcggtaaagcagacttcgtattaatggacacagtgtcaatgcccgaatttatggcaaacctcagactcagattcgaaaaaggaaggatctacacattcataggcgaagttgttgtatccgtaaacccttacaaactactgaacatttatggaagagatacaattgaacaatataagggcagagaattatacgaaagaccaccccacctatttgccatagcagatgcagcatataaagcaatgaaaagacgaagcaaagacacttgcatcgttatatcaggcgaatcgggagcaggaaaaacagaagctagtaaatacataatgcaatatatagcagctataacaaacccaagtcagagagcagaagtagaacgagttaaaaatatgcttctaaaatcgaactgtgtattagaagcattcggtaatgcaaaaaccaatagaaatgacaactcatcaagattcggaaaatacatggacatcaacttcgattttaaaggtgacccaatcggaggtcacattaataactacctcctagaaaaatcaagagtaatcgtacaacaacccggagaacgatctttccattccttctaccaactactacaaggaggctctgaacaaatgttaagaagtctacacctacaaaaatcattatcatcatacaactatatacatgtaggagcacaattaaaatcatcaattaatgacgcagcagagttccgagtcgtagcagatgcaatgaaagtgataggttttaaaccagaagaaatccaaactgtctacaaaatcctagcagcaatcctacatctaggcaatttaaaattcgtagtcgatggtgatacccccttaattgaaaatggcaaagttgtctcaataatagcagaactgctttctacaaaaacagatatggtcgaaaaggctttactttacagaacagtcgcaacagggagagacattattgataaacagcacacagaacaagaagccagttatggacgagatgcatttgctaaagcaatatacgagagactattctgctggatagtaacgcgaattaacgatattattgaagttaaaaattacgataccacaatacacggcaaaaatacagtaataggtgtacttgatatatacggatttgaaatattcgacaacaattcatttgaacaattttgtataaactactgcaatgaaaaactacaacaactatttatacaacttgtactaaaacaagaacaagaagaatatcaaagagaaggaataccgtggaaacatatagattactttaacaatcaaattatagtcgatttagtagaacaacaacataaaggaataattgccatattagatgacgcatgtatgaatgtagggaaagtaacagatgagatgtttctagaagcattaaacagcaaattaggcaaacacgcacattttagcagccgaaagctatgtgcatccgataaaatcctcgaatttgatcgagatttccgaatacggcactatgctggcgacgtcgtgtattcagttataggatttatagacaaaaacaaagatacactgtttcaagactttaaaagactaatgtacaattctagcaacccagtacttaagaatatgtggcctgaaggtaaactatcaataacagaagtaacaaaaaggccactaacagctgctacattgtttaaaaattcaatgatagccctcgtggacaacttagcatcgaaagaaccatactatgtcagatgtattaaaccaaatgacaaaaagtcacctcaaatcttcgacgatgaacgatgcagacatcaagtagaatacctaggactactagagaacgttcgtgttcgtagagctggtttcgccttcagacaaacctacgaaaaattcctccacagatataaaatgatatcagaatttacatggcccaatcacgatttaccaagcgacaaagaagccgtaaagaaactaatagaaagatgtggcttccaggatgatgttgcatatggaaaaacaaaaattttcatacgaacgccaagaacattattcacattagaagaattaagggcacaaatgttgatacgaatagtactctttctacaaaaagtttggcgaggcacattagcacgaatgagatacaaaagaacgaaagcagcactaaccataatacgttattatcgaagatacaaagtcaaatcctacatccatgaagtcgcacgacgcttccatggagtgaaaacaatgagagactatggcaaacacgttaaatggcctagcccaccaaaagtccttcgccgatttgaagaagcattacaaacaatttttaatcgttggcgagcaagccagctaataaaatcaataccagcatctgacctcccacaagtacgagcgaaagtcgcagcagtagaaatgttaaaaggccaaagagcagaccttggcctacaaagagcctgggagggcaattacctcgcatccaagcctgacactccacaaacatctggtacattcgttcctgtagcaaacgaactaaaacgcaaagataaatacatgaacgtattgtttagctgccacgtcagaaaggtaaaccgattctctaaagtagaagatagagccatctttgtaacggatagacacttatataaaatggacccaacgaagcaatacaaagtaatgaaaacaataccattatataacttaacaggtttatcagtatcaaacggcaaagatcaactcgttgtatttcatactaaagataacaaggacttaatagtatgtttattcagcaaacaacctacacatgaatcacgaatcggagaattagtaggagttctagttaatcatttcaaatccgaaaaacgacacctacaagtcaacgtaactaatccagtgcaatgctcattacatggaaagaaatgtacagttagtgttgaaacaagacttaaccaacctcaacctgacttcacgaaaaacagatcaggattcattctaagtgtacccggaaactaa

SEQ ID NO: 3884 - RNA, 3327 nt, synthetic construct
  misc_feature 1..3327: note = CCDS32254.1 variant
  source 1..3327: mol_type = other RNA
atgggatccaaaggcgtatatcaataccactggcaatcccacaacgtaaaacatagtggggtcgacgacatggtactcctctcgaaaatcacagaaaactccatagtagaaaatctaaagaaaagatacatggacgattatatcttcacatacataggttcagttctaatttcagtcaacccatttaaacaaatgccgtattttggagaaaaagaaatagaaatgtaccaaggagcagcacaatacgaaaacccacctcacatatacgctttagcagacaacatgtacaggaatatgataatcgacagagaaaaccaatgcgtcataatatccggtgaatcaggagcaggtaaaacagttgcagcaaaatatatcatgagttatatctcacgagtatcaggagggggaacaaaagtacaacacgtaaaagatataatactacagtcaaatcctttattagaagcctttggtaatgcaaaaaccgtcagaaacaataattcctcaaggtttggcaaatattttgaaattcaattcagcccaggcggtgaaccagatggcggcaaaatttctaactttttgttagagaaaagccgagtagtaatgagaaatccaggagaaagatcttttcacatattttaccaattaatcgaaggagcctcagctgaacaaaaacatagcctaggaataactagcatggattattattactatttaagcctaagtggaagttataaagtagatgacatcgatgacagacgagaatttcaagaaactcttcatgctatgaacgtaattggaatttttgccgaagaacaaactcttgtattacaaatagttgcaggaatacttcatttaggaaacattagctttaaagaagtaggaaattatgcagcggtcgaaagtgaagaatttctagcatttccagcatacctattaggcataaaccaggatagactcaaagaaaagctcacgtccaggcaaatggactccaaatggggaggaaaatcggaatccatacatgtaacacttaatgttgaacaagcatgctacacaagagacgctttagcaaaagccctacatgcacgagtattcgatttcctagtcgactcaataaataaagcaatggaaaaagatcacgaagaatataacatcggtgtattagacatctatggatttgaaatatttcagaaaaatggatttgaacaattttgtataaattttgtaaacgaaaagctgcaacaaatattcatagaattaacacttaaagccgaacaagaagaatatgtacaagaagggattcgatggacacccatcgaatactttaataacaaaattgtttgcgatcttatagagaacaaagtaaatccacccggaataatgtcaatactggacgacgtatgcgcaacaatgcatgcagtaggagaaggagcagaccaaactttactccaaaaattacaaatgcaaataggatcacatgaacatttcaattcatggaaccaaggattcattatacaccattatgcaggaaaagtatcatatgacatggacggtttctgtgaaagaaatcgcgatgtcctgttcatggacctaatagaattaatgcaatcatcagaacttccattcataaaaagtttgttccctgaaaacctacaagcagacaagaaaggaagacctacaaccgcaggaagcaaaataaagaaacaagcgaacgacctagtatccactctaatgaaatgcactccacactatatccgctgtataaaacctaacgaaaccaagaaaccacgagattgggaagagagcagagttaaacaccaagtagaatacctgggcctaaaagaaaatatcagagtacgacgtgcaggatatgcgtacaggcgcatattccaaaaatttctacaacgatatgcaattctgaccaaggcaacatggcccagctggcaaggagaagaaaaacaaggagtactacatctattacaatcagtcaacatggacagtgatcaattccaactaggacgctctaaagtctttataaaagcccccgaatccctgtttttacttgaagaaatgcgagaaagaaaatacgacggttatgcaagagtcattcagaaaagctggagaaaattcgtagcaagaaagaaatatgtacaaatgagagaagaagcaagtgatttgcttctaaataagaaagagagacgcaggaactcaataaaccgaaatttcataggagattacataggtatggaagaacatccagagcttcaacaatttgtaggaaaaagagagaaaatagatttcgcagatacagtaactaaatatgatagaagatttaaaggcgtaaaaagagatttactccttaccccaaaatgcttatacctaattggaagagaaaaagtaaaacaagggcctgacaaaggcctagttaaagaagtactcaaacgaaaaatcgaaatagagagaatattaagcgtatcactttctacgatgcaagacgatatctttattctacacgaacaggaatatgatagtcttttggaaagtgtattcaaaacagagttcctatcattattagctaaacgctatgaagagaaaacgcaaaaacagttaccattaaaattctcgaatacactagaattaaaactaaagaaagaaaattggggaccttggtcagcaggaggcagtcgacaagtacaatttcatcaaggtttcggagacctagcagtgttaaaaccatcgaacaaagtattacaagtaagtattggaccaggattaccgaaaaactcacgaccaacaagaaggaatactacacaaaatacaggttattcaagtggaacccaaaacgcaaactacccagttagagctgccccaccaccaccaggatatcaccaaaacggagtaataagaaaccaatacgtaccatatccacatgcccccgggagtcaacgaagtaaccagaaatccctatataccagtatggcacgaccaccactaccaagacaacaatcaacaagtagtgacagagtgtcacaaaccccagaatccttagattttctcaaagtgcccgatcaaggggcagcaggcgtacgcaggcagacgacatcaagaccaccaccagccggtggaagaccaaagccacaaccgaaaccaaaaccccaagtaccacaatgtaaagcgttatacgcatacgacgctcaagataccgatgaattatcttttaatgcaaacgatataatagacataataaaagaagacccatcaggttggtggaccggaaggctacgaggcaaacaaggacttttcccaaacaattatgttacaaagatataa

SEQ ID NO: 3885 - RNA, 3297 nt, synthetic construct
  misc_feature 1..3297: note = AAH28071 variant
  source 1..3297: mol_type = other RNA
atgggcagcaaagaaagatttcattggcaaagccataatgttaaacaatcaggtgttgatgatatggtactactacctcaaataacggaagatgcaattgcagccaacctgagaaaacgatttatggatgattatatatttacatatataggatcagtactaattagcgttaacccgttcaaacaaatgccttatttcacagacagagaaattgatctttaccaaggagcagcacaatacgaaaatccaccacacatctacgcgttgacagacaacatgtatagaaatatgcttatagactgcgaaaatcaatgcgttataattagtggagaatcaggagcagggaaaacggtagcggcaaagtatataatgggatatatatcaaaagtaagtggaggcggagaaaaagtccaacatgtaaaagatataatattacaaagcaaccccctcctagaagcatttggaaatgccaaaactgtaagaaataataactcaagcagattcgggaaatactttgaaatacaatttagccgaggaggtgaaccagatggaggaaaaatttccaactttttactagaaaaatccagagtagtaatgcaaaatgaaaatgaaagaaacttccacatctactaccaactattagaaggtgcatctcaagaacagagacaaaatttaggcttaatgacaccagattactattattatttaaatcaatcagatacctatcaggtagatggaactgacgacagatcagattttggtgaaacactaagtgccatgcaagttataggaatacctccttcaatacaacagctagtcttacaattagtagcaggcatactacatttaggaaacatttctttttgcgaagatggcaattatgctcgagtagaatcagtagacctactagcttttccggcttatttattaggaatcgactcaggcaggctgcaagaaaaattaacaagtagaaaaatggatagtaggtggggcggtcgaagtgaaagtataaatgttactttaaacgtagaacaagctgcatatactcgagacgcactagctaaaggtctatacgcgaggttattcgattttcttgtagaagctatcaacagggctatgcaaaaaccgcaagaagaatactctattggggtcttggatatatacggatttgaaatttttcaaaagaacggatttgaacagttttgtataaatttcgtgaacgaaaaattacaacaaatatttatagaacttactctaaaagcagaacaagaggaatatgttcaagaaggaataagatggaccccaatacaatatttcaacaataaagtggtctgtgatttaatagaaaataaactatctccgccaggcataatgtcagtattagatgacgtttgcgctacaatgcatgcaacaggtggaggcgcggaccaaacattactacaaaaactccaagcagcggtaggaactcatgaacatttcaatagctggtcagcaggttttgtaatacatcactacgcaggaaaagtatcatatgatgtaagcggattctgtgaacgcaatagagatgtcttattttcggacctaatagaattaatgcaaacaagtgaacaagcctttctacgaatgttattccccgaaaaattagatggagataagaaaggcagaccatcaacagcaggctcaaaaatcaagaaacaagccaatgatctagttgcaacactgatgagatgcacaccacactatattagatgtatcaaacccaatgagacaaaacgcccaagagattgggaagaaaacagggttaaacatcaagtagaatatttgggcctcaaagaaaacataagagtacgtagggcaggatttgcttatagacggcaatttgcaaaatttctacaaagatacgcaatattaacaccagaaacttggccaagatggagaggcgacgaaaggcaaggtgtccaacacctattaagagccgtaaatatggaacccgatcagtaccaaatgggatctacaaaagtgttcgtcaaaaacccagagagcttatttctactagaagaagtaagagaaagaaaatttgacggatttgcgagaacaatacaaaaggcttggagaaggcacgtagcagtaagaaaatacgaagaaatgagagaagaggcttcaaacatactcctaaataaaaaggaacgaaggcgaaacagtataaatagaaattttgtaggagattacttaggtctggaagaaagaccagaattgcgacaatttttgggcaaaagagaaagggtagatttcgcagactcagtaactaaatatgatagaaggtttaaacccattaaaagagacttaatactcacaccgaaatgtgtatatgtaataggaagagaaaaagtgaagaaaggacccgaaaaaggacaagtatgcgaagttttgaaaaagaaagtagatatccaagcactaagaggagtatcactgagtacaagacaagatgatttcttcatactacaggaagatgcggcggacagctttttagaatcagtatttaaaacagagttcgtatccttattatgtaaacgatttgaagaagcaacgaggagaccgcttcccctaacattctcggataccctacaattcagggtaaagaaagaaggttggggcggaggtggaactagaagcgtaactttctccagaggttttggtgacttagccgtacttaaagttggaggaagaacgttaacagtatcagtaggtgacggactaccgaaatcaagcaaaccaaccagaaaaggtatggcaaaaggaaaaccccgacggagctctcaagcacctacacgggcggctcctgcgcctccacgaggaatggatagaaacggagtacctccttccgcaagaggcggtccattaccactggaaataatgagtggtggaggtacacatagaccaccgcgaggcccgccatctacatcgctaggcgcatctcgaagacctagagcaagaccacctagtgagcacaatacagagttcttaaatgtacccgaccaaggcatggcagggatgcaaagaaaaagatcagtagggcaaaggccagtacctggagtaggacgacctaaaccacaaccgcgtactcacggcccgagatgtagggccctatatcaatatgtaggtcaagatgtagacgaattgtcattcaatgttaatgaagtcatcgaaatcttaatggaagatccatcaggatggtggaaaggtcgactgcacggccaagaaggattattcccaggcaactatgtggagaaaatttaa

SEQ ID NO: 3886 - RNA, 3057 nt, synthetic construct
  misc_feature 1..3057: note = CCDS34629.1 variant
  source 1..3057: mol_type = other RNA
atggaagacgaagaaggtcctgaatatggaaaacccgattttgttctcttagatcaagtaacaatggaagattttatgcgaaatttgcaattaagatttgaaaaaggacgaatatatacatatattggtgaagttcttgtatcagtgaacccttaccaagaattacccttatacggacctgaagcaattgcaagatatcaaggtagagagctatacgaaagacctccacacttatatgccgttgctaacgctgcatataaagccatgaaacacagaagcagagatacctgcatagttatatccggagaaagtggagcagggaaaacagaagcatccaaacatataatgcaatacatcgcagcagtaacaaacccaagtcaacgagctgaggttgaaagggtaaaagatgtattattaaaatctacctgcgtactagaagcattcggaaacgctagaacaaacagaaatcataattcatcaaggtttggtaagtacatggatataaactttgacttcaaaggagatccaataggaggacatattcacagttaccttttagagaaaagccgggtattaaaacaacacgtcggagaaagaaactttcatgcattttaccaactattacgaggcagtgaagataaacaattacatgaactacaccttgaaagaaatccagcggtctataactttactcaccaaggagcaggactaaacatgacagttcacagcgctctcgattctgacgaacaaagccaccaggcagtcacagaagctatgcgtgttatcggattttcaccagaagaagttgaatcagttcacagaatattagcggcaatactccatcttggaaatatagagttcgttgaaaccgaagaaggaggtttacaaaaagaaggattagctgtagcagaagaagccctagttgatcatgtagcagaattgacagcaacacccagagatcttgtacttcgttcactattagcacgaacagtagcatctggaggtagagaacttatagaaaaaggacatactgcagcagaagcaagctatgcgcgtgatgcatgcgcaaaggctgtatatcaacgtctattcgaatgggttgtaaatagaataaattcagttatggaaccaagagggagagatccccgtagagatggaaaagatacagtaattggggttttagatatctacggtttcgaagtatttcctgtaaattcatttgaacaattttgcattaattattgtaacgaaaaactacaacaactattcatccaactaatattgaaacaagaacaagaagaatacgaacgagaaggcataacttggcaatcagtagaatactttaataatgcaacgattgtagacctagtagaaagaccacacagggggattctagccgtacttgatgaagcgtgctcctccgcaggcaccatcacagacagaatatttttgcaaacattagatatgcatcatcgacaccacttgcattacacaagtcggcaactttgtcctactgataaaacaatggagttcggacgtgattttcgaataaaacactacgcaggggacgtaacatacagcgtagaaggctttatagataaaaacagagattttctctttcaagattttaaaagactactatataattcaacagatcccactctaagggcaatgtggccagatggacaacaagatataaccgaagtgaccaaaagaccattaaccgcagggacactgttcaaaaacagcatggtagcactggtagaaaatttagcatccaaagaaccattctatgtaagatgtattaaaccgaacgaagataaagttgcaggcaaattagatgaaaatcattgtagacatcaagtagcatacctaggactactagaaaacgtaagagttagacgagcaggattcgcatccagacaaccatacagcagatttctgctgagatacaaaatgacgtgtgaatacacatggccaaatcacctcttagggtctgacaaagcagcagtctcagccctcctagagcaacatggattgcaaggtgatgtagcttttggtcatagcaaattatttattagaagcccaagaactctagtcacactagaacaatcaagagcgagactaatacccataattgtattactgctgcaaaaagcatggagaggaactttagctaggtggaggtgtagaaggctacgagccatatatactataatgagatggtttcgacgacataaagttcgagctcacttagccgagttacaacgacggtttcaagccgcacgccaacctccactctatggccgagatttggtctggcctctaccaccagccgttctgcaaccttttcaagatacctgtcacgccctattctgcagatggcgagctagacagctagtcaaaaatataccaccatctgatatgccacaaataaaagctaaagtggctgcaatgggcgcactacaaggattaagacaagattggggatgtcgtcgagcttgggctcgggattatttaagcagtgcaacagataatcccactgcttcatcactttttgcacaacgtctaaagactttacaagataaagatggttttggagcagtcctattttcaagtcatgttagaaaagtaaatagatttcacaaaatacgaaatcgagcgctactgctcacagatcaacacctatataaactagacccagatagacaatacagagttatgagagcagtaccactagaagctgtcaccggactctcagtaacaagtggtggagatcaacttgtagtacttcatgcaagaggtcaagatgacctcgtggtttgtttacatagatcgcgacctccattagataacagagtaggagaacttgtgggagtcctagccgcacactgtcaaggtgaagggagaacattagaagtaagagtaagcgactgcataccactaagccaccggggtgtaagaagactaatatcagttgaaccaagaccagaacaaccagaacctgactttagatgcgcacgcggatctttcacattactatggccttctagataa

SEQ ID NO: 3887 - RNA, 3069 nt, synthetic construct
  misc_feature 1..3069: note = CCDS53826.1 variant
  source 1..3069: mol_type = other RNA
atggaaggagcactaacagcacgagataaagtaggtgttcaagattttgtactattagatgcctatacgagcgaaagtgcatttgttgacaatctaagaaaaagattttctgaaaacttaatctacacctacataggaacactcctcgtatctgttaatccctatcaagaactgggcatatacacagtttcacaaatggaactctatcaaggagttaacttcttcgaattgccaccgcatgtttacgctatagcagataatgcatacaggatgatgtgtgcagaactgaataatcatttcattctcatcagtggggaatctggagcaggcaaaactgaggctagtaagaaaatacttgaatatttcgccgtaacttgcccaatgacacaatccctccaaatagctcgggaccgtctactcttctcaaacccagtgttagaagcatttggaaatgcaagaaccttaagaaacgataatagctcaagattcggtaaatatatggatatacaatttgattttcaaggtattccagtaggaggacacatcatatcttacttaatagaaaaatctcgagtagtataccagaacgaaggagaacgtaactttcacatcttttaccaactactagcaggaggagaagaagaacgactaagttacttagggttagaaagagatccccaattatacaaatacctaagtcagggacactgtgcaaaagagtctagtataagcgataaaaacgactggaaaacagtatcaaacgcgttttcagtaatagattttactgaggcggatctcgaaaacctcttcggtatcatagcatccgtgttacacttaggtaatataggattcgaagaagatgatcagggctgcgcaacaataccagacacacacgaaataaaatggatagcaaaattattaggagtacatccgagcgtactactagaagccctaacacacagaaaaatcgaagctaaaacagaagaagtaatatgtccgctaaccttagaactcagtgtatatgcgagagacgctatggcaaaagcagtatatggacggacatttacatggcttgtaaacaagataaactcctcattagtcaacaaggacttcactcgtaaaactgttattggattactagatatatacggattcgaggtatttgacaaaaacggattcgaacaattttgtataaattattgtaacgaaaaactacagcaactattaatagagagaaccttaaaagcagaacaagcagaatatgaaatggagggtatagaatgggaaccaatcaaatatttcaacaacaaaataatatgtgatctagttgaagaaagacacaaaggaataatatcaattttagatgaagaatgtataagaccaggaccagcaacagacttatcattccttgaaaaattggaagaaaaagtaggaaaacatgcgcattttgaaacgcgaaaactagcgggaccaaaaggaagaaaaagaataggctggatggaatttagactcctgcactatgctggtgaagtaacatattgcactaaaggatttctggagaaaaataatgacctactatatagacatttaaaagaagtactatgcaaaagtaaaaatataatactaagagaatgttttcttctagcagaactagaaaatagaagacgacctccgacagtaggaactcagttcaaaaatagccttagtagcctgctagaaaccttgatatcaaaagaaccgtcatacattagatgcataaagcctaacgatagaaaagaaccatcaaaatttgacgatttcctaatacgacaccaaattaaatacttaggattaatggaacacctacgagtaagacgagctggattcgcatatagaagaaagtatgaacattttctacaaagatacaaatcgttgtgccccgacacgtggcctcattggcatggaccaccagcagagggagtagaacggctgattaaatacattggctataaaccagaagaatataaattgggaaaaacaaaaatttttatccgattcccgagaactttattcgctactgaggacgcatttgaattttcaaaacaccaattagtagcaaggattcaagcaacatataaaagatgtctaggtcgaagagaatacgtgaagaaacgtcaagcagcgatcaaattagaggcacattggaggggagctttagcaaggaaagctattcaaagaagaaaatgggcggtaagaataatcagaaaattcataaaaggattcataagtaggaacaagccactatgccctgataacgaggaatttatagtgtttgtacggaaaaattatatacttaatttgagatatcatttacccaagacagtattagacaaatcatggttaagaccaccaggaatactagaaaatgcgtcagacttattaagaaaaatgtgcgtaagaaatttagtacaaaaatattgtagaggaataacagcagaacgcaaagctatgatgcagcaaaaagtagtaacatcagaaattttcagaggccgtaaagatggttacactgaatctctaaatcaaccgtttgttaacagtcgaatagatgaaggggatataaaccccaaagtactacaattaataagtcacgagaaaatacaatatggagtaccggtgatcaaatatgatagaaaagggtttaaagcaagacaaagacaactaatactaacacaaaaagcagcctatgtagtagaactagccaaaataaaacagaaaattgaatacagtgctttaaaaggagtctcaacatcaaatctctcagatggtatattagtgatacacgtatcaccagaagatagtaaacaaaaaggtgatgcagtcttacaatgtggacacgtattcgaagcagtaacaaaattggtaatgctggtcaagaaagaaaacatagtaaatgtggtacaaggcagcttgcaattctttatatcaccaggtaaagaagggacaattgtctttgacacaggactagaagaacaagtctacaaaaataaaaatggtcaattaacagtagtttcagttagaagaaaaagctga

SEQ ID NO: 3888 - RNA, 2379 nt, synthetic construct
  misc_feature 1..2379: note = BAC84969 variant
  source 1..2379: mol_type = other RNA
atgataacagtgaatccagatgggaaaataatggttaggcgatgtctagtcacattaagaccatttcgcctttttgttctcgggattggattctttacattatgctttttaatgacatctctaggtggacaattttccgcaagaagattaggagattccccattcacaatccgaacagaagtaatgggaggacccgaatctcgaggagtattaagaaaaatgtctgaccttttagaacttatggtaaaaagaatggatgcactagctagactggaaaactcatcagaactacatcgtgcaggaggggacctacatttcccagcagataggatgccacccggagctggtttaatggaaagaatacaagcaattgcccagaacgtctccgatatagccgtaaaagtagatcagatactaagacactcattattgttacactctaaagtaagtgaaggacgacgtgatcaatgtgaagcaccatctgatcctaaatttcctgattgttctggcaaagtagaatggatgcgggctagatggacatcggatccatgttatgcatttttcggcgtagatggaacagaatgctcctttctaatctatttatcagaagttgagtggttctgtccaccactaccttggagaaatcaaacggctgctcagagagcacccaaacccctaccaaaagtacaagcagtatttcggtctaacttatcacacttattagacttaatgggctcaggtaaagagagcttaatatttatgaagaaaagaacaaaaagactcacagcacaatgggcattagccgcacaaagactagcacaaaaattaggagccacacaaagagatcaaaaacaaatactcgttcacataggttttcttacagaagaatcaggagatgtattttcacctcgcgtattaaaaggaggcccccttggagaaatggtgcaatgggcagacatactaacagccttatatgttctaggtcacggtctacgcgtaacagtttcacttaaagaattacaatccaacctaggagtaccacctggcagaggatcatgtcctctaacaatgcccctaccatttgaccttatatacacagattatcacggactacagcaaatgaaaagacacatgggtttatcatttaagaaatatagatgtagaataagggttatagatacattcggaacagaaccagcatacaaccatgaagaatacgcaactttacatggatatcgaacaaattggggatattggaacttaaatccaaaacaattcatgacaatgtttccacatacacccgataattcatttatgggatttgtatcagaagaactaaatgaaaccgagaaaaggcttataaaaggaggtaaagcatcaaatatggccgttgtatatggtaaagaagcatcaatctggaaattacaaggaaaagaaaaattcttaggcatactcaacaaatatatggaaatacatggaacggtttactacgaatctcaacgaccaccagaagtccccgctttcgttaaaaatcatggattgttaccccaaccagagttccaacaattattacgaaaagctaaattattcataggctttggctttccatatgaaggacccgctccactagaagcaattgctaatggttgtatatttctccaaagccgcttttcaccaccacactcatctttaaatcatgaatttttccgaggaaaaccaacaagtagggaagtattttcacaacatccctacgctgaaaactttatcggaaaacctcatgtatggacagtagactataacaactcagaagaatttgaagccgccatcaaagctataatgagaacacaagtagatccatacctaccatatgaatatacatgtgaaggtatgctagaaagaatacatgcatatattcaacaccaagacttttgtagagccccagaccctgctttacctgaagcacatgcaccccaaagtccctttgtactagcaccaaatgccacacatttagaatgggcaagaaatacatcattagcaccaggagcttggccaccagcacatgcactaagagcctggttagctgtaccaggacgcgcgtgtacagacacatgtttagaccacggtctcatttgtgaaccatcattctttccttttcttaactcccaagacgcatttttaaaactacaagttccatgtgatagcaccgaaagtgaaatgaatcatttatatccggcatttgcacagccaggacaggaatgttatttacaaaaagaaccactattattttcttgcgctggaagcaacactaaatacaggagattatgtccctgccgcgattttagaaaaggacaagtagcattatgccaaggatgtctataa

SEQ ID NO: 3889 - RNA, 36 nt, synthetic construct
  misc_feature 1..36: note = AF164963.1 variant
  source 1..36: mol_type = other RNA
atgacacaaggccaacacttcctccaaaaagtataa

SEQ ID NO: 3890 - RNA, 2211 nt, synthetic construct
  misc_feature 1..2211: note = AAI11702 variant
  source 1..2211: mol_type = other RNA
atgaaagaaatgtccgctaacactgtgctagattcacaaagacaacaaaaacattacggaataacaagtccaatatcactagcctcaccaaaagaaatcgaccatatctacacccaaaaattaatcgatgccatgaaaccatttggtgtttttgaagatgaagaagaactcaatcacagactggtagtacttggcaaattaaacaacttagtaaaagaatggatatcagatgtatccgaatcaaaaaacttgccaccttcagtagtcgccacagttggtggaaaaatattcacatttggctcatatagactcggagtacacacaaaaggagcagatatagacgcattatgtgtagcacctcgacacgtagaaagaagtgacttttttcaaagtttttttgaaaaactaaaacaccaagacggaatacgcaacttaagagcagttgaagacgcatttgtacccgtaataaaatttgaatttgatggtatagaaatagacttagtcttcgcacgactagcaatacaaaccatctctgacaaccttgacttaagagatgattcaagactaagaagtctagatatacggtgcatcagatcactaaatggctgcagagtcacagatgaaatattacacttagtaccaaacaaagaaactttcagactaacactaagagctgtaaaattatgggcaaaaagaagaggaatatactcgaacatgctaggctttttaggcggagtatcttgggcaatgttagtcgcaagaacatgccaattatatcctaacgcagcagcttccacattagtgcataaatttttcttagtcttttcaaaatgggaatggccaaatcctgtattactaaaacaaccagaagaatccaacctaaacctacccgtttgggacccacgtgtaaatccatcagatagataccatttaatgcccataataacaccagcatacccacagcaaaattcaacatacaacgtatccacctcaactagaactgtcatggttgaagaattcaaacaaggactggccgtaacagatgaaatccttcaaggaaagtccgattggtcaaaattattagagccacctaacttcttccaaaaatatagacactacatagttctaacagcctccgcctcgacagaagaaaaccatttagaatgggtaggcttagtcgaatctaaaattagagtactagtcggtaacctggaaagaaacgaatttataacactcgcacacgtaaatccacaatcattcccaggaaacaaagaacaccacaaagacaataattatgtttcaatgtggtttctaggaataatattccgacgagtagaaaacgcagaatcagtaaatattgatttaacatacgacatacaatcatttaccgataccgtatacagacaagcgaacaatataaatatgctaaaagaaggcatgaaaatagaagcaacacatgtaaaaaaaaaacaactacaccactacctacctgcagaaatattacaaaaaaaaaaaaaacaatcattatcagatgtcaatcgatccagcggtggtttacaatcaaaaagactcagtttagactcctcctgcctagactcaagtcgagacacagacaacggaacacctttcaattctcctgcatcaaaaagcgactcaccaagcgtcggagaaactgaaagaaacagcgcagaaccagccgcagtcattgtagaaaaaccgctttctgtaccaccagctcaaggactatcgatcccagtaataggagcaaaagtagactccaccgttaaaacagtcagcccaccaacagtctgcactatccctaccgtcgtaggtcgtaacgtcattcctcgtattacaactccacataatccagcacaaggtcaaccacacctcaacggaatgtcaaatataacaaaaacagtaacgccaaaacgatcacactcccccagtatagacggaacaccaaaacgattaaaagacgtagaaaaattcatcagattggaatcaacgtttaaagatccaagaactgccgaagaaagaaaacgcaaatcagtagacgcaataggaggagaatcaatgccaataccaacaatagacaccagtcgcaaaaaaagacttccatctaaagaattaccagattcatcttccccagtgccagcaaataatataagagttataaagaatagtataagactaacattaaacagataa

SEQ ID NO: 3891 - RNA, 1377 nt, synthetic construct
  misc_feature 1..1377: note = AAG28389 variant
  source 1..1377: mol_type = other RNA
atgtcaacagaaggaggatttggaggaacatcatcaagcgacgcacaacaatctctacaatcattctggccacgagtaatggaagaaatcagaaacttaacagtaaaagatttcagagtacaagaattacccttagccagaataaaaaaaataatgaaactagacgaagacgtcaaaatgatatcagccgaagctccagtattattcgctaaagcagcacaaatatttataacagaattaacactacgtgcatggatacacaccgaagacaacaaaagaagaacactccaacgcaatgacatcgctatggcaataacaaaattcgaccaattcgacttccttattgatatagtcccacgtgacgaattaaaaccacccaaaagacaagaagaagtacgacaatcagtaacaccagccgaaccagttcaatactacttcactcttgctcaacaacccacagcagtacaagttcaaggacaacaacaaggacaacaaacaacatcctcaacaaccacaattcaaccaggacaaataataatagcacaacctcaacaaggacaaaccacaccagtaacaatgcaagtaggagaaggacaacaagtacaaatagtccaagcacaacctcaaggtcaagcacaacaagcccaatcaggaacaggacaaacaatgcaagtaatgcaacaaataattacaaacactggagaaatacaacaaataccagtacaattaaacgccggccaattacaatacataagactagcccaacctgtctccggcacacaagtcgtacaaggacaaatacaaacattagcaacaaatgcacaacaaggacaaaggaatgcatctcaaggaaaaccaagacgttgcctaaaagaaacactacaaataactcaaacagaagtacaacaaggccaacaacaattttcccaattcacagatggacaacgaaactcagtacaacaagcaagagtatcagaactaacaggagaagctgaaccacgagaagtaaaagcaaccggaaacagcacaccttgtaccagttcccttccaaccacacaccccccatcacacagagcaggagcaagctgtgtatgctgttcacaaccacaacaatcctcaacatcacctcccccatcagacgcactacagtgggtagtagtagaagtatcaggaactccaaatcaactcgaaacccacagagaactacatgcacccctaccaggaatgacatcactaagcccactacatccatcccaacaattataccaaattcaacaagtaacaatgcctgcaggacaagatctagcccaaccaatgttcatacaatcagccaaccaaccctcagacggccaagcaccacaagtaacaggagactaa

SEQ ID NO: 3892 - RNA, 2802 nt, synthetic construct
  misc_feature 1..2802: note = CCDS33423.1 variant
  source 1..2802: mol_type = other RNA
atgagaatggccgcaacagcatgggctggactacaaggacctccattaccaacactatgtccagcagttagaacaggactttattgtagagatcaagcacacgcagagagatgggcaatgacgagtgaaacatccagcggttcacattgtgcacgcagtagaatgctaagacgtagagcacaagaagaagattctaccgtattaatagatgtctcacctccagaagccgagaaaagaggaagctatggctcaactgcccatgcaagtgaaccaggcggacaacaagcagctgcttgtagagccggtagtccagcaaaacccagaatcgcagattttgtattagtttgggaagaagacttaaaacttgataggcaacaagattcagctgcaagagatagaacagatatgcaccgaacgtggagagaaacattcttagataatttaagagccgcaggtctatgtgtagatcaacaggatgtacaagatggaaatacaacagtacactatgccttactatctgcatcttgggcagtactctgctattacgctgaggatctaagattaaaactaccattacaagaacttccaaatcaagctagcaactggtcagctggattattagcatggcttgggattcccaatgtcctgttagaagtagttcctgacgtaccacccgaatattattcctgtaggttccgtgtaaataaattaccaagatttcttggatcagataatcaagatacattctttacaagcacaaaacgacaccaaatcctattcgagattttagccaaaacaccatacggacatgaaaagaaaaatttactaggaatacatcaattattagctgaaggtgttctctccgctgcctttccactacatgatggaccttttaaaacacccccagaaggaccccaggcaccacgattaaatcaacgccaagtcttatttcaacactgggcacgatggggaaaatggaataaatatcaaccactagatcacgtcagacgatacttcggagaaaaggttgcactatactttgcatggcttggcttttacacaggttggttactacctgcagcagtagtaggtaccttagtttttctcgtaggctgctttttagttttctccgacattccaacacaagaattatgtggatcgaaagattcctttgaaatgtgtcccctttgcctagattgtccattttggctcttatcatcagcatgcgctttagctcaagcaggtagattatttgatcatggcggcacagtatttttctcactttttatggcattatgggcagttctattactcgaatattggaaacgaaaaagcgctacgttggcatacagatgggactgtagcgattacgaagatacagaagaaagaccacgacctcaatttgcagcaagtgctccaatgacagccccaaatccaataacaggagaagatgaaccatacttccccgaaagatctcgagcaagaagaatgttagcaggatctgtagtaatagtagttatggtagcggtagtagtaatgtgcctagtttctataatattatatagggccattatggcaattgttgttagtagatctggaaacactttactagcagcctgggccagcagaattgcatcactaacaggatcagtagtaaatttagttttcatattaatactatctaaaatatatgtatccctagcacatgtcctaacaagatgggaaatgcaccgaacccaaacaaaatttgaagatgcgttcacattaaaagttttcatatttcaattcgtgaatttttacagcagtcccgtatacatagctttctttaaaggacgatttgtaggttacccgggtaactaccacaccttattcggtgttagaaatgaagaatgtgctgctggaggatgtctaatagaactagcccaggaattattagttattatggtaggaaaacaagttatcaataatatgcaagaagtactgataccaaaattaaaaggttggtggcagaaattcagactacgatcaaagaaaagaaaagcaggagcttctgcaggggcatcacagggaccttgggaagacgattatgagctagtaccttgcgaaggactattcgatgaatacttagaaatggtacttcaatttggatttgtaacaatctttgtagctgcttgcccattagcaccattattcgccttgctaaataattgggtagaaataagattagacgcccgcaaatttgtatgtgaatatagacgaccagtcgccgagagagcccaagatataggcatttggttccatatattagcaggtctcactcatttagcagtaatttctaacgccttcctactagccttttctagtgattttctacctcgagcgtactatagatggacaagagcccatgacttaagaggtttcctaaattttaccctagctcgagcaccttcctcttttgccgcagctcataacagaacctgtagataccgtgcgttcagagacgatgatggacattattctcaaacttactggaatttattagctataagattagcattcgtaatagtatttgaacacgtggtctttagcgttggtcgacttctagatctattagtacctgatattccagaaagtgtagaaataaaagtaaaaagagaatattatttggcaaaacaagcattagctgaaaatgaagtgctatttggcacaaatggaacaaaagatgagcagccagaaggatctgaattatcatcccattggacaccctttacagtacctaaagcatcacaactccaacaataa

SEQ ID NO: 3893 - RNA, 885 nt, synthetic construct
  misc_feature 1..885: note = AAA36380 variant
  source 1..885: mol_type = other RNA
atggaagactcaatggatatggatatgtcaccattaagaccacaaaattacttatttggatgcgaactaaaagcagataaagattatcatttcaaagtagataacgatgaaaatgaacatcaattaagtttaagaactgtatcactaggagcaggggcaaaagacgaactacatatagtagaagcagaagcaatgaattacgaaggatcaccaataaaagtaacattagcaacactaaaaatgagtgtacaaccaacagtttcactagggggatttgaaataacaccacccgtagtcctaagactaaaatgtggatcaggaccagtacatatatcaggacaacacttagtagcagtagaagaagatgcagaaagcgaagacgaagaagaagaagacgttaaactattaagcataagcggaaaaagaagcgcaccaggaggaggaagtaaagtaccacaaaaaaaagtaaaattagcagcagacgaagacgatgacgatgacgatgaagaagacgatgacgaagacgatgacgatgacgatttcgatgacgaagaagcagaagaaaaagcaccagtaaaaaaaagcattagagatacaccagcaaaaaatgcacaaaaaagcaatcaaaacggaaaagacagtaaaccaagctcaacaccaagatcaaaagggcaagaaagcttcaaaaaacaagaaaaaacaccaaaaacaccaaaaggaccaagcagcgtagaagacataaaagcaaaaatgcaagcaagtatagagaaaggaggaagtctaccaaaagtagaagcaaaatttataaattacgttaaaaactgtttcagaatgacagatcaagaagcaatacaagatctatggcaatggcgaaaaagtctataa

SEQ ID NO: 3894 - RNA, 3915 nt, synthetic construct
  misc_feature 1..3915: note = CCDS47686.1 variant
  source 1..3915: mol_type = other RNA
atgcaattaaaaattatgccaaaaaaaaaacggctctccgcaggaagagttccgcttatcttatttttatgtcaaatgataagtgcattagaagttccattagaccctaagttattagaggatctagtacaaccccccaccataactcaacaatcaccaaaagactatataatagacccaagagaaaatatagtaatacaatgcgaagccaaaggtaaaccaccaccaagtttttcatggacacgaaacggtacacatttcgacatcgacaaagatcctttagtaacaatgaaacctggaacgggcacattaataataaatatcatgtctgagggaaaagccgaaacatatgaaggtgtttatcagtgcaccgctcggaacgaaagaggtgctgcagtatccaataacatagtagtaagacccagccgctcacccctttggaccaaagaaaaactcgaacctatcacacttcaatctggacaatcattagttcttccttgtagaccaccaattggacttccaccaccaataatattctggatggacaacagcttccaacgattacctcaatcagaaagagttagccaaggactaaatggagacttatacttttccaacgtactgcccgaagatacgagagaagactacatttgttatgctcgtttcaatcatacgcaaacgattcaacaaaaacaacctatttccgtcaaagtaataagtgtggatgagctaaacgatacaatcgctgcaaacttaagtgacacagaattctacggtgccaaatcatccagagaacgcccaccaacctttcttacgccagaaggaaatgctagtaataaagaagaactccgaggaaacgtactatctctagagtgtatagccgaaggattaccaacacctataatatactgggccaaagaagacggaatgttaccaaaaaatagaacagtatacaaaaactttgaaaaaactttacaaattattcatgtatccgaagcagacagcggtaactaccaatgcatcgcaaaaaatgccttgggtgccatccaccatactattagcgtaagagtcaaagcagctccatattggatcactgctccacaaaatcttgtattaagtcctggagaagatgggaccctaatatgccgtgcaaatggtaatcctaaaccaagaatctcttggttaaccaatggagtaccgattgaaatagcaccagacgatcctagtagaaagatcgatggagatacaataatcttctctaatgtacaagaaagaagctcagcagtgtatcaatgtaacgcaagcaatgaatacgggtatttattagccaacgcctttgtcaatgttttagctgaaccaccgaggatcttaacaccggcaaatacattgtaccaagtaattgcaaatagacctgcgcttctagattgcgcattttttggtagtccattacctaccattgaatggttcaaaggagcaaaaggttcagccctacatgaagatatttacgtactccatgagaatggcaccctcgaaatacctgtggcccaaaaagacagtacaggaacatatacctgtgttgctagaaacaaattaggtatggcaaaaaatgaagtacatctcgagataaaagatcctacttggatagttaaacaaccagaatatgctgttgttcaacgtggatcaatggtatcatttgaatgcaaagttaaacacgatcatactcttagccttacagtactatggttaaaagacaacagagaacttccttctgacgaaaggtttacagtagataaagatcatttagtagttgccgacgtatcagatgatgattctggtacatatacatgcgtcgcaaacacaacactagatagtgtatcagcaagtgctgttctttcagtcgtcgctcctacccccacaccggcacctgtttatgatgttcccaacccaccatttgatctggaattaacagaccaattggacaaaagcgttcaattaagctggacgccaggtgatgataacaacagcccgatcactaaatttataatcgaatacgaagatgccatgcacaaaccaggcctatggcaccatcagacagaagtgtcagggacacaaacgacagcacaactaaaactaagcccatatgtaaattattcatttcgcgtcatggctgtaaattcaataggtaaaagcttaccatccgaagcatcagaacaatacttaactaaagcatcagaaccagataaaaacccaacagctgtagaaggtttaggtagcgaacccgacaatcttgtaataacatggaaaccactaaatggcttcgaaagtaatggaccaggactacaatacaaagtgagttggagacaaaaagacggagacgacgaatggaccagtgtagttgtagccaatgtcagcaaatatatagtgtcgggtactccaacatttgtaccttatctcattaaagtacaggcacttaacgacatgggcttcgccccagaacctgcagtcgtaatgggtcattcaggcgaagacctaccaatggtagcacctggtaacgtacgagtaaacgtagtaaattccaccctcgctgaagtccactgggatccagtaccattaaaatcaatacgaggccatttacaaggttatagaatttactactggaaaacccaaagtagctctaaacgaaatcgtcgccatatagagaaaaaaattctgaccttccaaggcagtaaaactcatggcatgctacccggcctggaaccattttcacattatactctaaacgtaagggttgtaaacggcaaaggtgagggaccagcatctccagatagggtattcaatacacccgaaggtgtaccctcagcgccaagttcgctaaaaatagttaatcccacactcgattctctaacactagaatgggatcctccctcacacccaaacggcatattaactgaatacacactaaaataccaaccaattaattcaacacatgaacttggaccccttgttgatctaaaaatccctgctaacaaaacaagatggacactaaaaaacttaaatttttcaacacgatataaattctatttctacgcacaaacatcagccggctcaggctcacagattacagaagaggcagtcacaacagtagatgaagcaggtatattacctccagacgtaggagcgggaaaagtgcaagccgtaaatccaagaatatcgaatcttacagcagctgcagctgaaacatatgccaatataagctgggaatatgaaggacccgaacacgtaaacttctacgtagaatacggagtagcgggttctaaggaggaatggcgtaaagaaatcgtaaatggttcaagaagctttttcggactaaaaggtctaatgccaggcactgcctataaagttagagttggcgcagtaggagatagcggattcgtaagctctgaagatgtattcgaaactggacccgcaatggcttcaagacaagtagatatagcaacccaaggatggtttataggcttaatgtgtgctgtcgctttactaatattaattctacttatagtatgttttataagaagaaacaaaggcggcaaatacccagtaaaagagaaagaggatgcacatgcagaccccgaaatccaacctatgaaagaagatgatggaacctttggagagtacagcgatgctgaagatcacaagcctctaaaaaaaggctctagaaccccatcagatagaacagtaaaaaaggaagattcagacgattcgttagtagattacggtgagggcgttaacgggcaatttaacgaagatggctcatttataggacaatacagtggaaagaaggaaaaagaacctgcagaaggaaatgaaagttcagaagctccatctcctgtaaatgcaatgaatagctttgtataa

SEQ ID NO: 3895 - RNA, 1305 nt, synthetic construct
  misc_feature 1..1305: note = AAB51320 variant
  source 1..1305: mol_type = other RNA
atgtcaatagagaaaatatgggcgagagaaatactagactcaagaggaaaccccacagtagaagtagacttatacacagcaaaaggattattcagagcagcagtaccaagcggagcaagtacaggaatatatgaagcattagaattaagagacggagataaacaaagatacctgggcaaaggagtactaaaagcagttgaccatataaattcaacgatagcaccagcattgatatcatcaggattatcagtagtagaacaagaaaaactagacaatttaatgctagaattagacggaactgaaaacaaaagtaaatttggagcaaatgcaattttaggagtatcattagcagtatgtaaagcaggagcagcagaacgagaactaccactatatagacatatagcacaattagcaggaaattcagacctaatattaccagtaccagcttttaacgtaataaacggaggaagtcatgcaggaaataaactagcaatgcaagaatttatgatcctaccggtaggagcagaaagtttcagagatgcaatgagattaggagcagaagtataccatacattgaaaggagtcataaaagataaatatggaaaagacgcaaccaatgttggagacgaaggcggttttgcaccaaatatactagaaaatagcgaagcgttagaattagtaaaagaagcaatagataaagcaggatacacagagaaaatagtaataggaatggacgtcgcagcaagtgaattttaccgagacggaaaatatgacctagattttaaaagccctacagacccatcacgatacataacgggagatcaattaggcgctctatatcaagatttcgtacgagattatccagtagtaagcattgaggatccattcgaccaagacgattgggcagcatggtcaaaattcacagcaaatgtcggaatacaaatagtaggagatgacttaacagtaacaaatccaaaaagaatagaaagagcagtagaagaaaaagcatgcaattgcttgttattaaaagttaaccaaataggaagcgtaaccgaagctatacaagcatgtaaattagcacaagaaaacggatggggagtcatggttagtcacagaagcggcgaaacagaagatacatttatagcagacttagtcgtaggattatgcacaggacaaataaagaccggagccccatgcagaagtgaaagactagcaaaatataatcaattaatgagaatagaggaagaactcggagacgaagcacgattcgcaggacataactttagaaatccaagtgtactgtaa

SEQ ID NO: 3896 - RNA, 1395 nt, synthetic construct
  misc_feature 1..1395: note = AAH08489 variant
  source 1..1395: mol_type = other RNA
atggaaaccctaagcttccccagatacaacgtcgcagaaatagtaatacatataagaaacaaaatactaacaggcgcagacggtaaaaacctcaccaaaaatgacctatacccaaatccaaaaccagaagtattacacatgatatacatgcgagcactccaaatagtatacggcatacgattagaacacttttacatgatgccagtcaactcagaagtaatgtacccacacctaatggaaggtttcctccccttcagtaacctcgtaacgcacctagatagctttctaccaatatgtagagtaaacgacttcgaaacagcagacatcctatgccctaaagcaaaaagaacttccagattcctttcaggaataatcaacttcatacacttccgagaagcatgcagagaaacatacatggaattcctatggcaatacaaatcatcagcagacaaaatgcaacaactaaacgcagcacaccaagaagcacttatgaaattagaaagactagacagtgtcccagtcgaagaacaagaagaattcaaacagctatcagacggtatacaagaattacaacaatcactaaaccaagacttccaccaaaaaaccatagtactacaagaaggaaactcacaaaaaaaaagcaatatatccgaaaaaacaaaacgactaaacgaattaaaactaagtgtagtatcactaaaagaaatacaagaatccttaaaaacaaaaatagtagactcaccagaaaaactaaaaaactacaaagaaaagatgaaagatacagtccaaaaactaaaaaacgcccgacaagaagtagtcgaaaaatacgaaatttacggagattccgtagactgtctaccaagctgccaactagaagtacaattataccaaaaaaaaatacaagacctatcagataaccgagaaaaactagcatcaatactaaaagaatcactaaacctcgaagatcaaatagaatcagacgaaagcgaactaaaaaaacttaaaacagaagaaaatagcttcaaaagactaatgatagtaaaaaaagaaaaactagctacagcacaattcaaaataaacaaaaaacatgaagacgtaaaacaatacaaacgaaccgtcatagaagattgtaacaaagtacaagaaaaaagaggcgcagtttacgaacgagtaacgaccatcaatcaagaaatacaaaaaataaaactcggcatacaacaacttaaagacgccgcagaaagagaaaaactaaaaagccaagaaatattcctaaatctaaaaacagcactagaaaagtaccacgatggaatcgaaaaagcagcagaagacagctacgcaaaaatagatgaaaaaacagccgaacttaaaagaaaaatgttcaaaatgtcaacataa

SEQ ID NO: 3897 - RNA, 543 nt, synthetic construct
  misc_feature 1..543: note = AAB49693 variant
  source 1..543: mol_type = other RNA
atgcaagcagaaggacgaggaacaggaggaagtacaggagatgcagatggaccaggaggaccaggaataccagatggaccaggaggaaatgcaggaggaccaggagaagctggagcaacaggaggaagaggaccaaggggagcaggagcagcaagagcaagcggaccaggaggtggagcaccaagaggaccacatggaggagcagcaagtggattaaatggatgttgtagatgtggagcaagaggaccagaaagtagattattagaattttatttagcaatgccatttgcaacaccaatggaagcagaattagcaagaagaagtttagcacaagatgcgccaccattaccagtaccaggagtattattaaaagaatttacagttagtggaaacatattaacaataagactaacagcagcagatcatagacaattacaattaagtataagtagttgtttacaacaattaagtctattaatgtggataacacaatgttttctaccagtatttttagcacaaccaccaagcggacaaagaagataa

SEQ ID NO: 3898 - RNA, 1215 nt, synthetic construct
  misc_feature 1..1215: note = CCDS14134.2 variant
  source 1..1215: mol_type = other RNA
atggcatctccaagactaggaacattctgctgtccaacacgagatgcagcaactcaactagtattatcatttcaaccaagagcctttcacgcactttgtctaggatccggaggattacgactagcactaggattactacaactattaccaggacgaagaccagcaggaccaggcagcccagcaacttctcccccagcatcagtacgaatattacgagcagcagctgcatgtgacttactaggatgtttaggtatggtcataagatcaacagtatggttaggatttccaaatttcgtagactcagtatctgatatgaatcacacagaaatttggcctgcagcattttgtgtaggctcagccatgtggatacaattattatatagcgcatgtttttggtggttattttgctatgccgtagacgcatatctagtaataagaagatcagcaggattatcaacaatacttctatatcacataatggcctggggactagcaacattactatgcgtagaaggagcagcaatgttatattatcctagtgtttcaaggtgtgaaagaggtttagatcacgctataccacattacgtgacaatgtatctccctctattactagttttagttgctaatcccatattatttcaaaaaacagtaacagcagtagcaagcttactaaaaggaagacaaggaatatatacagaaaatgaaagaagaatgggagcagttataaaaataagattttttaaaataatgttagtattaataatttgttggttatcaaacattataaatgaatccttactattttatttagaaatgcaaacagatataaacggaggatcactaaaacctgtcagaactgcagcaaaaaccacatggttcattatgggaatactaaacccagcacaaggatttttactatcactcgcattttatggctggacaggatgttcattaggtttccaatcaccaagaaaagaaattcaatgggaatcactcacaacatcagctgctgaaggagcacatccttctcctttaatgcctcatgaaaaccctgcatcaggaaaagtatcacaagtaggaggacaaacatcagatgaagcattatctatgctaagtgaaggctcagacgcaagcacaatagaaatacatacagcatcagaaagttgtaataaaaatgaaggagatccagccttaccaacacacggagacttataa

SEQ ID NO: 3899 - RNA, 3141 nt, synthetic construct
  misc_feature 1..3141: note = AAH38180 variant
  source 1..3141: mol_type = other RNA
atggcatcatcagtaggaaacgttgctgactcaacagaacctacaaaaagaatgttatcatttcaaggactcgccgaacttgctcatagagaatatcaagcaggagatttcgaagcagctgaacgacattgtatgcaattatggagacaagaacctgataatacaggagtattacttttattatcatcaatccactttcaatgcagaagactagatagatctgcacatttctcaacgttagcaatcaaacaaaatccactattagcagaagcatactcaaatctgggtaacgtatacaaagaacgtggccaactacaagaagcaattgagcattatagacatgcgttaagattgaaaccagattttatagacggatacattaatttagccgcagccctcgttgcagctggagatatggaaggagctgtacaagcatatgtttcagcgctacaatataacccagatttatattgtgtaagatcagacctaggaaatctcttaaaagcactaggacgattagaagaagcaaaagcatgctatttgaaagctatcgaaacacaaccaaattttgctgttgcatggtcaaaccttggatgcgtatttaatgcccaaggagaaatatggttagcaatccatcatttcgaaaaagcggtaacattagacccaaatttcctagacgcatatattaacctaggaaatgttctaaaagaggctagaatattcgatagagccgtggccgcttatcttcgcgccctcagtttaagtccaaaccatgcagtagtacatggaaacctagcatgtgtatactatgaacaaggacttatagatttagctatagatacgtacagacgagctatagaacttcaaccgcatttccccgacgcatattgcaatctagccaatgctttaaaagaaaaaggatcagtcgctgaagccgaagattgctataatacagcattaagattatgtcccacacacgccgatagtttgaacaacttagcaaacattaaaagagagcagggaaatatagaagaagcagttagactatatagaaaagccttagaagttttccctgagttcgcagctgcacacagtaatttagcgtcagtcctacaacagcaaggtaagctacaagaagcactaatgcactacaaagaagcaatcaggatctcacctactttcgctgatgcatattcaaatatgggcaatacactaaaagaaatgcaagatgttcaaggagctctacaatgttatacaagagcaatacaaataaacccagcattcgctgatgcccatagtaatcttgcatcaatacataaagattcaggaaacataccagaagccatagcatcatatagaactgctttaaaactaaaaccagactttccagacgcatactgcaacctagcacactgtctgcaaatcgtatgcgattggacagattacgatgaaagaatgaaaaagctagtatctatcgtagccgatcaacttgagaaaaatagattaccttctgtccaccctcatcactccatgctctacccactttctcacggcttcagaaaagcaattgctgaaagacatggtaacctttgtttagataaaataaatgttcttcataaacctccttacgaacatcccaaagacctaaaactatctgacggaaggctaagagtaggctatgtaagttcagacttcggaaaccacccaactagccatttaatgcaaagtattccaggcatgcacaatccagacaaatttgaagtattctgttatgcactaagtcctgatgacggtacaaattttagagtaaaagtaatggctgaagccaaccacttcatcgacttatcgcaaataccctgtaacggtaaagctgcagaccgaatccatcaagatggaatacatatactcgtaaatatgaatggctacacaaaaggagctagaaatgaactatttgcattgagacctgcccccattcaagcaatgtggctaggatatcctggcaccagtggagcgctattcatggactatataataactgaccaagaaacgtcgccagcagaagtagcagaacaatattcagaaaaattagcctatatgccacatacattctttataggtgaccacgctaatatgtttccgcatttaaagaagaaagctgttatagactttaaatccaatggacatatatatgacaacagaatcgtactcaacggtattgacctgaaagcattcctcgattcactaccagacgtaaaaattgtaaaaatgaaatgtcccgacgggggcgacaatgcggattcgtccaacacggctctaaatatgccagtaattccgatgaacacaatagcagaagcagtgatagaaatgataaatagaggacaaatacaaataacaataaatggattctccatcagcaatgggcttgcgactacacaaatcaataacaaagcagcaactggagaagaagtcccaaggacaattatcgtaacgacacgatctcaatacggtttacctgaagatgcgatagtgtattgcaacttcaatcaactatacaaaatagatccatcaacattacaaatgtgggccaacatattaaaaagagtccccaatagtgtattatggctactaaggttcccagcagttggagaaccaaacatacaacaatatgcacaaaacatgggtctaccccaaaatcgaattatcttcagtccagtagcaccaaaagaggaacatgtaagaagaggacaattggcggacgtatgcctagacactccactatgtaacggacataccacaggaatggatgtactatgggctggcacacccatggttacaatgccaggagaaacattagcaagtcgagtcgcagccagccaattaacttgcctcggatgtttagaattaatagccaaaaacagacaagaatatgaagacatagcagtgaaattaggcacagatctagaatatctaaagaaagttagaggtaaagtatggaaacaaagaatttcctctccattatttaatacaaaacaatacactatggaactagaaaggttgtatctccagatgtgggaacattacgcagcgggaaataaacctgaccacatgataaaaccagttgaagtgaccgaatccgcataa

SEQ ID NO: 3900 - RNA, 441 nt, synthetic construct
  misc_feature 1..441: note = BAG57972 variant
  source 1..441: mol_type = other RNA
atggcagcagaaacactattaagcagtctattaggactactattactaggactattactaccagcatcactaacaggaggagtaggaagcttaaacctagaagaactatcggaaatgagatatggaatagaaatactaccactaccagtaatgggaggacaatcacaatcaagcgatgtagtaatagtgagctcaaaatataaacaaagatatgaatgtagattaccagtaggagcaatacacttccaaagagaaagagaagaagaaacaccagcatatcaaggaccaggaataccagaattactatcaccaatgagagatgcaccatgcttactaaaaacaaaagactggtggacatacgaattctgttacggaagacatatacaacaatatcacatggaagatagcgaaataaaaggattacaagcagcatcaagctaa

SEQ ID NO: 3901 - RNA, 1221 nt, synthetic construct
  misc_feature 1..1221: note = BAG65333 variant
  source 1..1221: mol_type = other RNA
atggcagcagaaacactactaagttcattactaggactactactactaggactactactaccagcaagtctaacaggaggagtaggaagcttaaaccttgaagaactatctgaaatgcgatatggaatagaaatattaccgctaccagtaatgggaggacaaagccaatcaagtgatgttgtaatagtgagttcaaaatacaaacaaagatacgaatgtcgcttaccagcaggagcgatacatttccaacgagaaagagaagaagaaactccagcataccaaggaccaggcataccagaattactatcaccaatgagagatgcaccatgcttgcttaaaacaaaagactggtggacatatgaattttgttacggaagacacatacaacaatatcatatggaagatagcgctagtggagcaccaaacgatttccaaaacaatgtacaagtaaaagtaataagatcaccagcagacctaatcagattcatagaagagctaaaaggcggaacaaaaaaaggaaaaccgaacataggacaagagcaaccagtagatgacgcagcagaagtaccacaacgagaaccagaaaaagaacgaggtgatccagaaaggcaaagagaaatggaagaagaagaagacgaggacgaggacgaagatgaagacgaagacgaacgacaactattaggagaattcgaaaaagagctagaaggaatactattaccttcagacagagacagactaagaagcgaagtcaaagctggaatggaaagagaactagaaaatataatacaagaaacagaaaaagaactagacccagacggattaaaaaaagaatcagaacgagatagagcaatgttagcattaacatcaacattaaacaaactaataaaaagactagaagaaaaacaaagtccagagctagtaaaaaaacacaaaaaaaaaagagtagtaccaaaaaaaccaccaccatcgccccagcccacgggaaaaatagaaattaaaatagtaagaccatgggcagaaggaacagaagaaggtgcaagatggttaacagacgaagatacaagaaacttaaaagaaatattctttaatatattagtaccaggagcagaagaagcacaaaaagaaagacagagacaaaaagaactagaaagcaattacagacgagtatggggtagtccaggaggagaaggaacaggagacctagatgaatttgatttctaa

SEQ ID NO: 3902 - RNA, 2223 nt, synthetic construct
  misc_feature 1..2223: note = BAH13933 variant
  source 1..2223: mol_type = other RNA
atggcagtagaaacactactgagttcattactaggattattattattaggtcttctactaccagcatcactaacaggaggtgttggaagtctaaatcttgaagaactaagtgaaatgagatacggaatagaaatattaccattaccagtaatgggaggacaatcgcaaagcagtgacgtagtaatagtaagctctaaatataaacaaagatatgaatgtagattaccagcgggagcaatacattttcaaagagaaagagaagaagaaacgcctgcatatcaaggaccaggaataccagaactattatcgcccatgagagatgctccctgcttattaaaaacaaaagactggtggacatatgagttctgttatggaagacatatacaacaataccacatggaagacagcgaaataaaaggagaagtactatatttaggatattaccaaagtgcatttgattgggatgacgaaactgcgaaagcctcaaaacaacacagactcaaaagataccatagtcaaacatacggaaatggatcaaaatgcgatctaaacggacgaccaagggaagcagaagtaagattcctctgtgatgaaggagccggtatatcaggtgattatatagatagggtagatgaaccattaagctgcagctatgtcttgacgataagaacacctaggttatgtccacatccactgctaaggccgccacctagcgcagctccgcaagctatattatgtcatccaagtttacaaccagaagaatacatggcctatgtacagagacaagcagattcaaaacaatacggggataaaataatagaagaattgcaagatttgggtccacaggtttggtctgaaacgaaaagtggggtagcacctcagaaaatggctggaagaacgttattccatcttttccgagaaatacattttcacttctttccaagcccagatttaacagtacttacagattggtggggaggtggaggagtagaaaaatatcacggaccttcaagtttaggagacaggggaggagaaggaacccccagctatctgttacccagcgtatctccattattaagtgatcagagcttgccagtcttatgtacattaggagcctcaccaacgaaagatgacagtaaagattcagatttttggaagatgttaaatgaaccggaagatcaagcaccaggaggagaagaagtaccggcggaagaacaagatccatcgcctgaagcagcagatagcgcatcaggggctccaaatgattttcaaaacaatgtacaagtgaaagttataagaagtcctgctgacctaatacgattcattgaagaattaaaaggaggaacaaagaaaggtaaaccaaatatcggacaagaacaaccagtggatgatgcagcagaagtaccgcaaagagaaccagaaaaagaaagaggagatcccgaaagacaaagagaaatggaggaagaagaagacgaagatgaagatgaagatgaagatgaagatgagcgacaattgctaggagagttcgaaaaagaactagaaggtatattattaccatcagacagagacagattacgatctgaggtaaaagcaggtatggaaagagaactagagaatataatacaagaaactgaaaaagagttagatccggacggtttaaagaaagaaagcgaaagagatagagcaatgctcgcactaacatcaacattaaataaactaataaaacgattagaagaaaaacaatcacctgagttagtaaagaaacacaaaaagaaaagagtagttccaaagaaacctccaccaagtccacaaccaacagaagaagatccagaacatagagtacgtgtgcgagttactaaactaagactaggagggccaaaccaagatttaacggtactggaaatgaaaagagaaaatccacaattaaaacaaatagaagggctagtgaaagaacttcttgaaagagagggactaacagcagcaggtaaaatagaaatcaaaatagtacgtccttgggcagaaggaacagaagaaggagcaagatggctaacagacgaggatacacgaaatttgaaagaaatattctttaatatactcgtcccaggcgcagaagaggcgcaaaaagagcgacaacgacaaaaagaattagaaagtaattatagacgagtatggggatcaccaggaggagaaggaacgggagatctagatgagtttgacttttga

SEQ ID NO: 3903 - RNA, 2004 nt, synthetic construct
  misc_feature 1..2004: note = AAB06495 variant
  source 1..2004: mol_type = other RNA
atggcagctgaaacattactatcatcactgctaggattgttactgctaggattactattaccagcctcgctgacaggaggagtaggaagccttaatttggaagaattaagtgagatgagatatggcatagaaatcttaccattaccagttatgggaggtcaaagtcaatcgtcagatgtagtaatagtaagtagcaaatataaacaaagatatgaatgtagactaccagccggtgcaatacacttccaaagagaaagagaagaagaaacaccagcatatcaaggcccaggaataccagaattactaagtccaatgagagatgcaccatgtctactcaaaactaaagactggtggacttacgagttctgctatggaagacatattcaacagtaccatatggaagatagtgaaataaaaggggaagtattatatttaggatattatcagtctgcatttgattgggatgacgaaactgcaaaggcaagcaaacaacatcgattaaagaggtatcatagtcaaacatatggaaacggaagcaaatgtgacttaaatggcagaccgagagaagcagaagtaagatttctatgtgacgaaggagcaggaatctcaggagactatatagacagagtcgatgaaccattaagttgttcatatgtattaacaataagaacaccaagattatgtccgcatcctttattgagaccacctccatcagcagctccacaagcaattctatgtcaccctagtttacaaccagaagaatatatggcatacgtacaaagacaagcagactcaaaacaatacggagataaaattattgaagaattacaagatttaggaccacaagtttggtctgaaactaaaagtggagtagcacctcagaaaatggcgggtgcatcacctacaaaagatgatagtaaagattcagacttttggaaaatgctgaatgaaccggaagatcaagccccaggaggtgaggaagtccctgcagaagaacaagatccaagcccggaagcagcagatagtgcgagtggcgctccaaatgattttcaaaacaacgtacaagtaaaagttataagaagtccagcagatctaataagatttatagaagaattgaaaggaggaaccaagaaaggaaaaccaaatattggacaagaacaaccagtagatgatgcggctgaagtcccacaaagagaaccggaaaaagagagaggagatccagaaagacaaagagaaatggaagaagaagaagacgaagacgaagacgaagacgaagatgaagatgaaagacaacttctaggagaatttgaaaaagaattagaaggtatactattgccaagcgatagagacaggctaagatcagaagtcaaagcaggaatggagagagagcttgaaaatattatacaagaaacagaaaaagaattagacccagatggtctaaagaaagaaagtgaaagggatagagcaatgttagcacttaccagcacattaaataagttaataaaaagattagaagaaaaacaatcacctgagcttgtaaagaaacataaaaagaaacgagtagtgccaaagaaaccaccgccaagccctcaaccaacagaagaagacccagaacatagagtgagagtgagagtaacaaaattaaggttaggaggaccgaatcaagatctaactgttttagaaatgaaacgtgaaaacccacaactaaaacaaattgaaggcctagtaaaagaattactagaacgagaaggattaacagcagcagggaaaattgaaataaaaatagtacgaccctgggctgaaggaaccgaagaaggggcaagatggctaacagatgaagacacaagaaacttaaaagaaatattctttaatatattagtaccaggagcagaagaggctcaaaaagagagacaaagacaaaaagaactagaatcaaattatagaagagtttggggtagtccgggaggtgagggaacaggagatcttgatgaatttgatttctga

SEQ ID NO: 3904 - RNA, 303 nt, synthetic construct
  misc_feature 1..303: note = AAI13433 variant
  source 1..303: mol_type = other RNA
atgagagcactaacactattagcattactagcactagcagcattatgcatagcaggacaagcaggagcaaaaccaagcggagcagaaagctcaaaaggagcagcattcgtaagcaaacaagaaggatcagaagtagtaaaaagaccaagaagatacttataccaatggttaggagcaccagtaccatatccagatccactagaaccaagaagagaagtatgcgaactaaatccagattgcgatgaattagcagatcacataggatttcaagaagcatatagaagattctatggaccagtataa

SEQ ID NO: 3905 - RNA, 945 nt, synthetic construct
  misc_feature 1..945: note = EAX06008 variant
  source 1..945: mol_type = other RNA
atgaggatagcagtaatatgcttctgcttactaggcataacctgtgcaatacccgtaaaacaagctgactcaggatcatccgaagaaaaacaactatacaacaaatatccagacgcagtagcaacatggctaaaccccgatccctcacaaaaacaaaatctactagcaccacaaaacgcagtatcctcagaagaaacaaatgacttcaaacaagaaacactaccatcaaaatcaaatgaatcacacgaccacatggacgacatggacgacgaagacgatgacgaccacgtagacagccaagactcaatagattcaaacgactcagacgacgtcgatgacacagacgactcacaccaatcagacgaatcacaccacagcgacgaatcagatgaactagtaacagacttcccaacagacctaccagcaacagaagtatttacaccagtagtaccaacagtagatacatatgacggaagaggagactcagtagtatacggattaagatccaaatcaaaaaaattccgaagaccagacatacaatacccagacgcaacagacgaagacataacaagtcacatggaatcagaagaactaaacggagcatacaaagcaatcccagtagcacaagacctaaatgcaccatcagactgggactcaagaggaaaagacagctacgaaacatcccaactagatgaccaatcagcagaaacccactcacacaaacaaagcagactatacaaaagaaaagccaacgacgaaagcaacgaacactcagatgtcatagattcacaagaattatcaaaagtatcaagagaattccactcccacgaatttcactcacacgaagacatgctagtagtagacccaaaaagcaaagaagaagacaaacatctaaaattcaggatatcacacgaattagactcagcaagcagcgaagtaaattaa

SEQ ID NO: 3906 - RNA, 903 nt, synthetic construct
  misc_feature 1..903: note = EAX06009 variant
  source 1..903: mol_type = other RNA
atgcgaatagcagtaatatgcttctgcctactaggaataacatgcgcaataccagtaaaacaagcagactcaggatcatcagaagaaaaacaattatacaacaaatacccagacgccgtagcaacatggctaaacccagacccctcccaaaaacaaaatctactagcaccacaaacactcccatcaaaatcaaatgaatcacacgaccacatggatgacatggacgacgaagacgacgacgaccacgtagattcacaagactcaatagactcaaacgactcagacgacgtagacgacacagacgactcacaccaatcagacgaatcacaccacagcgacgaatcagacgagctagtaacagacttcccaacagacctaccagcaaccgaagtattcaccccagtagtacccacagtagacacatacgacggaagaggagattcagtagtatacggcctaagaagcaaatcaaaaaaattcagaagaccagacatacaatacccagacgcaacagacgaagacataacatcacacatggaatcagaagaattaaacggagcatataaagctataccagtagcacaagatttaaacgcaccatcagactgggactcaagaggaaaagactcatacgaaacaagccaactagatgaccaaagtgcagaaacacactcacacaaacaatcaagactatacaaaagaaaagcaaacgacgaaagcaacgaacactcagacgtaatagactcacaagaattatcaaaagtaagcagagaattccactcacacgaatttcactcacacgaagatatgttagtagtagacccaaaatcaaaagaagaagacaaacatctaaaattcagaatatcacatgaactagactcagcaagctcagaagtaaactaa

SEQ ID NO: 3907 - RNA, 864 nt, synthetic construct
  misc_feature 1..864: note = EAX06010 variant
  source 1..864: mol_type = other RNA
atgagaatagcagtaatatgcttctgcctactaggaataacatgcgcaataccagtaaaacaagcagactcaggatcaagcgaagaaaaacaaaacgcagtaagctcagaagaaacaaacgacttcaaacaagaaacattaccatcaaaaagtaacgaatctcacgaccacatggacgacatggacgacgaagatgacgacgaccacgtagactcacaagattccatagattcaaacgactcagacgacgtagatgacacagacgactcacatcaaagcgacgaatcacaccactcagacgaatcagacgaactagtaaccgacttcccaacagatttaccagcaacagaagtatttacaccagtagtaccaaccgtagacacatacgacggaagaggagactcagtagtatacggtttaagatcaaaatcaaaaaaatttcgaagaccagacatacaatacccagacgcaacagatgaagacataacatcacacatggaatccgaagaactaaacggagcatacaaagccatacccgtagcacaagacctaaacgcaccatctgactgggactcaagaggcaaagactcatacgaaacatcacaactagacgaccaatcagcagaaacacactcacataaacaatcaagactatataaaagaaaagcaaacgatgaaagtaacgaacacagcgatgtaatagactcccaagaactatcaaaagtatcaagagaattccactcacatgaatttcacagccacgaagacatgttagtcgtagacccaaaatctaaagaagaagataaacacctaaaattcagaatatcacacgaattagactcagcatcatccgaagtaaactaa

SEQ ID NO: 3908 - RNA, 984 nt, synthetic construct
  misc_feature 1..984: note = BAH12087 variant
  source 1..984: mol_type = other RNA
atgggaatagtcccaagatcactagataaaaaagcacacagagtacaattccaactaaacagaataaaagcaaaaatagaactaccatgggggtcactacaactagattgtttaatgaaaacactaaaagaactctacaacaaatatcccgacgcagtcgcaacatggctaaacccagacccaagtcaaaaacaaaacctactagcaccacaaaatgcagtatcatcagaagaaacaaatgatttcaaacaagaaacactaccatcaaaaagtaacgaaagccacgaccacatggacgacatggacgacgaagacgacgacgaccatgttgactcacaagactcaatagactcaaatgacagcgacgacgtcgacgatacagatgactcacaccaatccgacgaaagccaccactcagacgaatcagatgaacttgtcacagactttccaaccgacctaccagcaacagaagtattcacaccagtagtaccaacagtagacacatacgacggaagaggagactcagtcgtatacggacttagaagcaaatcaaaaaaattcagaagaccagacatacaatacccagacgcaacagacgaagacataacatcacacatggaatcagaagagttaaacggagcatacaaagcaataccagtagcacaagacctaaacgcaccatcagattgggactcaagaggaaaagactcatacgaaacatcacaactagacgatcaatcagcagaaacacacagccacaaacaatccagactctacaaaagaaaagcaaacgacgaatcaaacgaacactcagacgtaatagactcacaagaactatcaaaagtatcaagagaattccattcacacgaattccacagccacgaagacatgttagtagtagacccaaaatcaaaagaagaagacaaacacttaaaattcagaatcagccacgaactagattcagcaagctccgaagtaaattaa

SEQ ID NO: 3909 - RNA, 879 nt, synthetic construct
  misc_feature 1..879: note = AEA49030 variant
  source 1..879: mol_type = other RNA
atgagaatcgcagtaatatgcttctgcttactaggaataacctgcgcaataccagtaaaacaagcagactcaggatcttcagaagaaaaacaattatacaacaaatacccagacgcagtagcaacatggttaaacccagacccctcacaaaaacaaaacctattagcaccccaaaacgcagtatcatcagaagaaacaaacgactttaaacaagaaacattaccatcaaaatcaaacgaaagccacgaccacatggacgacatggacgacgaagacgacgattcacaccaatcagatgaatcacaccactcagacgaatcagacgaattagtaacagacttcccaacagatctacccgcaaccgaagtcttcacaccagtagtaccaacagtagacacatacgacggaagaggcgactcagtcgtctacggactacgctcaaaaagcaaaaaattcagaagaccagacatacaatatccagatgcaacagacgaagacataacatcacacatggaatcagaagaactaaacggagcatacaaagcaataccagtagcacaagacttaaacgcaccatcagattgggacagcagaggaaaagactcatatgaaacatcacaactagacgaccaatcagcagaaacacactcacacaaacaatcaagactatacaaaagaaaagccaacgacgaatcaaacgaacactcagacgtaatagactcccaagaactaagcaaagtatcaagagaattccacagccacgaattccacagccacgaagacatgttagtagtagacccaaaatcaaaagaagaagacaaacatctaaaattcagaatatcacacgaactagactcagcatcctcagaggtaaactaa

SEQ ID NO: 3910 - RNA, 945 nt, synthetic construct
  misc_feature 1..945: note = AAA86886 variant
  source 1..945: mol_type = other RNA
atgagaatagcagtaatatgcttctgcttactaggaataacatgcgcaataccagtaaaacaagcagattcaggctcatcagaagaaaaacaactatataacaaatacccagatgcagtcgcaacatggttaaatccagatccatcacaaaaacaaaacctactagcaccacaaaatgcagtaagcagcgaagaaacaaacgacttcaaacaagaaacattaccatcaaaatcaaatgaatcacacgaccacatggacgatatggacgacgaagatgacgatgaccacgtagatagccaagacagcatagactcaaacgattccgacgacgtagacgacacagacgacagtcatcaatcagatgaaagccaccactcagacgaatcagatgaattagtaacggactttccaacagacctaccagcaacagaagtattcacaccagtagtaccaacagtagatacatacgacggaagaggagactcagtagtatacggattaagatcaaaaagtaaaaaattcagaagaccagacatacaatacccagacgcaactgatgaagatataacatcccacatggaaagcgaagaattaaacggagcatataaagcaataccagtagcacaagacttaaacgcaccatcagactgggactcaagaggaaaagactcatacgaaacatcacaactagacgaccaatcagcagaaacacactcccacaaacaatcaagattatacaaaagaaaagctaacgacgaaagtaacgaacactcagacgtcatagatagccaagaactatcaaaagtatcacgagaattccacagccatgaatttcattcacacgaagatatgttagtagtagacccaaaaagcaaagaagaagacaaacatctaaaatttagaatatcacatgaactagactcagcatcatcagaagtaaactaa

SEQ ID NO: 3911 - RNA, 1182 nt, synthetic construct
  misc_feature 1..1182: note = AAA59988 variant
  source 1..1182: mol_type = other RNA
atggaagaaccacaatcagacccctcagtagaaccaccactatctcaagaaacattctcagacctatggaaactcttacccgaaaacaacgtactatcaccactaccaagtcaagcaatggatgatctaatgctatctccagatgacatagaacaatggttcaccgaagaccccggaccagacgaagcgcccagaatgccagaagccgcaccaccagtagcacccgcacctgcagctccaacaccagcagcaccagcaccagcaccatcttggccactttcctcatctgtaccatcacaaaaaacttaccaaggatcatacggattcagattaggattcctacactcaggtacagcaaaatccgtaacatgtacctacagtcccgcactaaacaaaatgttttgtcaactagcaaaaacatgcccagtacaattatgggtagacagcacaccaccacccggaacaagagtcagagcaatggctatctacaaacaatctcaacacatgacagaagtcgtcagaagatgcccacaccacgaaagatgttcagactcagacggattagctccacctcaacatctaataagagtagaaggtaacctacgagttgaatacctcgacgatagaaacactttccgacactcagtcgtagttccatacgaaccaccagaagtaggctcagactgcacaacaatacactataactatatgtgtaacagtagttgcatgggaggtatgaacagaagaccaatattaactataatcaccctagaagactcatcaggaaacttattaggaagaaattctttcgaagtcagagtatgcgcctgcccaggacgcgacagacgaacagaagaagaaaacctaagaaaaaaaggagaacctcatcacgaattaccaccaggatcaacaaaaagagcactaccaaacaacacatcctcaagtccgcaaccaaaaaaaaaaccactcgacggcgaatacttcactctacaaatcagaggaagagaacgctttgaaatgtttagagaactaaacgaagcactagaacttaaagatgcacaagcaggtaaagaaccaggaggctcaagagcacactcatcacaccttaaatcaaaaaaaggacaatctacatcaagacacaaaaaactaatgttcaaaacagaaggaccagactcagattaa

SEQ ID NO: 3912 - RNA, 309 nt, synthetic construct
  misc_feature 1..309: note = AAF88037 variant
  source 1..309: mol_type = other RNA
atgagcgcaagagtaagatcaagatcaagaggaagaggagacggacaagaagcaccagacgtagtagcattcgtagcaccaggagaaagccaacaagaagaaccaccaacagacaatcaagatatagaaccaggacaagaaagagaaggaacaccaccaatagaagaaagaaaagtagaaggagactgtcaagaaatggatctagaaaaaacaagatcagaaagaggagatggatcagacgtaaaagaaaaaacaccaccaaacccaaaacatgcaaaaacaaaagaagcaggagatggacaaccataa

SEQ ID NO: 3913 - RNA, 1209 nt, synthetic construct
  misc_feature 1..1209: note = AAA60003 variant
  source 1..1209: mol_type = other RNA
atgcaaatgtcaccagcactaacatgtctagtactaggtctagccctagtatttggagaaggaagtgcagtacaccatccgcctagctacgtagcacacttagcaagtgacttcggtgtccgagtattccaacaagtagcacaagccagtaaagacagaaacgtagtattttcaccatatggagtagcatcagtactagcaatgttacaattgacaacaggaggagaaacacaacaacaaatacaagcagcaatgggatttaaaatagacgataaaggaatggcaccagcattaagacacttatacaaagaacttatgggaccatggaacaaagacgaaatttcaacaacagacgcaatatttgtacaaagagatttaaaactcgttcaaggtttcatgccacacttcttccgcctattcagaagtacagtaaaacaagtagacttctcagaagtcgaacgagcaagattcatcataaacgactgggtcaaaacacacacaaaaggaatgataagtaacctactaggaaaaggagcagtagaccaactaacaagactcgttctagtaaacgcactatacttcaatggccaatggaaaacaccatttcccgattcctcaactcacagaagactatttcataaaagtgacggatcaacagtatcagtaccaatgatggcacaaacaaataaatttaattataccgaatttacaacacccgacggccactattacgacatactagaattaccttaccatggagacacactatcaatgtttatagcagcaccatatgaaaaagaagtaccactatcagcactaacaaacatactatccgcacaattaatatctcattggaaaggaaacatgaccagattaccacgattattagtactaccaaaattcagcctagaaacagaagtagatctaagaaaaccactagaaaatctaggaatgacagacatgttcagacaattccaagcagacttcacatccctatcagaccaagaacccttacacgtagcacaagcactacaaaaagtcaaaatagaagtaaatgaatcaggaacagtagcatcatcatccactgcagtaatcgtatcagctaggatggcacccgaagaaataatcatggacagaccatttctcttcgtagtaagacataatccaacaggcacagtactattcatggggcaagtaatggaaccataa

SEQ ID NO: 3914 - RNA, 1248 nt, synthetic construct
  misc_feature 1..1248: note = AAA36797 variant
  source 1..1248: mol_type = other RNA
atggaagacctttgcgtagcaaacacactctttgcactcaacttattcaaacacttagcaaaagccagtcctacacaaaacttattcttaagtccttggtcaataagctcaacaatggcaatggtatatatgggatcaagaggatcaacagaagatcaaatggcaaaagtacttcaattcaacgaagtaggagcaaacgccgtaacaccaatgacaccagaaaatttcacatcatgcggcttcatgcaacaaatacaaaaaggatcatacccagatgcaattctacaagcacaagcagcagataaaatacacagctccttccgaagcctaagttcagctataaacgcaagcactggaaactatctactagaaagcgttaacaaactattcggagaaaaatcagcatcattcagagaagaatacataagactatgccaaaaatactatagttcagaaccccaagcagtagacttcctagaatgcgcagaagaagcacgaaaaaaaataaacagctgggtaaaaacacaaacaaaaggaaaaataccaaacctactaccagaaggatcagtagacggagacacaagaatggtattagtaaatgcagtctattttaaaggaaaatggaaaacaccgtttgaaaaaaaactaaacggactatacccatttagagtaaactcagcacaaagaacaccagtacaaatgatgtacctaagagaaaaattaaacataggttacatagaagacttaaaagcacaaatactagaattaccatacgccggagacgtaagcatgtttctattactaccagacgaaatagcagacgtatcaacaggattagaactattagaatcagaaataacatatgataaactaaacaaatggacatcaaaagacaaaatggcagaagacgaagttgaagtatacataccacaatttaaactagaagaacattacgaattaagatcaatactaagatccatgggaatggaagacgcttttaacaaaggaagagcaaacttctcaggaatgagtgaaagaaatgatttatttctatcagaagtatttcaccaagcaatggtagacgtaaacgaagaaggaacagaagcagcagcaggaactggaggagtaatgacaggaagaacaggacacggaggaccacaattcgtggcagaccacccatttttattcttaatcatgcataaaataactaactgcatactatttttcggaagattcagttcaccataa

SEQ ID NO: 3915 - RNA, 528 nt, synthetic construct
  misc_feature 1..528: note = AAA60020 variant
  source 1..528: mol_type = other RNA
atgttaccaccaatggcactaccaagcgtaagttggatgttactatcatgcttaatgttactatcacaagtacaaggagaagaaccacaaagagaactaccaagcgcaagaataagatgtccaaaaggatcaaaagcgtacggaagccattgctatgcattattcttaagcccaaaatcatggacagacgcagacctagcatgccaaaaacgaccatcaggaaacttagtctcagtattaagcggagcagaaggatcattcgtaagctcattagtaaaatcaataggaaattcatactcgtacgtatggataggattacatgatccaacacaaggaacagaaccaaatggagaaggatgggaatggagctcaagcgatgtaatgaactatttcgcatgggaaagaaatccatcaacaataagctcaccaggacattgtgcatctctatcaagatcaacagcattcttaagatggaaagattacaattgcaatgtaagactaccatacgtatgcaaattcacagactaa

SEQ ID NO: 3916 - RNA, 528 nt, synthetic construct
  misc_feature 1..528: note = AAT11159 variant
  source 1..528: mol_type = other RNA
atgttaccaccaatggcactaccaagcgtaagctggatgctactatcatgcctaatgttactatcacaagtacaaggagaagaaccacaaagagaattaccaagcgcaagaataagatgtccaaaaggatcaaaagcatacggaagccattgctatgcattattcttaagcccaaaatcatggacagacgcagacttagcatgtcaaaaacgaccaagcggaaacttagtatcagtattaagtggagcagaaggatcattcgtaagtagtctagtaaaatcaataggaaactcatactcatacgtatggataggattacacgatccaacacaaggaacagaaccaaatggagaaggatgggaatggtcatcatcagatgtaatgaactatttcgcatgggaaagaaatccatcaacaataagttcaccaggacactgtgcatcactatctagatcaacagcattcttgagatggaaagattacaattgcaatgtcagactaccatacgtatgcaaattcacagactaa

SEQ ID NO: 3917 - RNA, 381 nt, synthetic construct
  misc_feature 1..381: note = AAH39863 variant
  source 1..381: mol_type = other RNA
atggataaatcactattactagaactaccaatattactatgttgctttagagcactatcaggatcactatcaatgagaaacgatgcagtaaacgaaatagtagcagtaaaaaataactttccagtaatagaaatagtacaatgtagaatgtgccatctacaattcccaggagaaaaatgtagcagaggaagaggaatatgcacagcaacaacagaagaagcatgcatggtaggaagaatgttcaaaagagatggaaatccatggttaacattcatgggatgtctaaaaaactgtgcagatgtaaaaggaataagatggagcgtatacttagtaaatttcagatgctgtagatcacacgatctatgtaacgaagacttataa

SEQ ID NO: 3918 - RNA, 1440 nt, synthetic construct
  misc_feature 1..1440: note = CCDS42826.1 variant
  source 1..1440: mol_type = other RNA
atgacaaccctagctggagccgtcccaagaatgatgagaccaggaccaggccaaaactaccctagatctggattcccactagaagtatcaacaccacttggacaaggacgagtaaatcaactaggaggagtttttataaacggaagacctttaccaaatcatataagacacaaaatcgtagaaatggcccatcatggaatcagaccatgcgtaatttccagacaactaagagtatcacatggatgcgtatctaaaattctatgtagatatcaagaaaccggttcaatcagaccaggagccataggagggtccaaaccaaaacaagtaactacaccagacgtagaaaaaaaaatcgaagaatacaaacgagaaaatccaggaatgttttcctgggaaataagagacaaactattaaaagatgcagtatgcgatagaaacacagtaccctcagtttcctccatatcaagaatattaagatcaaaattcggaaaaggagaagaagaagaagccgacttagaaagaaaagaggcagaagaatcagaaaaaaaagcaaaacactccatagatggaatactatcagaacgcgcatctgcaccacaatcagatgaaggttctgacatagattcagaaccagacttaccactaaaacgaaaacaaagacgatcgagaacaaccttcacagcagaacaactagaagaattagaaagagcattcgaaagaacacattacccagatatatacacacgagaagaattagcacaaagagccaaactaacagaagccagagtacaagtatggttctcaaacaggagagccagatggagaaaacaagctggagcaaaccaactaatggcctttaatcacctaatcccaggaggatttccacctaccgctatgcctacattaccaacatatcaattatccgaaacatcataccaacctacttctataccacaagctgtctctgaccccagcagtacagtccatagaccacaacccttaccaccaagcacggtacaccaatcaacaattccctctaaccctgatagctcatcagcttactgtctaccatcaacccgacatggattcagctcatatactgattcctttgtacccccaagtggaccatcaaaccctatgaaccctacaataggaaacggtctatcaccacaagtcatgggcctcttaactaatcacggcggtgtaccacaccaaccccaaactgactacgcattatcaccattaacaggaggactagaaccaacaacaacagtttctgcatcctgttcacaaagactagaccacatgaaatctctagactcactaccaacctcacaaagctactgtccaccaacatactctacaactggatattccatggatccagtaacaggatatcaatacggtcaatacggtcaatctaaaccatggactttctag

SEQ ID NO: 3919 - RNA, 1176 nt, synthetic construct
  misc_feature 1..1176: note = AAA58397 variant
  source 1..1176: mol_type = other RNA
atggacctagaaaaaaactatccaacacctagaacttcaagaacaggccatggaggcgtaaaccaattaggaggagtatttgtaaacggaagacctcttccagacgttgtaagacaaagaatagttgaattagcacatcaaggagtaagaccatgcgacataagcaggcaattaagagtctcacacggatgtgtatctaaaattctaggacgctactatgaaacaggttccataaaaccaggagtaataggaggctcaaaaccaaaagtagcaacaccaaaagtagtagaaaaaatagctgaatacaaaagacaaaacccaacaatgtttgcatgggaaataagagacagattactagcagaacgagtctgtgacaatgacacagtcccatcagtatcatcaataaatagaataattcgaacaaaagtacaacaaccaccaaatcaaccagttccagcatcatcacactccatcgtctcaaccggttcagttactcaagtatcatctgtttcaaccgacagtgcaggatcgtcctactcaatatcaggaatattaggaatcacttccccatcagcagatactaacaaacgaaaaagagatgaaggcatacaagaatccccagtaccaaacggtcactcactaccaggccgagacttcctacgaaaacaaatgagaggagacttattcacacaacaacaactagaagttctagaccgagtattcgaaagacaacactattcagatatatttaccactacagaaccaataaaaccagaacaaacaactgaatattctgcaatggcatcattagcaggcggtttagacgacatgaaagcaaaccttgcatccccaacacctgcagacataggatcctccgtccctggaccacaatcatatccaattgtaaccggaagagatttagcatcaactactctaccaggatacccacctcacgtacccccagcaggacaaggatcatattcagcaccaacattaaccggcatggtaccaggatcagaattttcaggaagtccatattcacatccacaatactcatcgtataacgattcatggagatttccaaatccaggactattaggatcaccatattactactcagcagcagcaagaggagcagctccaccagccgcagcaacagcctatgaccgacattaa

SEQ ID NO: 3920 - RNA, 873 nt, synthetic construct
  misc_feature 1..873: note = AAF25807 variant
  source 1..873: mol_type = other RNA
atgagaatatttgcagtattcatcttcatgacatactggcacttattaaacgcattcaccgtaacagtaccaaaagacctctacgtagtagaatacggatcaaacatgacaatagaatgcaaatttccagtagaaaaacaactagacttagcagcactaatagtctactgggaaatggaagacaaaaatataatacaattcgtacacggagaagaagacctaaaagtacaacactcttcatacagacaaagagcaagactcctaaaagatcaactatcattaggaaacgcagcactacaaataacagacgtcaaattacaagacgcaggcgtatacagatgcatgatatcatacggaggagccgactacaaaagaatcacagtaaaagtaaacgcaccctacaacaaaataaaccaaagaatactcgtagtcgacccagtaacctcagaacacgaactaacatgtcaagcagaaggatacccaaaagcagaagtaatatggacatcaagcgaccaccaagtattatcaggaaaaacaacaacaacaaacagcaaaagagaagaaaaactattcaatgtaacaagcacactaagaataaacacaacaacaaacgaaatattctactgcacattcagaagattagacccagaagaaaatcacacagcagaattagtaataccagaattaccactcgcacacccaccaaacgaaagaacacacttagtcatactaggtgcaatactactatgcttaggagtagcactaacattcatatttagattaagaaaaggtagaatgatggatgtaaaaaaatgcggaatacaagacacaaactcaaaaaaacaatccgacacacatttagaagaaacataa

SEQ ID NO: 3921 - RNA, 867 nt, synthetic construct
  misc_feature 1..867: note = AAH74740 variant
  source 1..867: mol_type = other RNA
atgcaaatacctcaagcaccatggccagtagtctgggctgtattacaactaggatggagaccaggatggtttttagatagcccagacagaccatggaatccaccaactttttcaccagcacttttagtagtaacagaaggagataatgccacatttacatgctcattttcaaatacttcagaaagttttgttctaaattggtatagaatgtcaccatcaaaccaaacagacaaattagcagccttccctgaagatagatcacaaccaggacaagattgtagatttagagtaacacaattacctaacggaagagatttccatatgagtgtagtaagagcacgtagaaatgatagtggaacatatttatgtggagcaatatcattagcaccaaaagcacaaataaaagaatcattaagagcagaactaagagtaacagaaagaagagcagaagttccaacagcacatccatcaccctcaccaagaccagcaggtcaatttcaaacattagtagtaggagtagtaggaggtttattaggatcacttgtattactagtctgggtactagctgtaatatgctcaagagcagcaagaggaacaataggagcaagaagaacaggtcaacccttaaaagaagatccttcagcagtaccagtattctcagtagactatggagaattagattttcaatggagagaaaaaacaccagaacctccagtaccatgtgtacctgaacaaacagaatatgccaccatagtattcccaagtggaatgggaactagtagtccagctagacgaggttcagcagatggaccacgaagcgcacaaccattaagaccagaagatggacattgcagttggccattataa

SEQ ID NO: 3922 - RNA, 1008 nt, synthetic construct
  misc_feature 1..1008: note = AAC95296 variant
  source 1..1008: mol_type = other RNA
atgggatcagcatcaccaggattaagtagcgtttcaccaagtcatctactattaccaccagatacagtaagcagaacaggcttagaaaaagcagcagcaggagcagtaggactagaaagaagagactggtcaccatcaccaccagcaaccccagaacaaggattatcagcattttatctatcatactttgacatgctctatccagaagacagcagttgggcagcaaaagcacctggagcatcctcacgagaagaaccaccagaagaaccagaacaatgtccagtaatagacagtcaagcaccagcaggaagtttagacttagtaccaggcggactaaccttagaggaacattcactagaacaagtccaatcaatggtagtaggagaagtattaaaagatatcgaaacagcatgcaaactcttaaacataaccgcagatccaatggactggtcaccaagtaacgtacaaaaatggttactatggacagaacaccaatacagacttccaccaatgggaaaagcatttcaagaattagctggaaaagaattatgcgcaatgtcagaagaacaatttagacaaaggtcaccattaggaggagatgtgttacatgcacatctagatatatggaaatccgcagcatggatgaaagaaagaacaagtcctggagcaatacattattgtgcctcaacatcagaagaatcatggacagattcagaagtagacagctcatgctcaggacaaccaatacacttatggcaattcttaaaagaactattactaaaaccacatagctatggaagattcattagatggctaaataaagaaaaaggaatattcaaaatagaagatagcgcacaagtagcaagactatggggcatacgaaaaaacagaccagcaatgaattatgataaattatccagaagtatacgacaatattacaaaaaaggaataataagaaaacccgacataagccaacgattagtatatcaatttgtacatcccatataa

SEQ ID NO: 3923 - RNA, 2217 nt, synthetic construct
  misc_feature 1..2217: note = AAA36429 variant
  source 1..2217: mol_type = other RNA
atgcaaccaagatgggcccagggagccacaatgtggttaggtgtattattaacactattattatgtagctccctagaaggacaagagaatagctttacaataaacagcgtcgatatgaaatcattaccagactggactgtccaaaatggtaaaaaccttacactgcaatgcttcgcagacgtaagtacaacctcacacgtaaaacctcaacaccaaatgttattttacaaagacgacgtactattctacaacataagttcaatgaagtcaactgaatcatacttcatacccgaagtaagaatatacgacagcggaacatataaatgtactgttatcgtaaataacaaagaaaaaaccacagcagaatatcaattactcgtcgaaggagtaccaagtccacgagtaacactggacaaaaaagaagctatacaaggaggaatagtaagagtaaactgttcagtaccagaagaaaaagcacctatacattttacaatagaaaaactagaattaaatgaaaaaatggtaaaattaaaacgagaaaaaaacagtagagatcaaaacttcgtaatattagaatttccagtagaagaacaagatagagttttaagctttagatgtcaagctagaatcatttctggtatccatatgcaaacatcagaatccacaaaaagtgaactagtaaccgtcacagaatccttctctaccccaaaattccatatatccccaacaggaatgataatggaaggagcccaattacatataaaatgtacaatacaagtaacacacctcgcacaagaatttccagaaattatcatccaaaaagacaaagcaatagtagcccacaatagacacggaaataaagcagtctactcagtaatggccatggtagaacactcaggcaactacacatgcaaagtcgaatcctcaagaataagcaaagtatcaagcatagtagtgaatataaccgaattattctcaaagccagaactagaatcatcatttacacacctcgaccaaggcgaacgtttaaacttatcatgttccattccaggagcaccaccagccaacttcacgatacaaaaagaagatacaatcgtatcgcaaacccaagactttacaaaaatagcaagtaaaagcgacagtggcacatacatatgtacagccggcatcgataaagtcgtcaaaaaatcaaatacagtccaaatagtagtttgcgaaatgttatcacaaccaagaatttcctacgacgcccaattcgaagtaataaaaggtcaaactatcgaagtcagatgtgaatcaataagtggaacattacccatatcatatcaattactaaaaacaagcaaagtactggaaaactccacgaaaaactccaacgaccctgcagttttcaaagacaatcccacagaagacgttgaatatcaatgcgtagcagataactgccattcacatgccaagatgctatccgaagtacttcgagtcaaagttatagcccccgtcgacgaagtacaaattagtatactatcaagtaaagttgtagaatcaggagaagacatagtcttacaatgcgcagttaacgagggctctggaccaatcacatataaattttaccgtgaaaaagaaggaaaaccattctatcaaatgacaagcaatgccacccaagcattttggacaaaacaaaaagcatcaaaagaacaagaaggtgaatattactgtactgcattcaacagagcaaaccatgcctcaagcgtacctcgctcaaaaatcttaaccgttcgcgttatacttgcaccctggaaaaaaggtctaatcgcagtcgttataataggagtaataattgcactactaataatagcagcaaaatgttactttcttagaaaagcaaaagccaaacaaatgccagtcgaaatgtcaagacctgcagtccctctattaaattctaacaatgaaaaaatgtcagacccgaatatggaagcaaattcacactacggacacaacgacgacgtcagaaaccacgcaatgaaacctataaacgacaataaagaaccattaaactctgatgtacaatatacagaagtacaagtctcaagcgcagaaagtcataaagacctaggcaaaaaagatactgaaacagtatactctgaagttcgaaaagcagtaccggacgcagtcgaaagcagatacagtagaaccgaaggttcactagacggcacctaa

SEQ ID NO: 3924 - RNA, 2736 nt, synthetic construct
  misc_feature 1..2736: note = AAG23134 variant
  source 1..2736: mol_type = other RNA
atggcacaactatttttaccattattagcagctctagtactagcgcaagcaccagcagctttagcagatgtattagaaggagattccagcgaagatcgagcattccgagtcagaatagcgggagacgctccactacaaggagttttaggaggagctctaaccataccatgtcatgtacattatcttagaccacctccatctaggagagctgttctaggaagtcccagagttaaatggacatttttatcaagaggaagagaagctgaagtacttgttgcaagaggagttagagtaaaagtcaatgaagcatatagattcagagtagctttaccagcatacccagcaagcctaactgacgtatctcttgcactttcagaactaagaccaaacgatagtggaatttacagatgtgaagtacaacacggtatagacgattcatcagatgcggttgaagtaaaagtaaagggtgtagtattcctatatagagaaggatcggcaagatacgcattctccttcagtggagcacaagaagcatgcgcccgtataggtgctcacatagcaacaccagaacaactttacgcagcatacttagggggatacgaacaatgtgatgctggatggctaagtgatcagactgttagatatccaatacaaacacctagagaagcatgctacggggatatggatggattcccaggagtaagaaattacggagttgtagacccagacgatttatatgacgtctactgctatgcggaagatttgaatggagaattatttttaggagatccaccagaaaagttaacactagaagaagctcgagcttattgccaagaaagaggcgcagaaatagctacaactggacagctatacgcagcatgggatggaggattagatcattgctccccagggtggttagctgatggatcagtacgatatcccatagtaacaccaagccagcgatgcggaggaggtttaccgggtgtaaaaacattatttttgtttcctaaccaaacaggatttcctaataagcacagcagattcaatgtctattgttttagagattccgcgcaaccaagcgcaataccagaggctagtaatcccgcctcaaatccagcaagcgatggattggaagcaatagtgacagtaacagaaactttagaagaattacaactaccacaagaagcgaccgaatcagaatcaagaggagcaatctattcaatcccaataatggaagatggtggcggaggaagttcaacaccagaagatccagcagaagcacctagaaccttgttagagttcgaaacacaatcgatggtaccaccaacaggtttcagtgaagaggaaggtaaggcgttagaagaagaagaaaaatacgaggatgaagaagaaaaagaagaagaagaagaagaagaagaagtggaagatgaagccctatgggcgtggcctagtgaactatcaagcccagggcctgaggcctcactaccaacagaacccgctgctcaagaagaatcactatcacaagcaccagcacgagcagttctacaaccaggtgcaagtccattacctgacggtgaatccgaagcatcacgaccgccaagagtccatggaccacctactgaaacattacctacccctagagagagaaacctagcatccccatcaccttctactctcgtagaagcacgagaagtaggagaagcgacaggaggaccagaactaagtggagtaccaagaggagagtctgaagaaacagggtcgtctgaaggagcaccatcacttcttccagcaacaagagcacccgaaggaacaagggaattagaggcaccaagtgaagacaattcaggtcggacagctcctgcaggaacgagcgttcaagcacaaccggtactaccaacagattccgcatccagaggtggtgtagcagtagtgccggcaagtggagattgtgtcccaagcccatgtcacaatggagggacatgcctagaagaagaggaaggagttagatgtttatgcttgccaggttacgggggagatttatgtgacgtaggcctacgattctgtaatcccggttgggatgcatttcagggtgcatgttacaaacatttcagtacaagaagatcatgggaagaagcggaaacacaatgcagaatgtacggtgcacacttagctagtatctcaacacccgaagaacaagactttataaataacagatatagggaataccaatggattggattaaatgatagaacaattgaaggagatttcctatggtcagatggtgttccattgctctatgaaaattggaatccaggccaacctgacagctatttcttatccggggagaactgcgttgtaatggtatggcacgatcaaggacaatggagcgatgttccatgtaattatcatcttagttacacctgtaagatgggtctggtatcttgtggtccgccacctgaactaccattagcacaagtttttggaagaccaagattacgttacgaagtagataccgtgttacgatacagatgtcgagagggtctagcgcaaagaaacctaccacttatacgctgccaagaaaacgggcgttgggaagcccctcaaatttcatgtgtaccaagaagaccagcaagagcattacacccagaagaagaccctgagggtcgtcagggaagactattaggaagatggaaagcactgctaataccacctagtagtccaatgcccggaccttaa

SEQ ID NO: 3925 - RNA, 3321 nt, synthetic construct
  misc_feature 1..3321: note = AAA60049 variant
  source 1..3321: mol_type = other RNA
atgagattacccggcgctatgcccgcactcgcactaaaaggtgaattactattactatccctgttattactacttgaacctcaaataagccaaggacttgtggttacaccacctggtccagagttagtattaaatgtttccagcacattcgtattaacatgctcaggaagcgctccagtagtttgggaaagaatgtctcaagaaccacctcaggaaatggcaaaagcgcaagacggcaccttttcatctgtattaacactgaccaatttaacaggtctagacacaggtgagtatttttgtacacataatgattcaagaggcctagaaactgacgaacgaaagcgcttatatatatttgtaccagacccaacagttggatttctgccaaatgatgcagaagaactatttatattcttaactgaaataactgaaataactattccatgtcgagtaacagatcctcaattagtagttacacttcatgagaagaaaggagatgttgcactaccggtcccatatgatcatcaacgaggattctcaggtatattcgaagaccgatcatacatatgcaaaactacaataggcgatagagaagtagacagtgatgcatattatgtatatcgactacaagtttcaagcataaacgtatcagtcaatgcagtccaaaccgtagtaagacaaggagaaaatataacactaatgtgtatagtaataggaaacgaagtagtaaattttgagtggacctacccacgaaaagaatcaggccgactcgtagaacctgtgacagatttcctattagacatgccataccacataagatccattcttcatataccctcagctgaacttgaagactcaggaacatatacctgcaacgttacagaatcggttaatgaccatcaagacgaaaaagctataaacatcacagtggtcgaatcaggatatgtaagactcctaggcgaagtaggtacactacaattcgccgaacttcatagaagtagaacactacaagttgtttttgaagcatacccgccacccacagttttatggtttaaagacaatagaacattaggcgattctagtgcgggagaaattgcattatctacacgaaatgtaagtgaaacaagatatgtctcagaattaacactcgtaagagtaaaagttgcagaagcagggcactacacaatgcgcgcattccacgaagacgccgaagttcaactttccttccaactccaaataaatgttccagtcagagtcctagaattaagcgaaagccacccagactctggtgaacaaactgtaagatgtagaggcaggggcatgccacagccaaatataatatggagcgcatgtcgagatctcaaaagatgcccgcgcgaacttcccccaacactcttaggaaattctagtgaagaagaatcacaattagaaacaaatgtcacgtactgggaagaagaacaagaatttgaagtagtaagcacattaagattacaacatgtagatagacccttaagtgtacgttgcactttaagaaacgcagtcggacaagacacccaagaagtaattgtagtaccacactcacttccattcaaagtggtagtaatatccgcaatcctagctctagtcgtattaacaataattagcttaataatattaataatgttatggcaaaagaaaccgagatatgaaattagatggaaagttatagaaagtgtatctagtgatggtcacgaatatatttacgttgaccctatgcaattaccatatgattctacctgggaattaccacgagaccaactggtactcggtagaaccctaggatctggagcgttcggtcaagtagttgaagcaacggcacatggactaagtcattcacaggctactatgaaagtggctgtcaaaatgcttaaaagtaccgcaagatcttccgaaaaacaagctctaatgtctgaattaaaaattatgagccatttgggtcctcacctaaacgtagttaacctattaggagcatgtacaaaaggaggaccgatatatataataaccgaatattgtagatatggtgatctagtagactacctacacagaaataaacacacatttctacaacatcatagtgataaacgaagaccaccatctgccgaactctattcaaatgctttaccagtggggctacccttaccctcccacgtatccctaactggagaatctgatggaggttacatggacatgagcaaagacgaaagtgtcgactatgtacctatgttagacatgaaaggtgacgtaaaatatgctgatattgaaagttcaaactatatggccccatacgataattacgtacctagtgcccccgagcgtacctgtcgagccacactaattaacgagagtcctgtcttaagctacatggatctagtcggcttttcctatcaagtagctaacggaatggaatttctagcatctaaaaattgtgttcatcgcgacttagcagcccgaaacgtactaatttgcgaaggaaaattggttaaaatttgtgacttcggactagcccgcgatataatgcgagattcaaactatatcagtaaaggctcaacattcttacctttaaagtggatggctccagagtccattttcaactcactatacacaacactaagcgacgtatggtcatttggtatccttctttgggaaatattcactctaggagggacaccatacccagaactaccgatgaacgaacaattctacaatgctattaaaagaggatatagaatggctcaaccagctcatgcatctgatgaaatatatgaaataatgcaaaagtgctgggaggaaaaattcgaaataagaccacccttctcacaattagtattgcttctagagagacttctcggagaaggatataaaaagaaataccaacaagttgacgaagagttcctaagaagcgatcatcccgcaatcttaagaagtcaagctcgtttaccaggcttccacggactaagatccccattagatacatcgtcagtactttatacagccgtacaaccaaacgaaggagataacgactatattatacctttaccagatcctaaaccagaagtagctgatgagggaccactcgaaggtagtccaagtcttgcatcttcaactcttaacgaagtaaatacgagctcaacaatttcatgcgattcaccattagagccacaagacgaaccagaacctgagcctcaattagaactacaagtagaaccagaaccagaactagaacaattacccgatagtggttgcccggctcccagagctgaagctgaggactcgtttctataa

SEQ ID NO: 3926 - RNA, 942 nt, synthetic construct
  misc_feature 1..942: note = EAX03935 variant
  source 1..942: mol_type = other RNA
atgttattatccaaaataaattcacttgcacatctaagagcagcaccatgtaatgatctacacgctacaaaactagcacccggaaaagaaaaagaaccattggaatctcaatatcaagtaggacccctattaggatctggaggattcggatcagtatattcaggcataagagtctcagacaatcttcccgtagcaataaaacatgtagaaaaagacagaatatcagactggggagaattaccaaatggaacaagagtaccaatggaagtagtactattaaaaaaagtatcctcaggttttagtggagtaataagattattagattggtttgaaagaccagattcatttgtattaatactagaaagaccagaaccagtacaagatctttttgactttataacagaacgaggcgcattacaagaagaattagcaagatcatttttttggcaagtactagaagcggtcagacactgtcacaattgcggtgtattacacagagatataaaagatgaaaatatactaatagatttaaatagaggagaactaaaattaatcgacttcggatcaggagcactattaaaagatacagtatacacagactttgatggaactagagtctattcaccaccagaatggataagataccatagatatcacggaagatcagccgctgtatggagtttaggcatattattatatgatatggtatgtggagacataccatttgaacacgacgaagaaataataaggggccaagtattttttagacaaagagtatcatcagaatgtcaacatttaataagatggtgcttagcattaagaccaagtgacagacccacattcgaagaaatacaaaatcacccatggatgcaagacgtattgttaccacaagaaacagcagaaatacatttacattccttatccccaggaccatcaaaataa

SEQ ID NO: 3927 - RNA, 303 nt, synthetic construct
  misc_feature 1..303: note = AAB81333 variant
  source 1..303: mol_type = other RNA
atggcagatgaagaaaaattaccaccaggatgggaaaaaagaatgagtagaccaagtggaagaggatattattttaatcatataacaaatccaagtcaatgggaaagaccaagtggaaatagtagtagtggaggaaaaatatggcaaggagaaccagcaagagtaagaagaagtcatttattagtaaaaccagtaaaagcagcattagatttagcagcaggaaatcatccagatcaaggaggaggaccaggagcagatcaaagattacatccagaagatcaagggagaagagaaggattataa

SEQ ID NO: 3928 - RNA, 492 nt, synthetic construct
  misc_feature 1..492: note = AAC50492 variant
  source 1..492: mol_type = other RNA
atggcagatgaagaaaaattaccaccgggatgggaaaaaagaatgagcagaagctcaggaagagtatattactttaaccatataacaaacgcaagccaatgggaaagaccaagcggaaactcaagttcaggaggaaaaaatggacaaggagaaccagcaagagtaagatgtagccatctactagtaaaacactcacaatcaagaagaccatcaagctggagacaagaaaaaataacaagaacaaaagaagaagcactagaactaataaacggatacatacaaaaaataaaaagcggagaagaagactttgaaagtctagcaagccaattctcagactgtagcagtgcaaaagcaagaggagatctaggagcatttagtagaggacaaatgcaaaaaccattcgaagacgcaagctttgcattaagaacaggagaaatgagtggaccagtatttacagatagcggaatacatataatactaagaacagaataa

SEQ ID NO: 3929 - RNA, 138 nt, synthetic construct
  misc_feature 1..138: note = AAH31971 variant
  source 1..138: mol_type = other RNA
atgcaaaaaccattcgaagacgcatcatttgcattaagaacaggagaaatgtcaggaccagtatttacagattcaggaatacatataatactaagaacagaatgctggagacaaacaagaggaccaaactgtttctaa

SEQ ID NO: 3930 - RNA, 639 nt, synthetic construct
  misc_feature 1..639: note = AAG22596 variant
  source 1..639: mol_type = other RNA
atgaaagtcttcaaattcataggactaatgatattactaacatccgcattctcagcaggttcaggacaatcaccaatgacagtactatgctcaatagactggttcatggtaacagtacaccctttcatgctaaacaatgacgtatgcgtacacttccacgaactacacctaggactaggatgcccaccaaaccacgtacaaccacacgcataccaattcacatacagagtaacagaatgcggcataagagcaaaagcagtatcacaagacatggtaatatactcaacagaaatacactactcatcaaaaggaactccatcaaaattcgtaataccagtatcatgtgcagcaccacaaaaatcaccatggctaacaaaaccatgctcaatgagagtagcatcaaaatcaagagcaaccgcacaaaaagatgaaaaatgttacgaagtattctcactatcacaatcctcccaaagaccaaactgcgactgcccaccctgcgtattttcagaagaagaacacacacaagtaccatgtcaccaagcaggagcacaagaagcacaaccactacaaccctcacacttcttagacatatcagaagactggtcactacacacagacgacatgataggatcaatgtaa

SEQ ID NO: 3931 - RNA, 1986 nt, synthetic construct
  misc_feature 1..1986: note = AAB00386 variant
  source 1..1986: mol_type = other RNA
atggatctagtactaaaaagatgtttattacatttagcagtaataggcgcattactagcagtaggagcaacaaaagtaccacgaaaccaagattggttaggcgtatcacgacaactacgcacaaaagcatggaaccgtcaactatatccagaatggactgaagcacaaagattagattgttggagagggggacaggttagtttaaaagttagtaatgacggaccaacactaattggagcaaacgcaagttttagcatagcattaaatttcccaggatcacaaaaggtactacccgatggtcaagtaatttgggttaataataccataataaatggatcacaagtatggggaggacaaccagtatatcctcaagaaactgacgatgcatgtatatttcccgacggaggaccatgtccatctggtagttggtcccaaaaacgatcatttgtatatgtgtggaaaacatggggacaatattggcaagtattaggaggtcctgtatcaggactaagtattggaacaggaagggcaatgttaggaacacatacaatggaagtcactgtctaccatagacgcggatcgagatcatatgtccccttagcccattcatcttcagcattcacaataactgatcaagtaccattctccgtatctgtatcacaattaagagcattagatggaggaaataaacattttctacgaaatcaacctctaacatttgcattacaattacatgatccgtcaggataccttgcagaagcagatctttcatatacatgggactttggtgattcgtccggaacactgatttcaagagctctagttgtaacccatacataccttgaacccggcccagtcacagctcaggtagtattacaagcagctataccattgacgtcctgtggctcaagtccagtacctggaacaacagatggacataggcctactgcagaagcaccaaacacgacagccggacaagtacctacgacagaagtggtcggaacaacacctggtcaagcacctaccgcagaaccaagtggcacaacatcagttcaagtcccaacaacggaagtaataagtacggcaccagtacaaatgccaacagcagaatctaccggcatgacaccagaaaaagttccagtttctgaagtaatgggaacaacattagccgaaatgtctacacctgaagctactggaatgactccggcagaagtatcaattgtagtactatcaggtacaactgcagcgcaagtcaccactacagaatgggtagaaacgacggcacgggaacttccgataccagaacctgaaggaccagatgcatcatcaattatgagtacagaatcaataacaggatcacttggtccacttctagacggaaccgctaccctaagattagtaaaaaggcaagtaccacttgattgcgtcttatatcgatacggatcatttagtgtaactctagatatagtacaaggaatagaaagtgctgaaatactacaagcagtaccttcaggagaaggtgatgcttttgaactaactgtatcatgccaaggtggacttccaaaagaagcatgcatggaaatatcaagtccaggatgccaacctccagcacaaagactatgccaaccagttctccctagccctgcatgtcaattggtactccatcaaatactaaagggaggtagcggaacctattgcctaaacgtatctctagcagacactaatagcttagcagtagtttcaactcaactcataatgccaggtcaagaagcaggtctaggacaagttccattaattgtaggcattttattagttctaatggctgttgtcttagctagtctaatatacagaagaaggttaatgaaacaagatttttctgtaccacaactcccacattcgtcatcacattggttaagattgccaagaatattttgttcatgccccatcggagaaaattcacctctactatcaggccaacaagtctaa

SEQ ID NO: 3932 - RNA, 2649 nt, synthetic construct
  misc_feature 1..2649: note = CCDS10255.1 variant
  source 1..2649: mol_type = other RNA
atggaaccagcaccagcaagatccccacgaccacaacaagacccagctagacctcaagaaccaacaatgccaccccctgaaacaccttcagaaggaaggcaacctagtccatctccaagccccaccgaacgtgcgcccgcatcggaagaagaatttcaatttttaagatgtcaacaatgccaagcagaagcaaaatgccccaaattactgccatgcttacatactttatgttcgggctgcttagaagcaagtggaatgcaatgcccaatctgtcaagccccatggccattaggtgcagacacccccgccttagacaacgtattctttgaatcattacaacgaaggctctcagtataccgacaaatagttgatgcacaagctgtttgcacaagatgcaaagaaagtgcagacttttggtgttttgaatgcgaacaattactatgtgcaaaatgcttcgaagcccaccaatggtttctaaaacatgaagcacgaccattagcagaactaagaaatcaaagcgtaagagaatttttagatggcacgaggaaaaccaataatatcttttgctctaaccctaatcacagaacaccaactctcacaagtatttactgcagaggctgctcaaaaccactatgttgctcatgcgcactattagatagtagtcattcagaattgaaatgcgacataagtgcagaaatacaacaaagacaagaagaattagatgcaatgacacaagcattacaagaacaagatagtgcttttggagcagttcacgcccaaatgcatgccgctgtaggacaattaggtagagcacgtgcagaaacagaagaacttataagagaacgagttagacaagtcgtcgctcacgttcgtgcacaagaacgcgaattattagaagcagttgatgcaagatatcaaagagactatgaagagatggcatcccgacttggaaggctcgatgcagtattacaaagaataagaacaggatctgctttagtacaacgtatgaaatgctatgcatctgatcaagaagtactagatatgcatggatttctaagacaagcactttgccgacttcgtcaagaagaaccacaaagcctacaagcggccgtacgaacagatggttttgatgaatttaaggttcgccttcaagacttgtcttcatgcataacgcaaggaaaagacgctgctgtttctaagaaagcctcaccagaagcagcatcaacccctagagacccaatagatgttgatttacccgaagaagcagaaagagttaaagcacaagttcaagcactaggcttagcagaagcacaaccaatggcagtagttcagtcagttccaggagcacaccccgttcctgtatacgcattctctataaaaggtccttcttatggtgaagatgtatctaatacaacgacagcacaaaaacgaaaatgttcacaaacacaatgtccccgaaaagtcatcaaaatggaaagtgaagagggtaaagaagctagactagcacgatcaagtccagaacaaccccgaccatctacatcaaaagctgtatctccaccacatcttgatggacctccatcccctaggtcacctgttatcggttcagaagtcttcttaccaaacagcaaccatgtagcatcaggtgcaggagaagcggaagaaagagttgttgttatatcatcatcagaagactctgatgctgaaaactcatcctcccgcgaacttgatgattctagttcagaatcatcagatttacaattggaaggaccatctaccttaagggttcttgatgaaaatctagcagatccacaagcggaagatcgacccttagtattctttgatctaaaaatagacaatgaaacacagaaaataagtcaattagcagcagtaaaccgtgaatcaaaatttcgagtagtaatacaaccagaagcattcttttccatttatagtaaagcagtttcactagaagtaggcctacaacactttttatcatttttatcctctatgcgacgcccaattctagcgtgctataaactttggggacctggactaccaaactttttccgtgctttagaagatataaatcgactatgggagttccaagaagccatctcgggatttctagcagcactacctctaataagagaaagggtaccaggagccagctcatttaaacttaaaaacttagcacaaacttatttagcaaggaatatgagtgaaagaagcgccatggcggctgtactagccatgagagatctctgcagacttctagaagtctcacccggcccacaacttgcacaacatgtatatcccttctcgagtttacaatgttttgcttcactccaaccattagtacaagcagctgtacttccacgtgcagaagcacgactattagccttacataatgtttcatttatggaattactgagcgcacaccgaagagatcgacaaggaggtctaaagaaatacagcagatacttatcgctacaaactaccacacttccaccagcacaaccggctttcaacctccaagctctaggtacatactttgaaggtttacttgaaggccctgctttagcaagggccgaaggtgtgagcacacctttagcaggacgaggattagcagaaagagcatcacaacaatcctaa

SEQ ID NO: 3933 - RNA, 3228 nt, synthetic construct
  misc_feature 1..3228: note = CCDS46409.1 variant
  source 1..3228: mol_type = other RNA
atggtagtagaagtagattctatgccagcggcatcctcggtaaagaaaccatttggattaaggagcaaaatgggtaaatggtgttgtagatgttttccatgttgtagagaatctggaaaatcaaatgtcggcacttcaggagaccatgacgatagtgctatgaaaaccttacgctcaaaaatgggaaaatggtgcagacattgtttcccatgctgtagaggaagtggtaaatcaaacgtaggagcttcaggcgaccacgatgatagtgcaatgaaaacactaagaaacaaaatgggtaaatggtgttgccactgttttccatgctgcagaggaagctcgaaaagtaaagtcggcgcctggggagattacgatgactctgcattcatggaaccaaggtatcatgtgcgaggagaagacttggataaactacacagagccgcctggtgggggaaagttcctcggaaagatttaatcgtcatgttaagagacacagatgtaaacaaacaagataaacagaaaagaaccgcattacatttagcatcagcaaacggaaatagcgaagtagtaaaactgttattagacagacgatgccaattaaacgtgctagataacaagaaaagaacggccctaataaaagcagttcagtgccaagaagatgaatgtgcattaatgttattagaacatggtacagacccaaatataccagacgaatacggcaacacaacactacattacgctatatataacgaagataaattaatggcaaaagcattgttactctatggagcagatatagaaagcaaaaataaacatggactaacaccactgctacttggtgtccatgaacagaaacaacaagtggtaaaatttctaataaagaagaaagcaaatctcaatgccctcgatcgttatggaagaactgcactaatactagcagtatgttgcgggtcagcaagtatcgtaagtttattactcgaacaaaacatagacgtttcatcgcaagacctttcaggtcaaacagctcgagaatatgccgtaagctctcatcatcatgtaatatgtcaattattatcagactacaaagaaaaacaaatgctgaaaatatcgtcagaaaattcaaatccagaacaagatctcaaactaacatcggaagaagaaagtcaacgtttcaaaggctcagaaaatagtcaaccagagaaaatgtctcaagaaccagaaataaacaaagacggcgatagagaggtagaagaagagatgaagaaacatgaatcaaacaacgtaggactcctagaaaatttaacgaacggagtcactgcgggaaacggcgataatggacttataccacagcgtaaaagccgcacaccagaaaatcaacaattcccagacaacgaaagtgaagaatatcatcgaatatgcgaactattgtctgattacaaagaaaaacaaatgcccaaatattcatcggaaaatagcaaccccgaacaggatcttaaactcacgagtgaagaagaaagtcaaagattaaaaggatcagagaatggccagcccgagaaaagatctcaagaaccagaaataaataaagatggtgacagagaactagaaaatttcatggcaatcgaagaaatgaagaaacaccgcagcactcacgtaggatttccagaaaatctcacgaatggagcaactgcagggaatggagacgacgggttaataccgccaagaaaatcaagaactccagaaagccagcaatttccagataccgaaaatgaagaataccatagcgacgaacaaaacgatacacaaaaacaattttgcgaagaacaaaatacaggaatattacatgacgaaatattaatacatgaagaaaaacagatagaggtagttgagaaaatgaactctgaactttcactctcatgcaagaaagaaaaagatatactacatgaaaactcaacactaagagaggaaattgcaatgctgcgactggaattagacacaatgaaacatcaatctcaactacgagaaaagaaatatctggaagatatagaatcagttaagaaaagaaatgataatttactgaaagcgctccaattaaatgaattaaccatggacgacgatactgctgttctagtaattgataatggatctggaatgtgcaaagctggattcgctggagacgacgcacctcgcgcagtatttccatctatagtaggcagaccaagacaacaaggcatgatgggtggtatgcatcaaaaagaatcttacgtaggtaaagaggcgcaatcaaaaagaggaatacttaccctaaaatacccaatggaacacggaataataacaaattgggatgatatggagaaaatatggcatcacacattttacaatgaactgcgggtggcgccagaagaacacccagtattacttaccgaagctacgttaaaccccaaagcgaatcgagagaaaatgacacagatcatgtttgaaacctttaatacaccagccatgtacgtagctatacaagcagtactgtcactatacacaagtggaagaactacaggaatagtaatggattccggagatggtgtaactcatacagtccccatatacgaaggcaacgccttacctcacgcaacactcagactggacttagcaggtagagaattaccagactacttaatgaaaattttaacagaacacggatacagatttactacaatggcggaaagagaaatcgtgagagatataaaagaaaaactatgttatgttgcattagattttgaacaagaaatggcaactgtagcttccagtagttcgctagagaaaagttatgaactcccagatggacaagtaataacgataggcaacgaaagattcagatgtccagaagccttattccaaccctgctttttaggaatggaaagctgcggcattcatgaaaccacatttaatagcataatgaaatcagacgttgacatcaggaaagatttatacacaaatacagtactaagcggaggaacaactatgtaccccggaatggcacatagaatgcaaaaagaaatagctgcattagcaccaagtatgatgaaaataagaataatagccccgcctaaaagaaaatattcagtatgggtcggcggaagtatactagcctcacttagtacatttcaacaaatgtggataagtaagcaagaatatgacgaatcaggaccaagtatagtacatcgcaaatgtttataa

SEQ ID NO: 3934 - RNA, 1755 nt, synthetic construct
  misc_feature 1..1755: note = CCDS13562.1 variant
  source 1..1755: mol_type = other RNA
atggtcgcagaagtatgctccatgccaactgcatcaacagttaaaaaaccgttcgacttaagatcaaaaatgggaaaatggtgccaccacaggttcccttgctgcagaggctcaggaaaatcaaacatgggaacaagcggcgaccacgacgactcattcatgaaaatgctaagatcaaaaatgggaaaatgctgtagacactgttttccgtgttgcagaggctctggaacatcaaatgtcggaacaagcggagaccatgaaaacagctttatgaaaatgttaaggagtaagatgggtaaatggtgctgtcactgcttcccgtgttgcagaggtagtggaaaatcaaatgtcggcgcatggggagactacgaccacagtgctttcatggaaccgagataccatataaggagagaagacctagacaaattacacagagccgcatggtggggaaaagtaccaagaaaagatcttatagtcatgctaagagatacagacatgaacaaaagggataaagaaaaaagaacagcactccacttagcctcagcaaacggaaactcagaagtagtacaattgttattagaccgaagatgccaactaaatgtattagataacaaaaaaagaacagcactaataaaagcgatccaatgccaggaagacgaatgcgtactaatgctacttgaacacggagcagatagaaacataccagacgaatatggtaacacagcactacactacgcaatctacaacgaagacaaattaatggcaaaagcactactactatacggagcagacatagaaagtaaaaacaaatgcggactaacacctctactactgggagtacatgagcagaaacagcaagtagtaaaattcctcataaaaaaaaaagctaacttaaatgtattagacagatatggaagaaccgctttaatactcgcagtatgttgcggaagcgcaagcatagtcaatctacttttagaacaaaacgttgatgtatcaagccaagatctatcaggacaaacagcacgagaatacgctgtctcaagccaccaccatgtaatatgtgaattactatcagattacaaagaaaaacaaatgttaaaaatatcaagcgaaaacagtaatccagaacaagacctaaaattaacaagcgaagaagaatcacaaagactaaaagtatctgaaaacagtcaaccagagaaaatgagccaagaaccagaaataaataaggattgtgacagagaagtcgaagaagaaataaaaaaacacggatcaaacccagtaggcctcccagaaaatttaacaaatggagcaagtgcaggaaacggcgatgacggattaataccacaaagaaggtcaagaaaaccagaaaaccaacaattccctgacaccgaaaacgaagaatatcacagtgatgaacaaaatgacacacgaaagcaactatcagaagaacaaaacaccggaatatcacaagacgaaattctaaccaataaacaaaaacaaatagaagtagccgaacaaaaaatgaatagcgagttaagtctaagtcataaaaaagaagaagacctattaagagaaaactcagtattacaagaagaaatagcaatgttaagactagagctcgacgaaacaaaacatcaaaaccaactaagagaaaacaaaatattagaagaaatagaatctgtaaaagaaaaaacagacaaactattaagggcaatgcaactcaacgaagaagcattaacaaaaacaaatatatag

SEQ ID NO: 3935 - RNA, 1530 nt, synthetic construct
  misc_feature 1..1530: note = EAW59519 variant
  source 1..1530: mol_type = other RNA
atggaacgaagaagactatggggttcaattcaatctagatacatcagcatgtcagtatggacttctccaagaagattagtagaactcgcaggtcaatccttactcaaggacgaagcactcgcaatcgcagccctagaattactaccacgagaactattcccacccctattcatggcagcttttgatggacgacattcccaaacattaaaagcaatggtccaagcatggcccttcacctgtttacctctcggagtcttaatgaaaggacaacacttacatttagaaacatttaaggccgttttagacggtttagacgtactacttgctcaagaagtacgaccaagacgatggaaactccaagtactagatttacgaaaaaactctcaccaagatttctggactgtatggtcaggaaaccgtgcatcactttattcattcccagaacctgaagctgcccaacccatgaccaaaaaaagaaaagtagacggactatccaccgaagcagaacaaccatttataccagttgaagtattagtagatttatttctcaaagaaggagcttgtgatgaactttttagttatctcatagaaaaagtaaaacgaaaaaaaaacgtcctacgactctgttgcaaaaaacttaaaatatttgcaatgccaatgcaagacataaaaatgatcctaaaaatggttcaattagactccatagaagaccttgaagtcacatgtacatggaaattaccaacattagcaaaattctcaccatacttaggacaaatgataaatttaagacgactactcctttctcatatacacgcatcctcatacataagcccagaaaaagaagaacaatacatagctcaatttacatctcaattcctatctctacaatgcttacaagctttatatgtagactcattatttttcctaagaggtagattagatcaattactaagacacgtaatgaacccattagaaacactatcaataacaaattgtagattatcagaaggagacgtaatgcatctatcacaatcaccatctgtatctcaactctcagtcctcagcttaagcggagtaatgctaaccgacgtctctcctgaaccactacaagcattactagaaagagcctcagcaaccttacaagatttagtattcgatgaatgcggtataacagacgaccaattactagcattactaccatcactatcacactgttctcaactcacaactttatcattctacggaaactcaatatccatctcagcactacaatcactactacaacatttaataggattatctaatttaacacatgtactctacccagtaccacttgaatcttacgaagacatacatggtaccttacatttagaaagattagcatacttacacgcccgactcagagaactactgtgtgaattaggaagaccatctatggtatggctatcagccaacccttgcccacactgtggagatagaacattttacgaccctgaacccatattatgcccctgcttcatgccaaattaa

SEQ ID NO: 3936 - RNA, 1530 nt, synthetic construct
  misc_feature 1..1530: note = AAC51160 variant
  source 1..1530: mol_type = other RNA
atggaaagacgcagactatggggatcaatacaatcaagatacatatccatgtctgtatggacctcaccaagaagattagtagaactagccggacaatccttattaaaagatgaagccttagcaatcgcagcactagaactactccctagagaactatttccaccacttttcatggcagcattcgacggtagacattcccaaaccctaaaagcaatggtacaagcatggccatttacctgcttaccattaggagtactaatgaaaggccaacacctccatctagaaacattcaaagcagtactagacggattagacgtactactcgcacaagaagtcagaccaagacgatggaaattacaagtcctcgacctacgaaaaaactcccatcaagatttctggacagtctggtcaggtaatcgtgcaagtttatattcattcccagaaccagaagccgcacaaccaatgaccaaaaaaagaaaagtagacggtttatctacagaagccgaacaaccattcatcccagtagaagttctagtagatctattcttaaaagaaggagcatgcgacgaattattttcatatttaatagaaaaagtaaaaagaaaaaaaaacgtactaagactttgttgtaaaaaattaaaaatattcgccatgccaatgcaagacataaaaatgatcctaaaaatggttcagctagactcaattgaagacctagaagtaacatgcacatggaaactaccaacattagcaaaattctcaccttaccttggtcaaatgataaacctaagaagacttctattatcacatatacacgcctcttcttacatttcacccgaaaaagaagaacaatacatagcccaatttacatcacaattcctttcattacaatgcttacaagctctatacgtcgattccctattttttctaagaggtagactagatcaacttttacgccacgtcatgaaccctttagaaacattatcaatcacaaattgcagactatctgaaggtgacgtaatgcacttatcacaatcaccatctgtatctcaattatcagtcctatctctatccggagttatgttaacagatgtatcaccagaacctctccaagccctactagaacgagcatcagccacactacaagatctcgtattcgacgaatgtggaataactgacgaccaattactagctttattaccctccctctcccactgctctcaactcacaacactctccttctacggtaattcaatatcaatctctgcactacaatctcttttacaacacctaatcggtctaagcaatctcacccacgtattatacccagttcctctagaatcttacgaagatatacacggaaccctacatcttgaaagattagcatacctacacgcaagactacgcgaattactatgcgaacttggacgaccatcaatggtctggctatcagcaaatccatgcccacactgcggagaccgtacattctacgatccagaaccaatattatgcccatgtttcatgccaaactaa

SEQ ID NO: 3937 - RNA, 645 nt, synthetic construct
  misc_feature 1..645: note = CCDS8069.1 variant
  source 1..645: mol_type = other RNA
atgggattagcaggagtatgtgcattgagaagaagtgcagggtatatactagtaggaggagcaggaggacaaagcgctgcggcagcagcgaggagatacagtgaaggagaatgggcaagtggaggagtaagaagttttagtagagcagctgcagcaatggcgccaataaaagtaggagatgcaataccagcagtagaagtatttgaaggagaaccaggaaataaagtaaatttagcagagttatttaaagggaaaaaaggagtactatttggagtaccaggagcatttacaccaggatgtagtaaaacacatttaccaggatttgtagaacaagcagaagcattaaaagcaaaaggagtacaagtagtagcatgtttaagtgtaaatgatgcatttgtaacaggagaatggggaagagcacataaagcagaaggaaaagtaagactattagcagacccaacaggagcatttggaaaagaaacagatttattattagatgatagtttagtaagtatatttggaaatagaagattaaaaagatttagtatggtagtacaagatggaatagtaaaagcactgaatgtggaaccagatgggacaggattaacatgtagtttagcaccaaatataataagtcaattataa

SEQ ID NO: 3938 - RNA, 309 nt, synthetic construct
  misc_feature 1..309: note = AAA63250 variant
  source 1..309: mol_type = other RNA
atggtaagatatagagtaagaagtctaagtgaaagaagccatgaagtatacagacaacaactacatggacaagaacaaggacatcacggacaagaagaacaaggactaagcccagaacatgtagaagtatatgaaagaacacatggacaaagccattacagaagaagacactgtagcagaagaagactacatagaatacacagaaggcaacacagaagctgcagaagaagaaaaagaagaagctgtagacatagaagaagacatagaagaggatgtagaacaagaaaaagaacatgcagaagacattaa

SEQ ID NO: 3939 - RNA, 1662 nt, synthetic construct
  misc_feature 1..1662: note = AAH50416 variant
  source 1..1662: mol_type = other RNA
atggtacaaagactttgggtatcaagattactacgacatagaaaggctcaattattattagttaatctattaacatttggtttagaagtatgtttagcagccggaataacttatgttccaccactattgttagaagtaggggtagaagaaaaatttatgacaatggtcttaggtataggaccagttttaggcttagtttgtgttccactattaggtagcgcatcagatcattggagaggccgctacggaagacgtagaccatttatttgggcactatctttgggaatacttctttcactatttttaataccaagagccggatggttagccggacttttatgccccgacccaagaccccttgaactagcattactaattctaggagtaggattattagatttttgtggacaagtatgttttactccacttgaagcattattatcagatctttttagagatccagaccactgtagacaagcatatagtgtctacgcctttatgatatcattaggaggatgtctaggatatttattaccagctatagattgggatacaagtgctttagcaccatatctaggtactcaagaagaatgtttatttggattactaacattaatatttttaacatgcgttgcagccacattattagtagctgaagaagcagctcttggccctacagaaccagctgaaggattatcagcaccatccctctcaccacattgttgcccatgtagagctaggcttgcttttagaaatttaggagcactcttaccaagactacatcaactttgctgtagaatgccaagaacactacgacgtttattcgttgccgaactttgttcctggatggctctaatgacatttacactattctatacagattttgtaggtgaaggcttatatcaaggtgtaccaagagcagaacctggaacagaagcaagaagacattacgatgaaggagtaagaatgggttctttaggactattcctacaatgtgctatatcattagtattttctctggtaatggataggttagttcaaagatttggtacacgagctgtctatctcgcctcagtagccgcttttccagttgcagctggtgccacatgcttatcacattcagttgcagtagttacagcatccgcagcacttactggatttacattttctgctctacaaatattgccatatacattagcatctttatatcatcgagaaaaacaagtatttttacctaaatatcgaggagacactggtggtgcatcatctgaagatagtcttatgacatcctttctacctggaccaaaaccaggtgcaccatttcctaatggacacgtaggagctggtggtagtggactcctacctccacctccagcactatgtggagcatcagcatgcgacgtctctgtaagagtcgtagttggtgaaccaacagaagcaagagttgtaccaggtcgtggaatttgcctagatctcgcaatattagactcagcatttttactatcacaagtagcaccttctttatttatggggagcatcgtacaattatctcaatcagtaacagcatatatggtttccgcagccggtcttggactcgtagcaatatatttcgcaacgcaagttgtttttgataaatccgatttagctaaatattcagcgtaa

SEQ ID NO: 3940 - RNA, 648 nt, synthetic construct
  misc_feature 1..648: note = CBI83574 variant
  source 1..648: mol_type = other RNA
atggcaagtctacaaatgagaggaaacccaggatcacacttttgcggaggcacattaatacatccatcattcgtattaacagcagcacattgcttaagagatataccacaaagattagtaaacgtagtactaggagcacacaacgtaagaacacaagaaccaacacaacaacacttctcagtagcacaagtattcctaaacaactatgatgcagaaaacaaactaaacgacatcctactaatacaactatcatcaccagcaaacttatcagcatcagtagccacagtacaattaccacaacaagatcaaccagtaccacacggaacacaatgcctagcaatgggatggggaagagtaggagcacacgatccaccagcacaagtattacaagaattaaacgtaacagtagtaacattcttttgcagaccccacaacatatgcacattcgtaccacgaagaaaagcaggaatatgcttcggagactcaggaggaccactaatatgcgacggaataatacaaggaatagactcattcgtaatatggggatgtgcaacaagactattcccagacttctttacaagagtagcactatacgtagattggataagatcaacactaagaagagtagaagcaaaaggaagaccataa

SEQ ID NO: 3941 - RNA, 771 nt, synthetic construct
  misc_feature 1..771: note = AAH96183 variant
  source 1..771: mol_type = other RNA
atggcacatagaccaccatcaccagcactagcatcagtattactagcactactcttatcaggagcagcaagagcagccgaaatagtaggaggacatgaagcccaaccccattcacgaccatatatggcatcattacaaatgagaggaaacccaggttctcatttttgcggaggaacacttatacatccatcatttgtcttaacagcagcacattgtttaagagatattcctcaaagattagtaaatgtagtcctaggagcacataatgtaagaacacaagaaccaacacaacaacatttttcagtagcacaagtatttctaaataattatgacgcagaaaacaaattaaatgacgtacttctaatacaactatcttcaccagcaaatttatctgcatcagtagcaacagttcaattaccacaacaagatcaaccagtaccacatggaacacaatgtctagcaatgggatggggaagagttggagcacatgacccaccagcacaagtcttacaagaactaaacgtaacagtagtaacattcttttgcagaccacataatatatgcacttttgtaccaagacgaaaagcaggcatttgctttggagactcaggaggaccattaatatgtgacggaataatacaaggaatagactcatttgtaatatggggttgcgcaacaagactatttccagatttctttacaagagtagcattatatgttgattggataagaagtacactaagaagagtagaagcaaaaggcagaccataa

SEQ ID NO: 3942 - RNA, 2760 nt, synthetic construct
  misc_feature 1..2760: note = CCDS45721.1 variant
  source 1..2760: mol_type = other RNA
atgtggctagcagcagcggccccaagtttggctagaagactattgtttctcggtccaccacctccacccttgcttctattagtattttcacgtagctcaagaagaagactacattcattaggcttggccgcgatgcctgaaaaacgacccttcgaaagacttccagcagatgtatcaccaataaattactctttgtgtctaaaaccggatttattagacttcacctttgaaggcaaactagaagcagcagcacaagttagacaagctactaatcagattgttatgaattgcgcagacatcgatatcataactgcatcatatgctcccgaaggtgacgaagaaatccatgctactggctttaactatcaaaacgaagatgaaaaagttacacttagctttccttcaacattgcaaactggaacaggaacattaaaaattgatttcgttggggagctaaatgataaaatgaaaggtttctatcgaagtaaatacacaactccaagtggggaagtaagatatgcagctgttacgcaatttgaagcaacagatgcccgtagagcatttccctgttgggatgaaccagcaataaaagcaacatttgatataagcctagttgttcctaaagacagggttgcactttcaaatatgaacgtgatagacagaaaaccctatccagatgacgaaaacttagtcgaagttaaatttgcaagaacacctgtaatgtcaacatatctagtagcattcgtagttggagaatatgatttcgtagaaacaagaagcaaagatggagtctgcgttagagtctatacaccagttggaaaagcagaacaaggaaaattcgctctcgaagtagcagccaaaaccctaccattttacaaagattactttaacgtaccatatcctctacctaaaatagatcttatagccatagctgattttgctgcaggcgctatggaaaattggggcttagtaacatatagagagacagctttattaattgatcccaaaaattcttgcagctcatctaggcaatgggtcgctctagtagtcggtcacgaactagcccatcaatggttcggtaatctcgtaactatggaatggtggacacatttgtggctcaatgaaggttttgcatcttggattgaatatttatgcgtggaccattgctttccagaatacgacatttggacccaattcgttagcgccgattatacaagagcacaagaattagatgcactagataactcacacccaatagaagtaagtgtcggacacccttctgaagtggacgaaatattcgatgcaatcagttacagtaaaggagcttcagtaataagaatgttacatgattatataggagacaaagattttaagaaaggaatgaacatgtatcttacaaaatttcaacagaaaaacgctgcaactgaagatctatgggaatctcttgaaaatgcatcaggaaaaccaatagctgcagtaatgaatacttggacaaaacaaatgggctttcctttaatatatgtagaagcagaacaagtagaagatgacagactcctaagattatcccaaaagaaattttgcgccggcggctcttatgtaggagaagattgtccacagtggatggtacctataaccataagtaccagtgaagaccctaatcaagcaaaattaaaaatactaatggataaaccagaaatgaatgtggtacttaaaaacgttaaaccagatcagtgggtgaagttaaacctaggaacagtaggattttataggactcaatactcttcagctatgctagaatcattacttccgggtattagagatctgtctcttcctccggtcgaccgacttggtttacaaaacgatctcttcagcctagcccgagctggaatcatatctacagttgaagtccttaaagttatggaagcatttgtaaatgaaccaaattatacagtttggtcagatctaagctgcaacttaggcatattaagcacattattatctcacaccgatttttatgaagaaatacaagagttcgttaaagatgtattttcacctataggagaaagactaggatgggatccaaaaccaggagaaggccatctagatgcattacttagaggattagtattaggcaaactaggtaaagccggacacaaagcaacactcgaagaagcaagacgtcgctttaaagaccatgtagaaggaaaacaaatcttatccgcagatctccgaagccccgtttacctaaccgtcttaaaacatggcgatggaacaactctagatataatgctcaaattgcacaaacaagcagatatgcaagaagagaaaaacagaatagaaagagtgttaggagctacgctcttaccagatctcatacaaaaagttctaacatttgcactatctgaagaagttcgaccacaagatacagtatcagtaataggaggtgtagctggaggctcaaaacatggcagaaaagccgcatggaaatttataaaagataattgggaagaactttataatagataccaaggaggatttctaatttcaagattaataaagttatcagtagagggattcgcagtcgacaaaatggcaggcgaggtcaaagcattcttcgaaagtcacccggccccaagtgctgaaagaactatacaacaatgctgtgaaaatatcttactaaacgctgcctggttaaaacgagatgcggaatcaatacatcaatatctcctacaaaggaaagcatcaccaccaacagtttaa

SEQ ID NO: 3943 - RNA, 660 nt, synthetic construct
  misc_feature 1..660: note = AAH65513 variant
  source 1..660: mol_type = other RNA
atgttaagagcaggagcaccaacaggagatttaccgcgagcaggagaagtacacacaggaacaacgataatggcagtggaatttgatggaggagtagtaatgggatcagattcaagagtaagtgcaggagaagcagtagttaatagagtatttgataaattaagcccattacatgaaagaatttattgtgcactatcaggatcagcagcagatgcacaagcagtagcagatatggctgcatatcaattagaattacatggaatagaattagaagaaccaccgctagtattagcagcagcaaatgtagtaaggaatataagctataaatacagagaagatttaagtgcacatctaatggtagctggatgggatcaaagagaaggaggacaagtatatggaacactaggaggaatgttaacaagacaaccatttgcaataggaggaagtggaagtacgtttatatatggatatgtagatgcagcatataaaccaggaatgagtccagaagaatgtagaagatttacaacagacgcgatagcattagcaatgtcaagagatggatcaagtggaggagtaatatatttagtgacaataacagcagcaggagtagatcatagagtaatattaggaaatgaattaccaaaattttatgatgaataa

SEQ ID NO: 3944 - RNA, 345 nt, synthetic construct
  misc_feature 1..345: note = EAW82312 variant
  source 1..345: mol_type = other RNA
atggcaggactagcactacaaccaggaacagcactattatgctatagctgtaaagcacaagtatcaaatgaagattgcttacaagtagaaaattgcacacaattaggagaacaatgttggacagcaagaataagagcagtaggattattaacagtaatatcaaaaggatgtagcttaaactgtgtagatgactcacaagattactatgtaggaaaaaaaaacataacatgttgcgatacagatttatgtaacgcatcaggagcacatgcattacaaccagcagcagcaatactagcactattaccagcactaggactattactatggggaccaggacaactataa

SEQ ID NO: 3945 - RNA, 372 nt, synthetic construct
  misc_feature 1..372: note = AAC39607 variant
  source 1..372: mol_type = other RNA
atgaaagcagtattattagcactactaatggcaggactagcattacaaccaggaacagcactactatgctactcatgtaaagcacaagtatcaaacgaagactgcctacaagtagaaaactgcacacaactaggagaacaatgctggacagcaagaataagagcagtaggactactaacagtaatatcaaaaggatgctcactaaactgcgtagacgactcacaagactactacgtaggaaaaaaaaacataacatgctgtgacacagacctatgtaacgcatcaggagcacacgcactacaaccagcagcagcaatactagcactattaccagcactaggactactactatggggaccaggacaattataa

SEQ ID NO: 3946 - RNA, 963 nt, synthetic construct
  misc_feature 1..963: note = AAG40776 variant
  source 1..963: mol_type = other RNA
atgtcatcctgcaatttcacacacgcaacattcgtattaataggcataccaggattagaaaaagcacatttctgggtaggattcccattattatcaatgtacgtagtcgcaatgtttggtaattgcattgtagtattcattgttcgaacagaacgatcactacatgcaccaatgtacctcttcctatgtatgttagctgcaatagatctagcattatcaacatctacaatgccaaaaatactagcattattctggttcgattcacgcgaaatttcatttgaagcctgtttaacccaaatgttcttcatacacgcactatctgccattgaatcaacaatattattagcaatggcattcgaccgctacgtagctatttgtcatccattacgacacgcagcagtattaaataatacagttacagcacaaattggaatagtagcagtagtaagaggatccttattcttcttccccttaccactcctaataaaaagattagcattttgccattcaaatgtattatcacattcatattgcgtacatcaagacgttatgaaacttgcatacgctgacacactaccaaacgtagtctatggactaacagcaatattactcgtaatgggagtagatgtaatgtttatatcattatcatacttcttaataattcgaactgtattacaactaccatcaaaatcagaacgcgcaaaagcattcggaacatgcgtatcccatataggagtcgtattagcattctatgtaccactaataggactatcagtagtacatcgcttcggaaattcattacacccaatcgtaagagtagtaatgggagatatatatctattactaccaccagtaataaatccaataatttacggagcaaaaactaaacaaataagaaccagagtactagcaatgttcaaaatatcttgcgataaagaccttcaagcagtaggaggaaaataa

SEQ ID NO: 3947 - RNA, 2253 nt, synthetic construct
  misc_feature 1..2253: note = AAA60209 variant
  source 1..2253: mol_type = other RNA
atgtggaacctccttcatgaaacagacagcgcagtagcaactgcaagaagacctagatggctatgcgcaggagccctcgtactagcaggaggcttctttttattaggatttctttttggatggtttataaaatcgagcaatgaagctacaaacataacaccaaaacataatatgaaagcatttctcgatgaactaaaagctgaaaatatcaagaaattcctttataactttacccaaataccgcacttagcaggtacagaacaaaacttccaattagctaaacaaatacaatcccaatggaaagagttcggcctagattctgtcgaactagctcactacgacgtattactaagctatcccaacaaaacacaccctaattatatatcaataataaacgaagacggcaacgaaatattcaacacttccttattcgaaccacccccacctggatacgaaaacgtatctgacatagttccaccgttttccgcattttctccacaaggaatgccagaaggagatctagtatacgtaaattatgcaagaacagaagacttctttaaactagaaagagatatgaaaatcaactgttcaggaaaaatagtaattgcaagatatggaaaagtatttagaggcaataaagttaaaaacgcacaattagcaggagcaaaaggtgtaatattatactcagacccagccgattattttgcaccaggagtaaaatcatacccagatggctggaatttacctggaggcggagtacaacgaggcaatatacttaacttaaatggtgcaggagatccactaacaccaggctatccagctaatgaatacgcctatagaagaggcattgcagaagccgtcggattaccatcaataccagtacatccaataggatattatgatgcacaaaaactgcttgaaaagatgggcggttctgctccaccggactctagctggcgaggcagcttgaaagtaccatacaatgtaggaccaggatttaccggaaatttttcaacacaaaaagtaaaaatgcacattcattctacaaacgaagtcacaagaatatataatgttataggaaccttaaggggagccgttgaaccagaccgttatgtaattttaggcggacatagagatagctgggtattcggaggaatagatccacaaagtggtgcagctgtagtgcatgaaatagtaagatcatttgggacactaaagaaagaaggatggcgaccaagaagaacaatactgtttgctagttgggacgcagaagaatttggattactaggttcaactgaatgggccgaagaaaatagtagactactacaagaaagaggcgtagcctacataaatgccgactcatccattgaaggtaactacacgttacgagttgattgcacaccattaatgtatagcttagtacataatttaacaaaagaattaaaatcaccagacgaaggattcgaaggcaaaagtttatacgaaagctggacaaagaaatctccaagtccagaattttcaggcatgccaagaatatcgaaacttggctcaggaaatgactttgaagtattcttccaacgactaggaatagcatcaggcagagcaagatatactaaaaactgggaaacaaacaaattctctggatatccattatatcactcagtgtatgaaacatatgaattagtcgaaaaattctacgatcccatgtttaaatatcatctaacagtagcacaagttagaggaggcatggtattcgaactagcaaattcaatagtactcccatttgattgtagagattatgccgtagttctaagaaaatacgcagacaaaatatactctatatcaatgaaacatccgcaagaaatgaaaacttactcagtttcttttgacagcttattttcagccgttaaaaattttactgaaatcgcgagtaaattttcggaaagactacaagattttgataaatcaaatccaatcgtattaagaatgatgaacgaccaattaatgttcttagaacgagcattcatagatccattaggactaccagatcgtccattttacagacatgtaatttatgcaccaagttcacacaataaatacgcaggcgaatcattccccggtatatatgatgctttatttgacatagaatctaaagtagacccaagcaaagcatggggagaagttaaacgacaaatatacgtagctgcatttacagtacaagcagcagcagaaacactcagtgaagttgcctga

SEQ ID NO: 3948 - RNA, 3921 nt, synthetic construct
  misc_feature 1..3921: note = CCDS1397.2 variant
  source 1..3921: mol_type = other RNA
atgacaatgtatttgtggctaaaactactcgcatttggctttgcttttctagacaccgaggttttcgtaacaggacaaagccctactccatcgccaaccggtttaactaccgcaaaaatgccatctgtccccctatcttccgatcccttaccgacacataccacagcattcagccctgcctctacattcgaaagggaaaacgatttttcagaaaccacaacaagtttaagccccgacaatacctcaacccaagtttctcccgactctctggacaatgccagtgcattcaacacaacaggtgtaagcagcgttcaaacccctcacctaccgacacatgctgacagtcaaactccatctgcaggaaccgatacacaaactttttcaggctctgctgcaaatgctaaactaaatcccacaccaggatctaacgccatctcagacgtacctggtgaacgaagcactgctagcacattcccaactgaccccgttagtcccctcacaacgacacttagtctcgcacatcacagttcagctgccctacctgcaaggacctcaaatactacaataaccgctaataccagcgacgcttacctaaatgcttccgaaaccacaaccctatccccttccggaagcgcagttatttcgaccacgacaattgcaaccacaccatctaaacctacatgtgacgaaaaatacgccaacataaccgtagactatctatacaacaaggaaacaaaactatttaccgcaaaattaaatgtgaacgaaaatgtcgaatgtggaaacaatacctgcacaaataatgaagtacataacctaacagaatgcaaaaacgcctctgtatcgatatcacacaactcatgtactgccccggataaaaccctaattttagatgtaccacctggagtcgagaaattccaattacatgactgcacacaagtagaaaaggcagatactacgatatgtctaaaatggaaaaacatagaaacattcacatgtgatactcaaaacatcacataccggtttcaatgtggaaatatgatctttgataacaaggaaatcaagctagagaacctcgaaccagaacatgaatacaaatgcgactctgaaatattatacaataatcacaaatttacaaacgcatccaaaattattaaaacagacttcggatcacctggagaaccccaaataatattctgcagatcagaagcagcccaccaaggagttatcacctggaatccaccacaaagatcattccataacttcaccctttgctacataaaagaaacagagaaggactgtttaaacctagacaaaaatctaattaaatatgatcttcaaaaccttaaaccatatacaaaatacgtactttcgttacacgcctatattatcgcaaaagttcaaagaaatggatccgcagccatgtgccacttcaccacgaaatctgcacccccttctcaagtttggaatatgacagtcagcatgacgagtgataactcaatgcacgtaaaatgtcgaccaccacgagaccgaaatggcccacacgaacgttaccacctcgaagtagaagccggaaacacattagttagaaacgaatcgcataaaaactgcgattttagggttaaagatttacaatactccacagattacacattcaaagcctactttcataacggagactatcccggagaaccatttatattacatcactctacctcatacaatagtaaagctctaatcgcatttttagctttcttaataatagtcacctctatagcattacttgtagtactctataaaatatacgatctacacaaaaagagatcatgtaacttagatgaacaacaagaattagtggaaagagacgacgaaaaacagctaatgaacgtagaaccaatacatgccgacatactactagaaacatataaaagaaaaatcgctgacgaaggtagactatttcttgcagagttccaatccattccaagagtattttcaaaatttccaataaaagaagcacgtaaaccattcaatcaaaacaaaaaccgttacgttgatattttaccatatgactacaatcgcgtagaactctcagaaattaacggggatgcaggttccaactacataaacgcctcatatatagacggattcaaagaaccccgaaaatacatagcagctcaaggtccaagggacgaaacagtagatgatttctggaggatgatatgggaacaaaaagccacagtaatagtcatggtaacaaggtgtgaagaaggaaaccgtaataaatgcgcggaatactggccatcaatggaagaaggtacaagagctttcggcgacgtcgtcgtaaaaataaatcaacacaaaagatgcccagactatatcattcagaaattaaacatagttaataagaaagaaaaagcaacaggaagagaagtaacacatattcaatttacaagttggcccgaccacggagtacccgaagatccacatctgctactaaaactacgacgcagagtaaatgcctttagtaacttctttagcggacccattgtagttcactgctcagctggagtcggcagaaccggtacatatataggtatcgacgcaatgctcgaaggcctagaagctgaaaataaagtagacgtttatggatatgttgtcaaattaagacgccaaagatgcttaatggtacaagtcgaggcgcaatacatactcatccaccaagccctagtcgaatataaccaatttggcgagactgaagtcaatttatccgaattacatccatatcttcacaatatgaagaaaagagacccgccttcagaaccatctccactagaagctgaatttcaaagactaccctcttacagatcatggcgtactcaacatatagggaatcaagaagaaaataaaagtaaaaaccgtaactcaaacgtcataccctacgactataatagagtacctctcaaacacgaattagaaatgtctaaagaatctgaacatgattcagacgaatcttcagatgacgattctgactccgaagaaccatctaaatacataaacgctagctttataatgtcttactggaaaccagaggtcatgatcgccgcacaaggtcctcttaaagaaaccataggagacttttggcaaatgatattccaaagaaaagtcaaagttattgtaatgttaactgaactaaaacacggagaccaagaaatctgtgcgcaatactggggcgaaggtaaacaaacatacggcgatattgaagtcgacctaaaagacacagacaaatccagcacttatactttaagagtattcgaattacgtcatagtaaaagaaaagattccagaacagtatatcaataccagtataccaattggagtgtagaacaattacccgctgaaccaaaagagttaatatctatgatacaagtcgtcaaacaaaaacttccccagaaaaacagttccgaaggaaacaaacaccataaatccacgcctttattaatacactgtagagacggctctcaacaaacaggcatattttgcgctttactcaatctattagagtccgccgaaaccgaagaagtagtagatatattccaagttgtcaaagctctaaggaaagcacgcccaggaatggtcagcacattcgaacaatatcaatttctctatgacgtcatagcctcaacctatccagcacaaaacggacaagtaaagaaaaacaaccatcaagaagataaaatagagttcgataatgaagtagacaaagttaaacaagacgccaattgtgtcaatcccttgggcgcaccggaaaaactccccgaagcaaaagaacaagcggaaggctctgaaccaaccagtggcaccgaaggaccagaacatagcgtcaatggacccgcttcgccagcattaaaccaaggatcataa

SEQ ID NO: 3949 - RNA, 624 nt, synthetic construct
  misc_feature 1..624: note = AAH02977 variant
  source 1..624: mol_type = other RNA
atggcaaaaacatatgattacctatttaaactactactaataggagatagcggagtagggaaaacatgcgtactattcagatttagcgaagacgcattcaacagcacattcataagtacaataggaatagacttcaaaataagaacaatagaattagacggaaaaagaataaaactacaaatatgggacacggcaggacaagaaagattcagaacaataacgacagcatactacagaggagcaatgggaataatgctagtatacgacataacaaacgaaaaaagctttgacaacataagaaactggataaggaacatagaagaacacgcaagtgcagacgtagaaaaaatgatattaggaaacaaatgcgacgtaaacgacaaaagacaagtatcaaaagaaagaggggaaaaactagcactagactatgggataaaattcatggaaacaagcgcaaaagcaaacataaacgtagaaaacgcattcttcacactagcaagagacataaaagcaaaaatggacaaaaaactagaaggaaattcaccacaaggaagcaaccaaggagtaaaaataacgccagaccaacaaaaaagaagctcatttttcagatgtgtattactataa

SEQ ID NO: 3950 - RNA, 1260 nt, synthetic construct
  misc_feature 1..1260: note = BAA81688 variant
  source 1..1260: mol_type = other RNA
atgaaaaactacaaagccatagggaaaataggagaaggaaccttctcagaagtaatgaaaatgcaatcactaagagacggcaactattacgcatgcaaacaaatgaaacagagattcgaatcaatagaacaagtaaacaacctaagagaaatacaagccttaagaagactaaacccacacccaaacatactaatgctacacgaagtagtattcgatcgaaaaagcggatcactagcactaatatgcgaattaatggacatgaacatatacgaacttataagaggacgaagataccccttatcagaaaaaaaaataatgcattatatgtatcaattatgcaaaagcctagaccatatccacagaaacggcatattccatcgagacgtaaaacccgaaaacatactaattaaacaagatgtcctcaaactaggagactttggatcatgccgatcagtatactcaaaacagccatacacagaatacatatcaacaagatggtaccgagcaccagaatgcctactaacagacggattttacacatacaaaatggatctctggtccgcaggatgcgtattctacgaaatagcatccttacaacccctattcccaggcgtaaatgaactagatcaaataagcaaaatacacgacgtaataggaacaccagcacaaaaaatactaacaaaattcaaacaatctagagcaatgaacttcgatttcccctttaaaaaaggatcaggcatacctctactcaccacaaatctaagcccccaatgtctatcactcttacatgcaatggtagcatacgatccagacgaaagaatagcagcccatcaagcactacaacacccatacttccaagaacaaagaaaaaccgaaaaacgcgccctaggctcacatagaaaagccggattcccagaacacccagtagcaccagaaccactatcaaactcctgtcaaatatcaaaagaaggaagaaaacaaaaacaatccctaaaacaagaagaagacagaccaaaacgaagaggaccagcatacgtaatggaactcccaaaactaaaactctccggagttgtcagactatcatcatattcttcccccacattacaatctgtacttggatctggaactaatggtagagtaccagttttacgcccactaaaatgcataccagcatcaaaaaaaacagacccacaaaaagacttaaaaccagcaccacaacaatgtagattaccaacaatagtccgaaaaggaggaagataa

SEQ ID NO: 3951 - RNA, 1389 nt, synthetic construct
  misc_feature 1..1389: note = AAH08727 variant
  source 1..1389: mol_type = other RNA
atggcctcaaattcaagctcatgcccaacccctggtggaggacacctaaatggatacccagtacctccatacgcattcttttttcctcctatgctaggcggattaagtcctcctggcgctctaacaaccctacaacatcaattaccagtctcaggatattcaactccctcaccagcaacaatagaaacacaaagttcatcatcagaagaaattgtaccaagtccaccatctcctccacccttacccaggatatacaaaccatgcttcgtatgtcaagacaaatcatcaggataccactacggcgtatctgcctgtgaaggatgcaaaggatttttccgacgctctatccaaaaaaatatggtatatacatgccacagagacaaaaattgcataataaataaagtaactagaaacagatgccaatactgcagacttcaaaaatgttttgaagttggtatgtccaaagaatcagtacgtaatgacagaaataaaaaaaaaaaagaagtcccaaaaccagaatgttcggaatcatacactctaacaccagaagtaggagaactcatagaaaaagtacgaaaagcacaccaagaaacattccccgctttatgtcaactaggcaaatacacaaccaacaactcctcagaacaaagagtaagtttagacatagatctctgggacaaattctcagaactatccacaaaatgtataataaaaacagtagaattcgccaaacaattaccaggatttacaacattaacaatcgcagaccaaataacactcttaaaagctgcatgtttagatatattaatactacgcatatgcacaagatacacaccagaacaagacacaatgacattctcagatggacttacactaaacagaacacaaatgcacaatgctggattcggaccactaactgacttagtatttgcattcgcaaaccaacttctaccactagaaatggatgatgccgaaacaggactactatcagcaatatgcttaatatgcggagacagacaagacttagaacaaccagacagggttgatatgctacaagaaccattattagaagcattaaaagtatatgtacgaaaaagaagaccatctcgaccacacatgtttcctaaaatgcttatgaaaattacagacctaagatcaataagtgcaaaaggtgcagaacgagttataactttaaaaatggaaatccctggatccatgccacccctaatacaagaaatgttagaaaattcagagggtttagatactttatcaggacaaccaggaggaggaggccgagatggaggaggactagcaccacccccaggatcctgctcaccatccctatcaccatctagcaaccgttcatcaccagcaacacactcaccttaa

SEQ ID NO: 3952 - RNA, 570 nt, synthetic construct
  misc_feature 1..570: note = AAB02605 variant
  source 1..570: mol_type = other RNA
atgacagaatataaattagtagtagtaggagcagggggagtaggaaaaagcgcactaacaatacaactaatacaaaatcacttcgtagatgaatatgatccaacaatagaagacagctacagaaaacaagtagtaatagacggagaaacatgcctactagacatactagatacagcaggacaagaagaatatagtgcaatgagagaccaatatatgagaacaggagaaggatttctatgcgtatttgcaataaacaacacaaaatcattcgaagacatacatcaatacagagaacaaataaaaagagtaaaagacagcgacgatgtaccaatggtattagtaggaaataaatgcgacctagcagcaagaacagtagaaagtagacaagcacaagacctagcaagatcatacggaataccatacatagaaacaagcgcaaaaacaagacaaggagtagaagacgcattctacacgctagtaagagaaataagacaacataaattaagaaaactaaatccaccagacgaaagcggacccggatgcatgagttgtaaatgtgtattaagttaa

SEQ ID NO: 3953 - RNA, 570 nt, synthetic construct
  misc_feature 1..570: note = AAB59445 variant
  source 1..570: mol_type = other RNA
atgacagaatacaaactagtagtagtaggagcaggaggagtaggaaaaagcgcactaacaatacaactaatacaaaaccacttcgtagacgaatacgacccaaccatagaagactcatacagaaaacaagtagtaatagacggagaaacatgcctactagacatactagacacagcaggacaagaagaatacagcgcaatgagagaccaatacatgagaacaggagaaggattcttatgcgtattcgcaataaacaacacaaaatcattcgaagacatacaccactacagagaacaaataaaaagagtcaaagacagcgaagacgtaccaatggtactagtaggaaacaaatgcgacctaccatcaagaacagtagacacaaaacaagcacaagacctagcaagaagctacggaatacccttcatagaaacatcagcaaaaacaagacaaagagtagaagacgcattctacacactagtaagagaaatacgacaatacagactaaaaaaaatatcaaaagaagaaaaaacaccaggatgcgtaaaaataaaaaaatgcataataatgtaa

SEQ ID NO: 3954 - RNA, 570 nt, synthetic construct
  misc_feature 1..570: note = AAA60255 variant
  source 1..570: mol_type = other RNA
atgacagaatataaattagtagtagtaggagcaggaggagtaggaaaaagtgcactaacaatacaactaatacaaaaccacttcgtagatgaatacgacccaacaatagaagacagctacagaaaacaagtagtaatagacggagaaacatgcttactagacatattagacacagcaggacaagaagaatacagcgcaatgagagaccaatacatgagaacaggagagggattcctatgtgtattcgcaataaacaacagcaaaagcttcgcagacataaacttatatagagaacaaataaaaagagtaaaagactcagacgatgtaccaatggtactagtaggaaataaatgcgacctaccaacgagaacagtagacacaaaacaagcacacgaactagcgaaatcatacggaataccattcatagaaacaagcgcaaaaacaagacaaggagtagaagacgcattctacacactagtaagagaaataagacaatacagaatgaaaaaactaaacagctcagacgacggaacacaaggatgcatgggattaccatgcgtagtaatgtaa

SEQ ID NO: 3955 - RNA, 546 nt, synthetic construct
  misc_feature 1..546: note = AAB84001 variant
  source 1..546: mol_type = other RNA
atgtgcaaaggactagccgcactaccacactcatgcctagaaagagcaaaagaaataaaaataaaactaggcatactactacaaaaaccagactcagtaggagacctagtaataccatacaacgaaaaaccagaaaaaccagcaaaaactcaaaaaacatcattagacgaagcactacaatggagagactcactagacaaactactacaaaacaactacggactagcatcattcaaatcattcttaaaatcagaattctcagaagaaaacctagaattctggatagcatgcgaagactacaaaaaaataaaatcaccagcaaaaatggcagaaaaagcaaaacaaatatacgaagaattcatacaaacagaagcaccaaaagaagtaaacatagaccacttcacaaaagacataacaatgaaaaacctagtagaaccatcactaagctcattcgacatggcacaaaaaagaatacacgcactaatggaaaaagactcactcccaagattcgtaagaagcgaattctaccaagaactaataaaataa

SEQ ID NO: 3956 - RNA, 2175 nt, synthetic construct
  misc_feature 1..2175: note = CCDS4362.1 variant
  source 1..2175: mol_type = other RNA
atgagctttccaaaagcaccgctaaaaagatttaacgacccaagcggatgtgcaccaagcccaggtgcatacgacgtaaaaacactagaagtactaaaaggaccagtatcattccaaaagagccaacgcttcaaacaacaaaaagaatccaaacaaaatctcaacgtagataaagatacaactctaccagcaagcgccagaaaagtaaaatcaagtgagtcaaaagagagtcaaaagaacgataaagacctaaaaatactcgaaaaagaaataagagtcctactacaagaaagaggagcccaagaccgtagaatacaagatctagaaacagaactagagaaaatggaagcaagattaaacgcggctcttagagagaaaacatcactatccgcaaacaatgctacactagaaaaacaactaatagaattaactagaacaaacgaactactgaaaagcaaattcagtgaaaacggaaaccagaaaaatctaagaatactaagcctagaactaatgaaactaagaaacaaacgagaaacaaaaatgagaggaatgatggccaaacaagaaggaatggaaatgaaattacaagtaacacaaaggtcattagaggaaagtcaagggaaaatcgcccaactagaaggaaagctagtatcaatagaaaaagagaaaatagacgagaaaagcgaaacagaaaaactattagaatatatagaagaaatatcatgtgcatctgaccaagtagaaaaatacaaacttgacatagcgcaactagaagaaaatctcaaagagaaaaacgacgaaatattaagtctaaaacaaagtctagaagaaaatatagtaatcctaagcaaacaagttgaagacctaaatgtaaaatgccaattactcgaaaaagaaaaagaagaccacgtgaaccgaaaccgagaacataatgaaaacctaaatgccgaaatgcaaaacctgaaacaaaaattcatactagagcaacaagaaagagaaaaattgcaacaaaaagaattacaaatagattctctattacaacaagagaaagaactatcctcaagcctacaccaaaaactctgcagctttcaagaggaaatggtaaaagagaaaaacctattcgaagaagaactaaaacaaacactagacgaacttgacaaactacaacaaaaagaagaacaagcagaaaggctagtcaaacaactagaagaagaagcaaaatcaagagcggaagaactaaaactattggaagaaaaactaaaaggcaaagaagctgaattagaaaagagcagtgcggcacacacacaagccactctactattacaagaaaaatatgactcaatggtccaaagcctagaagacgtcacagcacaattcgaatcatacaaggctttaacagcatccgaaatagaagacctaaaactagaaaattccagcctgcaagaaaaagcagcaaaagcaggtaaaaacgcagaagacgtacaacaccaaatactagcaacagaaagtagcaatcaagaatacgtacgaatgctattagacctccaaacaaaatcagcattaaaagaaacagaaatcaaagaaatcacagtcagcttcctacaaaagataacagacctacaaaatcaactaaaacaacaagaagaagacttccgaaagcaactggaagacgaagaaggacgcaaggccgaaaaagaaaacactacagccgaactaacggaagaaataaacaaatggaggctactttatgaagaattgtacaataaaaccaaaccattccaattacaactagatgcattcgaagtagagaaacaagccctcctcaatgaacatggagctgcacaagaacaactaaacaaaatacgcgacagttatgccaaattactaggccaccaaaacttaaaacagaaaattaagcatgtagtaaaactaaaagacgaaaactcccaattaaaatcagaagtaagtaaattaagatgtcaattagctaaaaagaaacaatcagaaacaaaactacaagaagaactaaacaaagtgctaggaatcaaacacttcgacccaagtaaagcatttcaccatgagtcaaaagaaaactttgcattaaaaacgccattaaaagaaggaaacaccaactgctacagagcaccaatggaatgtcaagagagttggaaataa

SEQ ID NO: 3957 - RNA, 582 nt, synthetic construct
  misc_feature 1..582: note = AAC33179 variant
  source 1..582: mol_type = other RNA
atggcagcaataagaaaaaaactagtaatagtaggagacggagcatgcggaaaaacatgcttacttatagtatttagcaaagaccaattcccagaagtatacgtaccaacagtatttgaaaactacatagcagatatagaagtagatggaaaacaagtagaattagcactatgggatacagcaggacaagaagattacgatagattaagaccactatcatacccagacacagacgtaatattaatgtgcttctcaatagatagtccagactcattagaaaacataccagaaaaatggacaccagaagtaaaacatttctgcccaaatgtaccaataatattagtaggtaataaaaaagacttaagacaagacgaacacacaagaagggaattagcaaaaatgaaacaagaaccagtaagatcagaagaaggaagagatatggcaaacagaataagcgcattcggatacttagaatgtagtgcaaaaacaaaagaaggagtaagagaagtatttgaaatggcaacaagagcaggattacaagtaagaaaaaataagagaagaagaggatgcccaatattataa

SEQ ID NO: 3958 - RNA, 888 nt, synthetic construct
  misc_feature 1..888: note = AAA36161 variant
  source 1..888: mol_type = other RNA
atgagcggagcattagacgtattacaaatgaaagaagaagacgtactaaaattccttgcagcaggaacacatttaggaggaacaaacctagacttccaaatggaacaatacatatacaaacgaaaatcagatggaatatacataataaatttaaaaagaacatgggaaaaactattattagcagcaagagcaattgtagcaatagaaaatcctgctgacgtatcagtaatctcatcaagaaacacaggtcaaagagcagtgttaaaatttgcagcagcaacaggagcaacaccaatagcaggaagattcacaccaggaacattcacaaatcaaatacaagcagcatttagagaaccaagactattagtagtaacagatccaagagcagatcaccaaccactaacagaagcatcatacgttaacttaccaacaatagcactttgtaacacagacagtccattaagatacgtagatatagcaataccatgcaataacaaaggagctcactcagtaggattaatgtggtggatgttagcaagagaagtactacgtatgagaggaacaatatcaagagaacacccatgggaagtaatgccagacttatatttttatagagacccagaagaaatagaaaaagaagaacaagcagcagcagaaaaagccgtaactaaagaagaatttcaaggagaatggacagcaccagcaccagaatttacagccacacaacccgaagtagcagactggtcagaaggagtacaagtaccatcagtaccaatacaacaattcccaacagaagactggagtgcacaaccagcaacagaagactggagcgcagcaccaacagcacaagctaccgaatgggtaggagcaacaacagactggtcataa

SEQ ID NO: 3959 - RNA, 2601 nt, synthetic construct
  misc_feature 1..2601: note = AAH14614 variant
  source 1..2601: mol_type = other RNA
atgaatggagaacaacaattagatgcagatgcaggctctggaatggaagaagttgaattaagttgggaagattatcttgaagaaacaggatcaaccgcagtaccatatggatcattcaaacatgtagatacaaggctccaaaacggatttgcacccggaatgaaattagaagttgcagtaagaactgatccagaaacttactgggttgcaacagtaattacaacctgtgaacaattactacttttaagatacgatggatatggagaagatagaagagcagacttttggtgtgatataagaaaagcagatctctatccaataggttggtgtgaacaaaacaaaaaaactttagaagcaccggaaggtatcagagacaaagtaagcgactgggatgaattcctaagacaaacacttataggagcatgttcaccaccggttccattactcgaaggcttacgaaatggtcgaaatccactggatttaattgcaccaggatcgagattagaatgccaggcatttcaagattcattaagtacatggatagtaaccgttgttgaaaacataggggggagattaaagctaaggtatgagggactagaatcatcagacaactatgaacattggttatattacttagatccatttctacatcacgtaggttgggcagcacaacaaggatatgaattacagccaccaagcgctataagacatcttaagaacgaagcagaatggcaagaaatattagctaaagtaaaagaagaagaggaagaaccattacctagctatttatttaaagacaaacaagtcataggaatacacacattctcggttaacatgaaattagaagcagtagatccatggagtccattcggcatatcaccggcaacagttgtaaaagtatttgatgaaaagtactttctcgtagaaatggatgatctaagaccagaaaaccatgctagacgaagttttgtatgccatgcagattcaccgggcatatttcctgtacaatggtctttaaagaacggattacatatttcaccccctccaggatatcctagtcaagattttgattgggcagactatctaaaacaatgtggtgcagaagcagccccacaaaggtgcttcccaccactaatatcagaacacgagtttaaagaaaacatgaagctagaagcagtaaatccaattttacctgaagaagtatgcgtagctacaataacagccgtaagaggttcctatctatggctccaattagaaggatcaaaaaaaccaataccagaatgcatagtttcagtagaatcaatggatatatttccattaggatggtgtgaaacaaatggacatccgctatccacacctcgtagagcacgagtatataaacaaaggaaaatagcagttgtccaaccagaaaaacaagtgccatcaagcagaacagttcatgaaggacttcgcaatcaagaattaaactcaacagaatctgttatgataaatggaaaatactgttgtccaaaaatatactttaaccacagatgttttagtggaccatatctaaataaaggaagaatcgcagaattacctcaatgtgtaggcccagggaattgcgtattagtactaagagaagtattgaccctcttgattaatgcagcatataaaccttcacgagttttaagggaattacaattagataaagattcagtttggcatggatgtggagaagtacttaaagcgaaatataagggaaaatcctacagagccacagtagaaatcgtgaaaacagcagaccgagtaacagagttctgcaggcaaacttgcataaaactggaatgttgcccaaatttatttgggccacgtatggtattggataaatgctctgaaaactgctctgtcttaacaaaaacaaaatatacgcattattatggtaaaaaaaaaaacaaacgaattggacgcccgccgggaggccattccaacctggcctgcgccttgaaaaaagcatctaaaaggagaaaaagaagaaagaatgtattcgtacacaaaaaaaaaagaagcagcgcatcagtagacaacaccccagctggatcacctcaaggatcaggaggagaagatgaagatgatccagacgagggcgatgatgatagtctaagcgaaggaagcacaagcgaacaacaagatgaactacaagaagaaagcgagatgtctgaaaaaaaatcttgttcttcctcaccaacccagtccgaaattagtacgtcattaccacccgatcgacaaagaaggaaacgagagctaagaacatttagcttctctgatgatgaaaataaacccccaagtcccaaagaaatccgaatagaagtagcagaaagattacatctagatagtaatcctctgaaatggtcagttgctgatgtagtaagatttatcagaagtacagattgcgcacccctagcaagaatctttctagatcaggaaatcgacggtcaggcattactgttattaacattgccaactgtacaggaatgcatggatctcaaattaggacctgcaataaaattatgtcatcatattgaaagaataaagtttgctttctacgaacaattcgcaaattaa

SEQ ID NO: 3960 - RNA, 1431 nt, synthetic construct
  misc_feature 1..1431: note = CCDS4550.1 variant
  source 1..1431: mol_type = other RNA
atgagcggatcttcagcacgaagttcacatctatcacaaccagtcgtaaaaagtgtactagtatatagaaacggagatccattttacgccggaagaagagtagtaatacatgaaaaaaaagtaagttcatttgaagtattcttaaaagaagtaacagggggtgtacaagcaccattcggagccgttagaaatatatatacaccaagaacaggacacaggataagaaaactagatcaaatacaaagcggaggaaactatgtagcaggagggcaagaagcatttaaaaaattgaattacttagatattggcgaaataaaaaaaagaccaatggaagtagtgaatacggaagtgaaaccagttatacattcaagaataaacgtaagtgcaagatttagaaaaccattacaagaaccatgtactatatttctaatagcaaatggagatttaataaatccagcatccagattactaataccaagaaaaacattaaatcaatgggaccacgtactacaaatggtaacagaaaaaataacactaagatcaggagcagttcacagactctatacactcgaaggtaaattagtggaatcgggcgcagaattagaaaacggacaattttacgtagcagttggaagggataaattcaaaaaactaccatactcagaattactattcgataaatccacaatgagaagaccattcggacaaaaagcaagctcactacccccgatcgtaggatcacgaaaaagtaaaggttcaggaaacgataggcattcaaaatcaacagtaggatcaagcgataattcaagtccacaaccactcaaacgaaaaggaaaaaaagaagacgtaaatagtgaaaaactaacaaaactaaaacaaaatgtaaaactaaaaaacagtcaagaaacaataccaaatagtgatgaaggaatattcaaagcaggagcagaacgctcagaaacccgaggagcagcagaagtacaagaagatgaagatacacaagtagaagtacctgtagaccaaagaccagcagagatagtagacgaagaagaagacggtgaaaaagcgaataaagacgcagaacaaaaagaagacttcagtggaatgaatggggatttagaagaagaaggaggacgagaagccacagatgcaccagaacaagtagaagaaatactagaccattcagaacaacaagcaagaccagcgagagttaatggaggaacagacgaagaaaacggagaagaattacaacaagtaaataacgaattacaattagttctagacaaagaacgaaaaagccaaggagcaggaagtggacaagacgaagcagatgtagacccacaaagaccaccaagaccagaagtaaaaataacaagcccagaagaaaatgaaaacaaccaacagaacaaagactatgcagcagtggcttaa

SEQ ID NO: 3961 - RNA, 1362 nt, synthetic construct
  misc_feature 1..1362: note = BAA07903 variant
  source 1..1362: mol_type = other RNA
atgcgcattcctgtagatgcatcaacatctagacgatttactcccccatctacagcactctccccaggcaaaatgtctgaagcactaccattaggagcaccagatgcaggagcagctttagcaggtaaattaagatcaggagatagatcaatggtagaagtcttagctgaccaccctggagaacttgttagaacagattccccaaacttcttatgttctgtattaccaacacactggcgttgtaacaaaacattaccaatagcattcaaagtagtagcactcggtgacgtaccagacggaactctagtaacagtaatggcaggcaatgacgaaaattattccgccgaactaagaaatgcaacagccgcaatgaaaaaccaagtagcacgtttcaatgatttaagatttgtaggtagatctggaagaggtaaatcattcacattaacaataacagtatttacaaatccacctcaagtagccacataccacagagctataaaaataacagtagatggccctcgagaaccaagacgacatagacaaaaattagatgaccaaacaaaacctggcagtttatcattttcagaaagattatcagaactagaacaactacgcagaacagcaatgcgtgtttcaccacaccatcctgctcccacacccaacccaagagcatcactaaaccactccacagcctttaatccacaaccccaatcacaaatgcaagacaccagacaaattcaaccttcaccaccatggagctacgatcaatcataccaatacttaggatccatcgcatctccatcagtccatcctgcaacacccatatcacccggacgagcatcagggatgacaacactatcagcagaactctcatctagattatcaaccgcaccagatctaactgccttctcagatcccagacaatttcctgcactcccatcaattagtgacccaagaatgcattatcctggagcatttacttattccccaactccagttacatccggcataggcatcggcatgtccgcaatgggctccgctacaagataccacacatatctccctcctccatatccaggatcttctcaagcacaaggaggtccatttcaagcatcttctccatcctatcatttatattacggtgcctcagcaggctcataccaattttcaatggtcggaggagaacgatccccacccagaatattaccaccatgtaccaatgcatcaacaggctcagcacttttaaatccttctttaccaaatcaatctgatgttgtagaagcagaaggttcacactcaaattcaccaacaaacatggcaccatctgcacgactagaagaagccgtttggagaccatattaa

SEQ ID NO: 3962 - RNA, 1080 nt, synthetic construct
  misc_feature 1..1080: note = ACI46041 variant
  source 1..1080: mol_type = other RNA
atgccattagaattagaactctgcccaggaagatgggtaggaggacaacatccatgctttataatagcagaaataggacaaaatcatcaaggagatttagacgtcgcaaaacgaatgataagaatggcaaaagaatgtggagccgactgtgcaaaattccaaaaatctgaactagaattcaaatttaacagaaaagcactagaaagaccctatacaagcaaacactcatggggaaaaacatatggagaacacaaaagacatttagaattcagccacgatcaatacagagaactacaaagatacgcagaagaagtaggaatatttttcactgcatcaggaatggatgaaatggcagtagaatttctacacgaattaaacgtaccatttttcaaagtaggaagcggagacacaaacaattttccatacttagaaaaaacagcaaaaaaaggaagaccaatggtaatatcaagcggcatgcaatcaatggacacaatgaaacaagtataccaaatagtaaaaccattaaacccaaacttctgtttcttacaatgcacatcagcataccctttacaacccgaagacgttaacctcagagttataagcgaataccaaaaactatttccagacataccaatcggatatagtggacatgaaacaggaatcgcaataagcgtagcagcagtagcactaggagcaaaagtactagaaagacatataacattagacaaaacatggaaaggaagtgaccattcagcgagcctagaacccggagaactagcagaactagtaagatcagtaagattagtagaaagagcactaggaagccccacaaaacaactattaccatgcgaaatggcatgcaacgaaaaacttggaaaaagcgtagtagcaaaagtaaaaataccagaaggaacaatactaacaatggacatgctaacagtaaaagtaggagaaccaaaagcatatccaccggaagacatatttaacctagtaggtaaaaaagtactagtaacagtagaagaagacgatacaatcatggaagaattagtagacaaccacggaaaaaaaataaaatcataa

SEQ ID NO: 3963 - RNA, 2715 nt, synthetic construct
  misc_feature 1..2715: note = CCDS14652.1 variant
  source 1..2715: mol_type = other RNA
atgcaagcatctccactacaaacatcccagcctacacccccagaagaactacatgcagccgcatatgtcttcacaaatgatggacaacaaatgcgttctgatgaagtaaacttagtagccactggacatcaatccaaaaagaagcactcacgtaaatccaaacgccacagttcatcaaaacgaagaaaatcaatgtcctcctggctcgacaaacaagaagacgcagcagtaacacacagtatatgtgaagaacgaataaataatggccaaccagttgccgacaacgtattaagcacagcaccaccatggcccgacgcaaccatagcacataacataagagaagaacgaatggaaaatggccaaagccgcacagacaaagtactatcaacagcacctcctcaattagtacacatggccgcagcaggaataccttcaatgagcacaagagacctacattccacagtaacccataatatacgagaagaacgaatggaaaacggacaaccacaaccagataacgtactttcaacaggacccacaggcttaataaacatggcagccacacccatacccgccatgtccgcaagagatctatatgcaaccgtaactcataacgtttgtgaacaaaaaatggaaaacgttcaaccagcaccagacaacgtactgttaacactcagaccaagaagaataaatatgacagacacaggaataagtccaatgagcacaagagacccatatgcaacaataacttataatgtccccgaagaaaaaatggaaaaaggacaaccacaaccagacaacattttatctacagcttctactggtttaatcaatgtagcaggagcaggaacaccagcaatatccactaacggattatattcaaccgtaccacacaacgtttgcgaagaaaaaatggaaaacgaccaaccacaacctaacaacgtactatcaaccgtacaaccagtcatcatatacttaacagcaactggtattccaggaatgaatacaagagatcaatatgctacaattactcacaacgtctgcgaagaaagagttgttaataatcaacctctaccttcaaacgccctgtcaacggtactcccaggcttggcctatcttgcgacagcagacatgcctgcaatgagtacaagagaccaacacgcgaccatcatacacaacttaagagaagaaaagaaagacaactcacaacctaccccggataatgtattatccgcagtaacaccagagctcattaacttagccggcgcaggcattcctcccatgtcaacacgtgaccaatatgcaactgtaaaccatcacgtccatgaagcccgaatggaaaatggtcaaaggaaacaagataacgttctctcaaatgtcttgtccggattaataaatatggcaggagcatctatcccagctatgtcctccagagacctatacgccacaattacacattcagtacgagaagaaaaaatggaatctggaaaaccacaaacagacaaagtaataagtaacgatgcgccacaactcggtcacatggcagctggaggaatccctagtatgtcaacaaaagacttatatgcaactgtcacacaaaatgtccatgaagaacgcatggaaaacaaccaacctcaaccttcgtacgacctatctaccgtcctacctggtttaacataccttacagttgcaggtattcctgcaatgtcaactcgagaccagtatgcaacagtaacacataatgtacatgaagaaaaaataaaaaatggtcaagcagcatctgacaacgtcttctcgacagtgccccctgcatttataaatatggcagctacaggagttagttcaatgtcaactcgcgaccaatacgctgcagtaacacacaacatacgggaagaaaaaataaacaattcacaaccagcacccggtaatatactctctacagcccctccttggttacgacacatggccgccgccggaatttcatcaacaattacacgagacttatatgtaacagcaacccattcagtccacgaagagaaaatgaccaacggacaacaagcaccagataattctctaagtaccgtcccccccggctgtataaatctctcaggagcgggaatatcgtgtcgaagcaccagagacttatatgcaacagtaatacatgacattcaagaagaagaaatggaaaacgaccaaaccccacctgatggtttcctatcaaattcagactcacctgaactaattaacatgaccggccactgcatgccaccaaacgcactagactcattctcccatgactttacctcactgagtaaagatgaactcctctataaacccgattccaatgaatttgcagtaggtacgaaaaactacagtgtatccgctggcgatccaccagtcactgtaatgagtttagtagaaacagttcctaatacaccacaaatctcacctgctatggctaagaaaataaatgacgatataaaatatcaacttatgaaagaagtacgcagatttggacaaaactacgaacgtatttttatattactagaagaagtacaaggatcaatgaaagtcaaacgtcaattcgttgaattcacaataaaagaagcagctcgatttaaaaaagtagtacttatccaacaactagaaaaagctctgaaagaaatagattcccattgccatttaagaaaagtcaaacatatgagaaaacgataa

SEQ ID NO: 3964 - RNA, 2403 nt, synthetic construct
  misc_feature 1..2403: note = AAH01058 variant
  source 1..2403: mol_type = other RNA
atgggaagcagtaaaaagcatagaggagaaaaggaagcagcaggaacaacagcagcagcaggaacaggaggggcaacagaacaaccgccaagacatcgagaacacaagaaacacaaacacaggtcagggggttcagggggttcgggaggagaaagaagaaaaaggagcagagaaagagggggagaacgaggatcagggagaaggggagctgaagcggaagctagatcaagcacacacgggagagaaagaagtcaagcggaaccaagtgaaagaagggtaaaacgagaaaagagagacgatggttatgaagcggcagctagttcgaaaacaagctcaggtgacgcttcaagcctaagcatagaagaaacaaataaattaagagctaaactaggattaaaaccattagaagtaaatgctataaagaaagaagcaggaacaaaagaagaaccagtcactgctgatgtaataaacccaatggccttaaggcaacgcgaagaactaagagaaaagttggctgcagcgaaagagaaaaggctactaaatcaaaagctgggaaaaattaaaacgttaggagaagatgatccctggttagatgataccgcagcctggatagaaagatctcgacaactacaaaaagaaaaagacctggcagagaaaagagcaaaactattagaagaaatggaccaggaatttggagttagtacactggtagaagaagagttcggacaacgaagacaagatttatactcggcaagagatctgcaagggttaactgtggaacatgccattgactcattcagagaaggagaaacaatgattctaacacttaaggataaaggagtcttacaggaagaagaagatgttctagtaaatgttaatctagtagataaagaaagagcggagaaaaacgtagaattgaggaaaaagaaaccagattatttaccatatgcagaggacgaaagtgtagatgatttagcacaacaaaaaccgagatcgatattaagcaaatacgatgaagaattagaaggagaaagaccccattcattcagacttgaacaaggagggaccgcagacggattgagggaaagagaactggaagaaataagagcaaaattaagactgcaagcacaaagtctatcaacggtcggtcctcgactagcgagtgagtatttgacaccagaagaaatggtaacattcaagaaaacaaaaaggagagttaagaaaataaggaagaaagagaaagaagtcgtagtaagagcggatgacctattgccactaggcgatcaaacgcaagatggagacttcgggtcaagactgagagggagaggaagaagaagggtatctgaagtagaagaagaaaaagagccagtccctcagccactaccaagcgatgacacaagagttgaaaatatggatatatcagatgaagaagagggaggggccccaccaccagggtcgccacaagttctagaagaagacgaagcagaattagaattacaaaaacaactggaaaaagggagaagactacggcaattgcaacaattacaacaattaagagatagcggagagaaagtggtagaaatagtaaagaaattggaaagtagacaaagagggtgggaagaagatgaggatccggaaagaaaaggagcgatagtcttcaatgcaacaagcgaattttgtagaacgttaggagaaatacctacatatggtcttgccgggaatagagaagaacaagaagaattgatggatttcgaaagggacgaagaacggagcgccaatggaggctcagaatcggatggggaggaaaatataggatggagtacagttaacttagatgaagaaaaacaacaacaagatttttcagcatctagtacgacaattctagatgaagaaccgatagttaacagaggattagcggctgctctactattgtgccaaaataaaggactattggaaacaacagtacaaaaagtagcaagagtgaaagcaccaaacaaaagtttgccatcagcagtatactgcattgaagacaaaatggctattgatgataaatatagcagacgagaagagtataggggatttacacaagacttcaaagaaaaagatgggtacaaaccagacgtaaaaatagagtacgttgacgaaacaggaagaaaattaacgccaaaagaggctttcaggcaattatcacatagatttcatggaaaaggaagcggtaaaatgaaaacggaaagaagaatgaagaaacttgatgaagaagccttattgaagaaaatgtcgagtagcgacactccattaggaacagtagcgttactgcaagaaaaacagaaagcgcaaaagacgccatacatagtattatcaggaagcggaaaaagtatgaacgcgaatacaataactaaataa

SEQ ID NO: 3965 - RNA, 2877 nt, synthetic construct
  misc_feature 1..2877: note = AAF00087 variant
  source 1..2877: mol_type = other RNA
atgcgaactcataccagaggagcaccctcagtatttttcatttacctcttatgctttgtaagcgcatacatcacagacgaaaacccagaagttatgattcctttcaccaatgcaaattatgattcccatcctatgttatacttcagccgagccgaagtagcagaacttcaattgagagccgcatcctctcatgagcacatagctgcaagattaacagaagctgtacatacaatgttatcatctccgctagaatacctacccccatgggatcctaaagattactccgcgagatggaacgaaatattcggtaacaacctcggagcgttagccatgttttgcgttttatatcctgaaaatatagaagctagagatatggctaaagactatatggaaagaatggccgcacaaccatcttggctagtaaaagacgccccatgggatgaagtaccattagcacactccttagttggatttgcaacagcatacgactttctatataattatttaagcaaaactcaacaagaaaaatttctagaagtcatagcaaacgcttcaggttatatgtatgaaacctcttaccgtagaggttggggttttcagtaccttcataatcatcaacccaccaattgcatggccttattaactggaagtctagttttaatgaaccaaggatacctacaagaagcatatttatggactaaacaagtactcactatcatggaaaaatcactcgtcctactacgagaagtaactgacggttcactctatgaaggtgtagcatacggatcatatacaactagatccttatttcaatacatgtttctagtacaacgacacttcaatataaaccatttcggacacccatggttaaaacaacattttgcatttatgtacagaactatcttgccaggcttccaaagaacagtagcaatagcggattcaaattacaactggttttatggcccagaatcccaacttgtattcctagataaatttgtaatgagaaacggatccggtaattggttagccgatcagataagacgtaacagagtagtagaagggcctggaactccgtctaaaggtcaaagatggtgcactctacataccgagttcctatggtatgatgggtccttaaaatctgtaccaccaccggactttggaactccaactttacattattttgaagattggggagttgtaacttatggctctgcattaccagcggaaattaacagatcatttttgtcctttaaatctggaaaattaggcggcagagcaatatacgacatagtgcatagaaataaatacaaagattggataaaaggatggcgcaattttaatgcaggacatgaacatcccgatcaaaattcatttacatttgcacccaacggagtaccattcataaccgaagcattatatggtcctaaatacacatttttcaacaacgtattaatgttttctccagcagtatccaaatcatgcttttctccatgggtaggacaagtaacagaagactgttccagcaaatggagtaaatataaacacgatctagctgcatcatgccaaggaagagtcgtagctgcagaagagaaaaatggtgtagtatttatcagaggagaaggagtgggtgcttacaatccacaattaaatttaaagaatgttcaacgtaatttaattctattacaccctcaactcctcctcttagttgaccaaatacaccttggcgaagaatctcccttagaaacagcagcatcctttttccataatgttgacgtcccattcgaagaaactgtagtagatggagttcatggagcattcataagacaaagagacggattatataaaatgtattggatggacgacacaggttacagtgaaaaagcgacatttgcctccgttacctatcctagaggctacccatacaacggaactaactacgtaaatgtaactatgcacttaagatctcctataacccgtgccgcttacttattcattggaccaagcatagacgtccaatcattcacagtacatggcgatagccaacaactagacgtattcatcgccacttcaaaacatgcctatgcaacctacctgtggaccggagaagccacaggccaatcagccttcgcccaagtaatagcagacagacataaaatcctttttgacagaaattcagcaataaaatcttcaatagtacccgaagtgaaagactatgctgccatagttgaacaaaaccttcaacatttcaaaccagttttccaactgctagaaaaacaaattctaagtagggtaagaaacaccgcttcttttcgtaaaaccgctgaaagactactcagattttcagataaaagacagacagaagaagcgatcgacagaatttttgcaatctcccaacaacaacaacaacaatcaaaatccaagaaaaacaggagagcaggaaaaagatacaaattcgttgacgcagttccagacatattcgcccaaatagaagtaaatgaaaagaaaataagacaaaaagcacaaatattagcacaaaaagaacttccaattgacgaagatgaagaaatgaaagacctacttgacttcgccgacgttacatatgaaaaacataaaaatggcggacttataaaaggaagattcggtcaagctagaatggtaacaacaacacattcaagagcaccctcattatcagcttcatatacaagacttttcctgattttaaacattgcaatattctttgtaatgctagcaatgcaactaacatatttccaaagagcacaatctcttcacggtcaaagatgtctatacgccgtactattaatagattcttgcatacttctctggctatatagttcatgttcacaatctcaatgctaa

SEQ ID NO: 3966 - RNA, 2892 nt, synthetic construct
  misc_feature 1..2892: note = AAH93784 variant
  source 1..2892: mol_type = other RNA
atggcaacagctgcagaaacaagtgcttcagaaccagaagccgaatctaaagcaggaccaaaggcagacggagaagaagatgaggtaaaagcggcaagaacaagaaggaaagttctaagtagggccgtcgcagcagcaacatacaaaacaatgggaccagcctgggaccaacaagaagaaggagtttccgagagtgatggagatgaatatgcgatggcatcatccgcagaatcttcaccaggtgagtatgaatgggaatacgatgaagaggaagagaaaaatcaactggaaatcgaaagacttgaggaacaactaagcataaacgtatacgactataattgtcatgtagatttaatcaggctattaaggctcgaaggtgaacttactaaagtgagaatggcaagacagaaaatgtcagaaatattcccactaacagaagaattgtggctagaatggctacacgatgaaatttctatggcacaagatggacttgacagagaacatgtatacgatctgttcgaaaaagccgtaaaagactacatatgcccgaacatatggctagaatatggacaatactcagtaggaggaataggtcaaaaaggaggattagaaaaagtaagaagtgtgtttgaaagagctttaagttcagtaggattacatatgacaaaaggtctagctctatgggaagcatatagagaatttgaatcagcgatagttgaagctgcgaggctagaaaaagtccattcattatttaggagacaattagctataccattatatgacatggaagcaacattcgcagaatacgaagaatggagtgaagacccaataccagaatcagtaatacaaaattataataaagcgttacaacaactagaaaaatataaaccatatgaagaagcattactacaagcagaagcgcctagacttgcagaataccaagcatacatagactttgaaatgaaaatcggagatcctgctcgaatacaattaatttttgaaagggctttagttgaaaattgtttggtaccagatctttggataagatacagtcaatatttagatagacaattaaaagtcaaagacttagttctatcagtacacaatcgtgcaatacgaaattgcccgtggacagtagcactatggtcaagatacctattagcaatggaaagacatggagtagatcatcaagtaatatcagtaacctttgaaaaagcactgaacgcaggctttattcaagcaacagattatgtcgaaatatggcaggcttacctggattatctgagaagaagagttgatttcaaacaagattcctcgaaagaattagaagaactgagagctgcatttactagggcgttagagtatctaaagcaagaagtagaagagagatttaatgagagtggtgatccaagttgtgtaataatgcaaaattgggcaagaatagaagcacgcctatgcaataacatgcaaaaagcaagagaactttgggattcgataatgacaagaggcaatgctaaatacgcaaatatgtggcttgaatattataatctagagagggcacacggtgatactcaacattgtagaaaagcgcttcatagggcagtacaatgtacgtcagactatccagaacatgtatgtgaagttctactaaccatggaacggactgaagggagtttagaggactgggatatagcggtccagaaaacagaaacgagattggcaagagtaaacgaacaacgcatgaaagcagcagagaaggaagcagcacttgtacaacaagaagaagaaaaagccgaacaaagaaagcgcgcaagggcagaaaagaaagctcttaaaaagaagaagaaaataaggggcccggagaaaagaggagcagacgaagatgacgaaaaagaatggggagacgatgaagaggaacaaccaagcaaaagaagaagagttgaaaattcaataccagcagctggggaaacacaaaatgtagaggttgcagcaggaccagcaggaaaatgtgctgccgttgacgtagagccaccatcaaaacagaaagaaaaagcagcatccttaaaaagagatatgcctaaagtattacatgacagttcaaaagacagtataactgtttttgtcagtaatctgccatattcaatgcaagaaccagatacaaaactaagacccctattcgaagcctgtggagaagtagtacaaataagacctatattttcgaataggggagactttagaggatattgctatgtggagttcaaagaagaaaaatccgcactacaggcactagaaatggataggaaatctgtagaagggcgaccaatgtttgtaagcccgtgtgtcgataaatccaagaacccagattttaaagtatttagatatagtaccagcttggagaaacacaaattatttataagcggactcccatttagttgtaccaaagaagaactagaggaaatatgcaaagcacacggaacagtgaaagatttaaggcttgtcactaacagagcaggaaaaccaaaaggtctggcatacgtcgaatacgaaaatgagagtcaagccagtcaagcagtgatgaaaatggatggaatgactataaaagaaaacataattaaagtagctatatcaaatccaccacaaaggaaagtgcccgagaaacctgaaacacggaaagcgccaggtggaccaatgttgttaccacaaacatacggcgcaaggggcaaagggaggacacaattgagtttactaccccgcgcattacagagaccaagtgcagcagccccacaagcggaaaatggtccggcggcagcaccagcagtcgcggcaccagctgccacagaagcacctaaaatgagtaatgcagactttgcaaaacttttcttgagaaaataa

SEQ ID NO: 3967 - RNA, 2283 nt, synthetic construct
  misc_feature 1..2283: note = AAC51668 variant
  source 1..2283: mol_type = other RNA
atgaaaacatgggtaaaaatagtattcggagtcgcaacatcagccgtactagcattattagtaatgtgtatagtactacgaccatcaagagtacacaacagcgaagaaaatacaatgagagcattaacattaaaagacatccttaatggaaccttctcttataaaacattctttccaaattggatctcaggtcaagaatatttacatcaatcagcagacaacaacatagtattatacaacatagaaaccggtcaatcatatacaatcctatccaacagaacaatgaaatccgtaaatgcatcgaactacggtctatccccagatagacaattcgtatacctagaaagcgattattcaaaactatggagatactcttatacagcaacctattacatatatgaccttagcaacggagagttcgtacgcggtaatgaattaccgagaccaatacaatacttatgttggtctccagtcggctcaaaattagcctacgtataccaaaacaacatatatttaaaacaaagaccaggtgaccccccatttcaaataacattcaacggacgagaaaataaaattttcaacgggataccagactgggtatatgaagaagaaatgcttgcaacaaaatacgcactatggtggtcacctaatggaaaattccttgcatacgccgaattcaatgacacagatataccagttatagcctattcctattatggagacgaacaatacccacgcacaataaatatcccatacccaaaagcaggtgccaaaaatcccgtagtaagaatatttattatagacacaacatatccagcatacgttggaccacaagaagtaccggtacctgctatgatcgcatcatcagactactacttcagctggttaacatgggtcaccgacgaacgagtctgtctacaatggctaaaaagagtacaaaatgtaagcgtactatctatctgtgattttcgagaagactggcaaacatgggattgtccaaaaacacaagaacacattgaagaatcaagaaccggatgggcaggaggtttttttgtatcaacacctgttttcagctacgatgcaatctcttactataaaatattcagcgacaaagatggttacaaacacatacattacataaaagacaccgtagaaaacgccatacaaataacaagcggaaaatgggaagctataaacatattccgagttacacaagactcactattctacagtagtaatgaatttgaagaataccctggacgacgaaatatctacagaataagtatcggcagttatcctccatctaaaaaatgtgttacttgccatttacgaaaagaaagatgccaatactatacagcttcattctccgattacgctaaatattatgctctcgtttgttacggtccaggaataccaatatcaaccctccatgacggccgaacagatcaagaaattaaaattttagaagaaaataaagagctagaaaatgcactcaaaaatatacaactaccaaaagaagaaataaaaaaactagaagttgacgaaataacactatggtacaaaatgattttacccccacaattcgacagatcaaaaaaatatccactactcatacaagtatatggaggtccatgtagccaatctgtcagatcagtatttgcagttaactggatatcatacttagcctccaaagagggaatggtaatagcactggttgacggaagaggtacagcattccaaggagataaactattatacgccgtataccgtaaactaggagtatacgaagtagaagaccaaataacagcagttcgcaaatttattgaaatgggcttcatagacgaaaaacggatagcaatttggggatggtcatatggaggatatgtcagttcactcgctctagcatcaggaacaggactattcaaatgcggaatagctgtcgccccagtatcttcatgggaatactatgcatcagtatataccgaacgatttatgggattacccactaaagatgacaatttagaacactataaaaactctactgtaatggcaagggcagaatactttcgaaacgtagattatctattaatacacggcaccgcagacgacaacgtacactttcagaactccgcacaaatagctaaagctttagttaacgcacaggttgatttccaagcaatgtggtattcagaccaaaatcacggtctatcaggtctatcaacaaaccacctctacactcatatgactcactttttaaaacaatgtttctcactaagcgactaa

SEQ ID NO: 3968 - RNA, 1128 nt, synthetic construct
  misc_feature 1..1128: note = CCDS32839.1 variant
  source 1..1128: mol_type = other RNA
atggacgccctacaacttgcaaactcggcatttgcagtcgacctattcaaacaactctgcgaaaaagaaccattaggaaacgtcctattctcacccatatgcctatcaacttctctatcattagcccaagtaggagccaaaggagacacagcaaacgaaattggacaagtactccactttgaaaacgtaaaagacgtaccattcggattccaaacagtaacctcagatgtaaacaaactatcatcattttactcacttaaactcataaaaagactatacgtcgacaaatctttaaacctctcaacagaatttatatcatccaccaaaagaccatatgctaaagaactcgaaacagtagacttcaaagacaaattagaagaaacaaaaggccaaataaacaactccataaaagacctaacagatggacacttcgaaaacatactcgcagacaattccgtaaacgaccaaacaaaaatactagtagtaaatgcagcatacttcgtaggcaaatggatgaaaaaattctccgaatcagaaaccaaagaatgtcccttccgagtaaacaaaacagacacaaaaccagtccaaatgatgaatatggaagcaactttctgcatgggaaacatagactcaataaattgcaaaataatagaattaccattccaaaataaacatctatcaatgttcatactactccccaaagatgttgaagacgaaagcacaggattagaaaaaatagaaaaacaactaaattcagaatccctatcacaatggacaaacccatcaacaatggcaaacgcaaaagtcaaattatcaatcccaaaattcaaagtcgaaaaaatgatcgaccctaaagcatgtctagaaaacttaggtttaaaacacatcttctcagaagatacatcagacttctccggaatgtctgaaaccaaaggagtagcactatcaaacgtaatacacaaagtatgtcttgaaataacagaagacggaggagactcaatagaagtcccaggagccagaatactacaacacaaagacgaattaaacgcagatcacccattcatatacataataagacacaataaaactagaaacatcatattcttcggcaaattctgttcaccataa

SEQ ID NO: 3969 - RNA, 1002 nt, synthetic construct
  misc_feature 1..1002: note = AAH06564 variant
  source 1..1002: mol_type = other RNA
atggcttgttcaagaccaccatcacaatgcgaacccacaagtctaccaccaggcccaccagcaggaagaagacatttaccactatcaagacgaagaagggaaatgagttctaacaaagaacaaagatcagcagtattcgtaatattatttgcactaataacaatactaatactctatagctccaactcagcaaatgaagtatttcactatggatcactaagaggacgatcaagacgtccagtaaacttaaaaaaatggagcatcacagatggatacgtaccaatactaggaaacaaaacattaccatcaagatgtcaccaatgcgtaatagtatcatcaagctcacacctattaggaacaaaactaggaccagaaatagaaagagcagaatgtacaataagaatgaacgatgcaccaacaactggatattcagcagacgtaggcaataaaactacatatagagttgtcgcacattcatcagtattcagagtcttacgaagaccccaagaatttgtaaacagaacacccgaaacagtattcatattctggggcccaccatcaaaaatgcaaaaaccccaaggatcactagtaagagtaatacaacgcgcaggtttagtatttccaaatatggaagcatatgcagtcagcccaggtagaatgagacaatttgacgatttatttagaggagaaacaggaaaagacagagaaaaaagccattcatggctatcaacaggatggttcacaatggtaatagcagttgaattatgcgatcacgtacacgtatacggaatggtacccccaaactattgttcacaacgacccagactccaaagaatgccatatcactattacgaaccaaaaggaccagacgaatgcgttacatatatccaaaacgaacactctagaaaaggaaatcaccatagatttataacagaaaaacgagtattctcatcatgggctcaactatatggaataacatttagccatccatcatggacataa

SEQ ID NO: 3970 - RNA, 1071 nt, synthetic construct
  misc_feature 1..1071: note = AAC37586 variant
  source 1..1071: mol_type = other RNA
atgtcaccttgcggaagagccagaagacaaacatccagaggagctatggcagtattagcatggaaattcccacgaactagattaccaatgggagcatcagcattatgcgtagtagtattatgctggttatacatatttccagtatacagactaccaaacgaaaaagaaatagtacaaggtgtcctacaacaaggaacagcatggagaagaaatcaaaccgcagcaagagctttcagaaaacaaatggaagactgctgcgaccccgctcatttattcgcaatgacaaaaatgaactcaccaatgggaaaatccatgtggtacgatggagaattcctatactcctttacaatagataactcaacatactcactatttccacaagcaaccccattccaactacccctaaaaaaatgcgccgtagttggaaatggcggaattctcaaaaaatcaggatgcggaagacaaatagatgaagcaaacttcgtcatgagatgcaacttaccaccactatcctcagaatacacaaaagatgtaggatcaaaatcacaattagtaacagcaaacccctcaataataagacaaagattccaaaacctactatggtcaagaaaaacatttgtcgacaacatgaaaatatacaaccactcatatatatatatgccagcattctcaatgaaaacaggaactgaaccatcacttagagtatactacacattatcagacgtaggcgcaaatcaaacagtactattcgcaaatccaaacttcctaagatctataggcaaattctggaaatcaagaggaatacatgctaaaagattatcaactggcctattcctagtatcagccgcacttggattatgcgaagaagtagcaatatacggattttggcctttttccgtaaacatgcacgaacaaccaatatcacaccactactacgacaacgtactacccttttcaggattccacgccatgccagaagaattcctacaactttggtatttacataaaatcggagcactcagaatgcaattagacccctgcgaagacacatcattacaaccaacatcataa

SEQ ID NO: 3971 - RNA, 1257 nt, synthetic construct
  misc_feature 1..1257: note = BAG50894 variant
  source 1..1257: mol_type = other RNA
atgcgaaccaaagcagcaggatgcgcagaacgaagaccactacaaccacgaacagaagcagccgcagccccagccggaagagcaatgccaagtgaatatacgtacgtcaaattacgctcagactgcagtagaccaagcttacaatggtacacaagagcacaatcaaaaatgagacgaccaagtctattactaaaagacatattaaaatgtaccctactcgtattcggcgtatggatcttatacatactcaaactaaattatacaacagaagaatgtgacatgaaaaaaatgcactacgtagatccagaccacgtaaaaagagcacaaaaatacgcccaacaggtactacaaaaagaatgtagaccaaaattcgcaaaaacaagcatggcactcctattcgaacacagatactcagtagatcttttaccattcgtacaaaaagcacccaaagactcagaagcagaatccaaatacgatccacccttcggattcagaaaattctcatcaaaagtacaaactctattagagctactacccgaacatgatttaccagaacatttaaaagcaaaaacttgcagaagatgtgtagtaataggctcaggagggatattacatggactagaattaggacacacactaaatcaattcgacgtcgttatacgattaaattcagccccagtagaaggatactcagaacatgtaggaaacaaaacaacaataagaatgacatacccagaaggagctccactatcagacctagaatactactctaacgacctatttgttgccgtactattcaaatctgtcgatttcaattggttgcaagcaatggtaaaaaaagaaacattaccattctgggtaagactatttttttggaaacaagtagcagaaaaaatcccactacaacccaaacactttagaatattaaacccagttataataaaagaaacagcattcgatatactacaatacagtgaaccccaatcaagattttggggaagagacaaaaacgtaccaacgattggagtcatagcagtagtattagcaacacacttatgtgacgaagtcagtcttgccggtttcgggtatgatctaaaccaaccacgaacaccactacattatttcgactcacaatgtatggcagcaatgaacttccaaacaatgcataacgttacaacagaaactaaatttttactaaaacttgtaaaagaaggtgtcgtaaaagacctaagcggaggaatagacagagaattctaa

SEQ ID NO: 3972 - RNA, 1059 nt, synthetic construct
  misc_feature 1..1059: note = EAW56837 variant
  source 1..1059: mol_type = other RNA
atggatttcctaagaaatctcttttcacaaacactctcactaggaagtcaaaaagaaagattattagacgaattaaccttagaaggagttgcaagatatatgcaatcagaaagatgtagaagagtaatatgcctagtcggtgcaggaatatcaacatcagcaggaataccggacttcagatcaccatcaacaggactctacgacaacctagaaaaatatcacttaccatatcccgaagcaatatttgaaatatcatacttcaaaaaacacccagaaccctttttcgcattagccaaagaattatacccaggtcaatttaaaccaacaatatgtcactactttatgagattattaaaagacaaaggcttacttctaagatgttatacgcaaaacatagacactttagaaagaatagcaggattagaacaagaagacttagtagaagcacacggaactttctacacatcacactgcgtatcagcatcttgccgacatgaatacccactatcctggatgaaagaaaaaatattctcagaagtaacacccaaatgcgaagactgccaatcattagtaaaacccgacatagtattcttcggagaatcattaccggcaagattcttctcatgcatgcaaagcgacttcctaaaagtagacctactacttgtaatgggaactagcttacaagtacaacccttcgcctccttaatttcaaaagcaccattatcaacaccaagattattaataaacaaagaaaaagcaggacaatcagacccattcttagggatgataatgggactaggaggtggcatggacttcgactcaaaaaaagcatacagagacgtcgcatggctaggagaatgtgaccaaggatgtttagcacttgcagaactcttaggttggaaaaaagaattagaagacctagtaagaagagaacatgcatcaatagatgcacagtcaggagcaggagtaccaaatccatcaacatcagcatccccaaaaaaatcaccaccaccagcaaaagacgaagcaagaacaacagaaagagaaaaaccacaataa

SEQ ID NO: 3973 - RNA, 1170 nt, synthetic construct
  misc_feature 1..1170: note = AAD40850 variant
  source 1..1170: mol_type = other RNA
atggcagaaccagaccccagccatccattagaaacacaagcaggtaaagtacaagaagcacaagactcagattcagatagtgaaggaggagccgcaggaggagaagccgacatggattttctaaggaatctattctcacaaacactaagcctaggttcacaaaaagaacgactacttgacgaattaacactagaaggagtagcaagatatatgcaatcagaacgatgcagaagagtaatatgcttagtaggtgccggtatatcaacatcagcaggcattccagactttcgatctccatcaacaggactatatgacaatctagaaaaatatcacctaccatatccagaagcaatattcgaaatatcatattttaaaaaacacccagaaccatttttcgcactagccaaagaattataccccggacaatttaaaccaacaatatgtcattactttatgcgactcttaaaagacaaaggactactactaagatgttatacacaaaatatagacacactagaaagaatagccggattagaacaagaagatttagtagaagcacatggaacattttacacaagccattgcgtaagtgcatcatgcagacatgaatatccattaagctggatgaaagaaaaaatcttcagcgaggttaccccaaaatgtgaagactgccaatcactagtaaaacccgatatagtctttttcggcgaatcactaccagctagattcttctcatgtatgcaatcagatttcttaaaagtagaccttctattagtcatgggaacaagtctacaagtacaaccattcgcaagcctaataagtaaagcaccattatcaacaccaagactactaataaataaagaaaaagcaggacaaagtgacccattcttaggaatgattatgggacttggaggtggaatggattttgattcaaaaaaagcatacagagatgtagcatggctaggagaatgtgaccaaggatgcttagcattagcagaactactaggctggaaaaaagaactcgaagatttagtaagaagagaacacgcatccatagacgcacaatctggagcaggagttccaaatccctcaacatcagcatcacctaaaaaatccccaccaccagctaaagatgaagcaagaactacagaaagagaaaaaccacaataa

SEQ ID NO: 3974 - RNA, 1401 nt, synthetic construct
  misc_feature 1..1401: note = AAH02824 variant
  source 1..1401: mol_type = other RNA
atggcagaagaacaagatctatctgaagtagaattatcaccagtaggatcagaagaaccaagatgtctatccccaggatcagcaccatcactaggaccagatggcggaggaggtggatcgggactaagagcttcaccaggaccaggcgaactaggaaaagttaaaaaagaacaacaagatggagaagctgatgatgataaatttccagtatgcataagagaagcagtaagccaagtgttatcaggttacgattggacgctagttccgatgccagtaagagtaaacggcgcttctaaaagtaaacctcacgtaaagagaccaatgaacgccttcatggtatgggcacaagcagcaagaagaaaactagcagatcaatatccacaccttcataatgcagaactatcaaaaacattaggaaaattatggagattattaaatgaatcagacaaaagaccattcatagaagaagctgaacgattaagaatgcaacataaaaaggaccacccagattataaatatcaaccaagaagaagaaaaaacggaaaagcagcacaaggagaagctgaatgtcctggaggagaagcagaacaaggtggaacagccgcaatacaagcacactacaaaagcgcacacttagaccacagacatccaggagaaggaagtcctatgtcagacggtaacccagaacatccttcaggacaatcacatggacctcccacacctccaacaacaccaaaaacagaattacaaagtggaaaagcagacccaaaaagagacggaagatcaatgggagaaggaggaaaacctcacatagattttggtaacgtagatataggagaaatatcccacgaagtaatgtcaaatatggaaacatttgacgtggcagaactagaccaatatctcccaccaaatggtcacccaggacatgtatcaagttattcagcagctggatacggattaggaagtgcacttgcagtagcgtcaggacattcagcatggatttctaaaccaccaggtgtagcattaccaacagtatcaccgccaggcgttgatgcaaaagcacaagtaaaaacagaaacagctggcccacaaggcccacctcattacacagatcaaccaagtactagtcaaatagcatatacatcattatcattaccacattacggatcagcatttccatcaatatcaagaccacaattcgattactctgatcatcaaccatcaggaccatactacggacattctggacaagcttcaggtctctactcagcattctcttacatgggaccatcacaaagacctctctatacagccatatccgacccatcaccaagcggaccccaatcacattccccaacacactgggaacaaccagtttatacaacactaagtagaccataa

SEQ ID NO: 3975 - RNA, 456 nt, synthetic construct
  misc_feature 1..456: note = AAH32457 variant
  source 1..456: mol_type = other RNA
atgtcaataccattctcaaacacacactacagaataccacaaggattcggaaacctactagaaggactaacaagagaaatactaagagaacaaccagacaacataccagcattcgcagcagcatacttcgaaagcctactagaaaaaagagaaaaaacaaacttcgacccagcagaatggggatcaaaagtagaagacagattctacaacaaccacgcattcgaagaacaagaaccaccagaaaaatcagacccaaaacaagaagaatcacaaataagcggaaaagaagaagaaacatcagtaacaatactagactcatcagaagaagacaaagaaaaagaagaagtagcagcagtaaaaatacaagcagcattcagaggacacatagcaagagaagaagcaaaaaaaatgaaaacaaactcactacaaaacgaagaaaaagaagaaaacaaataa

SEQ ID NO: 3976 - RNA, 294 nt, synthetic construct
  misc_feature 1..294: note = AAF28420 variant
  source 1..294: mol_type = other RNA
atggacaaacaaagctcagcaggaggagtaaaaagaagcgtaccatgcgactcaaacgaagcaaacgaaatgatgccagaaacaccaacaggagacagcgacccacaaccagcaccaaaaaaaatgaaaacaagcgaaagctcaacaatactagtagtaagatacagaagaaacttcaaaagaacaagcccagaagaactattaaacgaccacgcaagagaaaacagaataaacccactacaaatggaagaagaagaattcatggaaataatggtagaaataccagcaaaataa

SEQ ID NO: 3977 - RNA, 426 nt, synthetic construct
  misc_feature 1..426: note = AAH62750 variant
  source 1..426: mol_type = other RNA
atggaacaaccaacatcatcaacaaacggagaaaaaacaaaaagcccatgcgaatcaaacaacaaaaaaaacgacgaaatgcaagaagtaccaaacagagtactagcaccagaacaatcactaaaaaaaacaaaaacaagcgaatacccaataatattcgtatactacctaagaaaaggaaaaaaaataaacagcaaccaactagaaaacgaacaatcacaagaaaacagcataaacccaatacaaaaagaagaagacgaaggagtagacctatcagaaggatcatcaaacgaagacgaagacctaggaccatgcgaaggaccaagcaaagaagacaaagacctagacagctcagaaggatcatcacaagaagacgaagacctaggactatcagaaggaagcagccaagactcaggagaagactaa

SEQ ID NO: 3978 - RNA, 567 nt, synthetic construct
  misc_feature 1..567: note = AAH01003 variant
  source 1..567: mol_type = other RNA
atgaacggagacgacaccttcgcaaaaagaccaagagacgacgctaaagcatcagaaaaaagatcaaaagcattcgacgacatagcaacatacttctcaaaaaaagaatggaaaaaaatgaaatactcagaaaaaatatcatacgtatacatgaaaagaaactacaaagccatgacaaaactaggatttaaagtaacactaccaccattcatgtgcaacaaacaagcaacagacttccaaggaaacgacttcgacaacgaccacaacagaagaatacaagtagaacacccacaaatgacattcggaagactacacagaataataccaaaaataatgccaaaaaaaccagcagaagacgaaaacgacagcaaaggagtatcagaagcatcaggaccacaaaacgacggaaaacaactacacccaccaggaaaagcaaatatctcagaaaaaataaacaaaagatcaggaccaaaaagaggaaaacacgcatggacacacagactaagagaaagaaaacaactagtaatatacgaagaaatatcagacccagaagaagacgacgaataa

SEQ ID NO: 3979 - RNA, 567 nt, synthetic construct
  misc_feature 1..567: note = AAH16957 variant
  source 1..567: mol_type = other RNA
atgaacggagacgatgcattcgcaagaagaccaacagtaggagcacaaataccagaaaaaatacaaaaagcattcgacgacatagcaaaatacttctcaaaagaagaatgggaaaaaatgaaagcatcagaaaaaatcttctacgtatacatgaaaagaaaatacgaagcaatgacaaaattaggattcaaagcaacactaccaccattcatgtgcaacaaaagagccgaagacttccaaggaaacgacttagacaacgacccaaacaggggaaaccaagtagaaagaccacaaatgacattcggaagactacaaggaatatcaccaaaaataatgccaaaaaaaccagcagaagaaggaaacgacagcgaagaagtcccagaagcatcaggaccacaaaacgacggaaaagaactatgcccaccaggaaaaccaacaacatcagaaaaaatacacgaaagaagcggcccaaaacgaggagaacacgcatggacacacagattaagagaaagaaaacaactagtaatatacgaagaaatatcagaccctgaagaagacgacgaataa

SEQ ID NO: 3980 - RNA, 567 nt, synthetic construct
  misc_feature 1..567: note = AAC05819 variant
  source 1..567: mol_type = other RNA
atgaacggagacgacacattcgcaagaagaccaacagtaggagcacaaataccagaaaaaatacaaaaagcattcgacgacatagcaaaatacttctcaaaagaagaatgggaaaaaatgaaagtatcagaaaaaatagtatacgtatacatgaaaagaaaatacgaagcaatgacaaaactaggatttaaagcaatactaccaagcttcatgagaaacaaaagagtaacagacttccaaggaaacgacttcgataacgacccaaacagaggaaaccaagtacaaagaccacaaatgacattcggaagactacaaggaatattcccaaaaataatgccaaaaaaaccagcagaagaaggaaacgtatcaaaagaagtaccagaagcaagcggaccacaaaacgacggaaaacaactatgcccaccaggaaaaccaacaacaagcgaaaaaataaacatgatatcaggaccaaaaagaggagaacacgcatggacacaccgactaagagaaagaaaacaactagtaatatacgaagaaataagcgacccagaagaagacgacgaataa

SEQ ID NO: 3981 - RNA, 567 nt, synthetic construct
  misc_feature 1..567: note = AAC05820 variant
  source 1..567: mol_type = other RNA
atgaacggagatgacgcattcgccaggagaccaagagacgacgcacaaataagcgaaaaactaagaaaagcattcgacgacatagcaaaatacttttcaaaaaaagaatgggaaaaaatgaaaagctcagaaaaaatagtatacgtatacatgaaactaaactacgaagtaatgacaaaactaggattcaaagtaacactaccaccattcatgagatcaaaaagagcagcagacttccacggaaacgacttcggaaacgacagaaaccacagaaaccaagtagaaagaccacaaatgacattcggctcactacaaagaatattcccaaaaataatgccaaaaaaaccagcagaagaagaaaacggactaaaagaagtaccagaagcatcaggaccacaaaacgacggaaaacaactatgcccaccaggaaacccaagcacactagaaaaaataaacaaaacatcaggaccaaaaagaggaaaacacgcatggacacacagactaagagaaagaaaacaattagtagtatacgaagaaatatcagacccagaagaagacgacgaataa

SEQ ID NO: 3982 - RNA, 888 nt, synthetic construct
  misc_feature 1..888: note = CCDS32420.1 variant
  source 1..888: mol_type = other RNA
atggaactaatacaagacacatcaagaccaccactagaatacgtaaaaggagtacccctaataaaatactttgcagaagcattaggaccattacaatcattccaagcaagaccagacgacttattaatatcaacatacccaaaatcaggaacaacatgggtatcacaaatattagacatgatataccaaggaggagacctagaaaaatgtcaccgagcaccaatattcatgcgagtaccattccttgaatttaaagcaccgggaataccatcaggaatggaaacattaaaagacacaccagcaccaagactattaaaaacacatctacccttagcactattaccacaaacactcctagaccaaaaagtaaaagtcgtctacgtagcaagaaacgcaaaagacgtagcagtaagttactatcacttctatcatatggcaaaagtccacccagaaccaggaacctgggactcattcctagaaaaattcatggtaggagaagtatcatacggatcatggtatcaacacgtacaagaatggtgggaattatcacgaacacaccccgtactatatctattctacgaagacatgaaagaaaacccaaaacgcgaaatacaaaaaatactagaattcgtaggcagaagtctaccagaagaaaccgtagatttcgtagtccaacacacaagcttcaaagaaatgaaaaaaaacccaatgacaaactatacaacagtaccacaagaattcatggaccacagtatatcaccattcatgagaaaaggaatggcaggagactggaaaaccacattcacagtagcacaaaacgaaagattcgacgcagactacgcagaaaaaatggcaggatgcagcttatcattcagatcagaactataa

SEQ ID NO: 3983 - RNA, 3807 nt, synthetic construct
  misc_feature 1..3807: note = CCDS43990.1 variant
  source 1..3807: mol_type = other RNA
atgatagcagcacctgaaattcccacagattttaatttactacaagaatcagagactcatttttccagtgacacggattttgaagacatagaaggaaagaatcaaaaacaaggaaaaggaaaaacctgtaagaaaggcaagaaaggaccagccgaaaaaggaaaaggcggtaacggcggaggaaaacccccatctggacctaatcgaatgaacggacatcaccaacagaacggagtcgagaatatgatgttgtttgaagtcgtaaaaatgggaaaaagcgccatgcaatctgtagtcgatgactggatagaatcgtacaaacatgatagggatatcgctttattagatttaataaactttttcatacaatgtagcggatgtaaaggcgtagtaacagccgaaatgtttaggcacatgcaaaatagtgaaattattagaaaaatgaccgaggaatttgacgaagatagcggagattatcctctaaccatggctgggccacaatggaagaaatttaaatcatcattttgtgaatttataggagtcctagtaagacaatgtcaatacagcattatatacgacgaatacatgatggatacagttatatctttattgacgggcctatcggattcacaagttcgtgcctttagacacacatctacacttgcagcaatgaaattaatgacggccttagtcaacgtagcattaaacttatcgatcaatatggataatacacaaagacaatatgaagccgaaaggaacaaaatgataggcaaaagagcaaatgaaagactagaacttctattacagaaaagaaaagaacttcaagagaaccaagatgagatagagaatatgatgaacgcaatcttcaaaggagtatttgtacatagatacagagacgcaattgccgagatacgcgcaatttgcattgaagaaattggcatatggatgaaaatgtattccgacgcattcctaaacgactcgtatctaaaatatgtaggctggaccatgcacgacaagcaaggagaagtaagactaaaatgtttaacagcattacaaggtttatactataacaaagaattgaactcaaaacttgaactatttacatcaagattcaaggacagaatcgttagtatgaccttagacaaggaatatgacgtagcagtacaagctataaaattactgaccctagttttacaatctagcgaagaagtactcacagcggaagattgtgaaaacgtctatcatttagtatacagtgcacatagacccgtagcagtagcagccggagagttcctatataagaaattattctcacgaagagaccccgaagaagatggaatgatgaaaagaaggggccgtcaaggaccgaacgcaaacctagtaaaaacattagtatttttcttccttgaatccgaactgcacgaacacgctgcatatttagtagatagtatgtgggactgcgcaacagaactacttaaagactgggaatgcatgaacagtttactattagaagaaccattaagtggagaagaagcactcaccgacaggcaagaatcagctctaatagaaataatgctatgcactataagacaagcagccgaatgtcatcctccggtaggaagagggacgggaaaaagggtactcacggccaaagaaaagaaaacacaacttgatgatagaaccaaaattacagagttatttgcagtagctctacctcaacttttagcaaaatattccgtggacgcagaaaaagttacaaatctactacaacttccacaatactttgatctagaaatttatacaacaggccgcttagaaaaacatctcgacgcacttctcagacaaattagaaatatcgtcgaaaaacatacagacaccgatgtattagaggcttgtagtaaaacctaccacgctttatgtaatgaagaatttacaatatttaaccgtgtagacatatcaagaagccaactaattgatgagttagctgataaatttaatagattactagaagacttcttacaagaaggagaagaaccagatgaagacgacgcctatcaagtacttagtaccctcaagagaataaccgctttccacaacgcacatgacttatcaaaatgggacttatttgcttgcaactacaaattattgaagacaggaatagaaaatggagatatgcctgaacaaattgtgatacacgccttgcaatgcactcattacgtgatcctctggcaattggctaaaattacagaatccagttcaactaaggaggacttactaagattaaagaaacaaatgagagtattctgccaaatttgccaacactacctaacgaacgtaaatacaacagtcaaggaacaggcattcactatactatgcgatatcctaatgatattttcacatcaaattatgtcaggtggtagagatatgttagaaccacttgtctacactccagattcctcacttcaaagcgagttactttcatttattttagatcatgtattcattgaacaagatgacgacaataacagtgctgacggacaacaagaagacgaagctagcaaaatagaggctttacacaagcggagaaacttactagcagcattttgtaaacttatagtttacacagttgtggaaatgaatactgcagctgatatttttaagcaatatatgaaatactataatgattacggcgatataataaaagaaactatgagtaagactagacaaattgacaaaatccaatgtgcaaagacacttatactttctttgcaacaactatttaatgaaatgatccaagagaatggttataattttgatcgaagctcatctaccttctctggtattaaagaactcgcacgaagatttgcactgacatttggccttgatcaacttaaaactagagaagcaatagcaatgctccacaaagatggcatagaatttgccttcaaagaacccaacccccaaggggaatcacatcccccattaaatctggcatttttagatattttatcagaatttagtagtaaactacttagacaagataaacgaacagtctacgtatacctcgaaaaattcatgacattccaaatgtctctacggagagaagatgtatggttaccgttgatgtcttaccgtaacagcttacttgcgggaggcgacgatgacacaatgagtgtaatatctggaatctcatcaagaggatcaacagtaagaagcaagaaaagtaaaccgagtactggaaaaagaaaagtagtggaaggaatgcagcttagcctaacagaagaatcctcctctagcgacagtatgtggttatcaagagaacaaacgcttcatacaccagtaatgatgcaaaccccacaactcacaagtaccattatgagagagccaaaaagattacgacctgaagatagctttatgtcagtttatcctatgcaaactgaacatcatcaaacacctttagattataacactcaagtaacatggatgctagcacaaagacaacaagaagaagcaagacaacaacaagaaagagcagctatgtcttacgtgaaattaaggacaaacctacagcacgcgattagaagaggtacctcacttatggaagatgacgaggagcctattgtggaggacgttatgatgtcctccgaaggccgtattgaagacctcaacgaaggaatggatttcgacacaatggatatagatttaccaccaagtaaaaatagaagagaaagaacagagcttaaacccgatttctttgacccagcatcaataatggacgaaagtgtattaggtgtttctatgttttaa

SEQ ID NO: 3984 - RNA, 1473 nt, synthetic construct
  misc_feature 1..1473: note = CCDS5615.1 variant
  source 1..1473: mol_type = other RNA
atggaaagtatatcaatgatgggatcaccaaaatctttatcagaaacattcttacccaacggaataaacggaataaaagacgcaagaaaagtaacagtaggcgtcattggatcaggtgatttcgccaaatcactcactataagactaattagatgcggataccacgtagtcataggttcaagaaatcccaaatttgcatcagaattcttcccccacgtcgtagatgtaacacaccacgaagacgccctaacaaaaaccaacataatattcgttgccatacatcgagaacattacacctccctctgggacctacgacacctactagtaggcaaaatactaattgacgtatccaacaacatgagaataaatcaatacccagaatccaacgcagaatacctagcatcactctttcccgactcattaatagtaaaaggatttaatgtagtatcagcatgggcattacaattagggcccaaagatgcatcccgacaagtatacatatgctcaaataatatacaagctagacaacaagtcatagaactagcaagacaattaaacttcataccaatagacctaggatcactatccagtgcccgagaaatagaaaatctccccttacgactcttcacactctggagaggcccagtcgttgtagcaatatcattagcaactttttttttcctatactcatttgtaagagacgtcatacacccatacgctagaaatcaacaatcagacttctacaaaattccaatcgaaatcgtaaacaaaacactaccaatcgtagcaataaccctattatcattagtatacttagcaggattactagcagcagcttatcaactatactatggtaccaaatatagaagattcccaccatggctagaaacatggcttcaatgtagaaaacaattaggattactatccttcttcttcgcaatggtacacgtcgcttactctctttgtctaccaatgagacgatcagaaagatacctatttttaaacatggcctatcaacaagtacacgcaaacatagaaaattcatggaacgaagaagaagtatggcgaatcgaaatgtacatatctttcggaattatgtcactaggactactttccctgctcgctgtaacatcaattccatcagtctccaacgccctaaattggcgagaattctcatttatccaatcaacattaggttacgtagcattactaatatctacattccacgtactaatatatggatggaaaagagcatttgaagaagaatactacagattctacactccccccaacttcgtactagcactagttttaccatccatcgtaatactaggcaaaataatattatttctcccatgcatctcacgcaaattaaaaagaatcaaaaaaggctgggaaaaatctcaatttctagaagaaggcatgggaggaacaataccccacgtatctccagaaagagtaactgtaatgtaa

SEQ ID NO: 3985 - RNA, 777 nt, synthetic construct
  misc_feature 1..777: note = EAW93749 variant
  source 1..777: mol_type = other RNA
atggaatcacgaaaagatataacaaatcaagaagaaatatggaaaatgaaacccagaagaaacctagaagataacgactacttacacaaagataccggagaaacatcaatgttaaaacgaccagtactactacacctacaacaaacagcacacgccgacgaattcgactgcccatcagaactacaacacgcacaagaactatttccacaatggcacctaccaataaaaatcgcagcagtaatggcatcattaacattcttatacacactactaagagaagtaatacacccactagcaacatcacaccaacaatacttctacaaaataccaatactagtaataaacaaagtattaccaatggtatcaataacactactagcactagtatatctaccaggcgtaatagcagcaatagtacaagtacacaatggcacaaaatacaaaaaattccctcactggctagacaaatggatgttaaccagaaaacaatttggactactatcactattcttcgcagtactacacgccatatacacattatcatatgcaatgagaagatcttacagatataaactactaaactgggcataccaacaagtacaacaaaacaaagaagacgcatggatagaacacgacgtatggagaatggaaatttacgtatcactaggcatagtaggattagcaatactcgcactattagccgtcacatcaataccatccgtatcagactcactaacatggcgagaatttcactacatacaagtaaataacatataa

SEQ ID NO: 3986 - RNA, 1020 nt, synthetic construct
  misc_feature 1..1020: note = AAD15620 variant
  source 1..1020: mol_type = other RNA
atggaatcaagaaaagatataaccaaccaagaagaactctggaaaatgaaacctagacgaaacctagaagaagacgattacttacacaaagacacaggagaaacttcaatgctcaaaagaccagtacttctccacctacaccaaacagcacatgcagatgaattcgactgtccctcagaactacaacatacacaagaactattcccacaatggcatttacccataaaaatagcagcaattatagcatcactaacattcctatacacccttttaagagaagtcatacacccccttgcaacctcccaccaacaatacttttacaaaataccaatattagtaataaacaaagtactacccatggtatctatcacactattagctttagtatacctacccggcgtcatcgccgctatagtacaactccacaatggaaccaaatacaaaaaattccctcactggttagacaaatggatgctaacaagaaaacaattcggattactatcattctttttcgcagtccttcacgccatatactcactatcctacccaatgcgtcgatcatatagatacaaactactaaattgggcataccaacaagtacaacaaaataaagaagacgcatggatagaacacgatgtatggcgcatggaaatatacgtatcattaggaatcgtaggactagccatactagccttattagcagtaacatcaataccctctgtatccgactccttaacttggagagaattccactacatacaatcaaaattaggaatcgtatctcttttactaggaacaatacacgcattaatatttgcatggaacaaatggatagacataaaacaattcgtatggtacacaccacccacattcatgatagcagtattcctaccaatagtagtcctaatattcaaatcaatactattcctaccatgcctaagaaaaaaaatactaaaaatacgccacggatgggaagacgtcacaaaaataaataaaaccgaaatatgctcccaattataa

SEQ ID NO: 3987 - RNA, 498 nt, synthetic construct
  misc_feature 1..498: note = CCDS32752.1 variant
  source 1..498: mol_type = other RNA
atgggagcaccaacactaccaccagcatggcaaccattcctaaaagaccacagaatatcaacattcaaaaactggccattcctagaaggatgcgcatgcacaccagaaagaatggcagaagccggattcatacactgcccaacagaaaacgaaccagacttagcacaatgctttttctgcttcaaagaattagaaggatgggaaccagacgacgacccaataggaccaggaacagtagcatacgcatgcaacacatcaacattaggaggaagaggaggaagaataacaagagaagaacacaaaaaacactcatcaggatgcgcattcctatcagtaaaaaaacaattcgaagaattaacactaggagaattcctaaaactagacagagaaagagcaaaaaacaaaatagcaaaagaaacaaacaacaaaaaaaaagaattcgaagaaacagcagaaaaagtaagaagagcaatagaacaactagcagcaatggattaa

SEQ ID NO: 3988 - RNA, 429 nt, synthetic construct
  misc_feature 1..429: note = AAC51660 variant
  source 1..429: mol_type = other RNA
atgggagcaccaacactaccaccagcatggcaaccattcctaaaagaccacagaataagcacattcaaaaactggccattcctagaaggatgcgcatgcacaccagaaagaatggcagaagcaggattcatacactgcccaacagaaaacgaaccagacctagcacaatgcttcttctgcttcaaagaactagaaggatgggaaccagacgacgacccaatagaagaacacaaaaaacactcaagcggatgcgcattcctaagcgtaaaaaaacaattcgaagaactaacactaggagaattcctaaaactagacagagaaagagcaaaaaacaaaatagcaaaagaaacaaacaataaaaaaaaagaattcgaagaaacagcaaaaaaagtaagaagagcaatagaacaattagcagcaatggactaa

SEQ ID NO: 3989 - RNA, 2931 nt, synthetic construct
  misc_feature 1..2931: note = EAW56623 variant
  source 1..2931: mol_type = other RNA
atggaaaaacaaaaaccattcgcgctttttgttcccccaaggtcaagttcaagccaagtatcagcagtaaaacctcaaaccctaggaggagatagtacctttttcaaatcttttaataaatgtacagaagatgattttgaattcccctttgcaaagacaaacctatcaaaaaacggggaaaatatagattctgatcctgccttacagaaagttaacttcctcccagtattagagcaggtcggaaacagtgattgccattatcaagaaggattaaaagacagtgaccttgagaactcggaaggattatcaagagtctactcaaaactatacaaagaagccgaaaaaataaaaaaatggaaagtatcaacggaagcagaattaagacaaaaagaaagcaaattacaggaaaacagaaaaataatagaagcacaacgaaaagcgatacaagaattacaattcggcaacgaaaaagtctcactaaagttagaagaaggaatacaagaaaataaagatctcataaaagaaaacaacgctacaagacacctatgcaacttactgaaagaaacctgtgcgcgatcagccgaaaaaacaaaaaaatatgaatatgaaagagaggaaaccagacaagtctacatggatttaaataataatatcgaaaaaatgatcaccgcattcgaagaactacgagtacaagctgaaaatagcagactcgaaatgcacttcaaactaaaagaagactatgaaaagatacagcacctggaacaagaatacaaaaaagagataaatgacaaagaaaaacaggtaagtctattactaatacaaataacagaaaaagaaaataaaatgaaagacttaacgttcctcctagaagaatcccgtgacaaggtgaatcaactagaagaaaaaacaaaacttcaaagtgaaaacctcaaacagagtatagaaaaacaacatcatctgactaaggaattagaagacataaaagtcagcctccaaaggtctgtaagtacacaaaaagccctagaagaagacttacagatcgcaactaaaactatatgtcaactaacagaagagaaagaaacacaaatggaagaatcaaataaagctcgagcagcacactcatttgtagtcacagaattcgaaacgaccgtatgtagcctcgaagaacttctaagaaccgaacaacaaagattggaaaaaaacgaagatcaattaaagattctaacgatggagctacaaaaaaaaagtagtgaactggaagaaatgacaaaactaacgaataacaaagaggtagagctagaagaactaaaaaaagtactaggagaaaaagaaacactactatatgaaaacaaacaatttgaaaaaatagctgaagaactaaaaggcacagaacaagagctcataggcttattacaagcccgagaaaaggaagttcacgaccttgaaatccaactcacagcaataaccacaagtgaacaatattactcaaaagaagtcaaggacctcaaaacagagctagaaaacgagaaattaaaaaacacagaactaacaagccattgcaataaacttagtctagaaaataaagagctcactcaagaaacctccgatatgacgctagaattaaaaaatcaacaagaggacataaacaataataaaaaacaagaagaacgaatgttaaagcaaatcgaaaacctgcaagaaacagaaacacaactgcgaaatgaacttgaatacgtaagggaagaactaaaacaaaaaagagatgaagtaaaatgcaaattggacaaaagtgaagagaactgtaacaacctacgaaaacaagtagaaaataaaaataaatatatcgaggaattacaacaagaaaataaagcgttgaaaaaaaaaggaaccgcagaaagcaaacaacttaacgtgtacgaaataaaagtaaacaaattagaactagaactagaatcagcaaaacagaaattcggcgaaataacagacacatatcaaaaagaaatagaagacaaaaaaatatcagaagaaaacttactcgaagaagtagaaaaagctaaagtgatcgcagatgaagcagttaagctacaaaaagaaatagacaaaagatgccagcataaaatagcagaaatggtagccctgatggaaaaacataaacaccaatatgacaaaattatcgaagagcgagatagcgaattaggactgtacaaatccaaagaacaagaacaaagctcactacgcgcttcactggaaatagaactaagcaacttaaaagccgaacttctcagcgtcaaaaaacaattagaaatcgaaagagaagaaaaagaaaaattaaaaagggaagcaaaagaaaacaccgcaacactaaaagaaaaaaaagacaaaaaaacccaaacgttcttattagagacaccagagatctactggaaactcgacagcaaagccgtacccagccaaactgtatcaagaaacttcacatctgttgaccatggaataagcaaggacaaaagagactatttatggacaagcgccaaaaatactctcagcacacccctcccaaaagcatatacagtaaaaacacctactaagcctaaactccaacaaagggaaaacctaaacataccaatagaggaatccaaaaagaaaagaaagatggcattcgaatttgacatcaactcagattcatccgaaacaaccgacctactatcaatggtatcagaagaagaaactctcaaaacactgtaccgaaacaataaccccccagcatcacatttgtgtgtgaaaacacccaagaaggccccttcatcactaacgaccccaggatcaacactaaaattcggagcaatacgaaagatgcgcgaagaccgatgggctgtaatagccaaaatggacagaaaaaaaaaattaaaagaagcagaaaagttatttgtctaa

SEQ ID NO: 3990 - RNA, 2931 nt, synthetic construct
  misc_feature 1..2931: note = AAI44020 variant
  source 1..2931: mol_type = other RNA
atggaaaaacaaaaaccatttgcgctttttgtaccccctcgaagtagttcaagccaagtatctgctgtgaaaccacaaaccctaggcggagactcgacattctttaaaagttttaacaaatgcacagaagatgatttcgagttcccatttgcgaaaaccaacctaagcaaaaatggtgaaaatatagatagcgatccagcacttcaaaaagtaaattttctaccagtattcgaacaagtagggaactcagactgccactaccaagaaggattaaaagacagtgatttagaaaactccgaaggtttaagcagagtttacagcaaactatacaaagaagccgagaaaatcaagaaatggaaagtaagtaccgaagcggaactgagacagaaagaatcgaaattacaagaaaataggaaaataatagaagcacaacgaaaagcgatccaagaactacaatttggaaatgaaaaagtatcattaaaattagaagaaggcatacaagaaaacaaagatctgatcaaagaaaacaatgcaacccgacatctatgcaatctacttaaagaaacatgcgctagatcagcagagaaaaccaagaaatacgaatacgaaagagaagaaacaagacaagtctatatggacttaaactccaatattgagaaaatgattacagcatttgaagaattaagagtccaagctgaaaacagtagactagaaatgcactttaaactaaaagaagattatgagaaaattcaacatttagaacaagaatacaagaaagaaattaacgataaagaaaaacaagtatcattactactgatacaaatcactgaaaaagaaaataaaatgaaagatttaactttcctactggaagaaagtagagacaaagtaaatcaattagaagagaaaacaaaactacaatcagaaaacctaaaacaatccatcgaaaaacagcaccatttgacaaaagaactcgaagatatcaaagtaagcctacaacgtagtgtaagcactcaaaaagcactagaagaagacttgcaaatcgccacgaaaactatatgtcaattaactgaagaaaaagaaacacagatggaagaaagtaacaaagcgagagcagcacacagttttgtagtaacagagttcgaaactaccgtatgttcactagaagaattactaagaacggaacaacagcggctagagaaaaacgaagatcagctaaaaattcttaccatggaactacagaagaaaagcagtgaactcgaagaaatgacaaaattaacaaacaataaagaagtagaacttgaggagcttaagaaagtcttaggagaaaaagaaaccctattatacgaaaataaacaatttgagaaaatagcagaagaactaaaaggaacagagcaagaacttataggactattacaagcaagagaaaaagaagtacatgacttagaaattcaattaaccgcaataactacaagtgagcaatactatagtaaagaagtaaaagatctcaaaacagagctggaaaacgaaaaactcaaaaacacggaactaacaagccactgcaacaaactctctttagaaaacaaagagttaacacaagaaacgtccgatatgaccctggaactcaaaaatcaacaagaagacataaacaacaataagaaacaagaagaaagaatgttaaaacaaatcgaaaacctacaagaaacagaaacccaattacgaaacgaactagaatacgtacgagaggaattaaaacagaaaagagacgaagtaaaatgcaaacttgacaaatcagaagagaactgcaataatctcagaaaacaagtagaaaacaaaaacaaatatatagaagaactgcaacaagaaaataaagcactcaaaaagaaaggtacagcagagagtaaacaactgaatgtctacgaaataaaagttaataaattagaactagaattagagagcgcaaaacaaaaattcggagaaataacagacacttaccaaaaagaaatagaagacaagaaaatatcagaagaaaatctgttggaagaagtagaaaaagccaaagtaatagctgatgaagcggtaaaactccaaaaagaaattgacaaacgctgtcaacataaaatagctgaaatggtggctctcatggaaaaacacaaacaccaatatgataaaataatcgaagaaagagactccgaacttggcctttacaaaagtaaagaacaagaacagagtagcctgcgagcgtcactggaaatagaattaagcaatctaaaagcagaacttttatcagtcaagaaacaactagaaatagaaagagaagaaaaagaaaaactaaaacgagaagcaaaagaaaataccgccaccttaaaagagaagaaagataagaaaacacaaaccttcctcctagaaaccccagaaatctattggaaattagactcaaaagcagtgccgtcgcaaacagtatcaagaaacttcacctcagtagaccacgggatctcgaaagacaaaagagactacttatggacatctgccaaaaacactctgtcaaccccgctacctaaagcgtatacagtaaaaacgccaactaaaccaaaactacaacaacgcgaaaacctaaacattccaatagaagaaagtaagaagaaaagaaaaatggcattcgaatttgatatcaacagcgatagctccgaaacgacagacttattatcaatggtatcagaggaagaaaccctaaaaacactatacagaaacaacaatcccccagctagccacctttgtgttaaaacgccgaagaaagcaccgtcatcattaactaccccaggatcaacactaaaatttggagcaattaggaaaatgcgagaagacaggtgggcggtcatagcaaaaatggataggaaaaagaaattgaaagaagcagaaaaattattcgtttaa

SEQ ID NO: 3991 - RNA, 2931 nt, synthetic construct
  misc_feature 1..2931: note = AAI26267 variant
  source 1..2931: mol_type = other RNA
atggaaaaacaaaaaccattcgcactcttcgtgccaccacgaagcagttctagccaagtaagcgcagtaaaaccacaaactctcggaggagactctacattcttcaaaagtttcaataaatgcaccgaagacgatttcgagttcccattcgcaaaaacaaacttaagcaaaaatggagaaaatatagacagcgacccggcactacaaaaagtcaactttctaccagttctcgaacaagtgggaaatagtgactgccattaccaagaaggactaaaagactcagacctagaaaactcagaaggtctaagccgagtatactcaaaactatacaaagaagcagagaaaatcaagaaatggaaagtatccacagaagcagaattacgacaaaaagaaagtaaattacaagaaaaccgaaaaattatagaagcacaacgaaaagcaatacaagaacttcaatttggaaacgaaaaagtaagcctgaaattagaagaaggaatccaggaaaacaaagacctcataaaagaaaacaatgctacacgacatctatgcaacttacttaaagaaacctgcgcaagatcagcagagaaaaccaagaaatatgaatacgaaagagaagaaacgagacaagtctatatggacctcaataacaatatcgagaaaatgattaccgccttcgaagaactacgtgtacaagcggaaaactccagattggaaatgcacttcaaactgaaagaagactatgagaaaatacaacaccttgaacaagaatataagaaagaaataaatgacaaagaaaaacaagttagcctactgctaattcaaataacggaaaaagaaaataaaatgaaagatttaacattccttctagaagaaagtagagataaagtcaaccaattagaagagaaaacaaaattacagtcagaaaatcttaaacaatcaatagaaaaacaacaccatttaacaaaagaactcgaagacattaaagtatcattacaacgatcagtgtccactcaaaaagcactagaagaagacttacaaatagccacgaaaacaatttgtcaattaactgaagaaaaggaaacacaaatggaagaaagtaacaaagctagagcagcccacagttttgtggttacagaatttgaaacaacagtctgcagtctagaagaactactacgaacagaacaacaaagattagagaaaaacgaagaccaactaaaaatattaacaatggaattacagaaaaagtcctcagaactagaagaaatgacaaaattaacaaacaacaaagaagtagaactagaagaattaaagaaagtccttggagaaaaagaaacattactatatgaaaacaaacaattcgagaaaatagcagaagaattaaaaggcacagaacaagaactcataggactcttacaagcaagggaaaaagaagtacatgacttggaaatacaattgacagcgattaccacctcagaacaatactactccaaagaagtcaaagacttaaaaacagaactagaaaacgaaaagctgaaaaatacagaactaacatcacactgtaacaaattaagcctagaaaataaggaactaacccaagaaacaagtgacatgactctggaactgaaaaatcaacaagaagatataaataacaataaaaagcaagaagaacgaatgctcaaacaaatagaaaatttacaagaaacggagacacaacttagaaacgaattagagtatgtaagagaagaactaaagcagaaaagagatgaagtcaagtgcaagctagacaaaagtgaagaaaactgtaacaatcttagaaaacaagttgaaaacaaaaacaaatacatagaagaattgcaacaagaaaacaaagctctgaaaaagaaaggaacggcagaaagcaaacaactaaacgtctatgaaattaaagtaaataagctagaattggaattagaatccgcaaaacaaaaatttggagaaataacggacacgtaccaaaaagaaattgaagacaagaaaatcagtgaagagaatctcctcgaagaagtcgaaaaagcaaaagtaatagctgacgaagcagtaaaactccaaaaagaaatcgataaaagatgtcaacataaaatagccgaaatggtagcacttatggaaaaacacaaacaccaatatgacaaaatcatcgaagaacgagatagcgaactaggtctctacaaatcaaaggaacaagagcaaagctcacttcgagcaagcctagaaatagaactcagtaaccttaaagctgaactgctaagtgtgaagaaacaactagaaatcgaacgcgaagaaaaagagaaactgaaacgagaagcaaaagaaaacacagcaacgctaaaagaaaagaaagataagaaaacgcaaacattcttactagaaacaccggaaatatattggaaattagactccaaagcagtcccatctcaaacagtaagtagaaactttacaagcgttgatcatggtataagcaaagataaaagagattacttatggacctcagctaaaaacacgctcagtacacccttgccaaaagcatacaccgtaaaaacacctacgaaacccaaactccaacaacgagaaaatctaaacattccgatagaagaatctaaaaagaaacgaaaaatggcatttgagttcgacataaactcagatagctcagaaacaacagacttactaagcatggtttccgaagaagaaacactaaaaacactttataggaacaacaacccaccggcatcacatctgtgtgtaaaaacaccgaagaaagcaccaagtagcctaacaacaccagggtctacactaaaatttggagcaataagaaaaatgcgagaagatagatgggcagtaattgcaaaaatggacagaaagaagaaactaaaagaagcagaaaaactattcgtatga

SEQ ID NO: 3992 - RNA, 330 nt, synthetic construct
  misc_feature 1..330: note = AAI05300 variant
  source 1..330: mol_type = other RNA
atggaaaaacaaaaaccattcgcactattcgtaccaccaagatcaagctcatcacaagtatcagcagtaaaaccacaaacactaggaggagactcaacattcttcaaatcattcaacaaatgcacagaagacgacttcgaattcccattcgcaaaaacaaacctatcaaaaaacggagaaaacatagactcagacccagcactacaaaacgtaaacttcctaccagtactagaacaagtaggaaactcagactgccactaccaagaaggactaaaagactcagacctagaaaactcagaaggactatcaagagtatactcaaaactataa

SEQ ID NO: 3993 - RNA, 1467 nt, synthetic construct
  misc_feature 1..1467: note = BAF56181 variant
  source 1..1467: mol_type = other RNA
atgtctgtagctttcgcagcaccaagacaaagaggaaagggcgaaataacaccagctgcaatacaaaaaatgcttgacgacaacaaccacctaatacaatgcatcatggacagtcaaaacaaaggcaaaacaagtgaatgttcacaataccaacaaatgctacacacaaatctagtatacttagcaactatagcagattcaaatcaaaatatgcaatccctcttacccgcacccccaacccaaaacatgccaatgggaccaggaggaatgaaccaatcaggaccacctccaccaccccgaagtcacaatatgccatccgatggaatggtcggcggaggtccaccagccccacatatgcaaaaccaaatgaatggacaaatgcccggtcccaaccacatgcccatgcaaggaccaggacccaaccaattaaatatgactaactcatcaatgaacatgccatcatcctcccatggctccatgggcggatacaatcattcagtcccatcttcacaatcaatgcccgtacaaaaccaaatgacaatgtcacaaggacaaccaatgggaaactacggaccaagaccaaatatgtcaatgcaaccaaatcaaggacctatgatgcaccaacaaccaccatctcaacaatacaatatgcctcaaggaggtggacaacattaccaaggacaacaacccccaatgggaatgatgggacaagtaaatcaaggaaatcacatgatgggacaacgacaaatcccaccatacagaccaccccaacaaggaccaccacaacaatactccggccaagaagattactacggagaccaatacagccatggaggacaaggaccaccagaaggtatgaaccaacaatactatccagacggacataatgactacgggtaccaacaaccatcatatccagaacaaggctacgacagaccatacgaagactcatcacaacactactacgaaggaggaaactcacaatacggacaacaacaagatgcataccaaggacctccccctcaacaaggatatccaccacaacaacaacaataccctggacaacaaggatacccaggccaacaacaaggttatggcccatcacaaggaggaccaggcccacaatatccaaactacccacaaggacaaggacaacaatacggaggatacagaccaacacaaccaggaccaccacaaccaccccaacaaaggccatacggatacgaccaaataatgccaaaaaaaccagccgaagacgaaaatgacagcaaaggagtctcagaagcatcaggaccccaaaacgacggaaaacaactacacccaccaggcaaagcaaacatctccgaaaaaataaacaaaagatcaggcccaaaaagaggaaaacacgcatggacccaccgattaagagaaagaaaacaacttgtaatatacgaagaaatatctgacccagaagaagacgatgaataa

SEQ ID NO: 3994 - RNA, 1374 nt, synthetic construct
  misc_feature 1..1374: note = BAF56182 variant
  source 1..1374: mol_type = other RNA
atgtcagtagcattcgcagcacccagacaaagaggcaaaggagaaataacaccagcagcaatacaaaaaatgctagacgacaacaaccatctaatccaatgcataatggattcacaaaataaaggcaaaacatcagaatgttcacaataccaacaaatgttacatacaaacctagtatacttagcaacaatagcagactcaaaccaaaacatgcaaagcttactaccagcaccaccaacacaaaacatgccaatgggcccaggaggtatgaatcaaagtggacctcctccaccaccaagaagtcacaacatgccatcagatggaatggtaggaggaggaccacccgccccacacatgcaaaaccaaatgaacggacaaatgcccggacccaatcacatgccaatgcaaggacctggcccgaatcaattaaacatgacaaactcatccatgaatatgccaagttcatctcacggaagtatgggtggttataaccattcagtaccatcatcacaatccatgccagtacaaaaccaaatgaccatgagccaaggacaaccaatgggcaactacggacctcgaccaaacatgtcaatgcaaccaaaccagggaccaatgatgcaccaacaaccaccatcacaacaatacaacatgccgcaaggaggaggacaacattaccaaggccaacaacccccaatgggaatgatgggacaagtaaaccaaggcaatcatatgatgggacaacgacaaatacctccatacagaccaccacaacaaggtccaccacaacaatattcaggacaagaagactactacggagaccaatactcacacggaggacaaggacccccagaaggtatgaatcaacaatactacccagatggcaacagtcaatatggacaacaacaagacgcatatcaaggacccccaccacaacaaggatacccaccacaacaacaacaatacccaggacaacaaggatacccaggccaacaacaaggctacggcccatcacaaggaggaccaggaccacaatacccaaactaccctcaaggacaaggacaacaatatggaggctatagaccaacccaaccaggaccaccccaacccccacaacaaagaccatacggatacgaccaaatcatgcccaaaaaaccagcagaagatgaaaacgactcaaaaggagtatcagaagcatcaggaccccaaaacgacggaaaacaactacacccaccaggcaaagcaaatatatcagaaaaaataaacaaaagatcaggaccaaaacgaggtaaacacgcatggacacaccgactaagagaaaggaaacaactagtaatctacgaagaaatctccgacccagaagaagacgacgagtaa

SEQ ID NO: 3995 - RNA, 1467 nt, synthetic construct
  misc_feature 1..1467: note = BAF56183 variant
  source 1..1467: mol_type = other RNA
atgtcagtagcattcgcagcacctagacaaagaggtaaaggcgaaataacacctgcagcaatacaaaaaatgctagacgacaataaccacctaattcaatgcataatggacagtcaaaacaaaggaaaaacaagcgaatgttcacaataccaacaaatgctccacacaaatctagtatacttagccaccatagccgactctaatcaaaacatgcaatcattactacccgcaccacctacacaaaacatgccaatgggaccaggaggaatgaaccaatctggaccaccaccaccccccagatctcacaatatgcctagcgacggaatggtaggcggaggacctccagcaccacacatgcagaatcaaatgaacggacaaatgccaggaccgaaccacatgccaatgcaaggacccggaccaaaccaactaaacatgacaaacagtagcatgaacatgccatcatcatcacatggatcaatgggaggatataaccattcagtcccatcaagtcaatctatgcctgtacaaaaccaaatgactatgtcacaaggacaaccaatgggaaactacgggcctagaccaaatatgtcaatgcaaccaaatcaaggacccatgatgcaccaacaaccaccaagccaacaatataacatgccacaaggcggtggccaacactaccaaggacaacaacccccaatgggaatgatgggccaagttaatcaaggcaaccacatgatgggacaaagacaaataccaccataccgaccaccacaacaaggaccgccacaacaatacagcggccaagaagattattacggagaccaatattctcatggaggacaaggaccaccagaaggaatgaatcaacaatactacccagacggccataacgattatggataccaacaaccatcatatccagaacaaggatatgacagaccctatgaagacagtagccaacactactatgaaggcggaaattcacaatacggacaacaacaagacgcataccaaggaccaccaccccaacaaggatacccaccacaacaacaacaatacccaggtcaacaaggttatccaggacaacaacaaggatatggaccatcacaaggcggaccaggacctcaatatcccaactatccccaaggacaaggacaacaatatggcggatatagaccaacacaacctggcccaccacaaccaccacaacaacgcccatatggatatgaccaaataatgcccaaaaaaccagcagaagaaggaaacgacagcgaagaagtacccgaggcatcaggaccccaaaatgacggaaaagaattatgcccaccaggaaaacccacaacatcagaaaaaatacacgaaagatcaggaccaaaaagaggagaacacgcctggactcacagacttcgagaaagaaaacaactagtaatatacgaagaaatatctgatccagaagaagacgacgaataa

SEQ ID NO: 3996 - RNA, 1374 nt, synthetic construct
  misc_feature 1..1374: note = BAF56184 variant
  source 1..1374: mol_type = other RNA
atgtcagtagcattcgccgcaccaagacaaagaggaaaaggtgaaataacaccagccgcaatacaaaaaatgctagacgacaacaatcatctaatacaatgcattatggacagccaaaacaaaggcaaaacctcagaatgttcacaatatcaacaaatgctacataccaacttagtatatctagcaacaatagcagactcaaaccaaaatatgcaaagcctcttaccagcaccaccaacacaaaatatgccaatgggaccaggaggaatgaaccaatcaggaccaccacctccacctcgcagccacaacatgccatcagacggcatggtaggcggaggaccacccgcaccacatatgcaaaaccaaatgaatggacaaatgccaggaccaaatcacatgccaatgcaaggaccaggtccaaaccaacttaatatgacaaatagttcaatgaatatgccatcatcaagccacggaagcatgggaggctacaaccactcagtcccctcatcacaatcaatgccagtccaaaatcaaatgacaatgtcacaaggacaaccaatgggaaattacggaccaagacccaacatgtctatgcaaccaaaccaaggacctatgatgcaccaacaaccaccctcacaacaatataacatgccacaaggaggaggccaacattaccaaggtcaacaaccgccaatgggtatgatgggacaagtaaaccaaggaaatcacatgatgggacaaagacaaatcccaccctacagaccaccacaacaaggacctccacaacaatacagcggacaagaagattactatggagatcaatactcacacggaggacaaggaccaccagaagggatgaaccaacaatactacccagacggaaactcacaatacggacaacaacaagatgcataccaaggaccaccaccacaacaaggatatccaccgcaacaacaacaataccctggacaacaaggatacccaggccaacaacaaggatatggaccaagtcaaggaggccccggaccacaatacccaaactacccacaaggacaaggccaacaatacggcggatatagaccaacacaaccaggacccccacaacccccacaacaaagaccatacggctacgaccaaataatgccaaaaaaaccagcagaagaaggaaacgactcagaagaagtaccagaagcatcaggcccacaaaacgacggaaaagaactatgtccaccaggaaaacccacaacaagcgaaaaaatacatgaaagatccggacccaaaagaggcgaacacgcatggactcacagattaagagaaagaaaacaattagtaatatacgaagaaatatcagatccagaagaagatgacgaataa

SEQ ID NO: 3997 - RNA, 336 nt, synthetic construct
  misc_feature 1..336: note = AAI05590 variant
  source 1..336: mol_type = other RNA
atgaaaacaaacgacacatacatgaaattctcatggctaacagtacccgaaaaatcactagacaaagaacacagatgcatagtaagacacgaaaacaacaaaaacggagtagaccaagaaataatattcccaccaataaaaacagacgtaataacaatggacccaaaagacaactgctcaaaagacgcaaacgacacattactactacaactaacaaacacatcagcatactacatgtacctactcctactactaaaatcagtagtatacttcgcaataataacatgctgcctactaagaagaacagcattctgctgcaacggagaaaaatcataa

SEQ ID NO: 3998 - RNA, 177 nt, synthetic construct
  misc_feature 1..177: note = AAG29337 variant
  source 1..177: mol_type = other RNA
atgcaaatgttcccaccatcaccactattcttcttcctacaactactaaaacaatcatcaagaagactagaacacacattcgtattcctaagaaacttctcactaatgctactaagatacataggaaaaaaaagaagagcaacaagattctgggacccaagaagaggaacaccataa

SEQ ID NO: 3999 - RNA, 1131 nt, synthetic construct
  misc_feature 1..1131: note = AAF26776 variant
  source 1..1131: mol_type = other RNA
atggctaacagcgctaatactaacacagttccaaaactatacagaagcgtaatagaagacgtaatcaatgacgtaagagatatatttttagacgacggtgtagacgaacaagtactcatggaactaaagacactttgggaaaacaaactaatgcaatcaagagcagtagacggattccactctgaagaacaacaattattactacaagtacaacaacaacaccaaccacaacaacaacaacaccatcaccaccaccaccaccaacaagctcaaccacaacaaaccgtacctcaacaagcacaaacacaacaagtattaataccagcctcacaacaagcaacagcaccacaagtaatagtaccagacagcaaactcatccaacacatgaacgcatcaaacatgtcagcagccgcaacagcagccacactagcactaccagcaggagtaaccccagtacaacaaatattaaccaacagtggacaacttctacaagtagtacgagcagcaaacggagcacaatacatattccaaccacaacaaagtgtagtactacaacaacaagtaatcccccaaatgcaaccaggaggagtccaagcacctgtaatacaacaagtattagcaccattaccaggaggaatcagcccacaaacaggagtcataattcaaccccaacaaatattattcacaggaaacaaaacacaagtaatacccacaacagtagcagcaccaacaccagcacaagctcaaataacggcaacaggacaacaacaaccacaagcacaaccagcacaaacccaagctcccctagtactccaagtagacggaacaggagacacttcatcagaagaagatgaagatgaagaagaagactacgacgatgatgaagaagaagacaaagaaaaagatggagcagaagacggtcaagtagaagaagaaccactaaactcagaagacgacgtatccgacgaagaaggacaggaactattcgacacagaaaatgtagtagtttgtcaatacgataaaatacatagaagcaaaaataaatggaaattccacctaaaagacggaataatgaacctaaacggaagagactatatattctcaaaagcaataggagacgccgaatggtaa

SEQ ID NO: 4000 - RNA, 1173 nt, synthetic construct
  misc_feature 1..1173: note = AAH00125 variant
  source 1..1173: mol_type = other RNA
atgccaccatcaggactaagactactactacttttactaccattactctggctactcgtattaaccccaggaagaccagccgcaggactctctacatgcaaaactatagacatggaactagtaaaacgaaaaagaatagaagcaataagaggacaaatattatcaaaattacgactagcttcccccccttcacaaggagaagtcccaccaggaccactaccagaagccgtactagctttatacaactcaacaagagacagagtagctggagaatcagcagaaccagaacccgaaccagaagcagactactatgccaaagaagtcacaagagtcttaatggtagaaactcacaacgaaatatacgacaaatttaaacaatcaacccacagtatatatatgtttttcaacacttcagaactacgagaagctgtaccagaacccgtattactatctcgagcagaattaagactcttaagattaaaattaaaagtagaacaacacgtagaattataccaaaaatactccaacaactcctggcgatacttatcgaatcgtctattagcaccatcagattctccagaatggttatcattcgatgtaacaggagtagtacgacaatggctatcaagaggtggagaaatagaaggatttagactttcagcacattgttcatgcgactcaagagacaacacactacaagtagatatcaacggatttacaacaggacgtagaggagacctagcaacaatacatggaatgaacaggcccttcttactactaatggcaacaccattagaacgagctcaacatctacaatcatcacgacatagaagagcattagatacaaattactgtttcagctccacagaaaaaaattgttgcgtcagacaactatatatagatttccgaaaagacctaggatggaaatggatacacgaaccaaaaggctaccatgcaaacttctgcctaggcccatgcccatacatatggtcattagacacacaatattctaaagtactagcactctataatcaacacaacccaggcgcctcagctgcaccatgttgcgttccacaagcactagaaccattacctattgtctactatgtaggaagaaaaccaaaagtagaacaattatctaatatgatagtaagatcctgcaaatgttcataa

SEQ ID NO: 4001 - RNA, 1704 nt, synthetic construct
  misc_feature 1..1704: note = AAT70724 variant
  source 1..1704: mol_type = other RNA
atgggcagaggattactacgtggattatggcctctacacatcgtactatggacacgaatcgcatcaacaattcctccccatgtccaaaaatcagtcaacaacgacatgatagtaacagacaacaacggcgccgtaaaatttccacaattatgcaaattttgtgacgtaagattctcaacatgcgacaaccaaaaatcatgcatgtcaaactgctcaataacatcaatatgcgaaaaaccacaagaagtatgcgtagccgtttggagaaaaaatgacgaaaacataacacttgaaacagtatgccacgatcccaaactaccataccacgattttatactcgaagacgctgcatctcccaaatgtattatgaaagaaaaaaaaaaaccaggagaaacattcttcatgtgctcatgctcttcagacgaatgcaacgacaatatcattttctcagaagaatacaatacatccaatccagatctcctattagtaatatttcaagtcacaggaatatcattattacctccattaggagtagcaataagcgtaataataatattttactgttatagagttaaccgtcaacaaaaattatcaagtacatgggaaacaggaaaaacacgaaaattaatggaattctcagaacactgtgctataatattagaagacgacagatctgatatctcttcaacatgcgcaaacaacataaatcataataccgaattactacctatagaattagatacattagtaggaaaaggacgatttgcagaagtctacaaagcaaaactcaaacaaaacacatcagaacaattcgaaacagtcgccgtaaaaatatttccatatgaagaatacgcgtcatggaaaactgaaaaagacatatttagtgacatcaacttaaaacacgaaaatatcctacaattcctaacagcagaagagagaaaaacagaattaggcaaacagtactggctaatcacagcctttcatgcaaaaggaaacctacaagaatacctaacaagacacgtaatatcatgggaagatctccgaaaattaggttcatcacttgcaagaggcatagcacatttacactcagaccacaccccctgtggacgaccaaaaatgccaatcgtacacagagacttaaaatcctcaaacatattagttaaaaacgatctaacatgctgcctttgcgacttcggattatcattaagacttgacccgacattaagcgtagatgacctagcaaactcaggacaagtcggtaccgccaggtatatggcacccgaagtactcgaatcaagaatgaatttagaaaacgtcgaaagctttaaacaaaccgacgtctattcaatggccttagtcctatgggagatgacaagtagatgcaacgcagtaggcgaagtaaaagactatgaaccaccattcggatcaaaagtccgagaacacccatgcgtagaatctatgaaagataacgtactaagagatagaggacgacctgaaatccccagcttctggctaaatcaccaaggaatacaaatggtctgtgaaacattaaccgaatgttgggaccacgaccccgaagccagactaacagcccaatgcgtcgcagaacgatttagcgaactagaacatctagaccgattatcaggaaggtcctgctcagaagaaaaaataccagaagatggctcattaaatacaaccaaataa

SEQ ID NO: 4002 - RNA, 2055 nt, synthetic construct
  misc_feature 1..2055: note = BAG35778 variant
  source 1..2055: mol_type = other RNA
atgatggacgcaagtaaagaattacaagtcctacacattgattttttaaaccaagataacgccgtatcacaccacacatgggaatttcaaacaagcagtccagtttttcgccgtggacaagtatttcacctaagactagtactaaaccaacctccacaatcataccaccaattaaaattagaattttctacaggccccaatccatcaatagccaaacacacactagttgtactcgatcctagaacaccttcagaccattacaattggcaagcaacactacaaaatgaatctggaaaagaagtaacagtcgcggtaacaagctcaccaaacgcaatactcggaaaataccaattaaacgtaaaaacaggaaaccatattctaaaaagcgaagaaaatatactatacttattattcaacccatggtgtaaagaagatatggtattcatgccagacgaagacgaaaggaaagaatacattctaaacgacacaggttgccattacgtaggagctgcacgatctataaaatgtaaaccatggaattttggccaatttgaaaaaaacgttttagactgttgtatatccctactaacagaatcaagcttaaaaccaacagaccgaagagatccagtattagtatgtagagctatgtgcgctatgatgagcttcgaaaagggacaaggagttctaattggcaattggaccggcgactacgaaggaggaactgcaccatataaatggaccggaagcgcacccatactacaacaatactataatacaaaacaagctgtttgtttcggtcaatgctgggtattcgctggaattctaacaacagtactaagagctttaggaatacctgcaagaagcgtaacaggcttcgattctgctcacgacacagaacgaaatttaactgtagacacatacgtaaacgaaaatggagaaaaaataacaagcatgacccatgactcagtatggaactttcatgtatggaccgacgcatggatgaaaaggcctgacttacctaaaggttacgacggttggcaagcagttgacgccacaccccaagaaagaagtcaaggagtcttctgctgcggaccttccccactcactgcaataagaaaaggagacatttttatagtatatgacacacgcttcgttttttcagaagttaacggtgacagactaatctggctagtcaaaatggtaaacggccaagaagaattacatgtcattagtatggaaactacgtcaattggaaaaaacattagcacaaaagcagtcggtcaagataggagacgagatataacttatgaatacaaatacccagaaggatcaagcgaagaaagacaagttatggaccacgcattcttactactgtcaagcgaacgagaacaccggagaccagtcaaagaaaactttctacacatgtcagtacaatctgatgatgtgttactaggaaatagtgtaaacttcacagttatacttaaaagaaaaacagccgcactacaaaatgttaacatactaggatcattcgaactacaattatacactggcaaaaaaatggcaaaactttgtgatttaaataaaacatcccaaatacaaggacaagtatcagaagtaacattaacattagactcaaaaacatatattaatagcttagcaatattagacgatgagccagtcattagaggatttattatagccgaaatagtagaatcaaaagaaatcatggcttcagaagtttttaccagctttcaatatcccgaattctcaattgaactacccaataccggaagaataggacaattactagtatgtaattgtatattcaaaaacacactagctatcccactcacagatgtaaaatttagcctagaatcactcggtattagttccctacaaaccagtgaccacggcaccgtacaaccaggagagactatccaatcacaaataaaatgtactccaataaaaacaggcccaaaaaaattcatagtaaaactatcatcaaaacaagtaaaagaaataaatgcacaaaaaatcgtactcataacaaaataa

SEQ ID NO: 4003 - RNA, 3375 nt, synthetic construct
  misc_feature 1..3375: note = CCDS6519.1 variant
  source 1..3375: mol_type = other RNA
atggactcactagcgtccttggtattgtgtggagtatcgctgctactatcgggtacagttgaaggagctatggacttaatactaattaattcattacctctagtgtcagacgccgaaacgagcctaacgtgcatagcatcaggatggcgacctcatgaaccaataacaatcggaagagacttcgaagcattaatgaatcaacaccaagatcctcttgaagtcacacaagacgtaaccagggaatgggcaaagaaagtagtatggaaacgagaaaaagcaagtaaaataaacggagcatacttctgtgaaggcagagtaagaggagaggcaatacgaataagaactatgaaaatgagacaacaagctagcttccttcctgcaacattaaccatgactgtagataaaggagataatgtaaacatatcatttaagaaagtattgattaaagaagaagatgcagtcatatataaaaatggttcatttatacacagtgttccccgtcacgaggtaccagatatattagaagttcatcttccacatgcccaaccgcaagatgctggagtgtatagcgcaagatacatagggggaaatttatttaccagcgcgtttacccgtctaatagtccggagatgtgaggctcaaaaatggggaccggaatgcaatcatttatgtacagcatgcatgaataatggcgtttgtcacgaagacacaggagaatgcatctgtccacctggttttatgggaagaacatgtgaaaaagcatgtgaacttcacacttttggaagaacatgtaaagaaaggtgtagtggccaagaaggatgcaaatcctatgtattctgtttacccgacccatacgggtgcagctgtgcgactggctggaaaggactacaatgtaacgaagcatgtcaccccggattttatggtccagattgcaaactacgctgctcttgtaacaacggagaaatgtgtgatagattccaaggatgtttatgttctcccggttggcaaggtctccaatgcgaacgagaaggaatacaaagaatgacaccaaaaattgtagatttgccagaccacattgaggtgaatagcgggaagtttaatccaatatgtaaagcaagcggctggcctttacccacaaatgaagagatgactctagtaaaaccagatggcacagtcttacacccaaaagattttaatcatactgatcatttctcagtagcgatctttacaatacatcgtattctacctccagattcaggggtttgggtttgttctgttaatacagtagcaggaatggtagaaaaaccattcaatataagtgtaaaagtgctacccaaaccattaaatgcaccaaacgttattgatacaggccataactttgcagttataaacatttcgtcggaaccatacttcggtgatggacctataaaatcaaagaaactactatataaaccagtaaaccattacgaagcatggcaacatatacaagttacgaacgagatagtaacattaaactatttagaacctagaacagagtatgaactatgcgtacaactggtaagaagaggagaaggaggagagggccatcctgggcccgtccgtaggttcacaacagcgtctataggattaccaccacctagaggtcttaatctcctaccaaaaagtcaaacgacattgaatttgacatggcaacctatatttcctagtagtgaggatgacttctacgtagaagtcgaacgacgctctgttcagaaaagcgaccaacaaaacataaaagtacctggtaatcttacctccgtactactaaataatttacacccaagagaacaatatgtcgttagagcacgagtaaatacgaaagctcagggagaatggagtgaagacttaacagcatggacattatctgacattctaccaccacaaccagagaatattaaaatctctaatatcacacattcttctgcagttataagctggacaatactagacggatattcaatatcatcaataactataagatataaagttcaaggcaaaaacgaagaccaacacgtagatgtcaaaattaaaaacgccacaatcacccaatatcaactaaaaggattagaaccagaaaccgcttaccaagtagacattttcgcagaaaacaatataggaagcagtaatccagccttttcgcatgaattagttacattaccagaatcacaagcacccgcagacttaggaggtggaaaaatgcttctcatagctattctcggaagcgcaggcatgacttgcctaaccgtactactagcattcctaattatcctacaactaaagagagcaaatgtacagagacgaatggcacaagcatttcagaatgtaagagaagaacctgcagtacaatttaatagcggaacactagctctaaacagaaaagttaaaaataatcctgatccaacaatatatcccgtattggattggaacgatattaaattccaagacgtaataggagaaggaaactttggacaagttctaaaagcacgcattaagaaagacggactccgaatggatgcagcaataaaaagaatgaaagaatatgctagtaaggatgatcaccgtgattttgccggagaacttgaggtactatgtaaacttggacatcacccaaacataattaacttattaggagcatgcgaacatagaggctatctctatctagcaattgaatatgctccccatggaaacctgcttgatttcctccgaaaatcaagagtactagaaacagatcccgccttcgctatcgcaaattcaaccgcatcaacactatccagtcaacagttgttacattttgcagcagatgtagcaagagggatggactatttaagtcaaaaacaatttatacatagagacttagcagccagaaatatattagtaggagaaaactatgtagccaaaatagcagattttggtttaagccgaggccaagaagtatatgtcaagaaaaccatgggacggttacccgtacgatggatggctatagagtcgttaaattacagtgtatatacaactaattctgacgtatggagttatggagtattactttgggaaatagtgtccttaggtggaacaccgtattgcggtatgacatgtgccgagctatacgaaaaattgccacaaggatacagattggagaaacctttaaattgtgatgacgaagtctacgatcttatgagacagtgttggagagaaaaaccatacgaaaggccaagttttgctcaaatcctagtaagtttaaatagaatgttagaagaaagaaaaacatatgtaaacaccacgctatatgaaaaatttacttacgctggaatagactgctcagccgaagaagcagcataa

SEQ ID NO: 4004 - RNA, 1791 nt, synthetic construct
  misc_feature 1..1791: note = BAF84950 variant
  source 1..1791: mol_type = other RNA
atggctgatgcagaagcaagagcagagttccctgaagaagcaagaccagacagaggtactctacaagtattacaagacatggcttcaagattacgtatacactcaataagagcgacatgttcaacaagtagcggtcacccaacatcatgtagtagttcatcagaaataatgtcagtgttattcttctacataatgcgatataaacaatcagatccagaaaatccagataatgatagatttgtattagcgaaaagattaagtttcgtagatgtagcaacaggatggttaggtcagggactaggtgtagcatgtggaatggcttacacaggaaaatattttgacagagcaagctatagagtattttgccttatgtcagatggagaatcaagcgaagggtctgtttgggaagcaatggcatttgcaagttattattcattagataatctcgttgcaatatttgatgtaaacagattaggtcactcaggtgcattacctgctgaacactgtataaacatatatcaaagaagatgtgaagcatttggatggaacacatatgtagtagacggaagagatgtagaagcactatgtcaagtcttttggcaagctagtcaagtaaaacacaaaccgacagcagttgtagcaaaaacttttaaaggaagaggaacaccttcaatagaagacgcagaatcatggcatgcaaaacctatgccaagggaacgagcagatgcaattataaaattaattgaatcacaaatacaaactagccgaaatttagatccacaaccacctatagaagatagtccagaagtgaatatcacagacgtaagaatgacatcaccaccagattatagagtaggtgataaaatagctacacgcaaagcatgtggactagcattagcaaaactaggctacgcaaataatagagtagtagttttggatggagacacccgatattcaaccttcagtgaaatattcaacaaagaatacccagaacgctttattgaatgttttatggcagaacaaaatatggtaagtgtagccctcggatgtgccagtaggggaagaactatagcctttgctagtacatttgcagctttcctaacaagagcatttgaccatataagaataggaggacttgcagaaagcaacataaatataataggatcccactgtggagttagcgtaggtgatgatggcgcatcacaaatggcactagaagatatagcaatgttcagaactataccaaaatgtacaattttctatcccaccgatgcagtttctacagaacatgccgtagcattagctgcaaatgcgaaaggaatgtgctttataagaacaactagacccgaaacaatggtaatatatacaccacaagaaagatttgaaataggacaagcaaaagttttgagacactgcgtatcagataaagtcacggtaataggagccggaataacagtatacgaagcattagcagcagctgatgaactaagtaaacaagatatatttataagagtaatagatttatttacaataaaaccccttgatgtagcaaccattgtttcaagtgcgaaagcaacagaaggtagaattataacagtagaagatcattatccacaaggaggaatcggagaagcagtatgcgcagcagtatcaatggatccagacatacaagtacatagtttagcagtaagcggtgttccacaatcaggaaaatcagaagaattactagacatgtatgggatatcagcacgccatataattgtggcagtaaaatgcatgctactaaactag

SEQ ID NO: 4005 - RNA, 861 nt, synthetic construct
  misc_feature 1..861: note = EAW88722 variant
  source 1..861: mol_type = other RNA
atggcagaagatggagaagaagcagaatttcattttgcagcattatatataagtggacaatggcctagattaagagcagatacagacttacaaagattaggaagcagcgcaatggcaccaagtagaaaattctttgtcggaggaaattggaaaatgaatggaaggaaacaaagtttaggtgaactaataggaacattaaatgcagcaaaagtaccagcagatacggaagtagtgtgtgcaccaccaacagcatatatagatttcgcaagacaaaaattggatccaaaaatagcagtagcagcacaaaattgttataaagtaacaaatggagcatttacaggagaaataagtcccggaatgataaaagattgcggagcaacttgggtagtattaggacacagtgaaagaagacatgtatttggagaatcagatgaattaataggacagaaagtagcacatgcattagcagaaggattaggagtaatagcgtgtataggtgaaaaattagatgaaagagaagcaggaattacagaaaaagtagtattcgaacaaacaaaagtaatagcagataatgtaaaagactggtcaaaagtagtattagcatatgagcctgtatgggcaataggaacaggaaaaacagcaacaccacaacaagcgcaagaagtacatgaaaaattaagaggctggctaaaatcaaacgtatcagatgcagtagcacaatcaacacgaataatatatggaggaagtgtaacaggagcaacatgtaaagaattagcaagccaaccagatgtagacggatttctagtaggaggagcatcattaaaaccagaatttgtagatataataaatgcaaaacaataa

SEQ ID NO: 4006 - RNA, 357 nt, synthetic construct
  misc_feature 1..357: note = CAA72108 variant
  source 1..357: mol_type = other RNA
atgccactagtagtagcagtaatattcttcagcctatgggtattcgcactaggacaactagaacaaccagaaatatcaatatcaagaccagcaaacaaatcagcacacatatcatggaaagcatcaatacaaggattctcatcaaaaataatacactggtactggcaaaaaccaaacaaaggactagaatacctactacacgtattcttaacaatatcagcacaagactgctcaggaggaaaaacaaaaaaactagaagtatcaaaaaacgcacacacatcaacatcaacactaaaaataaaattcctagaaaaagaagacgaagtagtataccactgcgcatgctggataagacac

SEQ ID NO: 4007 - RNA, 414 nt, synthetic construct
  misc_feature 1..414: note = EAL23985 variant
  source 1..414: mol_type = other RNA
atgctatcactactacacacatcaacactagcagtattaggagcactatgcgtatacggagcaggacacctagaacaaccacaaatatcatcaacaaaaacactatcaaaaacagcaagactagaatgcgtagtatcaggaataacaataagcgcaacatcagtatactggtacagagaaagaccaggagaagtaatacaattcctagtatcaatatcatacgacggaacagtaagaaaagaatcaggaataccatcaggaaaattcgaagtagacagaataccagaaacatcaacatcaacactaacaatacacaacgtagaaaaacaagacatagcaacatactactgcgcactatgggaagtacacagctcaagacaattcgaaccatcacactcaataaacgtatactaa

SEQ ID NO: 4008 - RNA, 366 nt, synthetic construct
  misc_feature 1..366: note = CAA30181 variant
  source 1..366: mol_type = other RNA
atgctatcactactacacacatcaacactagcagtactaggagcactatgcgtatacggagcaggacacctagaacaaccacaaatatcatcaacaaaaacactatcaaaaacagcaagactagaatgcgtagtatcaggaataacaatatcagcaacatcagtatactggtacagagaaagaccaggagaagtaatacaattcctagtatcaatctcatacgacggaacagtaagaaaagaatcaggaataccatcaggaaaattcgaagtagacagaataccagaaacatcaacctcaacactaacaatacataacgtagaaaaacaagacatagcaacatactactgcgcactatgggaagta

SEQ ID NO: 4009 - RNA, 366 nt, synthetic construct
  misc_feature 1..366: note = CAA33345 variant
  source 1..366: mol_type = other RNA
atgctatcactactacacacatcaacactagcagtactaggagcactatgcgtatacggagcaggacacctagaacaaccacaaatatcaagtacaaaaacactatcaaaaacagcaagactagaatgcgtagtatcaggaataaaaatatcagcaacatcagtatactggtacagagaaagaccaggagaagtaatacaattcctagtatcaataagctacgacggaacagtaagaaaagaatcaggaataccatcaggaaaattcgaagtagacagaataccagaaacatcaacatcaacactaacaatacacaacgtagaaaaacaagacatagcaacatactactgcgcactatgggaagta

SEQ ID NO: 4010 - RNA, 2382 nt, synthetic construct
  misc_feature 1..2382: note = AAA93251 variant
  source 1..2382: mol_type = other RNA
atgatggcagcattatatccttctaccgatctttcaggtgcatcatcatcaagtctaccctcaagcccatctagttcatctccaaacgaagtgatggcattaaaagacgtacgagaagtaaaagaagaaaacacattaaatgaaaaactattcctactagcatgcgataaaggagattattatatggttaagaaaatacttgaagaaaattcctctggagacctgaacataaattgtgtagacgtactaggacgcaatgcagtaacaataacaatcgaaaatgaaaatcttgacattctccaactattattagactatggatgtcaatcagcagatgcccttttagtagcgatagactcagaagtagtaggagcagtagacatactactaaatcacagacccaaaagatcatcccgacccactatagttaaattaatggaaagaatccaaaatccagaatactcaacaactatggacgtagctccagtcatcctagccgctcacaggaataattatgaaatactcaccatgttactcaaacaagatgtgtccttacccaaaccccatgctgtaggatgcgaatgtactctatgttcagccaaaaacaagaaagattcactacgacattcacgtttccgtcttgatatataccgttgtttagcatcaccagccctaataatgttaactgaagaagacccaattctccgcgcattcgaactatctgccgacttaaaagaattatccttagtcgaagttgaatttagaaacgactacgaagaactagcacgacaatgtaaaatgttcgcaaaagacctattagctcaagcacgaaattcacgagaactagaagtaattttaaaccacaccagttcggacgaaccccttgacaaacgcggactattagaagaaagaatgaatttatctcgactaaaattagcaataaaatataaccaaaaagaatttgtatcccaatccaattgccaacaattcctcaatacagtatggttcggacaaatgtcaggataccgtagaaaaccaacctgtaagaaaattatgactgtactaaccgtcggtatcttctggcccgtcctatcactttgttacctcattgcacccaaaagccaattcggacgaataatccataccccattcatgaaatttataatacatggagcatcatatttcacatttcttttactactaaacttgtactctttagtttacaacgaagataagaaaaacactatgggtccagctcttgaaagaatagactatctactaatcctatggattattggcatgatatggtctgatattaaacgactatggtacgaaggactcgaagactttctagaagaaagcagaaaccaactttcattcgtgatgaatagcctatatctcgctacattcgcactcaaagttgtagcacataacaaatttcatgactttgctgaccgtaaagactgggacgcctttcatccaacattagttgctgaagggctgtttgcttttgctaacgtgctctcatacctaagactattctttatgtatactacatcatcaattcttggacctctccaaatatcaatgggacaaatgttacaagactttggaaaattccttggtatgttccttctagtcctattttcattcacaataggactaacacaactatacgataaaggttacacatctaaagaacaaaaagactgtgtaggaatattctgtgaacaacaatcaaatgatacattccatagttttattgggacttgtttcgctttattttggtatatcttttctttagcccacgtagctatattcgttacacgattttcctacggagaagaacttcaatcattcgtaggagcagttatcgtaggaacatacaacgtagtagttgttatagtactaacaaaactattagtagcaatgctccacaaatcattccaacttatagctaaccacgaagataaagaatggaaattcgctagagcgaaattatggttaagctatttcgatgataaatgcacattaccaccaccattcaatataataccaagcccaaaaaccatatgctatatgatcagctcactatcaaaatggatatgctcccacacttcaaaaggtaaagtaaaaagacaaaattcactaaaagaatggcgaaacctaaaacaaaaacgtgatgaaaactaccaaaaagtgatgtgttgtctcgttcatagatacctcacctcaatgcgccagaaaatgcaaagcacagaccaagcaacagtagaaaacttaaacgaattacgacaagacctatcaaaattcagaaatgaaatcagagacttacttggatttcgaacttccaaatatgcaatgttttacccaagaaattaa

SEQ ID NO: 4011 - RNA, 3315 nt, synthetic construct
  misc_feature 1..3315: note = AAZ73614 variant
  source 1..3315: mol_type = other RNA
atgtctttcagagcagctagattgtcaatgagaaatagacgcaacgacacactggattccacacggaccttatattcatcggcatcaagatcaacagatctaagttatagtgaatcagaccttgtcaactttatacaagcgaactttaaaaaacgcgaatgtgttttttttactaaagactcaaaagcaactgaaaatgtatgcaaatgtggatacgcacaaagtcaacatatggaaggcacacaaataaaccaaagtgagaaatggaattacaaaaaacacactaaagaattccctacagatgcttttggagatatccaatttgaaacacttggtaaaaaagggaaatatatacgactcagttgtgatacagatgcagaaattttatatgaattactgacacaacattggcatttaaaaactcccaacctagtgatctcagtcacaggcggagccaaaaattttgccctaaaaccaagaatgagaaaaattttcagtagactaatatacattgcgcaaagcaaaggcgcttggatactcacaggaggaacccactacggtctaatgaagtatattggagaagtcgtaagagacaacacaatttcacgttcatcagaggaaaacattgtagcaattggcattgctgcttggggtatggttagtaatagagataccttaataagaaactgcgacgccgaaggctattttttagctcaatacctaatggacgatttcacaagagatcccctatatatactcgacaataaccatacccatctgctattagttgacaatggttgtcatggtcacccaaccgtcgaagcaaaattaagaaatcaactagaaaaatacataagcgaaagaacgatacaagactcaaattacggtggaaaaatcccaatagtatgcttcgctcaaggaggtggtaaagaaaccctcaaagcaataaatacatctataaaaaacaaaatcccgtgtgtagttgtagaaggcagcggacaaatagctgatgtaattgcatccctagtggaagtcgaagacgcattaacctcctcagcggtaaaagaaaaattagtgagatttctaccaagaactgtatcacgactcccggaagaagaaacagagagctggataaaatggctcaaagaaattttggaatgctcacatttactaacagtcataaaaatggaagaagcaggagacgaaatagtatctaatgctatctcatatgcactttataaagcattctctacaagcgaacaagacaaagataattggaacggtcagttgaaattactcctagaatggaatcaactagatttagccaacgatgaaatattcactaatgatcgacgatgggaaagtgcagatttacaagaagtaatgtttaccgcattaattaaagatagacctaaattcgtaagactattcctagaaaacggcttaaatctaagaaaattcctaactcatgacgtactaactgaactcttcagtaatcatttttcaacactagtatatagaaaccttcaaattgcaaaaaattcatacaatgacgcactacttacctttgtatggaaattagtagccaactttagacgaggtttcagaaaagaagatagaaatggacgggatgaaatggacatagaattacatgatgttagcccaataacacgacatccactacaagcactatttatctgggctatactacaaaacaaaaaagaactatcaaaagtaatatgggaacaaacaagaggatgtacactagctgcactcggcgcatctaaactattaaaaactttagcaaaagtcaaaaacgatataaatgcagcaggagagtcggaagaactagcaaatgaatacgaaacacgagccgttgaattatttacagaatgttattcaagtgatgaagacttagcagaacaactcttagtttactcatgcgaagcatggggtggaagtaattgcttagaacttgctgtagaagcgactgatcaacatttcatagcacaacctggcgtacaaaactttctctcaaaacagtggtatggagaaatctccagagatacaaaaaattggaaaattatactttgtcttttcattatcccattagttggatgtggctttgtaagctttcggaaaaaacctgtagataaacacaaaaaactactatggtactatgtagctttctttacatcaccatttgttgtcttcagttggaacgtagtattctatatagcatttctactactattcgcatacgttcttttaatggacttccatagcgtgcctcacccaccagagctagtactatactcactagtatttgttctcttctgcgacgaggtacgacaatggtatgtcaatggtgtaaattatttcaccgacctatggaatgttatggacactttaggtttattttactttatagctggtatagtattcagattacattcaagcaataaaagtagtctctattcaggacgagtaattttctgtctagattacataatattcaccttaagactaatacacattttcacagtctctagaaatttaggacctaagattataatgctacaacgaatgttaatcgatgttttctttttcttatttttattcgcagtatggatggtagcatttggtgtagcccgacagggaatactaagacaaaatgaacagcgttggcgctggatattcagaagtgtcatatacgaaccttaccttgcaatgttcggtcaagtaccatcagacgtggacggaaccacctatgatttcgctcattgtaccttcacaggtaacgaatcaaaaccattatgcgtagaattagacgaacacaacctacctcgatttccagaatggattaccataccacttgtttgcatatacatgctatcaacaaacatattattagtaaacctcttagttgcgatgtttggctatacggtaggaacagttcaggaaaataacgatcaagtctggaaattccaaagatatttcttagtacaagaatactgttcacgtctaaatataccgttccccttcatcgtcttcgcatacttttatatggtagtaaaaaaatgcttcaaatgctgctgcaaagaaaaaaatatggaatcttcagtatgctgctttaaaaatgaagataacgaaaccctagcatgggaaggagtgatgaaagaaaattatcttgtaaaaataaacacaaaagcaaacgatacttcagaagaaatgcgacaccgatttaggcaacttgacactaaactaaacgacttaaagggattattaaaagaaattgcaaataaaataaaatga

SEQ ID NO: 4012 - RNA, 2097 nt, synthetic construct
  misc_feature 1..2097: note = AAK13079 variant
  source 1..2097: mol_type = other RNA
atgatgagatccagaagcaaaagcccacgaagaccgtccccaacagctagaggagcaaattgcgatgtagaactactaaaaaccacaacaagggatcgtgaagaattgaaatgcatgctagaaaaatacgaacgacacttagcagagatacaaggaaacgtaaaagtactaaaatcagaacgagacaaaatattcctactatacgaacaagcacaagaagaaataacaagattaagacgcgaaatgatgaaatcatgtaaatctcccaaaagcacgaccgcacatgctatcttacgaagagtagaaacagaaagagacgtcgcgttcacagacctaaggagaatgacaacagaaagagatagtttaagagaaagattaaaaatcgctcaagaaactgcctttaacgagaaggcccacctagaacaaaggatagaagaactggagtgtacagtacataaccttgacgacgaaagaatggaacaaatgtccaacatgaccctaatgaaagaaactattagcacggtcgaaaaagaaatgaaatcattagcaagaaaagcaatggatacagaatcagaactaggacgacagaaagctgaaaacaattcactaagactactatacgaaaacaccgaaaaagacctaagtgacacacaaagacatctagcaaagaagaaatacgaactacaactaacacaagagaaaataatgtgcctcgacgagaaaatagataatttcacacgccaaaacatagcccaaagggaagaaataagcatactcgggggtacactgaatgacttagcaaaagaaaaagaatgcttacaagcatgtctagataagaaatcggaaaatatcgcatcattgggagaatccctagcaatgaaagagaaaacaataagcggaatgaaaaacataatagccgaaatggaacaagcatcacgacagtgtacagaggctttaatcgtatgcgaacaagacgtaagcaggatgagaagacaacttgatgaaacaaatgacgaactagcacaaatagcaagggaacgagacatattagcacacgacaatgacaatctacaagaacaatttgcaaaagcaaaacaagaaaaccaagccttatcaaagaaattaaacgacacccataatgaactaaacgacataaaacaaaaagtgcaagataccaacctagaagtaaacaaacttaaaaacatactaaaaagtgaagaaagtgaaaacagacaaatgatggaacaactaagaaaagctaatgaagacgccgaaaactgggaaaacaaagcgagacaaagtgaagctgacaacaacacattaaaacttgaactcataacagccgaagccgaaggaaacagactaaaagaaaaagtagacagtctaaatagagaagttgaacaacatttaaacgccgaacgatcctacaaatcacaaatatcgacactccacaagagcgtagtcaaaatggaagaagaactacaaaaagtacaatttgaaaaagtcagtgccttggcagacttgagtagtacacgagaattatgtatcaaactagacagttcaaaagaactgctaaacagacagctagtagccaaagatcaagaaatagaaatgagagaaaatgaactagacagcgcccattcagagatcgaattactacgatcgcaaatggcaaatgaaagaatatcaatgcaaaatctagaagccctattagtagctaacagagataaagaataccaaagtcaaatcgcactacaagaaaaagaatcagaaatacaattactaaaagaacacctttgcctggcagaaaataaaatggcaatacaaagtcgagatgtggcccaatttcgaaacgtagtaacacaactagaagccgatttagatataacaaaaaggcaattgggaaccgaaagattcgaaagagaaagagcagtacaagaactaagacgtcaaaactactcaagtaacgcctaccacatgtctagtacaatgaaacccaacactaagtgtcacagtccggaacgagcacaccatagaagtcctgacagaggactagacaggtccttagaagaaaacctatgctacagagatttctaa

SEQ ID NO: 4013 - RNA, 927 nt, synthetic construct
  misc_feature 1..927: note = CCDS48205.1 variant
  source 1..927: mol_type = other RNA
atgagaccagaaggatcattaacatatagagtaccagaaaggttaagacaaggattttgtggagtaggtagagcagcccaagctctagtatgtgcaagtgcaaaagaaggaacagcatttagaatggaagcggtacaagaaggagcagcgggagtagaatcagaacaagctgcactaggagaagaagcagtattattattagatgatattatggcagaagtagaagtagtagcagaagaagaaggattagtagaacgaagagaagaagcacaaagagcacaacaagcggtaccaggaccaggaccaatgacaccagaaagtgcaccagaagaattattagcagtacaagtcgaattagaacctgtaaatgcacaagcaagaaaagcatttagtagacaaagagagaaaatggaaagaagaagaaaaccacatctcgatagaagaggcgcagtaatacaatcagtaccaggtttctgggcaaatgttatagcaaatcacccacaaatgtcagcactaataacagatgaagatgaagatatgttatcatatatggtatcattagaagtcggagaagaaaaacatcccgtacatctatgtaaaataatgttattctttagatcaaatccatattttcaaaacaaagtaataacaaaggaatacttagtaaacataacagaatacagagcatcacattcaacaccaatagaatggtatcctgattatgaagtagaagcatatagaagaagacatcataactcatcattaaatttctttaattggttttcagatcacaattttgcaggaagtaacaaaatagcagaaatattatgtaaagatttgtggagaaatccactacaatattataaaagaatgaaaccaccggaagaaggaacagaaacatcaggagactcacaattattatcataa

SEQ ID NO: 4014 - RNA, 369 nt, synthetic construct
  misc_feature 1..369: note = M13231.1 variant
  source 1..369: mol_type = other RNA
atgagatgggcactattagtactactagcattcctatcaccagcatcacaaaaatcatcaaacctagaaggaagaacaaaatcagtcacaagacaaacaggatcatcagcagaaataacatgcgacctaacagtaacaaacacattctacatacactggtacctacaccaagaaggaaaagcaccacaaagactactatactacgacgtatcaacagcaagagacgtactagaatcaggactatcaccaggaaaatactacacacacacaccaagaagatggtcatggatactaagactacaaaacctaatagaaaacgactcaggagtatactactgcgcaacatgggacagacaaaaactactataa

SEQ ID NO: 4015 - RNA, 804 nt, synthetic construct
  misc_feature 1..804: note = CCDS12619.1 variant
  source 1..804: mol_type = other RNA
atgggagcaagacaaattcaaacatcatcatcacaaacatccccagaagaagcaatgggaacaccccgcatacaacacctactaatattattagtactaggcgcatcattactaacctccggactagaactatactgccaaaaaggactttcaatgacagtagaagcagacccagccaatatgtttaactggacaactgaagaagtagaaacatgcgacaaaggagcattatgccaagaaacaatcttaataataaaagcaggaacagaaacagccatactcgcaacaaaaggatgcataccagaaggagaagaagcaataacaatagtacaacactcatcaccaccaggactaatagtaacatcatactcaaactactgcgaagactctttctgtaatgacaaagacagtctatcacaattctgggaattttcagaaacaacagcatcaacagtaagcacaacactacactgcccaacatgcgtcgcactcggaacatgcttctccgcaccatcactaccatgccctaacggtacaacacgatgttaccaaggaaaactagaaataactggaggtggaattgaatcatccgtagaagtaaaaggatgtacagcaatgataggatgcagactaatgtcaggaatactagcagtaggaccaatgtttgtaagagaagcatgcccacatcaacttctaacacaaccaagaaaaacagaaaacggagctacatgcctaccaataccagtatggggattacaactcctattaccactactactaccatcattcatacacttttcataa

SEQ ID NO: 4016 - RNA, 1590 nt, synthetic construct
  misc_feature 1..1590: note = AHZ44440 variant
  source 1..1590: mol_type = other RNA
atgctcttagccgtactatattgccttctatggtcatttcaaacatccgctggacattttccaagagcctgcgtatcatctaaaaatctaatggaaaaagaatgctgcccaccatggtcaggcgatagatcaccatgtggacaattgtcaggcagaggaagctgtcaaaatatactattatcaaatgctccccttggacctcaattcccatttacaggagtcgatgatcgagaatcatggccaagcgtattttataatcgtacatgtcaatgttcaggaaactttatgggcttcaactgtggaaactgtaaattcggtttttggggcccaaactgtacagaacgaagacttctagttagaagaaatatttttgatctatctgcaccagaaaaagataaattcttcgcatatttaaccttagccaagcatacaatatcatcagattacgtaattccaataggaacatacggtcaaatgaaaaatggatcaacacctatgttcaacgacataaatatatatgatttattcgtttggatgcactattacgttagtatggatgcactattaggcggatcagaaatatggagagatatagatttcgcacatgaagcccctgcattccttccctggcacagattattcttactaagatgggaacaagaaatacaaaaattaacaggagacgaaaattttacaataccatattgggactggcgagatgctgaaaaatgcgatatctgtacagatgaatacatgggaggacaacatccaaccaaccccaacttattatcaccagcatcattcttttcttcatggcaaattgtatgctcaagactagaagaatataattctcatcaatccctatgtaatggaacaccagaaggaccattaagaagaaacccaggaaatcacgataaatcaagaacccccagattaccttcatctgcagatgtagaattttgtctcagcctaactcaatatgaatccggatccatggataaagcagcaaatttctctttcagaaacacattagaaggatttgcctcaccattaacaggtatcgcagatgcatcccaatcatccatgcataatgctctacatatatatatgaatggaaccatgtcacaagtacaaggttcagcaaatgatccaattttcctactacaccatgcatttgtagattcaatatttgaacaatggctccgaagacatagaccactacaagaagtatatccagaagcaaatgcaccaataagacacaatagagaatcatatatggtaccttttataccactatatagaaacggcgacttctttatttcttctaaagatctaggatatgactattcatatctacaagactctgatccagattcctttcaagactatataaaaagttatctagaacaagcctcaagaatatggtcatggctacttggcgccgccatggtaggcgcagtactcacagccttactagcaggacttgttagcctactatgccgacacaaaagaaaacaacttccagaagaaaaacaacccctactaatggaaaaagaagactaccattccttatatcaatcacacttataa

SEQ ID NO: 4017 - RNA, 1590 nt, synthetic construct
  misc_feature 1..1590: note = AGV39051 variant
  source 1..1590: mol_type = other RNA
atgctattagcagtcttatactgcttattatggtcattccaaacatcagctggccatttcccacgagcatgcgtaagcagtaaaaacttaatggaaaaagaatgttgcccaccatggtcaggtgacagatcaccctgtggacaactatcaggaagaggatcatgtcaaaacatattattaagtaatgcaccactcgggccacaatttccatttaccggtgtcgatgacagagaatcatggccttccgtattttataacagaacatgccaatgctcaggaaactttatgggattcaactgtggaaactgtaaatttggattctggggaccaaattgcacagaacgaagacttctagtaagacgaaacatattcgacctatccgcaccagaaaaagataaattctttgcatacctaacactagcaaaacacaccatatcttctgactatgtcatacccataggaacatatggacaaatgaaaaatggatcgacaccaatgtttaatgatataaatatatatgatctattcgtatggatgcactattatgtatcaatggacgcacttttaggaggttcagagatttggcgagacatcgatttcgctcatgaagcaccagcatttttaccatggcatcgcttatttctactccgatgggaacaagaaatacaaaaattaacaggagacgaaaattttacaataccatattgggattggagagacgcagaaaaatgcgatatatgtacagatgaatatatgggaggacaacacccaacaaatccaaatttactctctccagcatctttcttttcatcatggcaaatagtatgcagtagactagaagaatataattcacaccaatctctctgcaatggaacaccagaaggaccattaagaagaaatcctggaaaccatgacaagtcacgtacaccaagactaccttcatcagcagatgtagaattttgtctatcactcacccaatacgaatcaggatcaatggacaaagctgcaaatttttctttccgaaacactctagaaggatttgcaagtcctctaactggaatcgcagacgcttcccaatcatctatgcataatgcactccatatctatatgaatggaaccatgtctcaagtacaaggatccgcaaatgatccaatattccttttacatcacgcatttgtagattcaatatttgaacaatggctaagaagacaccgaccactacaagaagtatatccagaagctaacgccccaattggtcataatagagaatcatacatggttccatttataccattatacagaaatggagatttctttatatcaagcaaagaccttggatacgattattcatacctacaagattctgacccagactcttttcaagattatataaaaagttacttagaacaagcctcaagaatctggtcatggctcttaggagcagccatggttggagcagttctaacagcacttcttgcaggcttagtttcattactctgtcgacacaaaagaaaacaactaccagaagaaaaacaaccactcttaatggaaaaagaagactaccattccttatatcaatcacatttataa

SEQ ID NO: 4018 - RNA, 1590 nt, synthetic construct
  misc_feature 1..1590: note = AGV39049 variant
  source 1..1590: mol_type = other RNA
atgctattggcagtactatattgcctattatggtcatttcaaacttctgcaggacattttcctagagcctgcgtatcttccaaaaacctaatggaaaaagaatgttgtcccccatggtcaggagaccgttcaccttgcggacaactatctggaagaggttcatgtcaaaatatcttattatcaaacgcacctctaggaccacaattcccatttacaggagtagatgacagagaatcatggccatctgtattctataaccgaacatgtcaatgttcaggaaatttcatgggattcaattgcggaaattgtaaatttggcttttggggacccaattgcacagaaagacgtctactcgtacgccgtaacatattcgatttatcagcaccagaaaaagataaattctttgcatacctaacattagccaaacacactatttccagtgattatgtaatccccataggaacatacggtcaaatgaaaaatggatcgacacccatgtttaacgatataaacatatacgatctattcgtatggatgcactattatgtatccatggatgctctcttaggtggctcagaaatatggcgagatatagacttcgctcacgaagcaccagcattcctcccatggcacagattattcttactaagatgggaacaagaaatacaaaaacttactggagacgaaaacttcacaataccatattgggattggagagatgcagaaaaatgtgacatctgcaccgatgaatacatgggaggacaacatcctaccaatccaaaccttctatcaccagcatctttcttctcatcctggcaaatagtttgttcaagactagaagaatacaactcacatcaatctctttgtaacggaacacctgaaggaccactaagacgaaacccaggcaaccacgataaatcaagaacaccacgacttccatcatcagccgatgtagaattttgtctctcactaacacaatatgaatctggaagcatggataaagcagcaaacttctcctttagaaatacactcgaaggatttgcatcaccattaacaggtatagcagatgcttcccaatcatctatgcataacgccctacatatatatatgaatggtacaatgagccaagtccaaggatcagccaatgacccaattttcttgttacatcacgccttcgtagactccatatttgaacaatggctacaaagacacagaccccttcaagaagtatatccagaagcaaacgcacctataggacataatagagaatcttacatggttccctttataccactatatcgaaacggagacttcttcatatcatcaaaagatctaggatacgactattcttatttacaagactctgaccccgactccttccaagactatataaaatcatacttagaacaagcatcaagaatatggtcatggctattaggagcagccatggtcggagcagtattaacagcacttctagctggattagtatcattattatgtagacacaaaagaaaacaacttccagaagaaaaacaaccccttcttatggaaaaagaagactaccactcattatatcaatcacacttataa

SEQ ID NO: 4019 - RNA, 1590 nt, synthetic construct
  misc_feature 1..1590: note = AGV39050 variant
  source 1..1590: mol_type = other RNA
atgttattagccgtattatattgcttattatggtcatttcaaacatccgctggccactttccaagagcatgcgtatcatccaaaaacttaatggaaaaagaatgctgtcctccctggtcaggagatcgatcaccatgcggacaattatcaggaagaggatcatgccaaaatatattactatctaatgctccacttggaccacaatttccatttacgggcgtcgatgatagagaatcatggccatcagtattttataatagaacctgtcaatgttctggaaactttatgggtttcaattgtggaaactgcaaatttggtttttggggccccaattgcacagaaagacgacttttagtaagacgtaacatattcgatctatccgcacctgaaaaagacaaatttttcgcatatctaaccttagcaaaacatacaatatcatccgattatgtcattcccataggaacatacggacaaatgaaaaatggatcaactcctatgtttaacgatatcaatatatatgatcttttcgtatggatgcactattatgtatctatggacgcactattaggaggctatgaaatatggagagatatagacttcgcacatgaagcccccgcatttttaccatggcatagattattcttactacgatgggaacaagaaatacaaaaactaactggagatgaaaacttcacaataccttactgggattggcgtgatgcagaaaaatgtgatatttgcacagatgaatatatgggtggacaacaccctacaaatccaaatttactatctcctgcaagtttcttttcctcttggcaaatagtatgctctagacttgaagaatataactcacaccaatctttatgtaacggtacacctgaaggaccattacgaagaaatccaggtaatcacgataaatcaagaactccaagactaccatcatctgcagatgtagagttctgtctatcattaacacaatatgaatccggaagtatggataaagctgcaaacttttcattcagaaatactctagaaggatttgcatctccactaaccggaatagcagacgcatctcaatcttcaatgcataatgcattacacatatatatgaatggaacaatgtctcaagttcaaggatcagctaacgatcctatatttcttctacatcatgccttcgtagattccatatttgaacaatggctaagaagacatagacctctacaagaagtttatcccgaagcaaatgcacctataggtcacaatcgagaatcatatatggtaccattcataccactatatagaaatggagatttctttatatcatcaaaagacttgggatatgactattcatatctacaagatagtgacccagacagtttccaagattatataaaatcatatctagaacaagcatcaagaatatggtcatggttattaggagcagcaatggtaggagcagtcctaactgcactactagctggattagtatcattattatgccgacacaaaagaaaacaattaccagaagaaaaacaaccactactaatggaaaaagaagattatcacagtttatatcaatcacatctttaa

SEQ ID NO: 4020 - RNA, 714 nt, synthetic construct
  misc_feature 1..714: note = CAA04137 variant
  source 1..714: mol_type = other RNA
atgtcacctttatggtggggattcttactatcatgcttaggatgcaaaatattaccaggagcacaaggacaatttccacgagtatgtatgacagtagattcactagtaaataaagaatgctgtccaagactaggagcagaaagcgcaaatgtatgtggatcacaacaaggtagaggacaatgtacagaagtaagagcagatacaagaccatggtcaggaccatatatattaagaaatcaagatgaccgagaactatggccaagaaaattctttcacagaacatgtaaatgtacaggtaattttgcaggatataattgcggagactgtaaatttggttggacaggaccaaactgcgaaagaaaaaaaccaccagtaatacgacaaaatatacattcactatcaccacaagaaagagaacaatttctaggagctttagacctagccaaaaaaagagtccatccagattacgtaataacaacacaacactgggtaggactattaggaccaaacggaacacaaccacaatttgcaaattgtagtgtatatgatttttttgtatggttacattattattcagtaagagatacattattaggaggattttttccatggttaaaagtatactattacagattcgtaataggattaagagtatggcaatgggaagtaatatcatgcaaactaattaaaagagcaacaacaagacaaccataa

SEQ ID NO: 4021 - RNA, 1590 nt, synthetic construct
  misc_feature 1..1590: note = AAA61242 variant
  source 1..1590: mol_type = other RNA
atgttactagctgtattatattgtctattatggtcattccaaacatcagctggacactttccaagagcatgcgtatcctccaaaaatctaatggaaaaagaatgttgccctccatggagcggtgaccgatccccatgcggacaattaagtggaagaggaagttgtcaaaatatacttctatcaaacgcaccattaggcccccaatttccatttactggagtagatgatcgagaatcatggccttccgtattttacaatcgtacatgccaatgtagtggaaacttcatgggcttcaactgcggaaattgtaaatttggattctggggacctaattgtacagaacgtagacttttagtaagaagaaacatatttgatctatcagccccagaaaaagataaattctttgcatatttaactttagccaaacataccatatcatctgattatgtcataccaataggcacctacggacaaatgaaaaatggctcaacaccaatgtttaatgatataaatatttacgacttattcgtatggatgcattactatgtatctatggatgcactactaggaggttcagaaatatggagagatatagattttgcacacgaagcaccagcatttctaccatggcatcgactatttctactaagatgggaacaagaaatacaaaaattaactggagacgaaaatttcacaataccttactgggactggcgagacgctgaaaaatgtgatatatgtacagatgaatatatgggaggacaacatccaacaaacccaaatctcctttcaccagcatctttcttttcttcatggcaaatagtatgcagcagattagaagaatacaactcacatcaatcactatgcaacggtacacctgaaggaccactaagaagaaaccccggaaatcatgacaaatcaagaacaccaagattaccatcatccgccgatgtagagttctgtctatcattaacacaatacgaatctggttccatggacaaagcagcaaatttcagctttcgaaataccctagaaggatttgcatctcccctcaccggtattgctgacgcatcacaatcaagtatgcacaacgcactccatatatacatgaatggtacaatgagccaagtacaaggatccgccaatgatccaattttccttctacaccatgcttttgtagactctatatttgaacaatggttaagacgacacagacccttacaagaagtatatcctgaagcaaatgcacctataggccacaacagggaatcatatatggtaccatttatcccactttatcgaaacggcgatttctttatatcttccaaagacctaggatatgattatagttatctccaagattcagacccagattccttccaagactacataaaatcatatctagaacaagcctcacgcatatggtcttggctattaggcgcagccatggtaggagctgttctcacagcactattagcaggtctagtatcactcctatgtagacacaaaagaaaacaactacccgaagaaaaacaaccattactaatggaaaaagaagattatcattcattatatcaatcacacctttaa

SEQ ID NO: 4022 - RNA, 1590 nt, synthetic construct
  misc_feature 1..1590: note = AGV39054 variant
  source 1..1590: mol_type = other RNA
atgctactagcagtattatattgtttactctggtcatttcaaacctcagcaggacatttcccaagagcatgtgtatcatccaaaaacctaatggaaaaagaatgttgccctccatggagtggagacagatcaccttgcggccaattaagcggaagaggttcatgtcaaaatatactattatccaatgcaccattaggcccccaatttccatttacaggtgtagacgatcgagaatcctggccatcagtcttctataacagaacctgccaatgttctggtaactttatgggatttaattgcggaaattgtaaatttggattttggggaccaaactgcacagaaagaagattactcgtacgaagaaacatattcgatctatcagcaccagaaaaagacaaattctttgcctatctaaccctagctaagcatacaataagttcagattatgtaataccaattggaacttatggacaaatgaaaaatggatcgacaccaatgttcaatgacattaatatatatgacctcttcgtctggatgcattactatgtctctatggacgctctattaggaggttcagaaatatggagagacatagatttcgcacacgaagctccagcctttctcccctggcatcgactattcctactacgatgggaacaagaaatacaaaaattaacaggagatgaaaacttcacaataccatattgggactggagagacgcagaaaaatgtgatatttgtacagatgaatacgtaggaggacaacatcccacaaacccaaacttattatcccctgcatcattcttttcctcatggcaaatagtttgctccagacttgaagaatataattctcatcaatcattatgtaacggaacaccagaaggacccttaagaagaaatcccggaaatcacgacaaatcaagaacaccaagactccctagttcagcagatgtagaattttgtctctcattaacacaatatgaatcaggttcaatggacaaagctgcaaatttctcattcagaaacacattagaagggtttgcttcaccattaactggtatagcagacgcatcacaatcatcaatgcataacgctctacacatatacatgaacggaacaatgtcccaagtacaaggatcagcaaatgatccaatatttttactacatcatgcattcgtagactcaatctttgaacaatggttaagacgacaccgcccattgcaagaagtatatccagaagcaaatgccccaataggccataaccgagaatcatatatggtaccattcataccactctacagaaatggtgatttctttatctcttcaaaagaccttggatatgactattcatatctacaagattcagacccagattcattccaagattacattaaatcctatctagaacaagcatctaggatttggtcatggttactaggagcagcaatggtaggagccgtactaacagcattactagccggtctagtctcattattatgtagacacaaacgtaaacaacttccagaagaaaaacaaccactcttaatggaaaaagaagactaccattcattatatcaatcacacctataa

SEQ ID NO: 4023 - RNA, 1590 nt, synthetic construct
  misc_feature 1..1590: note = AGV39162 variant
  source 1..1590: mol_type = other RNA
atgctattagccgtactttactgcttactatggtcattccaaacatcagctgggcacttcccacgagcatgcgtttctagcaaaaatctcatggaaaaagaatgttgtccaccatggtcaggtgacagatccccatgtggccaactatccggaagaggatcttgtcaaaacatattattaagtaacgcaccattaggaccacaatttccatttacaggagtagatgacagagaatcttggccatcagtattctataacagaacatgccaatgcagtggaaattttatgggattcaattgcggtaattgtaaatttggattttggggacccaattgcactgaacgaagattattagtaagaagaaatattttcgatttatctgcacctgaaaaagataaattctttgcctatttaacactcgctaaacacaccatttcatcagattatgtaataccaatcggaacatatggccaaatgaaaaatggctcaactcctatgtttaatgacataaatatctacgacttattcgtttggatgcattattacgtatcaatggacgcactcctaggaggatctgaaatatggagagatatagattttgctcacgaagctccagcatttctaccatggcacagattatttttacttaggtgggaacaagaaatacaaaaattaacaggagatgaaaatttcactataccctactgggactggagagacgccgaaaaatgcgacatatgtacagatgaatacatgggaggccaacacccaaccaatccaaatctcctttcccctgcatcattcttttcctcatggcaaatagtatgttcaagactagaagaatataactcacatcaatctctatgcaatggaacacctgaaggaccattaagacgcaatccaggtaatcacgataaatcaagaactccaagattaccaagttcagcagatgttgaattttgtttatctttaacacaatatgaatcaggatcaatggataaagctgcaaattttagtttcagaaatacactcgaaggttttgcatcaccactaacaggaatagcagacgcatcccaatcctcaatgcacaatgctttacatatatatatgaatggaacaatgagtcaagtacaaggatcagctaatgatccaatttttctattacaccatgcattcgtagactcaatattcgaacaatggttaagaagacatcgattactccaagaagtatatcccgaagcaaatgcaccaatcggtcacaacagagaatcctacatggtaccatttataccactatatagaaatggagactttttcatttcctcaaaagaccttggttacgactattcatatctacaagactcagaccctgactccttccaagactatatcaaatcatacttagaacaagccagccgaatatggtcatggttacttggagcagcaatggtcggtgcagttctaacagctttactagcaggacttgtatctctactttgcagacacaaaagaaaacaacttccagaggaaaaacaacccctcctcatggaaaaagaagactatcattcattatatcaatcacacttataa

SEQ ID NO: 4024 - RNA, 1590 nt, synthetic construct
  misc_feature 1..1590: note = AGV39086 variant
  source 1..1590: mol_type = other RNA
atgctattagcagtattatactgcctattatggtcatttcaaacatcagcaggacattttccacgagcatgtgtatcttctaaaaatttaatggaaaaagaatgttgtccaccctggtctggagatagatcaccatgtggacaactaagcggaagaggatcatgtcaaaatatactattatcaaatgcaccattaggcccacaatttccatttactggtgtagatgacagagaatcctggccctcagtattctataacagaacatgtcaatgtagcggcaacttcatgggatttaactgcggaaattgtaaattcggattttggggccctaattgcacagaaagaagactcctagttagaagaaatatatttgatctatccgcaccagaaaaagataagttctttgcttatctaacacttgcaaaacatacaataagtagcgattacgtaattccaattggaacatacggacaaatgaaaaacggctccacaccaatgtttaacgatataaatatatatgacttattcgtatggatgcactactacgtatctatggacgccctcttaggaggaagcgaaatctggcgagatatagacttcgcacatgaagcccctgcattcttaccatggcatagactattcttattacgctgggaacaagaaatacaaaaattaacaggtgacgaaaattttaccattccatactgggattggcgtgacgcagaaaaatgtgatatatgcacagacgaatatatgggaggacaacatccaacaaaccctaacctattatcaccagcatcattcttttcctcatggcaaatagtttgctccagactagaagaatacaattctcaccaatcattatgtaacggcacaccagaaggaccattaagaagaaacccaggaaaccacgataaatccagaactcccagattaccaagctcagcagacgtagaattttgtttatcactcacacaatatgaatcaggctcaatggataaagcagctaacttttccttcagaaatacactagaaggatttgcttcaccattaaccggtatcgcagatgcatcacaaagctctatgcacaatgccctccacatatatatgaatggaacaatgtcacaagtacaaggatcagcaaacgatccaatattcttactacatcacgcttttgtagactccatgttcgaacaatggttaagacgacacagaccactccaagaagtctatccagaagctaatgcaccaataggacacaacagagaaagttatatggtaccatttataccactatatagaaatggagatttctttatttcttcaaaagacttaggatatgactattcatacttacaagattccgacccagactcatttcaagactatatcaaatcatatttagaacaagcatccagaatttggagctggttactaggagctgcaatggtaggagctgtactaacagcactactagctggtctagtttcacttttatgtagacacaaacgaaaacaattacctgaagaaaaacaacctttattaatggaaaaagaagactaccactcattataccaatcacatttataa

SEQ ID NO: 4025 - RNA, 1614 nt, synthetic construct
  misc_feature 1..1614: note = AAC15468 variant
  source 1..1614: mol_type = other RNA
atgtctgcacctaaattactaagcctaggatgcatattcttcccattactattattccaacaagcacgagcacaatttccacgacaatgtgctaccgttgaagcattgcgctcgggaatgtgttgtccagatttatcaccagtaagtggtccaggaactgatcgatgcggatcatcatctggaagaggtcgatgtgaagcagttaccgcagactcaagaccacattctccacaatatccacacgatggaagagacgatcgagaagtttggccattaagattcttcaacagaacttgccactgcaatggaaatttctccggacacaattgcggaacatgtagaccaggatggagaggagccgcatgcgatcaacgagtcctcatagtaagaagaaacctactagacctctcaaaagaagaaaaaaatcattttgtaagagccttagacatggcaaaaagaacaactcatccactatttgtaatagcgaccagaagatccgaagaaatattaggacccgacggaaatactccacaatttgaaaatatatcaatatacaactatttcgtatggacacattattatagtgtaaaaaaaacattcctaggagtaggacaagaatcattcggagaagttgatttctctcatgaaggtcctgcatttctcacatggcatagataccacttattaagattagaaaaagatatgcaagaaatgctacaagaaccatctttttcattaccatattggaattttgcaactggaaaaaacgtatgcgatatttgtactgatgacttaatgggatctagatcaaattttgattctacattaatttcaccaaattcagtattctcacaatggcgagttgtatgtgactctctcgaagactacgatactctaggaaccttatgcaattcaacagaagatggaccaataagaagaaatccagctggtaatgtagcaagacctatggttcaaagactacctgaaccccaagatgttgcacaatgcctagaagttggtctatttgacacacctccattctattcaaatagcacaaattcgtttagaaataccgtcgaaggatatagcgatccaaccggaaaatatgatccagcagtcagatccttacataatctagcacacctttttctaaatggtacaggaggacaaacccatctctcaccaaatgacccaatatttgtattactacacacatttacagatgccgtattcgatgaatggctcagaagatacaatgcagatatctcaacattcccactagaaaacgcaccaataggccataatagacaatataacatggttcctttttggccaccagtaacaaatacagaaatgtttgtaactgcaccagataatctaggttacacatatgaaatacaatggccctcaagagaattttccgtaccagaaataatcgcgatagcagtagttggagcactactactagtagctttaattttcggaacagcatcatatctaataagagcaagacgttcaatggatgaagcaaatcaaccattattaacagatcaataccaatgttatgcggaagaatatgaaaaactacaaaacccaaatcaatccgttgtataa

SEQ ID NO: 4026 - RNA, 1560 nt, synthetic construct
  misc_feature 1..1560: note = AAA20870 variant
  source 1..1560: mol_type = other RNA
atgtcaccattatggtggggatttttactatcatgcttaggttgcaaaatacttcctggcgcacaaggacaatttccaagagtatgtatgactgtagattcactagttaataaagaatgctgtccaagattaggagccgaatccgccaatgtctgtggatcccaacaaggtagaggacaatgtacagaagttcgtgctgatacaagaccatggagtggaccatatatattaagaaatcaagatgacagggaattatggccaagaaaattttttcacagaacttgtaaatgtacaggaaattttgcaggatataattgtggtgattgtaaatttggatggacaggaccaaattgtgaacgtaaaaaaccaccagtaataagacaaaatattcatagtttatcacctcaagaaagagaacaatttctaggagctctagatttagcaaaaaaaagagttcacccagattatgtaataaccactcaacattggctaggcttattaggtccaaatggaacccaaccacaattcgctaactgttcagtttatgacttttttgtatggcttcattattattcggttagggatactttattaggaccaggacgaccatatagagccatagacttctcacaccaaggcccagcatttgtaacatggcatcgatatcatctcctttgtttagaaagagacctacaaagattaataggaaatgaatcattcgcattaccatattggaattttgcaacaggacgaaatgaatgcgatgtctgtacagatcaattatttggagcagcaagaccagacgacccaacactcatatcaagaaattctagattttcatcatgggaaacagtatgcgactcattagatgattataatcatctagtaacactatgtaacggcacttatgaaggacttctaagaagaaatcaaatgggtagaaatagcatgaaactaccaacattaaaagacatccgcgattgtttatctttacaaaaattcgataatccaccattcttccaaaattctacattttcatttagaaacgcattagaaggttttgacaaagcagatggtacattagattctcaagtcatgtccctacataatctagtacactcatttctaaacggaacaaatgcccttccacattcagcagcaaatgatccaatatttgttgtattacactcatttactgacgcaatcttcgatgaatggatgaaacgttttaacccacccgcagatgcatggccacaagaactagcacctataggtcataatcgaatgtacaacatggtaccatttttcccacctgtaactaatgaagaattatttttaacttcagaccaattaggatattcatatgccattgacctaccagtttcagttgaagaaacacccggatggccaacaacattactcgttgtaatgggaacattagtagcattagtcggcctatttgtattactggcattcctacaataccgaagattaagaaaaggatacaccccattaatggaaacacatctatcatcaaaaagatatacagaagaagcataa

SEQ ID NO: 4027 - RNA, 456 nt, synthetic construct
  misc_feature 1..456: note = CCDS7679.1 variant
  source 1..456: mol_type = other RNA
atgagaagactactattagtaacatcattagtagtagtactactatgggaagcaggcgcagtaccagcaccaaaagtaccaataaaaatgcaagtaaaacactggccatcagaacaagacccagaaaaagcatggggagcaagagtcgtagaaccaccagaaaaagacgaccaattagtagtactattcccagtacaaaaaccaaaactactaacaacagaagaaaaaccaagaggacaaggaagaggaccaatactaccaggaacaaaagcatggatggaaacagaagacacactaggacacgtattatcaccagaaccagaccacgactcactataccacccaccaccagaagaagaccaaggagaagaaagaccaagactatgggtaatgccaaaccaccaagtactactaggaccagaagaagaccaagaccacatataccacccacaataa

SEQ ID NO: 4028 - RNA, 525 nt, synthetic construct
  misc_feature 1..525: note = ACF47598 variant
  source 1..525: mol_type = other RNA
atggtatcatactgggacacaggagtactattatgcgccctactatcatgcctattactaacaggatcatcctcaggatcaaaattaaaagacccagaattatcactaaaaggaacccaacacataatgcaagcaggacaaacattacacttacaatgcagaggagaagcagcacacaaatggtcactaccagaaatggtctcaaaagaatcagaaagactatcaataacaaaatcagcatgcggaagaaacggaaaacaattctgctcaacactaacactaaacacagcacaagcaaaccacacaggattctactcatgcaaatacctagcagtaccaacatcaaaaaaaaaagaaacagaatcagcaatatacatattcatatcagacacaggaagaccattcgtagaaatgtactcagaaataccagaaatcatacacatgacagaaggaagagaattagtaataccatgcagagtaacatcaccaaacataacagtaacactaaaaaaaaaaaaagcataa

SEQ ID NO: 4029 - RNA, 750 nt, synthetic construct
  misc_feature 1..750: note = BAR92607 variant
  source 1..750: mol_type = other RNA
atgggatcagacgtacgcgatttaaacgccttattaccagcagtaccatcactaggaggaggaggaggatgcgctctaccagtatcaggagctgcacaatgggcaccagtactagattttgcaccaccaggtgcttctgcatacggttcattaggcggaccagcaccaccaccagcaccaccaccaccaccaccaccaccaccacattcctttatcaaacaagaaccatcatggggaggagctgaaccacacgaagaacaatgcttatcagcatttacagtacatttctcaggacaattcacaggaacagcaggagcatgtagatatggaccatttggaccaccaccaccatctcaagcatcttccggacaagcaagaatgttcccaaacgcaccatatctaccatcatgtttagaatcacaacctgctattagaaaccaaggatattcaacagtaacattcgacggaacaccatcatacggacacacaccctcacaccatgccgcacaatttccaaatcattcattcaaacacgaagatccaatgggacaacaaggatctttaggagaacaacaatattcagtaccaccaccagtttacggatgtcatacaccaacagattcctgtacaggatctcaagcattacttttaagaacaccctactcatcagacaatttatatcaaatgacatcacaattagaatgtatgacatggaatcaaatgaaccttggtgcaacactaaaaggttaa

SEQ ID NO: 4030 - RNA, 1350 nt, synthetic construct
  misc_feature 1..1350: note = AAA61299 variant
  source 1..1350: mol_type = other RNA
atgggatcagacgttcgtgacttaaatgctttactaccagcagtaccaagtctaggcggtggaggaggatgcgcgctaccagtatccggagcagcacaatgggcaccagtattagattttgcaccacctggagcctccgcatacggtagcttaggcggaccagccccaccaccagcaccacctccaccaccccctccacctccacattcatttataaaacaagaaccaagttggggtggagcagaaccacatgaagaacaatgtctatcagcatttactgtccatttttcaggacaatttacaggcactgcaggagcatgtagatacggaccatttggtccaccaccaccatcacaagcttcttcgggacaagcaagaatgtttccaaatgctccatacttaccatcgtgtctagaatcccaaccagcaattagaaatcaaggctattcaactgtaacatttgacggcacaccatcatacggacatacaccatcacatcatgcagcacaattcccaaaccattcctttaaacacgaggatccaatgggacaacaaggttcattaggagaacaacaatattctgttcccccacccgtatatggttgtcatacaccaactgattcatgtacaggctctcaagctttattattacgaacaccatattcatcagacaacctataccaaatgacaagtcaattagaatgcatgacatggaatcaaatgaatttaggagcaactttaaaaggtgtcgcagcaggatcaagctcatcagttaaatggacagaaggacaatcaaaccattctacaggttatgaatctgataatcacactacaccgattttatgtggtgctcaatacagaatacacacacacggagtttttagaggaatacaagatgtacgtcgtgtaccaggcgtagccccaacactagtacgctcagcaagtgaaacatcagaaaaaagaccatttatgtgtgcatatcctggatgtaataaacgatactttaaactaagccacctacaaatgcattcacgaaaacacacaggcgaaaaaccatatcaatgtgactttaaagattgcgaaagacgattttcacgctcagaccaattaaaaagacatcaacgacggcatacaggagtaaaaccctttcaatgtaaaacctgtcaacgtaaattttccagatcagaccacttaaaaacacacacaagaacacacacaggaaaaacatcagaaaaaccattctcatgtagatggccatcctgtcaaaaaaaattcgcacgaagtgatgaactagtaagacaccataatatgcatcaaagaaatatgacaaaattacaactagcactataa

SEQ ID NO: 4031 - RNA, 279 nt, synthetic construct
  misc_feature 1..279: note = AAA63269 variant
  source 1..279: mol_type = other RNA
atgcaaagaagaggacaaccattagaaaaccacgtagcactaatacactggcaatcagcaggaataccagcatcaaaagtacacaactactgcaacatgaaaaaatcaagactaggaagatcaagagcagtaagaatatcacaaccactactatcaccaagaagatgcccattacacctaacagaaagaggagcaggactactacaaccacaaccacaaggaccagtaagaacaccaggaccaccatcaggatcacacccagcagcagcagacaactaa

SEQ ID NO: 4032 - RNA, 246 nt, synthetic construct
  misc_feature 1..246: note = AAP35763 variant
  source 1..246: mol_type = other RNA
atggaatcaccaaaaaaaaaaaaccaacaactaaaagtaggaatactacacctaggaagcagacaaaaaaaaataagaatacaactaagaagccaatgcgcaacatggaaagtaatatgcaaaagctgcatatcacaaacaccaggaataaacctagacctaggaagcggagtaaaagtaaaaataataccaaaagaagaacactgcaaaatgccagaagcaggagaagaacaaccacaagtataa

SEQ ID NO: 4033 - RNA, 1098 nt, synthetic construct
  misc_feature 1..1098: note = AAA59652 variant
  source 1..1098: mol_type = other RNA
atggcagtaatggccccacgtaccctattactcctactcagcggagccctcgcactcacacaaacctgggccggatcacacagcatgcgctacttcttcaccagcgtatccagacccggacgcggagaaccccgattcatagcagttggctacgtcgacgacacacagttcgtaagattcgactcagacgcagccagccagaaaatggaacccagagccccgtggatcgaacaagaagggcccgaatactgggaccaagaaaccagaaacatgaaagcccactcccaaacagaccgcgccaacctcggcaccctcagaggatactacaaccaaagcgaagacggaagccacaccatacaaatcatgtacggttgcgacgtcggtcccgacggccgattcctcagaggctacagacaagacgcctacgacgggaaagactacatcgccctcaacgaagacctccgttcctggaccgcagcagacatggccgcccaaataacaaaacgcaaatgggaagccgtgcacgcagccgaacaaaggcgagtatacctcgaaggacgctgcgtcgacggcctcagaagatacctagaaaatggcaaagaaacactccaaagaacagacccaccaaaaacccacatgacccaccaccccataagcgaccacgaagccacactccgatgctgggccctaggattctacccagcagaaataacactaacatggcaaagggacggcgaagaccaaacacaagacaccgaactcgtagaaacccgccccgccggcgacggcacattccaaaaatgggcagcggtcgtcgtcccaagcggagaagaacaaagatacacatgccacgtccaacacgaaggactacccaaacccctaaccctacgatgggaactaagctcgcaacccacaatcccaatagtcggcataatagccggcctcgtactcctgggtgcagtcataaccggagcagtagtcgccgcggtcatgtggcgaagaaaaagctccgaccgcaaaggcgggagctacacccaagcagcgagcagcgactcagcccaaggctcggacgtcagcctcaccgcctgcaaagtctaa

SEQ ID NO: 4034 - RNA, 1098 nt, synthetic construct
  misc_feature 1..1098: note = AAA59606 variant
  source 1..1098: mol_type = other RNA
atggcagtcatggccccacgcacactcgtcctactgctctccggagccctcgcactcacgcaaacatgggcaggctcacactccatgaggtacttcttcaccagcgtcagcagacccggccgaggcgaaccacgcttcatcgccgtcggctacgtagacgacacccaattcgtgcgcttcgactcagacgcagcatcacaaaggatggaaccccgagcaccatggatagaacaagaaggacccgaatactgggacggagaaacacgaaaagtcaaagcccacagccaaacccacagagtagacctcggaacactcaggggctactacaatcaatcagaagcaggctcacacaccgtccaacggatgtacggatgcgacgtaggaagcgactggcgattcctacgcggataccaccaatacgcctacgacggaaaagactacatcgccctaaaagaagacctacgctcctggacagccgccgacatggccgcccaaaccaccaagcacaaatgggaagcagcacacgtcgccgaacaactacgcgcgtacctcgaaggcacatgcgtcgaatggctacgaagatacctagaaaacggcaaagaaacactacaaagaacagacgcgcccaaaacccacatgacccaccacgccgtgagcgaccacgaagcaacgctccgctgctgggccctcagcttctacccagccgaaatcaccctaacatggcagagagacggagaagaccaaacccaagacaccgagctagtcgaaacccgacctgccggcgacggcacgttccaaaaatgggccgccgttgtggtcccaagcggacaagaacaaagatacacgtgccacgtccaacacgaaggcctgcccaaacccctcaccctccgctgggaaccaagctcccaacccaccatacccatcgtaggcatcatagccggcctcgtactcttcggcgctgtaataaccggagccgtagtcgccgccgtgatgtggcgccgaaaatcaagcgaccgcaaaggcggctcctacagtcaagccgccagctcagactcggcccaaggctcagacgtaagcctgacagcatgcaaagtataa

SEQ ID NO: 4035 - RNA, 1263 nt, synthetic construct
  misc_feature 1..1263: note = AAH37161 variant
  source 1..1263: mol_type = other RNA
atgcccggcggatgctcccgtggaccagcagcaggcgacggccgcctacgactcgcccgccttgccctagtcctcctcggctgggtttcatcttcctcacccacatcttcagcctcctcattctcctcatccgcacctttcctagcgtcagccgtatccgctcaaccaccactaccagaccaatgccccgccctctgcgaatgctccgaagcagcacgaaccgtaaaatgtgtcaaccgaaacctcacagaagttcccaccgacctcccagcatacgtccgaaacctcttcctcaccggcaaccaactagcagtcctccccgccggcgccttcgcccggcgacctcccctcgccgaactcgccgctctaaacctatcaggatcccgacttgacgaagtccgcgcaggcgcattcgaacacctaccctccctccgccaactcgacctctcacacaacccactcgccgacctctcacccttcgccttctctggctccaacgcctccgtctccgccccctctcccctagtcgaactcatcctcaaccacatagtccctcccgaagacgaacgccaaaaccgcagctttgaaggcatggttgtcgccgcactcctcgccggacgcgcgctccaaggactacgacgcctcgagctcgcatccaaccatttcctctacctcccacgagatgtcctagcacaactcccatcccttcgccacctagacctctccaacaactccctagtatcactaacatacgtctccttccgcaacctcacccacctagaatccctccacttagaagacaatgcactcaaagtcctccacaacggcacactcgcagaactccaaggcctcccacacatccgcgtcttccttgataacaacccctgggtatgcgactgtcacatggccgacatggtcacctggctcaaagaaacagaagtagtccaaggcaaagacagactcacttgtgcatacccagaaaaaatgcgcaaccgcgtactcctcgaactcaactcagccgacctcgactgcgaccccatactcccaccttccctccaaacctcatacgtcttcctcggcatcgtcctcgcactcatcggcgccatcttcctcctcgtactttatctaaaccgcaaaggaatcaaaaaatggatgcacaacatccgcgacgcctgccgtgaccacatggaaggataccactaccgatacgaaataaacgctgaccctcgactaaccaacctctcctccaactcagatgtctaa

SEQ ID NO: 4036 - RNA, 1632 nt, synthetic construct
  misc_feature 1..1632: note = AAH33010 variant
  source 1..1632: mol_type = other RNA
atgcgcaaacccgccgcaggattcctcccctccttactcaaagttctcctactcccgctagcccccgccgctgcccaggactccacccaagcatcaacaccaggatcccccttgtcccctaccgaatacgaacgatttttcgcactcctcacacccacctggaaggcagaaacaacatgccgcctacgcgccacccacggatgccgaaaccccactctcgttcaactcgaccaatacgaaaaccacggcctagtcccagacggagcagtttgctccaacctgccctacgcctcatggtttgaatctttctgccaattcacccattaccgatgcagcaaccacgtctactacgcaaaacgagtactctgttcacaacccgtttccatcctatcaccaaacacacttaaagaaatcgaagctagcgccgaagtatccccaactacaatgacatcccccatcagcccccacttcaccgtcacggaacgacaaaccttccaaccatggccagaacgcctttccaacaacgtggaagaactactacaatcctccctctcactcggcggccaagaacaagcgcccgaacacaaacaagaacaaggcgtcgaacacagacaagaacccacacaagaacacaagcaagaagaaggacaaaaacaagaggagcaagaagaagaacaagaagaggaaggaaaacaagaagagggacaaggaaccaaggaaggccgagaagccgtctcccaactgcaaaccgactccgaacccaaattccactccgaatccctctcatcaaaccccagcagcttcgcaccccgagtccgtgaagtcgaaagcaccccaatgataatggagaacatccaagaactaatacgctcagcccaggaaatcgacgaaatgaacgaaatatacgacgaaaactcctactggcgcaaccaaaaccctggtagccttctccagctcccccacacggaagcgctcctcgtcctatgctactccatcgtcgaaaatacctgcatcatcacacccactgccaaagcctggaaatacatggaagaagaaatattaggatttggcaaatccgtctgtgattccctcggaagacgccacatgtccacttgcgccctttgcgacttctgctccctaaaactcgaacaatgccacagcgaagcatccctccagcgccaacaatgtgacaccagccacaaaaccccctttgtatccccactgctagccagccaaagcctttccatcggcaaccaagtcggctcaccagaaagcggccgattctacggactcgacctgtacggcggcctccacatggacttctggtgcgctcgtctggccaccaaaggatgcgaagacgtacgcgtaagcggctggctccaaaccgagttcctctccttccaagacggagatttcccaaccaaaatctgcgacaccgactacatacaataccctaactactgctccttcaaatcccaacagtgcctaatgcgcaaccgcaaccgcaaagtctcccgtatgcgctgccttcaaaacgaaacctactccgccctctccccaggcaaatccgaagacgtagtcctcagatggtcacaagagttctccacactcaccctcggacaattcggctaa

SEQ ID NO: 4037 - RNA, 1830 nt, synthetic construct
  misc_feature 1..1830: note = AAB58754 variant
  source 1..1830: mol_type = other RNA
atgaaatgggtagaatcgatattcctcatcttcctcctcaacttcaccgaatcacgtaccctacatcggaacgaatatggtatcgcatccatactagacagctaccaatgcaccgccgaaatcagcctagccgacctcgccacaatcttcttcgcccaattcgtccaagaagccacatacaaagaggtatcaaagatggtcaaagacgccctaaccgccatagaaaaacccacaggagacgaacaatcctctggctgcctcgagaaccaactacccgccttcctagaagaactgtgccacgaaaaagaaatcctcgaaaagtacggacactcagactgctgctcgcaatccgaagaaggacgacacaactgcttcctcgctcacaagaaacccacacccgcctccatccccctcttccaagtcccagaacctgtcacctcctgcgaagcctacgaagaagaccgagaaacattcatgaacaaattcatatacgaaatcgcacgacgtcaccccttcctatacgccccaaccattctcctctgggcagcccgctacgataaaatcatccccagctgctgcaaggccgaaaacgccgtagaatgcttccaaacaaaagcagccaccgtgacaaaagaactgcgcgagagctccctcctcaaccaacacgcctgcgcagtcatgaaaaacttcggcacccgtaccttccaggccataacagtcaccaagctctcacagaagttcaccaaagtcaactttacagaaatacaaaagctagttctcgacgtcgcccacgtccacgaacactgctgcagaggcgacgtcctcgactgcctccaagacggcgagaaaatcatgagctacatctgctcacagcaagacaccctttccaacaaaatcaccgaatgctgcaagctcacaaccctagaacgcggtcaatgcatcatccacgcagaaaacgacgaaaaacccgaaggcctgtcacctaacctcaaccgcttcctcggcgaccgagacttcaaccagttcagctccggagagaaaaacatcttcctcgcctccttcgtccacgaatactcccgccgacacccccaactcgccgtatcagtcatcctacgcgtagcgaaaggctaccaggaactcctagaaaaatgcttccaaacagaaaaccccctcgaatgccaagacaaaggagaggaagaactacaaaaatacatccaagaatcccaagccctagctaaacgatcatgcggacttttccagaaacttggcgaatactacctacaaaacgcattcctagtcgcctacacaaagaaagcaccccagctgaccagctcagagctaatggccataacccgcaaaatggccgccacagccgccacatgctgccaactatctgaagacaaactcctcgcctgcggagaaggcgccgctgacatcatcatcggccacttgtgcatccgccacgaaatgacacccgtcaaccccggcgtcggccaatgctgcacctccagctacgcaaaccgacgcccctgcttctcctcgctcgtcgtagacgaaacctacgtaccccctgcattctcagacgacaaattcatattccacaaagacctttgccaagcccagggcgttgccctccaaaccatgaaacaagagttcctcattaacctcgtcaaacaaaaaccccaaataaccgaagaacaactagaagccgtaatagcagacttcagcggcctactcgagaaatgctgtcagggccaagaacaagaagtctgcttcgcagaagaaggacaaaaacttatctcaaaaacacgcgccgccctaggcgtctaa

SEQ ID NO: 4038 - RNA, 2565 nt, synthetic construct
  misc_feature 1..2565: note = AAI26251 variant
  source 1..2565: mol_type = other RNA
atgatggcctacagcgacacaacgatgatgagcgacgacatcgactggctacgctcacacagaggggtatgcaaggtggacctatacaacccagaaggacagcaggaccaagaccgcaaagtcatctgcttcgtagacgtcagtactctcaacgtagaagacaaagattacaaagacgccgcatcctcaagctctgaaggcaaccttaacttaggcagcctggaagaaaaagaaatcatagtcattaaagacactgagaaaaaggaccaatccaaaaccgaaggttccgtctgcctattcaaacaagccccctccgaccccgtatcagtcctcaactggctcctatccgacctacaaaaatacgcgctcggcttccagcacgcactctccccatcaacaagtacctgcaagcacaaagtaggcgataccgaaggcgaataccaccgcgcatcaagcgaaaactgctattcagtctacgcagaccaagtaaacatcgactacctcatgaacaggccccaaaacctccgcctcgaaatgacagcagccaaaaacacaaacaacaaccaaagcccatcagcgccacccgcgaaacctccaagtacccagcgagccgtaataagcccggacggcgaatgctccatagacgacctatcgttctacgttaatagactatccagcctagtaatccaaatggcacacaaagaaattaaggaaaaactcgaagggaagtcgaaatgcctccaccactcaatctgcccaagccccggaaacaaagaacgaatctcccccaggaccccagccagcaaaatcgccagcgaaatggcttacgaagccgtcgaactgaccgccgcggagatgcggggaacaggagaagaatccagagaaggaggccaaaagtccttcctctacagcgaactcagcaacaaaagcaaatccggcgacaaacaaatgtcacagagagaatctaaagagttcgccgacagcatctcaaaggggctcatggtctacgccaaccaagtagcctccgacatgatggtatccctcatgaagacactcaaagtacacagctcaggaaagccaatcccagcctctgtcgtactcaagcgtgtactcctacgccacacaaaggaaatcgtcagcgacctaatagacagctgcatgaaaaaccttcacaacatcacgggcgtactaatgacggacagcgacttcgtcagtgccgtaaagcgaaacctcttcaaccaatggaaacaaaacgcaactgacatcatggaagccatgctcaaacggctagtctccgcgctcatcggcgaagagaaggaaactaaatcccagagtctgtcgtacgcatccctaaaagccggcagccacgaccccaaatgcagaaaccaatccctagagttcagcaccatgaaggcggaaatgaaagaacgcgacaaggggaaaatgaaaagcgacccctgcaaatcccttacaagcgcagaaaaagtaggagaacacatactgaaagaagggctaacaatctggaaccaaaagcaaggcaacagctgcaaggtggccacaaaagcctgctccaacaaggacgaaaaaggggagaaaataaacgcgtccactgactccctagcaaaagaccttatcgtctcagcgctcaaattaatccaataccacctaacccagcaaacaaaaggaaaagacacatgcgaagaagattgccccggatccacaatgggatacatggcccaaagcacccaatacgaaaagtgcggcggaggccaatcagcaaaagcactcagcgtcaaacagctagaaagtcacagagcacctggcccttcaacctgccagaaagaaaaccagcacctggacagccagaaaatggacatgtcaaacattgtcctaatgctaatacaaaaattactcaacgaaaaccccttcaaatgcgaggatccttgcgaaggcgagaacaaatgctcagagccccgcgcaagcaaagcagcatccatgagcaaccgcagcgacaaagcagaagaacaatgccaagaacaccaagaactcgactgcacctcaggcatgaagcaagccaacggacaattcatagacaagctagtagaatcagtcatgaaactctgcctcataatggcaaaatacagcaacgacggcgcggcactcgcagaactcgaagaacaagctgcctcggcgaacaagccgaatttccgaggcacacgctgcatacacagcggagccatgccccagaactaccaagactccctgggccacgaagtcatagtgaacaaccagtgctcaaccaacagcctccaaaaacaactccaagcagtcctacaatggatagcagccagccaattcaacgtccccatgctatacttcatgggcgacaaggacggacaactggagaaactcccccaagtcagcgccaaagccgccgaaaagggctactcagtcggtggactcctgcaagaagtcatgaagttcgccaaagaacgacaaccagacgaggcggtcggaaaagtcgcacgcaaacaactactagactggctactggccaacctatag

SEQ ID NO: 4039 - RNA, 1251 nt, synthetic construct
  misc_feature 1..1251: note = BAG61782 variant
  source 1..1251: mol_type = other RNA
atggtcgactaccacgccgccaaccaaagctaccaatacggcccctcaagcgcaggcaacggcgcaggcggcggaggctccatgggcgactacatggcccaagaagacgactgggacagagacctcctcctcgaccccgcctgggagaaacaacaacgcaaaaccttcaccgcatggtgcaacagccacctacgaaaagccggcacccaaatcgaaaacatagacgaagacttccgcgacggactaaaactcatgctcctcttggaagtcatctccggcgagcgcctaccaaagcccgaacgcggcaaaatgcgagtacacaaaataaacaacgtcaacaaagccctcgacttcatcgcctcaaaaggcgtcaagctcgtctccatcggcgccgaagaaatagtagacggcaacgccaaaatgaccctcggcatgatctggaccataatcctgcggttcgcgatacaagacatcagcgtcgaagagacctcggccaaagaaggcctcctactctggtgccaacgaaagaccgccccctacaaaaacgtcaacgtccaaaacttccacatatcatggaaagacggactagccttcaacgcactcatacaccgccacagaccagagctcatagaatacgacaaactacgaaaagacgaccccgtcacaaacctaaacaacgccttcgaagtcgccgaaaaatacctagacatccccaaaatgctcgacgccgaagacatcgtcaacacagcacgccccgacgaaaaagcaatcatgacatacgtatcctccttctaccatgccttcagcggagcccaaaaagcagaaactgcagccaaccgaatatgcaaagtcctcgccgtaaatcaagaaaacgaacaccttatggaagactacgaaaaactagcctccgacctactcgaatggatccgacgcaccataccatggctcgaagaccgcgtacctcaaaagaccatccaagaaatgcaacaaaaactcgaagacttccgagactaccgacgagtccacaaaccgcccaaagtccaagaaaaatgccaactggaaatcaacttcaacacactccaaacaaaactccgcctctcaaaccgacccgccttcatgccttcgtggcgatcaagagcatcatcctcccccaccagcacatgcgcagcatcctcccctgcccgccccatgctatggggccccggaagccgccctcgatggcgacgctcaggcgccagccccctaagataa

SEQ ID NO: 4040 - RNA, 1689 nt, synthetic construct
  misc_feature 1..1689: note = BAG65349 variant
  source 1..1689: mol_type = other RNA
atggtagactaccacgccgccaaccaaagctaccaatacggaccatcaagcgccggcaacggcgcgggcggtggagggtccatgggcgactatatggcgcaagaagatgactgggacagagacctcctcctcgatccagcctgggaaaagcaacaacgaaaaacattcaccgcatggtgcaactcacacctaagaaaagccggaacacaaatcgaaaacatagacgaagacttcagggacgggctaaaactaatgctcctcctcgaagtcatcagcggcgaacgcctgcctaaacccgaacgcggcaaaatgcgagtccacaaaattaacaacgtcaacaaagccctagacttcatcgcatccaaaggagtaaaactcgtatccatcggagccgaggaaatagtagatggcaacgccaaaatgaccctgggcatgatctggaccataatactcaggttcgcaatccaagacatctcagtcgaggaaacctcagctaaagaaggactcctactctggtgccaacgcaaaaccgcgccttacaaaaacgtaaacgtccaaaacttccacatcagctggaaagacggcctagcattcaacgcactaatacacagacaccgacctgaactaatagaatacgataagctccgtaaagacgacccagtcaccaacctcaacaacgccttcgaggtcgccgaaaaatacctcgacataccaaagatgctcgacgccgaagacatcgtcaacaccgccagacccgacgaaaaagccataatgacctacgtttctagcttctaccacgcgttctcaggcgcccaaaaagccgaaaccgccgcgaacagaatctgcaaagtcctagccgtcaaccaagaaaacgagcacctcatggaagactacgaaaaactcgccagcgacctactcgaatggatccaacgcaccataccatggctcgaagaccgcgtcccacaaaaagccatccaagaaatgcaacaaaagctagaagatttccgcgattaccgcagagtacacaaaccaccaaaagtgcaggaaaaatgccagctagaaataaacttcaacacactccaaacaaaactccgacttagcaaccggcccgcgttcatgccaagcgaaggaaaaatggtgtcggacatcaacaacggatggcagcacctcgaacaagccgaaaagggctacgaagagtggctactcaacgaaatacgccgcctagaacgactcgaccacctagcagaaaagttccgccaaaaagccagcatccacgaagcatggaccgacggcaaagaagccatgctcaaacaccgagactacgaaacagcaaccctcagcgacatcaaagcactcatccgcaaacacgaagcattcgaatccgacctagcagcccaccaagacagagtagaacagatagcagcaatagcccaggaactgaacgaactcgattactacgacagccataacgtcaataccccggacgggcttcaagaaggccccggccaaccccactcacccatacccccactatgcatctacgcaaaacactcactacaatcctcgggcgtaggaggatgggccgggagagggtggggcagactcagccccctatccctatgtggcctcgcccgacgattcccacgacccggatggggcgaccttgggcctgcactcctcgtctggtaa

SEQ ID NO: 4041 - RNA, 2736 nt, synthetic construct
  misc_feature 1..2736: note = AAH05033 variant
  source 1..2736: mol_type = other RNA
atggtcgattaccacgcagcaaaccaatcctaccagtacgggccgtcatcagccggcaacggagcagggggagggggcagtatgggcgactacatggcccaggaagatgactgggaccgcgacctacttctagaccccgcctgggaaaaacagcaacgcaagacctttaccgcatggtgcaactcccacctacgcaaagcaggcacacaaatcgaaaacatagacgaggacttccgcgacggtctcaaactgatgctcctactagaggtcatctccggagaacgcctgccgaagccggaacgagggaagatgcgcgtccacaaaataaacaatgtgaataaagccctcgacttcatcgcctcgaagggcgttaagctagtctcaatcggagcggaagaaatcgtcgacggcaacgccaaaatgactctcggcatgatctggaccatcatactcagattcgccatccaagacataagcgtagaagagacatccgccaaagaggggctcctcctatggtgccagcgcaaaacagcaccctacaaaaacgtcaacgtccaaaacttccacatatcttggaaagacggcctcgcattcaacgcactaatacacagacacagacccgagctcatagaatacgataaactaagaaaagacgatcccgtgaccaacctcaacaacgcattcgaagtggcagaaaaatacctagacatccctaaaatgctcgacgctgaagacattgtaaatacagcgcgacccgacgagaaagccataatgacatacgtatcgtcgttctaccacgccttttccggcgctcaaaaggcggaaaccgctgcgaacagaatatgtaaggtcctcgcagtaaaccaggaaaacgagcacctgatggaagattacgaaaaactcgcaagcgacctactcgaatggatacgacgcaccataccatggcttgaagaccgcgtaccacagaaaacgatccaagaaatgcaacaaaaactcgaagacttcagagactaccgcagagtccacaaacctccaaaggtccaagaaaagtgccaactcgaaatcaacttcaacaccttacaaacaaaactccgcctatccaaccgacccgcctttatgccttctgaagggaaaatggtgtccgacataaacaacggctggcaacacctagaacaggcggaaaaaggatacgaagagtggcttctcaacgaaatcagacggctcgaacgcctggaccacctagccgaaaagttccgccaaaaagccagcatccacgaagcctggaccgacgggaaagaagccatgctcaaacacagagattacgaaacagccaccctaagcgacattaaagcactcatccgcaaacacgaggccttcgaaagtgacctcgccgcccatcaagaccgagtagagcagatcgccgccatagcacaggagctaaacgaactcgactactacgacagtcacaatgtgaacacccgctgccagaaaatctgcgaccaatgggacgcactcggctcactcactcacagccggcgggaagccttggagaaaaccgaaaaacagcttgaagccatagaccagctccacctcgaatacgcaaaacgagcagccccctttaacaactggatggaatccgccatggaagacctccaagacatgttcatcgtacacaccatagaggaaatcgaaggcctaatctccgcacatgatcaattcaagagcaccctacccgacgcagatcgcgaacgagaagccatcctcgccatacacaaagaagcacaacgcatcgccgaatcaaaccacatcaaactatccggatccaacccgtacaccacagtcacaccccaaataataaacagcaaatgggaaaaagtccaacaattagtccccaagcgagaccacgcgctcctcgaagaacagtcgaagcaacaatcgaacgagcacctccgccgccaattcgcctcacaggctaacgtcgtcggcccctggatccaaaccaaaatggaagaaatcggccggatttccatcgaaatgaacggcacactagaagaccaactctcacacctcaaacaatacgaacgaagtatagtagactacaaacccaacctcgacctcctcgagcaacagcaccaactaatccaggaagcactcatcttcgacaacaaacacactaactataccatggagcacatacgagtaggctgggaacaactcctaaccactatagcgagaaccatcaacgaagtcgagaaccaaatactaacccgtgacgccaaaggaatcagccaggaacaaatgcaagagttccgcgcctccttcaaccacttcgataaagaccacgggggcgcgctcggaccagaagagttcaaagcctgcctaatatcactaggatacgacgtcgaaaacgaccgccagggcgaagccgagttcaaccgcattatgtccctggtagatccaaaccactcgggactggtcaccttccaggccttcatagatttcatgtcccgagaaaccacagacaccgacacagccgaccaagtaatcgccagcttcaaagttctagcaggagacaagaacttcatcaccgccgaagaactccgccgtgaactcccacccgaccaagcagaatactgcatagcccggatggctccctaccaggggccggacgcggtccccggcgcactagactacaaatcattctctacagccctgtacggcgaaagcgacctataa

SEQ ID NO: 4042 - RNA, 597 nt, synthetic construct
  misc_feature 1..597: note = EAX10817 variant
  source 1..597: mol_type = other RNA
atggcactccagggcataagcgtgatggagctatcgggattggccccgggcccgttctgtgccatggtcttggccgacttcggggcaagagtcgtgcgcgtggacaggcccgggagcaggtacgatgtctcgcgcttgggaaggggcaagcgctcactcgtgctcgatctcaagcaaccgcgcggggccgcagtcctgcgcaggctctgtaaaaggagcgatgtcttgctcgagccctttcgcaggggcgtgatggagaaattgcaattgggcccggaaatactccagcgcgagaacccgcgcctgatctatgccaggctctcaggctttggccagagcgggagcttttgcaggctagcgggccatgacataaactacctcgcgctctcgggcgggcgcaatagcatattcaagttctttagcgtggaaaatagcgagatcgagagcgtgggatcgacctcgcgcacggaacatgtcggatggtggagcacgttcttatacgatctacaggactcgcgctggggaatacacgggtgctggagcaatcgcacgccagtgctcagggccgcggaccagcgcacgtggacgaaagtatga

SEQ ID NO: 4043 - RNA, 597 nt, synthetic construct
  misc_feature 1..597: note = BAF85677 variant
  source 1..597: mol_type = other RNA
atggcgctccagggcataagcgtggtcgagctctcgggcctggccccgggcccgttctgtgccatggtattggcagatttcggggccagggtcgtgcgcgtggacagacccgggagcagatacgatgtctcacgcctgggcaggggaaagcgctcgctcgtgctcgatctcaagcaaccgcgcggggccgcagtcttgcgcaggctctgtaaaaggagcgatgttctgctcgagcccttccgcaggggcgtgatggagaaattacaactgggaccggaaatactccagcgcgagaacccgcgactgatctacgccaggctctcgggctttggccagagcgggagcttttgcaggctagcgggccatgacattaactatctcgcgctctcgggcgggagaaatagtatattcaagttctttagcgtggaaaatagcgagatcgaaagcgtgggctcgacctcacgcacggaacatgtagggtggtggagcacgttcttgtacgatctccaggactcgagatggggcatacacgggtgctggagcaatcgcacgcccttcctaagagcagcggaccagcgaacgtggacgaaagtgtga

SEQ ID NO: 4044 - RNA, 2763 nt, synthetic construct
  misc_feature 1..2763: note = EAX05380 variant
  source 1..2763: mol_type = other RNA
atggaagtacagctaggactaggccgagtatacccccgcccaccctcaaagacctaccgcggagctttccaaaacctgttccagagcgtcagagaggtaatacaaaaccccggcccccgccaccccgaagccgcatcggctgcacccccaggcgcctccctcctcctacttcagcaacaacaacaacagcaacaacaacaacaacaacaacaacagcagcaacaacaacaacaacaacaagagaccagcccccgccaacagcaacaacagcaaggcgaagatggcagcccacaagcgcaccgaaggggtccaaccggatacctcgtactagacgaagaacaacaacccagccaaccccaaagcgccctcgaatgtcacccagaaagaggctgcgtaccagaaccaggagcagcagttgcggcctccaaaggactacctcaacaactacccgccccacccgatgaagacgactcggccgcaccctccacccttagcctccttggccccaccttccccggcctttcatcctgcagcgccgacctcaaagacattctatcagaagcctccacgatgcaactactgcaacaacagcaacaagaagcagtctctgaaggttcatcctcaggcagagcacgagaagcatcaggcgccccgacatccagcaaggacaactacctaggcggcacctcaaccatctcagacaacgcgaaagaactatgcaaagccgtatcggtctcgatgggcctcggagtcgaagcgctcgaacacctctcccccggtgagcaactccgaggagactgcatgtacgccccactattaggggtaccaccagcggtccgacccaccccctgcgcacccctcgcagaatgcaaaggctccctcctcgacgactccgccggcaagagcaccgaagatactgcagaatactcacccttcaagggcggctacacaaaaggtctcgaaggggaatccctaggctgttcaggctccgccgcagccggaagctccggaaccctagagctaccatcaaccctctcgctctataagtccggtgccctggacgaagccgccgcctaccaaagccgcgactactacaacttcccactcgctctcgccggccctcccccacccccacctccgccccatccccatgcacgcataaaactcgaaaaccccctcgactacggaagcgcctgggccgcagcagccgcgcaatgccgttacggagacctagcgtcactacacggcgccggcgccgccggaccaggctctggctccccatctgctgcagcaagcagctcatggcacacactctttacagcagaagaaggacaactatacggaccctgtggcggaggcggcggaggcggaggaggcgggggcggaggcggcggaggtggcggcggtggaggaggcggcgaggccggcgccgtcgcaccttacggctacacacgacccccacaaggcttagcaggacaagaatccgacttcacagcacccgacgtctggtacccgggaggcatggtatctcgcgtcccctacccaagtccgacctgcgtaaaaagcgaaatgggcccctggatggacagctactccggaccatacggagatatgagacttgaaaccgcgagagatcacgtcttgccaatagactactacttccctccccagaaaacctgcctaatatgcggcgatgaagcatccggatgccactacggcgccctcacatgcggctcatgtaaagtcttctttaaacgagcagcagaaggaaaacaaaaatacctatgcgcatcccggaacgactgcaccatcgataaattccgccgcaaaaactgcccctcatgccgactacgcaaatgctacgaagcaggaatgacactcggcgcacgaaaactaaagaaactaggcaacctaaaactacaagaagaaggagaagccagctcaaccacatcccccacggaagaaacgacacaaaaattaaccgtctcccatatagaaggctatgaatgccaaccaatctttctaaatgtcctcgaagccatagaacctggcgtagtatgcgcaggacacgacaacaaccaacccgacagcttcgcagcattactgtcctccctaaacgaacttggcgaacgccagctagttcacgtggtcaagtgggctaaggcgctacctggatttcgaaatctacacgtcgatgaccaaatggcggtaatccaatactcctggatgggcctcatggtcttcgccatgggatggcgttccttcacaaacgtaaacagccgcatgctgtatttcgcacctgacctcgtcttcaacgaataccgcatgcacaaatctcggatgtactcccaatgcgttcgcatgagacacctctcccaagagttcgggtggctccaaataacaccccaagagttcctctgcatgaaagccctcttactgttctccataatccctgtggacggattaaagaaccaaaagtttttcgacgaactccgcatgaactacataaaagaacttgaccgaatcatagcctgcaaacgtaaaaatccgacctcatgctcaaggagattctaccaactaaccaagctgctcgacagcgtccaacccatcgcacgcgaactacaccaattcacctttgacctactcataaaatcgcacatggtcagcgtcgactttcctgaaatgatggccgaaataatcagcgttcaagtacccaaaatattaagtggcaaagtcaaacccatatacttccacacacaataa

SEQ ID NO: 4045 - RNA, 1239 nt, synthetic construct
  misc_feature 1..1239: note = AAH64630 variant
  source 1..1239: mol_type = other RNA
atggcccccgtcgaacacgtcgtcgccgacgccggagccttcctacgtcacgccgcactacaggacatcggtaaaaacatctacaccatcagagaagtcgtcaccgaaatccgagacaaagcaacccgacgacgcctcgcagtactcccctacgaactccgattcaaagaacccctaccagaatatgtccgactcgtcaccgaattctccaaaaaaaccggcgactacccctcactaagcgccaccgacatccaagtacttgccctaacataccaactcgaagcagaattcgtcggcgtcagccacctcaaacaagaaccacaaaaagttaaagtctcctcctccatacagcaccccgaaacacctctccacatatcaggcttccacctcccctacaaaccaaaaccaccccaagagaccgaaaaaggccactccgcctgcgagcccgaaaacctcgaattctcatcattcatgttctggcgcaaccccctccccaacatcgaccacgaactccaagaactcctcatcgaccgcggcgaagacgtaccctcagaagaagaagaagaagaagaaaacggcttcgaagaccgaaaagacgacagcgacgacgacggaggcggctggataacaccctccaacatcaaacaaatccaacaagagctcgaacaatgcgacgtccccgaagacgtacgcgtgggctgcctcaccacggacttcgccatgcaaaacgtcctactccaaatgggcctacacgttcttgcagtcaacggcatgctcatccgtgaggcccgatcctacatcctccgctgccacggatgcttcaaaaccacctccgacatgagccgagtcttctgctcacactgcggcaacaaaaccctcaaaaaagtctccgtcaccgtatccgacgacggcaccctccacatgcacttctcccgtaacccaaaagtcctcaacccccgcggcctccgatactcactaccaaccccaaaaggtggcaaatacgccatcaacccacacctaaccgaagaccaacgcttccctcagcttagactatcccaaaaggcacgccaaaaaaccaacgtattcgcccccgactacatcgccggagtatccccattcgtcgaaaacgacatctcatcccgatctgcaaccctccaagtccgagactcaaccctcggcgccggacgacgacgactcaacccaaacgcatcacgcaaaaaattcgtcaaaaaacgctga

SEQ ID NO: 4046 - RNA, 984 nt, synthetic construct
  misc_feature 1..984: note = AAH69102 variant
  source 1..984: mol_type = other RNA
atgcaaatgcccgccatgatgtcactcctcctcgtctccgtcggcctcatggaggcactccaagcgcaatcccaccccatcacacgccgcgacctattctcccaagaaatccaactcgacatggccctcgcatcattcgacgaccaatacgccggctgcgccgccgccatgaccgccgccctccctgacctaaaccacaccgaattccaagccaaccaagtctacgccgactcctggaccctcgcctcctcccaatggcaagaacgacaagcccgctggcccgaatggtccctctcccctactcgcccctctccccctcccctcggcttccgcgacgaacacggcgtcgccctcctcgcctacaccgccaattcacccctccacaaagaattcaacgcagccgtccgcgaagccggccgctcccgcgcccattacctacaccacttctccttcaaaaccctccacttcctactcaccgaagccctacaactactaggctccggacaacgccccccccgctgccaccaagtcttccgcggtgtccatggccttcgcttccgacccgcaggcccacgcgcaactgtccgcctcggcggattcgcctccgcctccctcaaacacgttgccgcccaacaattcggcgaagataccttcttcggcatctggacctgcctcggcgcccccatcaaaggctactccttcttccccggcgaagaagaagtcctaatccctccattcgaaaccttccaagtcatcaacgcctcccgcctagctcaaggccccgcccgcatctacctccgcgccctaggaaaacactccacctacaactgcgaatacatcaaagacaaaaaatgcaaatcaggcccctgtcacctcgacaactctgccatgggccaatccccactctccgccgtatggtccctactccttctcctctggttcctagtcgtacgcgcctttcccgacggccccggcctcctttaa

SEQ ID NO: 4047 - RNA, 1035 nt, synthetic construct
  misc_feature 1..1035: note = AAH09751 variant
  source 1..1035: mol_type = other RNA
atggcccaaaaagaaaactcctacccctggccctacggccgccaaactgccccctcgggcctcagcaccctcccccaacgcgtacttcgcaaagaacccgtcaccccctccgcactagtcctcatgtcccgcagcaacgtccaacccacagcagcccccggccaaaaagtcatggaaaactcctccggcacccccgacatcctaacccgccacttcaccatcgacgacttcgaaatcggccgccccctcggcaaaggcaaattcggcaacgtctatctcgcccgcgaaaaaaaatcacacttcatcgtcgccctaaaagtcttattcaaatcccaaatcgagaaagaaggcgtagaacaccaactccgccgagaaatagaaatacaagcacacctccaccaccccaacatcctccgcctctacaactacttctacgaccgccgccgcatctacctcatactagaatacgccccccgcggagaactctacaaagaactccaaaaatcatgcaccttcgacgaacaacgcaccgcaacaatcatggaagaactcgccgacgccctaatgtactgccacggcaaaaaagtaatccatcgcgacatcaaacccgaaaacctactcttaggcctaaaaggcgaactaaaaatcgccgacttcggatggtccgtccacgcaccctccctccgacgcaaaaccatgtgcggtactctcgactacctaccccccgaaatgatcgaaggccgcatgcacaacgaaaaagtcgacctctggtgcataggcgtcctctgctacgaactcctcgtcggaaacccccccttcgaatccgcctcccacaacgaaacctaccgccgcatcgtcaaagtcgacctcaaattccccgcatccgtccccatgggagcccaagacctcatctcaaaacttcttcgacacaacccatctgaacgcctccccctcgcccaagtctccgcccacccctgggtcagagccaactccagacgtgtcctccccccctcagccctacaatccgtcgcctaa

SEQ ID NO: 4048 - RNA, 360 nt, synthetic construct
  misc_feature 1..360: note = AAD48083 variant
  source 1..360: mol_type = other RNA
atgtcccgctccgtcgccctcgccgtcctcgccctcctctccctctccggcctcgaagccatccaacgcacccccaaaatccaagtctactcccgacaccccgccgaaaacggcaaatccaacttcctcaactgctacgtctccggcttccacccctccgacatcgaagtcgacctcctcaaaaacggcgaacgaatcgaaaaagtcgaacactccgacctctccttctccaaagactggtccttctacctactctactacaccgaattcacccccaccgaaaaagacgaatacgcctgccgcgtcaaccacgtcaccctctcccaacccaaaatcgtcaaatgggaccgcgacatgtaa

SEQ ID NO: 4049 - RNA, 1137 nt, synthetic construct
  misc_feature 1..1137: note = AAH28058 variant
  source 1..1137: mol_type = other RNA
atgcgcatgctcgtctccggtcgccgcgtcaagaaatggcaactaataatccaactattcgcaacctgcttcctcgcctccctaatgttcttctgggaacctatagacaaccacatcgtatcccacatgaaatcatactcctacagatacctcatcaactcctacgacttcgtaaacgacacactctcactcaaacacacctccgccggaccccgctaccaatacctcatcaaccacaaagaaaaatgccaagcccaagacgtccttctcctactcttcgtcaaaaccgcccccgaaaactacgaccgccgctccggcatccgacgaacctggggcaatgaaaactacgttcggtctcaacttaacgccaacatcaaaaccctcttcgcactcggcacacccaaccccctcgaaggcgaagaactccagcgaaaactagcctgggaagaccagcgttacaacgacataatccaacaagacttcgtcgacagcttctacaacctcaccctaaaactcctcatgcaattctcctgggcaaacacctactgcccccacgccaaattcctcatgaccgccgacgacgacatcttcatccatatgcccaacctcatcgaatacctacaatcactcgaacaaatcggtgtacaagacttctggatcggccgagtccaccgcggcgctccacccatccgagacaaatcatccaaatactacgtgtcctacgaaatgtaccaatggcccgcctaccccgactacacagccggcgccgcctacgtcatctccggcgacgtcgcagccaaagtctacgaagcctcccaaaccctcaactcctccctctacatcgacgatgtcttcatgggcctctgcgccaacaaaatcggcatagtcccccaggaccacgtcttcttctccggcgaaggcaaaaccccataccacccctgcatctacgagaaaatgatgacctcccacggccatctcgaagacctacaagatctctggaaaaatgccactgacccaaaagtcaaaaccatctccaaaggcttcttcggccaaatctactgtcgcctaatgaaaatcatcctactctgcaaaatctcctacgtcgacacctacccctgccgcgcagcctttatctaa

SEQ ID NO: 4050 - RNA, 1602 nt, synthetic construct
  misc_feature 1..1602: note = AAA35516 variant
  source 1..1602: mol_type = other RNA
atgtggctaggccgccgtgccctttgtgcccttgtactcctacttgcatgcgcatcactaggactcctatacgcaagcacccgcgacgcccccggcctccgcctacctctcgccccttgggccccaccccaatcacccagacgccccgaactacccgatctcgcccccgaaccccgctacgcccacatcccagtacgtataaaagaacaagtcgtcggactactcgcttggaacaactgctcgtgtgaatcatccggcggcggactcccactccccttccaaaagcaagtacgagccatagacctcaccaaagcctttgacccagccgaactccgagcagcatccgccacccgagaacaggagttccaagccttcctctctcgctcacaatctcccgctgaccaactcctaattgccccagccaactcccctttacagtacccactccaaggcgtcgaagtccaaccactacgctccatcctcgtccccggactctccctccaagcagcctccggtcaagaagtctaccaagtaaacttaaccgcctcactcggcacttgggacgtagcaggcgaagtcacaggcgtcacactaaccggcgaaggccaagctgaccttaccctggtctctcccggcctagatcaactcaaccgacaactacaactcgtcacctacagctccagatcctaccaaaccaacaccgccgacacggtaagattctccacagaaggccacgaagccgcattcacaatcagaataagacacccacccaacccccgcctctacccacccggctcactaccccagggagcgcaatacaatatctctgcactcgtcaccatagctacgaaaacatttctacgctacgaccgacttcgcgccctaatcacatcaatacgccgcttctaccccacagtaaccgtagtcatcgccgatgacagcgacaaacccgaacgcgtctcaggaccctacgtagaacactacctcatgccattcggcaaaggctggttcgctggacgtaacctagcagtctcccaagtcaccacaaaatacgtactgtgggtagacgacgacttcgtcttcactgcccgcacacgcctcgaacgcctagtagacgtactcgaacgaaccccacttgacctcgtcggcggcgccgtacgcgagatatccggcttcgccactacctatcgccagctcctctcagtagaacccggcgctccaggactaggcaactgcctccgccaaagacgaggcttccaccacgagctagtcggcttccccggatgcgtcgtaacagacggcgtagtcaatttcttcctcgcccgtaccgacaaagtacgagaagtcggatttgacccccgcctatcccgcgtcgcacacctcgagttcttcctagacggcctcggatcactacgagtaggctcatgctccgacgtggtcgtagaccacgcctccaaattaaaactaccctggacaagcagagacgccggtgcggaaacctacgcccgatacagatacccaggctcactcgacgaatcacaaatggctaaacaccgactcctattcttcaaacaccgcttacaatgtatgacatcccaataa

SEQ ID NO: 4051 - RNA, 849 nt, synthetic construct
  misc_feature 1..849: note = AAH74729 variant
  source 1..849: mol_type = other RNA
atggcctccctcggccaaatcctcttctggtccatcatctcaatcatcatcatcctcgcaggcgccatcgccctcataatcggcttcggaatctcgggaagacactcgatcaccgtcaccaccgtagcatcggccggaaacatcggtgaggacggcatcctgagctgcaccttcgaaccagacatcaaactcagcgacatcgtcatccaatggctcaaagaaggcgtcctcggcctcgtgcacgagttcaaagaaggaaaagacgaactgagcgaacaagacgaaatgttccgaggccgaaccgcagtattcgcagaccaagtaatcgtaggcaacgcctcactccgcctcaaaaacgtgcaactcaccgacgcagggacctacaaatgctacatcatcacctccaaaggcaagggtaacgccaacctagaatacaaaaccggcgccttcagcatgcccgaagtcaacgtcgactacaacgcctcgagcgaaaccctccgctgcgaagcccccagatggttcccccaacccacagtcgtctgggccagccaagtcgaccaaggagccaacttctccgaagttagcaacacctcattcgaactcaacagcgagaacgtaaccatgaaagtagtctcagtcctatacaacgtaacgatcaacaacacctactcatgcatgatcgaaaacgacatcgccaaagccaccggcgacatcaaagtcaccgaatccgaaatcaaacgccgaagccaccttcaactcctaaactcaaaagccagcctctgcgtaagctcattcttcgccataagctgggccctcctaccactctcaccctacctcatgctcaaataa

SEQ ID NO: 4052 - RNA, 132 nt, synthetic construct
  misc_feature 1..132: note = AAC50123 variant
  source 1..132: mol_type = other RNA
atggccgcccgcgccgtcttcctcgccctctccgcccaactcctccaagcccgcctcatgaaagaagaatcccccgtcgtctcctggcgcctcgaacccgaagacggcaccgccctctgcttcatcttctaa

SEQ ID NO: 4053 - RNA, 1158 nt, synthetic construct
  misc_feature 1..1158: note = AAN40694 variant
  source 1..1158: mol_type = other RNA
atggccgccgcactcttcgtcctcctcggattcgcactcctaggtacacacggagcctccggagcagccggattcgtccaagcacccctcagccaacaacgctgggtcggcgggagcgtagaactacactgcgaagcagtcggaagccccgtcccagaaatacaatggtggttcgaaggacaaggaccaaacgatacctgctcccaactatgggacggcgccagactcgaccgcgtacacatccacgccacataccaccaacacgccgcaagcacaatcagcatcgacaccctagtcgaagaagacacaggcacatacgagtgccgcgcaagcaacgacccagaccgcaaccacctcacacgtgcacccagagtaaaatgggtccgcgcccaagccgtcgtactcgtactagaacccggcaccgtcttcacaaccgtagaagacctcggatccaaaatcctcctcacatgctcactcaacgactctgccacagaagtgaccggacaccgctggctgaaaggcggcgtcgtcctcaaagaagacgcactcccaggccagaaaacagagttcaaagtcgactcagacgaccaatggggagaatactcatgcgtattcctacccgaaccaatgggcacggccaacatccaactccacggcccaccccgcgtaaaagcagtgaaatcatcagaacacataaacgaaggcgaaaccgccatgctagtatgcaaatcggaatccgtcccacccgtcaccgactgggcatggtacaaaatcacagacagcgaagacaaagcactcatgaacggatcagaatcacgcttcttcgtaagctcatcccaagggcgctccgagctccacatcgaaaacctaaacatggaagcagacccaggccaataccgatgcaacggaaccagctcaaaaggcagcgaccaagcaatcataacactccgcgtacgatcgcacttagccgcactctggccattcctcggcatcgtagccgaggtcctagtactggtaacaataatattcatatacgaaaaacgccgaaaaccagaagacgtactcgacgacgacgacgccggctccgcacccctaaaaagctcgggccaacaccagaacgacaaagggaaaaacgtaagacaacgaaactcgagctaa

SEQ ID NO: 4054 - RNA, 720 nt, synthetic construct
  misc_feature 1..720: note = ABX60202 variant
  source 1..720: mol_type = other RNA
atggcccacgccggccgcaccggttacgacaaccgcgaaatcgtaatgaaatacatccactacaaactatcccaacgcggctacgaatgggacgccggcgacgtcggcgccgccccccccggcgccgcccccgcccccggaatcttctcctcccaacccggccacacaccccaccccgcagcctcccgcgaccccgtagcccgaacctccccactccaaacccccgccgccccaggcgccgccgccggccccgcactatcacccgtcccccccgtcgtccacctaacactccgacaagccggcgacgacttctcccgccgctaccgacgagacttcgccgaaatgtcctcccaactccacctcacccccttcaccgcccgcggccgcttcgcaaccgtcgtcgaagaactcttccgcgacggcgtaaactggggccgaatcgtcgccttcttcgaattcggaggcgtcatgtgcgtcgaatcagtcaaccgcgaaatgtcacccctcgtagacaacatcgccctatggatgaccgaatacctcaaccgccacctccacacctggatccaagacaacggcggctgggacgccttcgtcgaactctacggcccctccatgcgccccctcttcgacttctcatggctctccttaaaaaccctcctctccctcgccctcgtcggcgcctgcatcacactcggcgcatacctctcccacaaataa

SEQ ID NO: 4055 - RNA, 1290 nt, synthetic construct
  misc_feature 1..1290: note = ABX82700 variant
  source 1..1290: mol_type = other RNA
atggtcgaccccgtaggcttcgccgaggcatggaaagcccaattccccgacagcgaacccccgcgcatggaattacgctcagtcggagacatagaacaagaactcgaaagatgcaaagcctcaataagaagactggaacaagaagtaaaccaggaaaggttccgaatgatataccttcaaacactcctggccaaagaaaaaaaatcttacgacagacaaagatggggattccgacgagccgcgcaagcgccagacggcgcgtccgaaccccgagccagcgccagccgcccacagccggccccggcagacggcgcagacccacccccggctgaggaaccagaagcacggccagacggggaaggaagcccaggtaaagccagacccggaacagcgagacgacccggagcagctgcctcaggcgagagagacgacagaggcccacccgcatcagtagcagcactaagaagcaacttcgaacgaataagaaaaggccacggccagccaggggccgacgccgaaaaaccattctacgtaaacgtcgaattccaccacgaacgaggactagtaaaagtaaacgacaaagaggtatcagacaggatatcatccttaggctcgcaagcaatgcaaatggaacgaaaaaaatcacaacacggcgcaggctcgagcgtaggtgacgcctcacgaccaccctacagaggacgatcgagcgaaagctcatgcggagtagacggcgactacgaagacgcggaactaaacccacgcttcctcaaggacaacctcatagacgcaaacggaggctcaagacccccctggcccccactagaataccaaccctatcaatcaatctacgtcgggggaatgatggagggggaaggcaaaggaccactcctacgaagccaatcaacatcggaacaagaaaaacgcctaacctggccaagaagatcatactcacccaggagcttcgaagactgcgggggaggatacactcccgactgttcgagcaacgaaaatctaacaagttcggaagaggacttcagctcgggacagagctcccgcgtcagcccaagcccgacaacataccgaatgttccgcgacaaatcccgctcacccagccaaaacagccagcaatcatttgacagctcaagtccccccacaccccagtgccacaaaagacacagacactgccccgtagtcgtatccgaggcaacaatcgtaggagtaagaaaaaccggacaaatatggccaaacgacggcgaaggagcattccacggagacgccgacggcggctaa

SEQ ID NO: 4056 - RNA, 1665 nt, synthetic construct
  misc_feature 1..1665: note = ABX82703 variant
  source 1..1665: mol_type = other RNA
atggtcgaccccgtaggctttgctgaagcctggaaagcccaattccccgactcagaacccccacgaatggaactcagatcagtcggcgacatcgaacaggaactagaacgatgcaaagcctccatacggagactagaacaagaagtgaaccaagaaagattcagaatgatctacctacaaacactcctcgccaaagaaaagaaatcatatgaccgacaacgatggggcttccgcagagcagcccaagcccccgacggcgcgagcgaacccagggcaagcgcatcccgcccacaaccagccccagccgacggcgcagatccacccccagcagaagaaccagaagcacgaccggacggagaaggcagccccggcaaagcccgtcccggaaccgcaagaagaccaggagcagcagcctcaggagaacgcgacgacagaggcccacccgcatcagtagcagcactaagaagcaactttgagcgaatccgcaaagggcacggacaacccggcgccgacgcagaaaaacccttctacgtcaacgtggagttccaccacgaacggggactcgtcaaagtcaatgacaaagaagtatcagaccgaatcagcagcctaggctcgcaagcaatgcaaatggaacgaaagaaatcccaacacggcgccggctcaagcgtaggcgacgcatcccgcccaccctacagaggcagatcatccgaaagctcatgcggggtcgacggcgactacgaagacgccgaactcaacccgcgcttcctaaaagacaacctcatagacgcaaacggaggctcccgacccccatggccacccctagaataccaaccataccaatcaatctacgtcggcggaatgatggaaggagaaggcaaaggtcccctcctacgctcacaaagcacgtcggaacaagaaaaacgcctcacatggcccagacgctcctactcaccccggtccttcgaagactgcggcggcggatacaccccagactgctccagcaacgaaaacctcaccagcagcgaagaagacttcagctcgggccaatcaagccgagttagcccttctccaacaacctaccgaatgttccgcgacaaatcacgctcaccctcccagaacagccagcaatcattcgacagcagcagcccgcctacgccccaatgccacaaaagacaccgacactgccccgtcgtcgtaagcgaagcaacaattgtaggagtacgaaaaacaggccagatatggccgaacgacggcgagggagcattccacggcgacgccgacggctcattcggaacaccgcccggctacggatgcgcagccgaccgagcagaagaacaaaggcgccaccaagacggcctgccctacatagacgattcaccctcgagctctccccatctctcctccaaaggcagaggatcacgagacgccctcgtctcaggcgccctagaaagcacaaaagcgagcgaactcgacctcgaaaaaggcctcgaaatgagaaaatgggtcctaagcgggatcctagcctccgaagaaacctacctatcacacctagaagcacttctacttccaatgaaaccactaaaagcagccgcaaccaccagccaaccagtactcacgagccaacaaatagaaacaatcttcttcaaggtccccgacctactctag

SEQ ID NO: 4057 - RNA, 1545 nt, synthetic construct
  misc_feature 1..1545: note = ABX82704 variant
  source 1..1545: mol_type = other RNA
atggtagaccccgtgggattcgcagaagcatggaaagcgcaattcccagacagcgaaccacccagaatggaactacgctcagtcggagacatagaacaagaactagaaaggtgcaaagcctcaatacggcgcttagaacaagaggtcaatcaagaaagattcaggatgatatacctacaaacgctactagccaaagaaaagaaatcatacgaccgccaacgatggggcttccgccgagccgcgcaagcgccagacggcgcgagcgagcccagagcatcagcatcgcgaccacaaccagcaccggccgacggcgcggacccgccaccggccgaagaaccagaagcacgcccagacggagaagggagccccggaaaagccaggccagggaccgcaagacgacccggagcagcggcatcaggagaacgcgacgacagaggcccgccagcgagcgtcgccgcactaagaagcaacttcgaacgaatcagaaaaggccacggccaaccaggagccgacgccgaaaaaccattctacgtcaacgtagagttccaccacgaacgcggccttgtaaaagtaaacgacaaagaagtcagcgaccgcatatccagcctaggaagccaagccatgcagatggagcgaaagaaatcacaacacggcgcgggatcgagtgtgggcgacgccagcagaccaccctatcgaggaagatcaagcgaaagttcgtgcggggtagacggagactacgaagacgctgaattaaacccaagattcctaaaagacaacctaatagacgcgaacggcgggagtcgaccgccctggccacccctcgagtaccaaccctaccagtcgatatacgtaggagggatgatggaaggggagggaaaaggcccactcctacgcagtcaatcgacctcagaacaagagaaaagactgacatggccaaggcgatcatactcaccaagatccttcgaagactgcggaggcgggtacacgccagactgcagcagcaacgaaaacttaacaagcagcgaagaagacttcagctcgggccaaagcagccgagtgtcgccctcaccgacaacatacagaatgttccgagacaaatcgcgctcaccatcacaaaacagccaacaatcattcgacagctcatcaccaccaacaccccaatgccacaaaagacacagacactgcccagtggtcgtgagcgaagccacaatagttggagtgagaaaaaccgggcaaatatggccgaacgacggcgagggcgcgttccacggcgacgccgacggatccttcggaacgccacccggatacggatgcgcagcagaccgcgcagaagaacaaagacgacaccaagatgggctgccctacatagacgacagccccagtagctcaccccacctgtcaagtaaaggcagaggctcaagagatgccctagtatccggtgcactcgaaagcacgaaagcaagcgaactcgacctagagaaaggactcgagatgaggaaatgggtcctgtccggaatcctagcaagcgaagaaatcacgctataa

SEQ ID NO: 4058 - RNA, 1326 nt, synthetic construct
  misc_feature 1..1326: note = ABX82705 variant
  source 1..1326: mol_type = other RNA
atggtcgacccagtaggcttcgccgaggcttggaaagcgcaattcccagacagcgaaccaccccgaatggaactacgctcagtaggggacatagaacaagaactagaaagatgcaaggcatcgatcagacgcctagaacaagaagtaaaccaagaaaggttcagaatgatatacctgcaaacactactggcaaaagaaaagaaatcgtacgaccgccaacgctggggcttcagacgcgccgcacaagcacccgatggcgcaagcgaaccaagagcctccgcctcaagaccacaaccagcccccgccgacggagctgacccgccaccggccgaagaacccgaagcgcgcccagacggagaaggaagcccaggcaaagcaaggcccgggaccgccagaagacccggagcagcggcctcaggcgaacgagatgaccgcggaccaccggcaagcgtggccgcactcaggagcaacttcgaacgcataagaaaaggccacggtcaaccaggagccgacgcagaaaaacccttctatgtaaacgtagagttccaccacgaaagaggactcgtaaaagtgaacgacaaagaagtctcagacaggatctcatccttaggctcgcaagcgatgcaaatggaacgaaagaaatcacaacacggcgcgggctcgagcgtgggagacgcctcaagaccaccctaccgaggacgctcgagcgaatcctcatgcggagtcgacggcgactacgaagacgcagaactaaacccacgctttctcaaagacaatctcatagacgcaaacggaggctcccgcccaccatggccaccactagaataccagccctatcaatcgatctacgtaggaggaatgatggaaggcgaaggcaagggccccctattacgatcacaatcgacctcagaacaagagaaaagactaacatggccccggcgatcatactcgcccagatcgttcgaagactgcgggggcggctacaccccagactgcagcagcaacgaaaacctaacaagttcagaagaagacttcagctcaggccaaagttcgcgagtctccccaagtccaaccacctaccgaatgttccgagacaaatcgcgatcaccatcacaaaacagccaacagagcttcgacagctcaagcccacccacgccccaatgccacaaaaggcaccgacactgcccagtggtagtcagtgaagccaccatcgtgggagtgcgaaaaacaggacaaatatggccgaacgacggcgaaggagctttccacggcgacgcagacggatcactagaactccaaggcaaaccctcgcgctggacacaataa

SEQ ID NO: 4059 - RNA, 1575 nt, synthetic construct
  misc_feature 1..1575: note = ABX82706 variant
  source 1..1575: mol_type = other RNA
atggtagaccccgtcggattcgccgaggcctggaaagcccaattccccgacagcgaaccaccaagaatggaacttcgaagtgtcggagacatagaacaggaactggaaaggtgcaaagccagcatcagacgcctagaacaagaagtcaaccaggaaagattcagaatgatatacttacaaacactcctagccaaagaaaagaaatcctacgaccgacaaagatggggattcagaagggccgcacaagcacccgacggcgcaagcgaaccaagagcctcagcctcgcgaccacaaccggccccagccgacggcgcagacccaccccctgccgaggaaccagaagcgcgccccgacggagaaggaagcccgggcaaagctagacccggtaccgcgcgccgccccggagcagcagcatcgggagagcgcgacgaccgaggaccgccagcgagcgtcgcagcgctccgaagcaacttcgaacgaatccgaaaaggccatggccaacccggggccgatgcagagaaaccgttctacgtcaacgtcgagtttcaccacgaaagaggcctagtaaaagtaaacgacaaagaagtctcagacagaatctccagcctgggatcgcaagccatgcaaatggagcggaagaaatcccaacacggcgcgggctcgtccgtaggagacgcttcacgaccaccctatcgcggaagatccagcgaaagctcatgcggggtcgacggcgactacgaggacgcagagctgaacccacgtttcctcaaagataacctaatagacgcgaacggaggctcacgaccaccctggcccccactcgagtaccaaccctaccaatcgatctacgtaggaggaatgatggagggagagggtaaaggaccactattacgctcacaatcaacctccgaacaagagaaaagactaacatggcccaggcgctcatactcaccccgcagcttcgaagactgcggaggcggatacacacccgactgctcaagcaatgaaaacttaacaagctcagaagaagacttcagctccggccaatccagccgagtaagcccaagcccgactacataccgaatgttccgagacaaatcacgatcaccctcacaaaacagccaacaatcattcgacagctcgagcccgcccacgccccaatgtcacaaaagacacagacactgcccagtagtcgtaagcgaagccacaatcgtcggcgtaagaaagacaggacaaatatggcccaacgacggagaaggcgcgttccatggcgacgcagacgggtcattcgggacaccacccggatacgggtgcgctgccgacagagcagaagaacaaagacgacaccaagacggcctaccctatatcgacgactcaccatcaagctcaccccacctctcatcaaagggcagaggatcacgagacgccctggtatcaggtgcacttgaaagcacaaaagcaagtgaactcgacctcgaaaaaggcctcgaaatgagaaaatgggacccagtcaaaatgacacccacgttctcattacactgcatgatattatggcccgtagagatcacactctaa

SEQ ID NO: 4060 - RNA, 1398 nt, synthetic construct
  misc_feature 1..1398: note = ABX82707 variant
  source 1..1398: mol_type = other RNA
atggtagaccccgtgggatttgccgaggcctggaaggcccaattccccgacagcgaacccccacgcatggaactacgctcagtaggggacatagaacaagaactagaacgctgcaaagcctcgatcaggcgcctcgaacaagaagtgaaccaagaaagattcaggatgatatacctgcaaacactcctagcaaaagaaaagaaatcatacgacagacaacgctggggcttcagacgagcagcacaagcgcccgacggagcgagcgaacccagagcatcggcatcgagaccgcaacctgcccccgcagacggcgccgacccacccccagccgaagaaccagaagcacgcccggacggggaaggaagcccgggcaaagccagacccggaaccgcacgacgacccggcgccgcggcctcgggcgaaagagacgacagaggccctccagcgagcgtagccgcactccgcagcaatttcgaacgcatacgaaagggacacggacagcccggagccgatgccgaaaaaccattctacgtaaacgtagagttccaccacgaacgcggactcgtcaaagttaacgacaaagaagtctcggacaggatctctagcttaggatcacaagcaatgcaaatggaacgaaagaaatcacaacacggcgcaggctcatctgtcggcgacgcatcccgaccgccctacagaggacgctccagcgaaagctcgtgcggagtcgatggcgactacgaagacgcagaactgaacccacgcttcctcaaagacaacctaatcgacgcgaacggcggctcacgccctccctggcccccactagaataccaaccataccaatcaatctacgtcggcggtatgatggaaggcgaaggcaaaggcccgctactccgctcacaatcgacctcagaacaggaaaaacgcctgacatggcccagacgctcatactcgcccagatcattcgaagactgcgggggagggtacacaccagattgcagcagcaacgaaaacctcacgagctcagaagaagacttcagctctggccaaagctcacgcgttagcccgagcccaacaacataccgaatgtttcgtgacaaatcacgctcaccctcacaaaacagccagcaatcgttcgacagctcaagcccacccacaccccaatgccacaaaagacacagacactgcccagtggtcgtaagcgaagccacaatcgtaggcgttcgcaagacagggcaaatctggccgaacgacggagaaggcgcattccacggagaacaccccggcgcagccgaggaagtattccaaaaacttctcccggacatacgcggagcagccgacgcagaccaactcgtatgcgaaacgccagactgtccccaacactctgcagaccaccagtaa

SEQ ID NO: 4061 - RNA, 1377 nt, synthetic construct
  misc_feature 1..1377: note = ABX82709 variant
  source 1..1377: mol_type = other RNA
atggtcgatcccgtaggcttcgcagaagcctggaaagcacaattccccgacagtgaacccccgcgcatggaactacgttcggtcggggacatcgaacaagaactggaaagatgcaaagcctcgatcaggagactagaacaagaagtaaaccaggaaaggttcagaatgatatacctacagactctactggccaaagaaaagaaatcgtacgacagacaacgctggggcttccgcagagcagcccaagcaccggatggagcgtccgaacctagggcaagtgcctcgcgcccgcaaccggccccagccgacggcgcggacccgcccccagcagaggaaccggaagcacgaccagacggagaagggagcccaggcaaagcccgacccggaaccgcacgtagacccggggcagcagcaagcggcgaacgagacgaccgaggcccgccagcaagcgtggccgcgctcagaagcaactttgagcgaatacgcaagggacacggacaacctggggccgacgccgagaaaccattctacgtcaacgtcgagttccaccacgaacgaggcctagtaaaagtgaacgataaagaagtcagcgacaggatatcgagcctgggatcacaagcgatgcaaatggaaagaaagaaatcacaacacggagcgggcagtagcgtaggcgatgcctcacgcccaccctaccgcgggcgatcaagcgaaagttcatgcggggtcgacggagactacgaagacgcagaactaaacccgcgcttcctcaaagacaatctcatagatgcaaacggaggctcacgaccaccctggcccccactcgaataccaaccctaccaatctatctacgtagggggcatgatggaaggcgaaggcaagggcccgctcctcagaagccaatccacctcggagcaagaaaaacgcctaacctggccaaggcgatcatactctccccgcagctttgaagactgcggaggcggatacacacccgactgctcgtccaacgaaaacctaacgtcctcggaagaagacttcagctcaggacaaagctcaagagtgagcccaagcccaaccacctacaggatgttcagagacaaatcacgctcaccctcccaaaacagccagcaatcattcgacagctcgagtcctcccacaccccaatgccacaaaaggcacagacactgccccgtagtagtgtccgaagccacaatagtaggagtacgcaagaccgggcaaatatggccaaacgacggcgaaggcgccttccacggcgacgccgacggatcattcgggaccccacccggatactgctgcctgtgcctacccgcatggccgtccgggtgcacggcagcaaccgcgcgcgtgaccagaagctaa

SEQ ID NO: 4062 - RNA, 1365 nt, synthetic construct
  misc_feature 1..1365: note = ABX82710 variant
  source 1..1365: mol_type = other RNA
atggtagaccccgtaggattcgccgaggcttggaaagctcaattccccgacagcgaacccccaagaatggaattacgatcagtaggagacatagaacaagaactggaaagatgcaaagccagcataaggcgactcgaacaagaagtaaaccaagaaagattcagaatgatatacctgcagaccctcctagccaaagaaaagaaatcctacgatcgccagcgctggggcttccgcagagccgcgcaagcacccgacggagcaagcgaaccccgagccagcgcctccagaccccaaccagccccagccgacggcgcagacccgcccccagccgaagaaccggaagccagacccgacggagaaggaagcccgggaaaagcccgaccaggaaccgccagaagaccaggagccgcggcctcaggcgaacgcgacgaccgaggcccaccagccagtgtagcggcactcagatcaaacttcgaaagaataagaaaaggacacggtcaaccaggagcagacgccgaaaaacccttctacgtcaacgtcgagttccaccacgaacgcggactcgtaaaagtaaacgacaaagaagtatccgaccgaatctcaagcctaggatcacaagcgatgcaaatggaaagaaagaaatcgcaacacggagcaggatccagcgttggcgacgccagccgacccccatacagaggccgctcaagcgagagcagctgcggagtcgacggtgactacgaagacgcagaactgaacccacgattcctcaaagacaacctcatagacgcgaacgggggctcgcgcccaccctggcccccactagaataccaaccataccagtcgatctacgtcggcggcatgatggaaggagaaggaaaagggccactcctccgctcccaaagcacatcggaacaagaaaaacgcctaacctggccaaggagatcatactcgcccagatccttcgaagactgcggaggcggctacacgccagactgctcaagcaacgaaaacctaacctcctcagaagaagatttcagctccggacagagctcgcgcgtatccccatccccgaccacatacagaatgttccgagacaaatcaagatcaccttcccaaaacagtcaacagagcttcgacagcagcagcccacccactccccaatgccacaaacggcaccgacactgccccgtcgtcgttagcgaggccaccatagtcggcgtaagaaaaacaggacaaatatggccaaacgacggcgaaggagcattccacggagacgccgacggctcattcggaaccccacccggatacgggtgcgcagcaggccgaccaccccacctaacagaactcccagtccaacaccaatag

SEQ ID NO: 4063 - RNA, 1404 nt, synthetic construct
  misc_feature 1..1404: note = ABX82711 variant
  source 1..1404: mol_type = other RNA
atggtggaccccgtaggcttcgccgaagcgtggaaagcccaattcccagacagcgaacccccaagaatggaactaagaagcgtcggcgacatagaacaagaactagaacgctgtaaagcctcaatacgacgactagaacaagaagtaaaccaagaacgattccgaatgatatacctacaaacactcttagccaaagaaaagaaaagctacgaccgccagcgatggggcttccgaagggccgcacaagcccccgacggagccagcgaaccccgagcctcagccagccgcccccaacccgcccccgcagacggagccgacccaccaccagccgaagaacccgaagcaagaccagacggcgaaggaagccccggaaaagcccgacccggaacagcacgcagaccaggagccgcggcaagcggagaaagagacgaccgcggcccacccgcaagcgtagcagccctgcgatccaacttcgaacgaatccgaaaaggccacggccaacccggagcagacgccgaaaaacccttctacgtcaacgtcgagttccaccacgaacgaggcctagtaaaagtcaacgacaaagaagtcagcgacagaataagcagcctgggatcacaagcaatgcaaatggaacgcaagaaatcccaacacggcgccggctcatccgtaggagacgcatccagaccaccctatagaggacgcagctcagaaagctcatgcggagtagacggcgattacgaagacgcagaactaaacccccgcttcttaaaagacaacctaatcgacgcaaacggaggctcacgacccccatggccgccactagaataccaaccttaccaatccatctacgtaggcggcatgatggaaggagaaggcaaagggcccctacttagatcgcagtccacaagtgaacaagagaaaagactcacctggccaagacggagctattcacccagatccttcgaagactgcgggggcggatacacaccagactgctccagcaacgaaaacctcacaagcagcgaagaagacttcagctcagggcaatcatcacgagtatccccaagccctacaacctaccgaatgttcagggacaaatcaaggagccccagccaaaactcccaacaatcgttcgactcatcaagcccaccaacaccacaatgccacaaacgacaccgacactgcccagtagtagtaagcgaagcaacaatagtgggagtacgcaaaaccggccaaatatggccaaacgacggcgaaggcgcattccacggcgacgccgtcctcaaaaccgaagtcccacaccagggcgtaagacgagccagactctcactcgaagcactgggagaagaccccagcttcctattccccgccagcgacggcccaagacacagctccacctggtaa

SEQ ID NO: 4064 - RNA, 1542 nt, synthetic construct
  misc_feature 1..1542: note = ABX82712 variant
  source 1..1542: mol_type = other RNA
atggtagacccagtaggcttcgcagaagcctggaaagcacaattcccagacagcgagccaccccgcatggaactcagatcagtcggagacatcgaacaagaacttgaaagatgtaaggcatcaataagacgcctcgaacaagaagtaaaccaagaaagattcagaatgatctacctccaaacactcctagccaaagaaaagaaatcgtacgaccgccaacgatggggcttccgacgcgcagcacaagcacccgacggagcatccgagccccgcgcctcagcctcacgaccacaacccgccccggcagacggagcagacccaccacccgccgaagaacccgaagccagacccgacggagaaggaagccccggaaaagccagaccaggaacagcacgtcgacccggagcagcagcatcaggagaaagagacgatcgcggcccacccgcatccgtcgccgccctccgttccaacttcgaacggatcagaaaaggccacggccagcccggcgcagacgcagaaaaacccttctacgtcaacgtagagttccaccacgaacgcggactcgtgaaagtcaacgacaaagaagtctccgaccgaatatccagcctaggctcacaagccatgcaaatggaacgaaagaaatcacaacacggcgcaggctcctccgtcggcgacgcctcccggccaccctaccgcggccgttcatcagaatcctcatgcggagtcgacggcgactacgaagacgcagaactaaacccgagattcctcaaagacaacctaatcgacgccaacggaggctcccgaccaccctggcccccactcgaataccaaccctaccaatcgatctacgtcggaggcatgatggagggcgaaggcaaaggaccccttctgcgctcccagagcacttcagaacaagaaaaacgcctaacctggcccagacgatcatacagccctcgttccttcgaagactgcgggggaggctacacccccgactgctcaagcaacgaaaacctcaccagctccgaagaagacttcagctcaggccaaagctcacgagtaagcccgagcccgacaacctacagaatgttccgcgacaaatcacgctccccatcccaaaactctcaacagagcttcgatagctccagcccaccaacaccccaatgccataaacgccacagacactgcccagtcgtcgtcagcgaagcaaccatagtaggcgtacgaaaaaccggccaaatatggccaaacgacggcgagggagcattccacggcgacgccgacggctccttcgggacaccacccggatacggctgcgcggccgaccgagccgaagaacaacgacgccaccaagacggactcccctacatagacgactccccctcgagctcaccccacctatcatccaaaggaagaggctcccgcgacgccctggtttcaggcgcactcgaaagcacaaaagcctcagaactcgaccccgtcaaaatgacacccacattctccctacactgcatgatactctggcccgtagaaatcaccttataa

SEQ ID NO: 4065 - RNA, 1221 nt, synthetic construct
  misc_feature 1..1221: note = ABX82714 variant
  source 1..1221: mol_type = other RNA
atggtagacccagtcggattcgccgaagcctggaaggcacaattcccagacagcgaaccaccgaggatggaactaaggtcagtaggagacatcgaacaagagctagaaagatgcaaagccagcatacgacgcctcgagcaagaggtaaaccaagagcgattccgaatgatctacttacaaaccctgctagcaaaagaaaagaaatcatacgacagacaaagatggggcttcaggagagcagcgcaagcaccagacggcgcctcagaaccaagagcctccgcaagcagaccccaaccagccccagcagacggagcagacccaccacccgcagaagaacccgaagcaagacccgacggagagggaagccccggcaaagcccgaccaggaacggccagacgacccggagcagcagccagcggcgaacgagacgaccgaggcccaccagcaagcgtggccgcactacgcagtaacttcgaacgaatccgaaaaggacacgggcaaccaggagccgacgcagaaaaacccttctacgtaaacgtagagttccaccacgaaagaggactcgtaaaagtaaatgacaaagaagtaagcgacagaatatcctcactcggatcacaagcaatgcaaatggaaagaaagaaaagccaacacggggccggctcaagcgtaggagacgccagccgaccgccctacagaggacgaagcagcgaatcctcctgcggcgtcgacggagactacgaagacgcagaactaaacccacgcttcctcaaagacaacctaatagatgccaacggaggcagcagacccccatggccacccctagaataccaaccataccaaagcatatacgtaggaggaatgatggaaggagaaggaaaaggaccgctactcagaagccaaagcaccagcgaacaagaaaaacggctgacctggcccagacgctcatacagcccacgatccttcgaagattgcggcggcggatacacaccagactgcagcagcaacgagaacctaacaagcagcgaagaagacttcagcagcggacaaagcagcagagtatcaccaagcccgacaacataccggatgttcagagacaaaagcagaagcccaagccaaaatagccaacagagcttcgacagcagctcacccccaacaccccaatgccacaaacgacaccgccactgcccagtagtcgtaagcgaagcaaccagcggacaataa

SEQ ID NO: 4066 - RNA, 2346 nt, synthetic construct
  misc_feature 1..2346: note = AAH58926 variant
  source 1..2346: mol_type = other RNA
atggccacccaagccgacctgatggaactcgacatggccatggaacccgaccgaaaagcagccgtctcacactggcaacaacaatcgtacctcgactcaggcattcacagcggagccacaaccaccgcacccagcctcagcggaaaaggtaaccccgaagaagaagacgtcgacacatcacaagttctctacgaatgggaacaaggtttctcccaatccttcacccaggaacaggtagccgacatagacggccaatacgcaatgacacgggcccaacgagtccgcgctgccatgttccccgaaacactcgacgaaggcatgcaaatcccatcaacccaattcgacgctgcccacccaacaaacgtccaacgcctggcagaaccatcacaaatgctcaaacacgcagtcgtaaaccttataaactaccaagacgacgctgaacttgcgacccgagccatccccgaactcaccaaactactaaatgacgaagaccaagtcgtagtaaacaaagccgcagtgatggtccaccaactctccaaaaaggaagcctcccgacacgcaatcatgcgcagcccacaaatggtctccgctatagtccgaactatgcagaacaccaatgacgtagagaccgcgcgatgcaccgcgggaacgctccataacctatcacaccatagggaaggactcctcgctatattcaaatccggcggaatacccgcactcgtcaagatgctaggatcccccgtcgactctgtcctgttctacgccatcaccaccctccacaacctcctactccatcaagaaggagcaaaaatggccgtcagactcgccggcggactacagaaaatggtcgccctgctcaacaaaacgaacgtcaaattcctcgctataaccaccgactgcttacaaatcctcgcctacggtaaccaagaatcaaaactaatcatcctcgccagcgggggcccccaagccctagtaaatatcatgcgcacatacacttacgaaaaactactatggacaacctcgagggtccttaaggtcctctccgtctgctcatcaaacaaaccggccatcgtcgaagcaggaggaatgcaagccctcggcctccacctcaccgacccatctcaacgcctagtccaaaactgcctttggacactacgaaacctctcagacgccgccacaaaacaagaaggaatggaaggcctccttggcactctagtacaactcctcggctccgacgacataaacgtcgtcacctgtgcagcaggtatcctatcaaacctaacctgcaacaactacaaaaacaaaatgatggtctgccaagtcgggggaatcgaagcactcgtccgcacagtactccgggcgggggaccgcgaggatatcaccgaaccggccatctgtgccctccggcacctaacctccagacaccaagaagcagagatggcacaaaacgcggtgcgactccactacggactccccgtcgtcgtcaaactcctacacccaccctcccactggcccctcatcaaagccacagtcggcttaatccggaacctagcactctgccccgctaaccacgcgcccctccgggaacagggcgcaatcccccgattagtacaactcctcgtccgcgcacaccaggacacacagcgaaggaccagcatgggcggcacccagcaacagttcgtagaaggtgtacgcatggaggaaatcgtggaaggatgcacgggagccctacacatactcgcacgtgacgtccacaaccgaatagtcatccgaggcctaaacaccataccccttttcgtacaattactctactctcccatagagaacatacaacgcgtggccgcaggagtactatgcgagctcgcccaggacaaagaagcggctgaagccatagaagccgaaggcgccaccgctccccttaccgagctccttcactcacgcaacgagggagtagctacctacgcagcagccgtactatttcgcatgtcagaggacaagccccaagattataagaaaagactctcagtcgaactaacctcatccctcttcagaacggaaccgatggcctggaacgaaacagccgacctagggctcgacataggcgcacaaggcgaacccctaggctacagacaggacgacccgtcgtaccgcagcttccactcaggagggtacggccaagacgcactaggcatggacccaatgatggaacacgaaatgggcggtcaccacccaggcgctgattaccccgtcgacggcctacccgacctaggtcacgcccaagacctcatggacggacttccacccggcgactcaaatcaattggcatggtttgatacagacctctaa

SEQ ID NO: 4067 - RNA, 1692 nt, synthetic construct
  misc_feature 1..1692: note = AAI21007 variant
  source 1..1692: mol_type = other RNA
atggacgtaggagaactcctgagctaccaacccaacagagggaccaaaagaccaagagacgacgaggaagaggaacagaaaatgcgccgaaaacaaacaggcaccagagagaggggtcgctaccgcgaggaagaaatgacagtagtcgaagaagcagacgacgacaagaaacgactcctccaaataatcgaccgcgatggagaggaagaggaagaagaagaggaacccctagacgaaagcagcgtaaagaaaatgatactcacctttgagaaacgaagctacaaaaaccaagaactcagaatcaaattccccgacaaccccgaaaaattcatggagagcgaactagacctcaacgacataatccaagaaatgcacgtagtagcaaccatgcccgacctctaccacctcctagtagagctaaacgcagtccaaagcctactcggactcctaggccacgacaacacggacgtaagcatcgcagtagtcgacctactccaagaactaaccgacatcgacacactccacgagagcgaggaaggagccgaggtcctgatcgacgccctagtagacggccaagttgtagcgctactcgttcagaacctagaacgcctagacgagagcgttaaagaggaagcagacggcgtccacaacaccctcgccatcgtcgaaaacatggccgagttcagaccggaaatgtgcaccgaaggagcgcaacaaggactactacaatggctcctaaaacgactcaaggcaaagatgccgttcgacgccaacaaactctactgcagcgaagtactcgccatactcctacaagacaacgacgagaaccgagagctcctaggcgaactcgacggcatagacgtcctactacaacaactatcagtattcaaacgccacaacccgtcaacagcagaggaacaagaaatgatggaaaacctattcgacagtctctgcagttgcctcatgcttagcagcaaccgagaacgcttcctaaaaggagagggcctacaactaatgaacctcatgctccgtgagaaaaagatctccagaagcagcgcactaaaagtactcgaccacgcaatgatcggcccagaaggcaccgacaactgccacaagttcgtcgacatactagggctcagaacaatcttcccactcttcatgaaaagcccgagaaaaatcaagaaagtaggcaccaccgaaaaagaacacgaagaacacgtctgcagcatactcgccagcctcctcagaaacctacgagggcaacaacgcacgcgactactcaacaaatttacggaaaacgacagcgaaaaagtagaccggctgatggaactacacttcaaatacctcggagccatgcaagtagcagacaagaaaatcgaaggcgaaaaacacgacatggtcaggcgcggagaaataatagacaacgacaccgaggaagagttctacctgaggcgcctagacgcgggcctatttgtactccaacacatatgctacataatggccgaaatctgcaacgcaaacgtcccgcaaatccgacaacgagtacaccaaatactcaacatgcggggatccagtataaaaatagtcagacacataatcaaagagtatgcagaaaacataggagacgggagaagccccgagttccgcgaaaacgaacagaaaagaatcctcggcctactagaaaacttctaa

SEQ ID NO: 4068 - RNA, 1833 nt, synthetic construct
  misc_feature 1..1833: note = CCDS4772.1 variant
  source 1..1833: mol_type = other RNA
atggaaacagccccaaaacccggaaaagacgtcccccccaaaaaagacaaactccaaaccaaacgcaaaaaaccaaggcgctactgggaagaagaaacagtccccacaaccgccggagccagcccaggccccccacgaaacaaaaaaaaccgagaactacgcccacaacgtccgaaaaacgcctacatcctcaaaaaatccagaatctccaaaaaaccccaagtcccaaaaaaaccaagagaatggaaaaaccccgaaagccaacgcggcctatcaggcacacaagaccctttcccaggacccgcacccgtgccagtagaagtagtccaaaaattctgcagaatcgataaaagccgaaaacttccacactccaaagcaaaaactagatcccgactcgaagtcgccgaagccgaagaagaagaaacaagcatcaaagccgcacgaagcgaactcctactagcagaagaaccaggcttcctagaaggcgaagacggcgaagacacggccaaaatatgccaagcagacatagtcgaagccgtggacatagcctccgcggcgaaacattttgacctcaaccttagacaattcggaccctaccggctcaactatagccgaacgggcaggcacctcgccttcggcggccgcagaggacacgtcgccgccctcgactgggtaaccaagaagctaatgtgcgaaatcaacgttatggaagcggtcagggacatccgctttctgcacagcgaggcactactagccgtcgcacaaaaccgttggctccacatatacgacaaccaaggtatcgaactacattgcatcagacgatgcgaccgagtcacccgactagaattcctacccttccacttcctcttagccacagcctcagaaacgggcttcctaacatacctcgacgtaagcgtaggaaaaatcgtggccgcactcaacgcccgagccggccggctcgatgtcatgtcccaaaatccctacaacgcagtcatacacctgggccacagcaacggaacggtcagcctatggagcccagccatgaaggaacccctcgcaaaaatcctctgccaccgcggaggcgttagagccgtcgcggtagactccacaggcacctacatggccacatcagggctagaccaccaactcaaaatattcgacctccgaggcacctaccagcccctctccacccggacactaccccacggcgccggccacctcgcgttctcacaacgaggactactcgtagccggcatgggagacgtggtcaacatctgggccggccaaggtaaagcaagccccccaagcctggagcagccttacctcacacacagactttcgggacccgtacacggtctacaattctgccccttcgaagacgtactcggagtcggacacaccgggggcataacctcaatgctcgtacccggcgcaggagaaccaaacttcgacggcctcgaatcaaacccatacagatcacgaaaacagcgacaggaatgggaggtcaaagcactcctcgaaaaagttcccgcagaactcatctgcctagacccgcgcgccctagcggaagtcgacgtcatatccctagagcaaggaaagaaagagcaaatcgaacgactaggctacgacccccaagcgaaagccccgttccaacccaaaccgaaacaaaaaggacgctctagcactgcatcacttgtcaaacgcaaacgcaaagtcatggacgaggaacaccgcgacaaggtacgacagagtctacaacaacagcaccacaaggaggcaaaagcaaaacccaccggagcacgcccaagcgccctagacagattcgtacggtaa

SEQ ID NO: 4069 - RNA, 897 nt, synthetic construct
  misc_feature 1..897: note = AAG37878 variant
  source 1..897: mol_type = other RNA
atgggcccgaaagatagcgcgaaatgcctccatcgcgggccccagccatcgcactgggccgcaggcgatggcccaacccaggaaaggtgcgggcccaggagcctgggctcaccagtgctcgggctcgatacctgtcgcgcgtgggaccacgtagacgggcaaatactcgggcaactgcgccccctaacagaagaggaagaggaagagggagcgggcgcgaccctgagcaggggcccggcctttccagggatggggagcgaggaattacgcttggcctcgttctatgactggcccttaacagcggaagtgccaccggaattgctcgcagccgcgggctttttccatacagggcaccaggacaaagtcaggtgcttcttctgttacgggggcttacaatcgtggaagcgcggggacgatccatggacagagcacgcgaaatggttcccgagctgtcaattcctcttgcgatcaaaaggacgagacttcgttcactcagtccaggaaacgcactcgcaactactcgggagctgggacccatgggaagaaccggaagatgccgcgcccgtggcaccgagcgtgcccgctagcgggtacccggaattgcccacgcccaggcgcgaggtccagagcgagagcgcgcaagagcccgggggcgtaagcccggccgaagcccagagagcgtggtgggtcttggaaccgccaggagccagggacgtggaagcgcaattgcgcaggctccaggaggaacgcacgtgcaaggtctgtctcgaccgcgcggtctcgatagtattcgtgccatgtggccatctcgtatgcgcggaatgcgccccaggcctacaactgtgcccaatctgccgagcacctgtgcggtcacgcgtgcgcacgttcttgagctaa

SEQ ID NO: 4070 - RNA, 2280 nt, synthetic construct
  misc_feature 1..2280: note = EAW60925 variant
  source 1..2280: mol_type = other RNA
atggacctaagcgccctccgcgtagaagaagtccaaaacgtaataaacgccatgcagaaaatcctcgaatgcccaatatgcctcgaactaattaaagaaccagtctcaacgaaatgcgaccacatcttctgcaaattctgcatgctcaagctcctcaaccaaaagaaaggtccatcacaatgcccgctatgcaaaaacgatatcacgaaacgcagcctccaagaatcgaccagattctcacaactcgttgaagaactcttaaaaatcatctgcgccttccaactcgacacaggactagaatacgccaactcatacaacttcgccaagaaagaaaacaactccccggaacatctcaaagacgaagtatccatcatccagtccatgggctaccgtaaccgcgcgaaacgcctcctccaaagtgaaccagaaaatccctcactacaagagacatcactatccgtacaactttcaaacctagggaccgtacgaaccctcagaaccaaacaacggatccaaccacagaaaaccagcgtatatatcgagctaggcagcgactcctcagaagacacagtaaacaaagccacctactgctcagtaggagaccaagaactactacaaataacaccccaaggcacccgcgacgaaatatcgctcgacagcgcaaagaaagcagcctgcgagttcagcgaaaccgacgtgaccaatacagaacaccaccaacccagcaacaacgacctcaacaccacagagaaaagagcagctgaacgacaccccgaaaaatatcagggtgaagccgcctccggatgcgaaagcgaaacttccgtaagcgaagattgctccggactatccagccaaagcgatatcctcacgacccaacaacgcgacaccatgcaacacaacctaatcaaactccaacaggaaatggcagaactagaagcagtcctagaacaacacggatcccagccctccaactcatacccctccataatatccgactccagcgccctcgaagacctacgaaatcccgaacaaagcaccagcgaaaaagtcctaacctcccagaaaagctcagagtaccccatcagccaaaacccagaaggcctctccgccgacaaattcgaagtcagcgcagacagtagcaccagcaaaaacaaagaacccggcgtcgaaagatccagcccatccaaatgcccctccctcgacgacagatggtacatgcatagctgctcaggctcacttcaaaatcgcaactacccatcacaagaggaactaatcaaagttgtcgacgtcgaagaacagcaactagaagagtccggcccacacgacctaacagaaacaagctacctaccccgacaagacctggaaggcaccccctaccttgagtccggcatctccctgttctccgacgacccagaatcagacccgagcgaagaccgcgcacccgaatccgcccgcgtaggcaacatcccatctagtacatccgcactcaaagttcctcaactcaaagtcgccgagtccgctcagtcgcccgctgcagcccacaccacagacaccgccggatacaacgccatggaagagtcagtaagccgtgaaaaacctgaactcacagcctcaaccgaacgtgtcaacaaacgcatgtcaatggtcgtgtccggcttaacacccgaggaatttatgctagtctacaaattcgcccgaaaacaccacatcaccctcaccaacctaataaccgaggagacaacccacgtcgtaatgaagaccgacgcagaatttgtatgcgaacgcacactaaaatatttcttgggcatcgccggcggtaaatgggtcgtcagctacttctgggtcacacagtctatcaaagagcgcaaaatgctaaacgaacacgacttcgaagtacgcggagacgtcgtaaacggtcgaaaccaccaaggtccaaagcgcgcccgcgagtcccaagacagaaaaatcttcagaggcttagagatctgctgctacggacccttcacaaacatgccaaccgaccaactcgaatggatggtacaactatgcggagcatccgtcgtgaaggaactctcctccttcaccctcggcacaggcgtacaccccatagtggtcgtccagcccgacgcatggacagaggacaacggcttccatgccatcggacaaatgtgtgaagcccccgtcgtcacaagagaatgggtcttagactcagtcgcactataccaatgccaagaactcgacacctacctaatcccacagattccccacagccactactga

SEQ ID NO: 4071 - RNA, 2160 nt, synthetic construct
  misc_feature 1..2160: note = EAW60922 variant
  source 1..2160: mol_type = other RNA
atggaccttagcgccctccgcgtcgaagaggttcaaaacgtaattaacgcaatgcaaaagatactagaatgccccatctgcttagaactcatcaaggagccagtctccaccaaatgcgaccacatcttctgcaaattctgtatgctcaagctcctcaaccaaaagaaaggaccctcccagtgtccgctatgcaaaaatgacataaccaaacggtcgctccaagaatccacccgcttctcccaactggtagaagaactcctcaaaattatctgtgcattccaactcgacaccggcctcgaatacgcgaacagctacaacttcgctaagaaagaaaacaactcaccagaacacctcaaagacgaagtctccataatacaatccatgggataccgaaaccgcgccaaacgcctcctgcaatccgaaccggagaacccctcgctccaagaaacatccctatccgtacaactatccaatctcggaaccgtacgaaccctccgcaccaaacaacgaatccaaccacagaaaaccagcgtctacatcgaactagccgcctgcgagttctcagaaaccgacgtaaccaacaccgagcaccaccaaccctctaacaacgacctcaacactacagaaaaacgtgccgccgaacgacaccccgaaaaataccaaggcgaggccgcctccggctgcgaatcagaaaccagtgtctccgaagactgcagcgggctctccagccaatccgacatcctaacaactcaacaacgagacaccatgcaacacaacctaatcaaactccaacaagagatggcagaactagaagcagtgcttgaacaacatggctcccaacccagcaactcatacccctccataatctcagacagctccgccctcgaagacctccggaatccagaacaatcgacctccgaaaaggccgtcctcacaagccaaaagagctccgaataccccatcagccagaacccagagggcctctcagccgacaaattcgaagtctccgccgacagctcaacgagcaaaaacaaagaaccaggagtagaacgctcatcaccatcaaaatgccccagcctcgacgaccgctggtacatgcactcatgctcgggatccctccaaaatagaaactacccatcgcaggaagaactcataaaagtcgttgacgtagaagaacaacagcttgaagaatcaggcccccacgacctcacagaaaccagctacctcccgcgacaagacctggaaggcaccccctacctagaatcagggatctctctcttctccgacgatcccgaatcagatccctccgaagatcgcgccccagagtcagcccgcgtgggaaacatcccaagctcgacctcggccctgaaagtcccacaactaaaagtcgccgagtcggcccaaagtcccgccgcagcacacactacagacacagccggatacaacgctatggaagaaagcgtctcacgggaaaaaccggaattaaccgccagcaccgaacgcgtaaacaaaagaatgagcatggtcgtctcaggcctcacgccagaggaatttatgctcgtatacaaattcgcccgaaaacaccacataaccctaaccaacctaatcacagaagaaacgacccacgtagtaatgaaaaccgacgccgagttcgtgtgcgaacgcacactaaaatatttcctaggaatcgccggcggcaaatgggtcgtatcatacttctgggtcacccaatcgatcaaggaacgcaaaatgctcaacgaacacgacttcgaagtacgaggagatgtagtcaacggacgaaaccaccagggacccaaacgcgcccgagaaagccaagacagaaaaatatttagggggctagaaatctgttgctacggccctttcaccaacatgcccaccgaccaacttgaatggatggttcagctctgcggggcctccgtcgtcaaggaactatcctccttcaccttaggaaccggagtccaccccatagttgtcgtacaacccgacgcctggaccgaagacaacggcttccacgccatcggccaaatgtgcgaggcccccgtagtaacgcgcgaatgggtcctggattccgtagcactataccaatgccaagaactcgacacatacctaataccccaaatccctcacagccactactag

SEQ ID NO: 4072 - RNA, 2166 nt, synthetic construct
  misc_feature 1..2166: note = EAW60923 variant
  source 1..2166: mol_type = other RNA
atggacctcagcgccctcagggttgaagaagtccagaacgtaattaacgcaatgcaaaagattctcgaatgcccaatctgcctcgagctaatcaaagaacccgtcagcaccaaatgcgaccacatcttctgtaaattctgcatgctaaaactccttaaccaaaagaaaggcccctcccaatgccccctctgcaaaaacgacatcaccaaacgatccctccaagaaagcactcgtttcagtcagctagtcgaggaactcctaaaaatcatatgcgccttccaactcgacaccggattggaatacgcgaactcctacaacttcgccaagaaggaaaacaactccccagagcacctcaaagacgaagtatccatcatccaatctatgggctaccgaaaccgggccaaacgactcctccaatcagaacccgaaaaccccagcctacaagaaacctccctaagcgtccagctatcaaacctcggaaccgtccgaaccctacgaacaaaacaacggatccaaccacagaaaacatccgtctacattgagctaggcagcgactcctcagaagacaccgttaacaaagcaacatactgctcagtcggcgaccaagaactactccaaatcactccccaaggaacccgcgacgagatatccctcgactcagccaaaaagggcgaagccgcctccggttgcgaatcagaaacctcagtatccgaagactgctcaggcttgagctcccaatccgatatcctaaccacccaacaacgcgacaccatgcaacacaacctcatcaagctccaacaggaaatggccgaactcgaagcagtcctcgaacaacacggctcgcaaccctccaactcctaccccagcatcatctcagattcaagcgccctcgaagacctccgaaaccccgagcaatctacttcagaaaaagcagtactcacctcgcaaaaatcctcagagtaccccatatcacaaaatccggaaggactcagcgcagacaaattcgaagtatctgccgactcaagcacctccaaaaacaaagaaccaggagtcgaacgctcctccccttccaaatgtccatccctcgacgacagatggtacatgcactcctgctctggctccctacaaaatcgaaactatcccagccaagaagaactgatcaaagtcgtggacgtagaagaacagcaactagaagaatccggcccccatgacctcactgagacctcatatctcccgcgacaagaccttgaaggcaccccctacctcgaatccggcatatcactcttctccgacgatcccgagtcagacccttctgaggaccgagccccggaaagcgcacgggtcggcaacattccctcctcaacatctgccctaaaagtcccgcagcttaaagtcgctgaaagcgcacaatccccagccgccgcccacacaaccgacaccgcaggctacaacgctatggaagaaagcgtctcccgagaaaaacccgaacttaccgcctccacagagcgcgtcaacaaacgcatgtcaatggtggtctcgggcctaacacccgaagagttcatgctagtatacaaattcgctcgcaaacaccacataacactcaccaatctcatcaccgaagagaccacacacgtcgtcatgaagaccgacgcggagttcgtctgcgaacgcactctcaaatacttcctcgggatagccggagggaaatgggtcgtctcatacttctgggtcacccagtccataaaagaaagaaaaatgctcaacgaacacgatttcgaagtccgaggcgacgtggtgaacggccgcaaccaccaaggcccgaaacgcgcccgggaatcccaagacagaaagatcttcagaggcctagaaatctgttgctacggacccttcaccaatatgcccacagatcaactagaatggatggtccaactctgcggagcatccgttgtcaaagaactcagctccttcaccctcggaaccggcgtacaccccatagtagtagtgcagccagacgcctggacagaagacaacggcttccatgccatcggccagatgtgcgaagcaccagtagtaacacgcgaatgggtccttgactccgtagccctataccaatgccaagaactcgacacctatctcatcccccaaatcccccactcccactactaa

SEQ ID NO: 4073 - RNA, 36 nt, synthetic construct
  misc_feature 1..36: note = AIC83575 variant
  source 1..36: mol_type = other RNA
atggatttgagtgcgttgagggtggaggaggtgtga

SEQ ID NO: 4074 - RNA, 522 nt, synthetic construct
  misc_feature 1..522: note = ABC59810 variant
  source 1..522: mol_type = other RNA
atggacgccgaattcgtctgcgaacgaaccctcaaatacttcctaggcatcgccggcggcaaatgggtcgtctcctacttctgggtcacccaatccatcaaagaacgcaaaatgctcaacgaacacgacttcgaagtacgcggcgacgtcgtcaacggccgcaaccaccaaggccccaaacgcgcccgcgaatcccaagaccgcaaaatcttccgcggcctcgaaatctgctgctacggacccttcaccaacatgcccaccgaccaactcgaatggatggtacaactctgcggcgcctccgtcgtaaaagaactctcctccttcaccctcggaaccggcgtccaccccatcgtcgtcgtccaacccgacgcctggaccgaagacaacggcttccacgccatcggccaaatgtgcgaagcccccgtagtcacccgcgaatgggtcctcgactccgtagccctataccaatgccaagaactcgacacctacctcatcccccaaatcccccactcccactactaa

SEQ ID NO: 4075 - RNA, 1065 nt, synthetic construct
  misc_feature 1..1065: note = ABC88652 variant
  source 1..1065: mol_type = other RNA
atgcactcatgctcaggatccctccaaaaccgaaactacccctcacaagaagaactaatcaaagtcgtcgacgtcgaagaacaacaactggaagaatcaggaccacacgacctcaccgaaacctcatacctaccacgccaagacctcgaaggcacaccatacctagaatcaggcatctccctattctccgacgacccagaaagcgaccccagcgaagaccgcgccccagaaagcgccagagtcggcaacataccctcctccacatccgccctcaaagtcccccaactcaaagtcgcagaatccgcacaaggaccagccgccgcccacaccaccgacaccgccggatataatgccatggaagaatctgtctcccgcgaaaaacccgaactcacagccagcacagaacgagtaaacaaacgaatgtccatggtagtatcaggcctcacccccgaagagttcatgctcgtctacaaattcgcccgaaaacaccacataaccctcaccaacctcatcaccgaagaaacgacccatgtcgtcatgaaaaccgacgcagagttcgtttgcgaacgcacactaaaatacttcctgggcatagccggaggaaaatgggtcgtcagctacttctgggtcacccaatcaatcaaagaaagaaaaatgctcaacgaacacgacttcgaagtacgcggcgacgtcgtaaacggccgcaaccaccaaggccccaaaagagcccgcgaatcccaggaccgaaagatattccgcggcctcgaaatctgctgctacggacccttcaccaacatgccaaccgaccaactcgaatggatggtccaactttgcggggcctccgtcgtaaaagaactcagctccttcaccctaggcaccggcgtccacccaatcgtggtcgtccaacccgacgcctggaccgaagacaacggcttccacgccataggacaaatgtgcgaaaccccagtagtcacccgagaatgggtcctcgacagcgtcgccctttatcagtgccaagaactagacacctacctcatcccccaaatcccccactcacactactaa

SEQ ID NO: 4076 - RNA, 2043 nt, synthetic construct
  misc_feature 1..2043: note = EAW60939 variant
  source 1..2043: mol_type = other RNA
atggatctatcggccctccgtgtagaagaagtccagaacgtcataaacgccatgcagaaaattctcgaatgccccatctgcctagaactcataaaggaacccgtctcaaccaaatgtgaccacattttctgcaaattctgcatgttaaaactactcaatcaaaagaaaggcccctcgcaatgccccctatgcaaaaatgacatcaccaaacgatccctccaagaatcaacccgcttttcccaactcgtcgaggaactcctcaaaataatctgcgcattccaactcgacacgggcttggagtacgccaactcctacaactttgcaaagaaagagaataattcccccgaacacttaaaagacgaggtatctataatacaatcaatgggctaccgcaacagagccaaacgcctcctacaaagcgaacccgaaaacccctccctccaagagacctccctctcggtacaactcagcaacctgggaacggtccgaacgctacgcacaaagcaaagaatccagccccagaaaacctccgtctacatcgaactcggcgaagccgcatcaggctgcgaatccgaaacctcagtctctgaagattgctccggtttatcctcccaatccgacatcctcaccacacaacaacgcgacaccatgcaacacaacctcatcaaactccaacaggagatggccgagctcgaggcagtcctcgaacagcacggtagccaaccatccaactcttacccctccatcatcagcgactcatccgccctcgaggacctccgcaacccagaacagtccacctcagagaaagccgtactcacatcccaaaaatcatcagaataccctatctctcaaaaccccgaagggctcagcgccgacaagttcgaggtctccgccgactcctcaacctccaaaaacaaggagcccggcgtcgaacgctcctccccctctaaatgcccaagtcttgacgacagatggtacatgcactcttgcagcggcagcctccaaaatagaaactacccctcgcaggaagaactcatcaaagtagtcgacgtagaagaacagcagctagaagagtcaggcccccacgacctaacagaaaccagctacctccctcgacaagacctagaaggcacaccttacctagaatccggaatctcactcttctccgacgacccagaatcagacccatcagaagaccgcgcacccgaaagtgcccgcgtcgggaacatacccagcagcacatccgcactaaaagtccctcaactcaaagtcgccgaatccgcccagtcccctgcggctgcccacaccaccgataccgccggatataacgcaatggaggaatcagtctcccgagaaaaacccgaactcacagcctcaactgaacgcgtcaacaaacgcatgagcatggtcgtctccggcctcacccccgaagagttcatgcttgtctacaaattcgcccgcaaacaccacataaccctcaccaaccttataacagaagaaaccacacacgtcgtcatgaaaaccgacgccgagttcgtatgcgaacgcacactcaaatacttcctgggaatagcgggagggaaatgggtagtatcatacttctgggtcacccaaagcatcaaagaacgcaaaatgctcaacgaacacgacttcgaagtccgcggagacgtagtcaacgggcgcaaccaccaaggaccaaaaagagcccgcgaatcgcaagacagaaaaatcttccgcggactcgaaatatgctgctacggaccattcactaacatgcccaccgaccaactcgaatggatggtccaactgtgcggtgcttcagtagtaaaggaactctcatccttcaccctgggcaccggcgtccaccccatcgtcgtagtccaacccgacgcgtggacagaagacaacggattccacgcaataggccaaatgtgcgaagccccagtcgttaccagggaatgggtccttgacagcgtcgcactctaccagtgccaagaactcgacacatacctcataccccaaattccacactcccactactaa

SEQ ID NO: 4077 - RNA, 546 nt, synthetic construct
  misc_feature 1..546: note = AAC72302 variant
  source 1..546: mol_type = other RNA
atgctcctcgaacccggccgcggctgctgcgccctcgccatcctcctcgccatagtcgacatccaatccggcggctgcatcaacatcacatcctccgcctcccaagaaggcacccgcctcaacctcatctgcacagtctggcacaaaaaagaagaagccgaaggcttcgtcgtcttcctctgcaaagaccgctccggagactgctcccccgaaacctccctcaaacaactccgcctcaaacgcgaccccggcatcgacggcgtcggcgaaatctcctcacaactcatgttcaccatctcccaagtaacccccctccactccggcacctaccaatgctgcgcccgctcccaaaaatccggcatccgcctccaaggccacttcttctccatcctcttcaccgaaaccggcaactacaccgtcaccggcctcaaacaacgccaacacctcgaattctcccacaacgaaggcaccctctcctccggcttcctccaagaaaaagtctgggtaatgctagtcacatcactcgtcgccctacaagccctctaa

SEQ ID NO: 4078 - RNA, 639 nt, synthetic construct
  misc_feature 1..639: note = BAG58223 variant
  source 1..639: mol_type = other RNA
atgctactcagcgtatacttcaaagaacaattcctcgacggcgacggatggacctcacgctggatcgaaagcaaacacaaatccgacttcggcaaattcgtcctaagctcaggcaaattctacggcgacgaagaaaaagacaaaggactccaaacctcacaagacgcccggttctacgccctaagcgccagcttcgaaccattctccaacaaaggccaaaccctagtcgtccaattcaccgtcaaacacgaacaaaacatcgactgcggcggcggctacgtaaaactattccccaacagcctcgaccaaaccgacatgcacggcgacagcgaatacaacatcatgttcggccccgacatctgcggcccaggcaccaaaaaagtccacgtcatcttcaactacaaaggcaaaaacgtcctcatcaacaaagacatccgatgcaaagacgacgaattcacgcacctctacaccctcatcgtaagacccgacaacacatacgaagtcaaaatagacaactcccaagtcgaatccggctccctagaagacgactgggacttcctcccccccaaaaaaatcaaagaccccgacgcgagcaaacccgaagactgggacgaacgcgccaaaatcgacgacccctaa

SEQ ID NO: 4079 - RNA, 891 nt, synthetic construct
  misc_feature 1..891: note = BAG65301 variant
  source 1..891: mol_type = other RNA
atgcacggagacagcgagtacaacatcatgttcggacccgacatctgcggcccgggcacgaaaaaggtacacgtcatattcaactacaaaggaaagaacgtgctcataaacaaggacatacgctgcaaagacgacgagttcacacacctgtacacgctcatagtcaggcccgacaacacgtacgaggtcaagatcgacaactcacaagtggaatcgggatcgctcgaggacgactgggacttcctgcccccgaaaaagatcaaagacccagacgcgagcaagccagaggactgggacgagcgcgcgaaaatagacgatcccacggactcgaaaccggaagactgggacaaaccggaacacatcccggacccggacgcgaaaaagccagaggactgggacgaggaaatggacggggaatgggaaccgcccgtgatccagaaccccgaatacaaaggggaatggaaaccgcgacagatcgacaacccggactacaaagggacctggatccaccccgagatcgacaacccggaatacagcccagaccccagcatatacgcatacgacaacttcggagtgctaggactcgacctatggcaagtgaaatcgggcacgatattcgacaacttcctgatcacgaacgacgaagcatacgcggaagagttcggaaacgaaacatggggcgtgacaaaggcagcggaaaagcaaatgaaagacaaacaggacgaagaacagcgcctgaaagaggaagaggaagacaaaaagcgcaaggaagaggaagaggccgaagacaaggaagatgacgaggacaaagacgaggacgaggaagacgaagaggacaaggaagaggacgaggaagaggacgtgcccggacaagcgaaagacgaactgtga

SEQ ID NO: 4080 - RNA, 1254 nt, synthetic construct
  misc_feature 1..1254: note = AAA36582 variant
  source 1..1254: mol_type = other RNA
atgctcctcagcgtgcccctcctactaggactacttgggctagcagtcgcagaaccagcagtgtacttcaaagagcaatttctcgacggcgacggatggaccagccgctggatcgagagcaaacacaaaagcgacttcggaaaattcgtcctaagcagcggaaaattctacggggacgaggaaaaagataaaggactccaaacatcccaagacgccagattctacgccctgagcgccagcttcgaaccattcagcaacaaaggccaaacactcgtagtgcaattcacagtcaaacacgaacaaaacatagactgcgggggcgggtacgtcaaactattccccaacagcctggaccaaaccgacatgcacggcgacagcgaatacaacataatgttcggacccgacatatgcgggccaggaacgaaaaaggtccacgtcatattcaactacaaaggaaagaacgtactcataaacaaagacatacgttgcaaagacgacgagttcacgcacctgtacacactgatagtgaggccagacaacacatacgaagtcaaaatcgacaactcacaagtagaaagcgggtccctagaggacgactgggacttcctaccacccaaaaagatcaaagacccagacgcaagcaaacccgaagactgggacgaacgcgcaaaaatagacgaccccacagactcgaaaccagaagactgggacaaacccgaacacataccggacccagacgcaaagaaaccagaagactgggacgaagaaatggacggagaatgggaaccaccagtgatccaaaacccggaatacaaaggggaatggaaaccacgccaaatagacaacccggactacaaagggacatggatccaccccgaaatcgacaaccccgaatacagcccggacccaagcatatacgcatacgacaactttggagtactcggcctagacctatggcaagtaaaaagcggaacaatcttcgacaacttcctgataacgaacgacgaagcatacgcagaagagttcgggaacgaaacctggggcgtgaccaaagccgcagaaaaacaaatgaaagacaaacaagacgaagaacagcgcctaaaagaggaagaggaggacaagaaacgcaaagaagaagaagaagcggaagacaaagaagacgacgaagacaaagacgaagacgaagaagacgaagaagacaaagaggaagacgaagaagaggacgtacccggacaagcaaaagacgaattgtga

SEQ ID NO: 4081 - RNA, 1155 nt, synthetic construct
  misc_feature 1..1155: note = BAB71655 variant
  source 1..1155: mol_type = other RNA
atggcccgcgccctagtccaactctgggcaatctgcatgctccgagtcgccctcgccacagtctacttccaagaagaattcctcgacggcgaacactggcgcaaccgctggctacaaagcacaaacgacagcagattcggccacttccgactcagctcaggcaaattctacggccacaaagaaaaagacaaaggcctccaaaccacccaaaacggccgcttctacgccatcagcgcacgcttcaaaccgttctccaacaaaggaaaaacactcgtcatacaatacacagtaaaacacgaacaaaaaatggactgcggcggaggctacatcaaagtcttccccgccgacatagaccaaaaaaacctcaacggaaagagccaatactacataatgttcggccccgacatctgcggattcgacatcaaaaaggtccacgtcatactgcacttcaaaaacaaataccacgaaaataaaaaactaatccgatgtaaagtcgacggcttcacccacctctacaccctaatcctccgccccgacctatcttacgacgtcaaaatcgacggacaaagcatcgaatcaggatcaatcgaatacgactggaacctcacaagcctcaaaaaggaaaccagcccagcagaaagcaaagactgggaacaaaccaaagacaacaaagcgcaagactgggaaaagcacttcctagacgccagcaccagcaaacaatcagactggaacggcgacctggacggcgactggcccgccccaatgctccaaaaacccccctaccaagacggcctcaaaccagaaggcatccataaagacgtctggctccaccgcaaaatgaaaaacacggactacctaacacaatacgacctcagcgaattcgaaaacatcggcgccatcggactcgaactatggcaagtacgctcaggcacaatcttcgacaacttcctcatcaccgatgacgaagaatacgccgacaacttcggcaaagcaacctggggcgaaaccaagggacccgaacgcgaaatggacgccatccaggcaaaagaagagatgaaaaaagcccgcgaagaagaagaagaagaactactctccggcaaaatcaaccgccacgaacactacttcaaccagttccaccgacgcaacgaactataa

SEQ ID NO: 4082 - RNA, 330 nt, synthetic construct
  misc_feature 1..330: note = CAA10193 variant
  source 1..330: mol_type = other RNA
atgctgatggcacaggaggcgctggcgttcttgatggcgcaaggggcaatgctggcggcacaggaaagaagagtgccgagggcggcggaagtgccgggggcacagggacagcaggggccgaggggaagggaagaggcgccgagaggggtaaggatggcggtgccgctattgagaaggatggagggggcgccggcggggccgggagggaggacggcggcgtgctttagctgtacaagtagatgtctgagtaggaggccgtggaaaaggagctggagcgcggggagttgcccgggaatgccgcatctgagtccggatcaagggagattttga

SEQ ID NO: 4083 - RNA, 1440 nt, synthetic construct
  misc_feature 1..1440: note = CAA66853 variant
  source 1..1440: mol_type = other RNA
atggacttctcccgcaacctctacgacatcggcgaacaactcgactccgaagacctcgcctccctcaaattcctctccctcgactacatcccccagcgcaaacaagaaccaattaaagacgccctcatgctattccaacgactccaagaaaaacgcatgctcgaagaatccaacctatcattcctgaaagaactcctcttccgtatcaaccgcctcgacctcctcataacttatctcaacacccgcaaagaagaaatggagcgcgaactccaaacacccggccgagcccagatatccgcctaccgcgttatgctctaccaaatcagcgaagaagtatcccgctcagaactccgctcattcaaattcctcctccaagaagaaatctccaaatgcaaattagacgacgacatgaacctgctcgatatattcatcgaaatggagaaaagggtcatccttggcgaaggcaaactcgacatcctcaaacgcgtatgtgcccaaataaataaatccctcctaaaaatcatcaacgactacgaagagttctcaaaagaacgcagcagctccctcgaaggatcccccgacgagttctcaaacggggaagaactatgcggtgtcatgaccatctccgactctccccgagaacaagactcagaatcccaaacgctcgacaaagtataccaaatgaaatcaaaaccccgcggctactgtctcatcatcaacaaccacaacttcgccaaagcccgcgaaaaagtccccaaacttcattccatacgagaccgcaacggcacgcacctcgacgcaggagcactaacaactaccttcgaagaactccacttcgaaatcaaaccacacgacgactgcaccgtcgaacaaatctacgaaatcctcaaaatataccaactcatggaccactccaacatggactgcttcatatgctgcatactatcccacggagacaaaggaatcatatacggcacagacggacaggaagccccaatctacgaactaacctcacaattcacaggcctcaaatgcccctccctcgccggcaaacctaaagtattcttcatccaggcctgccaaggcgacaactatcaaaaaggcattccagtcgaaaccgactcagaggaacaaccctacctcgaaatggacctctctagcccccaaacccgctacatccccgacgaagcagacttcctcctcggcatggccaccgtcaacaactgcgtctcctaccggaaccccgccgaaggcacttggtatatacaatccctctgtcaatccctacgcgagcgctgcccccgcggcgacgatatcctaaccatcctcactgaagtcaactacgaagtctccaacaaagacgacaagaaaaacatgggcaaacaaatgccccaacccacgttcacactccgcaagaaactcgtgttcccctccgactag

SEQ ID NO: 4084 - RNA, 1569 nt, synthetic construct
  misc_feature 1..1569: note = CCDS2340.1 variant
  source 1..1569: mol_type = other RNA
atgaaatcgcaaggccagcactggtattcctcctccgacaaaaattgcaaagtatccttccgcgaaaaactactcatcatcgactccaacctcggcgtccaagacgtagaaaacctcaaattcctgtgcatcgggctcgtccccaacaaaaaactagaaaaaagctcctcagcctcagacgtattcgaacacctcctagccgaagacctcctttccgaggaagacccattcttcctcgcagaattactgtacatcatccgccaaaagaaactcctacagcaccttaactgcacgaaagaagaagtagaacgactcctacccactagacaacgagtcagcctcttcagaaacctactatacgaactctccgaaggcatcgactcagaaaacctgaaagatatgatcttcctcctaaaagactcactacccaaaaccgaaatgacctccctctccttccttgcattcctcgaaaagcaaggcaaaatcgacgaagacaacctcacctgcctcgaagacctttgcaaaaccgtcgtccctaaactccttcgcaacatcgaaaaatacaaacgcgagaaggccatccaaatcgtaaccccaccagtcgataaagaagctgaatcctaccaaggagaagaagaactcgtatcccaaaccgacgttaaaaccttcctagaagccctaccccaagaatcctggcaaaacaaacacgccggctccaacggcaaccgagccacaaacggcgccccaagcctcgtgtcccgaggcatgcaaggtgcatcagccaacaccctcaactccgaaacctcaacgaagcgcgcggccgtataccgcatgaaccgcaatcaccgaggcctatgcgtaatcgtcaacaaccactccttcacctccctaaaagaccgccaaggcacccacaaagacgccgaaatacttagccacgtattccaatggttaggctttaccgtccacatacacaacaacgtcaccaaagtagaaatggagatggtactccaaaaacaaaaatgcaaccccgcccacgccgacggagactgcttcgtgttctgcatcctcacacacggacgcttcggcgccgtctactccagcgacgaagccctcatccccatacgagaaatcatgtcccacttcacagccctccaatgcccccgactagccgagaaacccaaactattcttcatacaggcatgccaaggagaagaaatacaaccatccgtctcaatcgaggccgacgccctcaaccccgaacaagcgccaacctccctccaagactctattcccgccgaagcagacttcctcctcggactggccaccgtacccggctacgtatctttcaggcacgtcgaggaaggcagctggtacatccaatcgctatgcaaccacctcaaaaaactcgtcccccgtcacgaagacatactctcaatcctcaccgccgtcaacgatgacgtctcccgtcgagtagacaaacaaggcacaaaaaaacaaatgccccaacccgccttcacactccgtaaaaaactcgtattccccgtacccctcgacgcactctccctctaa

SEQ ID NO: 4085 - RNA, 1020 nt, synthetic construct
  misc_feature 1..1020: note = EAW65632 variant
  source 1..1020: mol_type = other RNA
atgtggcaactctgggcctccctatgctgcctactcgtactagccaacgcccgaagccgaccatccttccaccccctcagcgacgaactcgtaaactacgtaaacaaacgaaacacaacctggcaagccggccacaacttctacaacgtcgacatgtcctacctcaaacgcctctgcggcacattcctcggagggcccaaaccaccccaacgcgtaatgttcacagaagacctaaaactcccagcctccttcgacgccagggaacaatggccccaatgccccaccatcaaagaaatacgtgaccaaggaagctgcggctcctgctgggccttcggcgccgtcgaagccatctcagaccgaatctgcatacacaccaacgcccacgtcagcgtcgaagtcagcgccgaagacctcctaacctgctgcggatctatgtgcggggacggatgcaacggcggctaccccgccgaagcctggaacttctggacccgcaaaggcctcgtatccggcggactctacgaatcccacgtcggctgccgaccatactccattccaccctgcgaacaccacgtcaacggctcccgacccccatgcacaggcgaaggcgacacccccaaatgcagcaaaatctgcgaaccaggctatagcccaacctacaagcaagacaaacactacggctacaactcctactcagtatccaactcagaaaaggacatcatggccgaaatctacaaaaacggacccgtagaaggcgcattctccgtctactcagacttcctcctctacaaatccggcgtctaccaacacgtaaccggcgaaatgatgggagggcacgccatcagaatcctaggctggggcgtcgaaaacggcaccccatactggctcgtcgcaaactcctggaacaccgactggggcgacaacggattcttcaaaatactccgcggccaagaccactgcggaatagaatcagaagtagtagccggcatccctcgaaccgaccaatactgggagaaaatctaa

SEQ ID NO: 4086 - RNA, 1020 nt, synthetic construct
  misc_feature 1..1020: note = AAC37547 variant
  source 1..1020: mol_type = other RNA
atgtggcaactatgggcctcactctgctgcctcctcgtactcgcaaacgcccgctcgagacccagcttccaccccctatcagacgaactcgtaaactacgtcaacaaacgaaacacgacctggcaagcaggccacaacttctacaacgtagacatgtcctacctaaaacgactatgcggcacattcctaggcggccccaaacctccccaacgagtaatgttcacagaagacctaaaactacccgccagcttcgacgcccgcgaacaatggccccaatgcccaaccatcaaagaaatccgcgaccaaggatcctgcggaagctgctgggcattcggcgcagtagaagccatctccgaccgcatctgcatacacaccaacgcgcacgtctccgtcgaagtatccgcagaagacctcctaacatgctgcggaagcatgtgcggcgacggctgcaacggcggctaccccgccgaagcctggaacttctggacccgaaaaggcctagtctccggaggactatacgaatcacacgtaggctgcagaccctactccatcccaccctgcgaacaccacgtcaacggcagcaggccaccctgcaccggcgaaggcgacacccccaaatgctccaaaatatgcgaaccaggctacagcccaacctacaagcaagacaaacactacggctacaactcctactcagtctccaactccgaaaaagacatcatggccgaaatctacaaaaacggcccagtagaaggagccttctccgtctactcagacttcctcctgtacaaaagcggcgtctaccaacatgtcaccggcgaaatgatgggaggacacgccatacgaatcctcggctggggcgtcgaaaacggcaccccctactggctcgtcgccaactcctggaacaccgactggggagacaacggcttcttcaaaatcctaagaggacaagaccactgcggaatagaatccgaagtagtcgcaggcatcccccgaaccgaccaatactgggagaaaatataa

SEQ ID NO: 4087 - RNA, 1002 nt, synthetic construct
  misc_feature 1..1002: note = EAW62731 variant
  source 1..1002: mol_type = other RNA
atgaaccccacgctcatactcgcggccttctgcttgggcatagcctcggccacgctaacgttcgaccattcgctcgaagcccagtggacgaaatggaaagcaatgcataataggctctatggaatgaacgaggaagggtggaggcgcgcggtctgggaaaagaacatgaaaatgatagagctccataaccaggaataccgcgagggaaagcactcgttcacgatggcgatgaacgcattcggcgacatgacgagcgaggagttcagacaggtcatgaacgggttccagaacaggaaaccgagaaagggcaaggtattccaagaacccttattctatgaagcacccagaagcgtagactggcgcgagaaagggtacgtaacaccggtcaagaaccagggccagtgcgggagctgctgggcattctcagccacgggcgcgctcgagggccagatgttccgcaagaccgggcgattgatctcgctctctgaacagaacctggtagactgctcgggcccgcaagggaacgagggatgcaacggaggcttgatggattacgcgttccagtacgtgcaagataacgggggcctggactcagaagagagctatccctatgaagcaaccgaggaatcatgcaagtacaatccaaagtactcggtcgcgaacgacaccggattcgtggacatacccaagcaagaaaaagcactcatgaaagcggtcgcgaccgtaggcccgatctcggtcgcgatagacgccgggcacgagagctttctattctacaaggaaggaatctatttcgagcccgactgctcaagcgaggacatggaccacggcgtactcgtagtagggtacgggttcgagagcacggaatcggacaacaacaagtactggctagtgaaaaatagctggggcgaggaatggggcatgggcgggtacgtgaaaatggccaaggacagacgaaaccactgcggcatagcctcggccgcgagctatcccacggtatag

SEQ ID NO: 4088 - RNA, 1002 nt, synthetic construct
  misc_feature 1..1002: note = AAA66974 variant
  source 1..1002: mol_type = other RNA
atgaaccccacgctcatactcgcagcattctgcctaggcatagcttcggccacgctcacgttcgaccactcgctcgaggcccagtggacgaaatggaaagcgatgcacaacagactctacggcatgaacgaggaaggatggaggcgcgcggtctgggaaaagaacatgaaaatgattgaactccacaaccaggaatatcgcgagggcaagcactcgttcacgatggcgatgaacgccttcggcgacatgacgagcgaggagttccgtcaggtcatgaatggattccagaacaggaaaccgcgcaagggcaaggtcttccaagaaccattgttctacgaagcgcccaggagcgtggactggcgcgagaaagggtacgtgaccccggtcaagaaccagggccaatgcgggagctgctgggcgttctcggccacaggagcgctcgagggccagatgttccgcaagaccgggcgcttgatctcgctatcggaacagaacttggtcgactgctcgggcccgcaagggaacgagggctgcaacggaggcctaatggactacgcgttccagtacgtgcaagacaacgggggcctggactccgaagagagctatccctacgaagcaaccgaagaatcgtgcaagtacaatccaaagtactcggtcgcgaacgacaccgggttcgtggacatacccaagcaagagaaagcgctcatgaaagcggtcgcgaccgtgggccctatctcagtcgcaatcgacgccggacacgagagctttctcttttacaaggaagggatctacttcgagccagactgctctagcgaggatatggaccacggcgtgctagtagtcgggtacgggttcgagagcacggaatctgacaataacaagtactggctcgtgaaaaacagctggggcgaggaatggggcatgggagggtacgtaaaaatggccaaagacaggcgcaaccactgcggaatagcatcggccgcgagctacccaacggtctaa

SEQ ID NO: 4089 - RNA, 456 nt, synthetic construct
  misc_feature 1..456: note = AAG17239 variant
  source 1..456: mol_type = other RNA
atggattacgcgttccagtacgtgcaagataacgggggcttggactcggaagagagctatccctatgaagcgaccgaggaatcgtgcaagtacaatcccaagtactcggtcgcgaacgataccgggttcgtagacatacccaagcaagagaaagcgctcatgaaagcggtcgcgaccgtgggcccgatctcggtcgcgatcgatgccgggcacgagagctttctcttttacaaggaagggatctatttcgagcccgattgctcgagcgaggacatggaccatggcgtgctcgtggtcgggtacgggttcgagagcacggaatcggacaataacaagtactggctagtgaaaaacagctggggcgaggaatggggcatgggcgggtacgtgaaaatggccaaggacaggcgcaatcactgtggcatagcatcggccgcgagctatcccacggtctag

SEQ ID NO: 4090 - RNA, 984 nt, synthetic construct
  misc_feature 1..984: note = AAA51932 variant
  source 1..984: mol_type = other RNA
atgctattcctcctcctccccctactcgcagtactacccggcgacggcaacgctgacggcctcaaagaacccctctctttccacgtcacctggatagcctccttctacaaccactcatggaaacaaaacctcgtctctggttggctctccgacctacaaactcacacctgggactccaattcctcaaccatcgtcttcctctgcccatggtcccgaggcaacttctccaatgaggaatggaaagaacttgaaacactcttccgcatacgaaccatccgctccttcgaaggcatccgccgctacgcccacgaactacaatttgaataccccttcgaaatccaagtcaccggcggctgcgaactccactcaggcaaagtctccggctccttcctccaactcgcctaccaaggctccgacttcgtttccttccagaacaactcctggctaccctatcccgtcgccggcaacatggcaaaacacttctgcaaagtactcaaccaaaaccaacacgaaaacgacatcactcacaacctactctccgacacatgcccccgcttcatcctcggcctcctcgacgccggcaaagcccacttacaacgccaagtcaaacccgaagcctggctctcccacggcccctcacccggccccggccacctccaactcgtctgccacgtctctggcttctaccccaaacccgtctgggttatgtggatgcgcggcgaacaagaacaacaaggcacccaacgaggagacatactcccctccgccgacggcacttggtacctccgcgcaaccctcgaagttgccgccggagaggccgcagacctatcctgccgagtaaaacactcctccctcgaaggacaagacatagtcctatactgggaacaccactcctccgtcggcttcattatcctcgccgtcatcgtaccactactactcctcataggactcgcactctggttccgcaaacgctgcttctgctaa

SEQ ID NO: 4091 - RNA, 1002 nt, synthetic construct
  misc_feature 1..1002: note = AAA51939 variant
  source 1..1002: mol_type = other RNA
atgctactactccccttccaactactcgccgtcctcttccccggcggcaactccgaacacgcattccaaggccccacctccttccacgtcatccaaacctcctccttcaccaactccacctgggcccaaacacaaggctccggctggctcgacgacctacaaatccacggctgggactccgactccggcaccgccatcttcctaaaaccctggtccaaaggcaacttctccgacaaagaagtagccgaacttgaagaaatcttccgagtctacatcttcggcttcgcccgcgaagtccaagacttcgcaggcgacttccaaatgaaataccccttcgaaatacaaggcatcgcaggctgcgaactccactcaggcggcgccattgtttcatttctccgcggcgcactcggcggcctcgacttcctatccgtcaaaaacgcatcctgcgtcccctcccccgaaggcggctctcgagcacaaaaattctgcgcactcataatacaataccaaggcatcatggaaaccgtccgaatcctcctctacgaaacctgcccccgctacctcctcggcgtcctaaacgccggcaaagccgacctacaacgccaagtcaaacccgaagcctggctctcctccggtcccagcccaggccccggaagactccaactcgtatgccacgtctccggcttctatccaaaacccgtctgggtaatgtggatgcgcggcgaacaagaacaacaaggcacccaactcggcgacatcctccccaacgccaactggacctggtacctacgcgctaccctcgacgtcgccgacggagaggccgcaggcctcagctgccgagtcaaacactcttcactcgaaggccaagacatcatactctactggcgaaatccgacatccatcggctccatcgtactcgccatcatagtcccttccctcctactcctcctatgcctagccctctggtacatgcgccgccgcagctaccaaaacatcccataa

SEQ ID NO: 4092 - RNA, 1002 nt, synthetic construct
  misc_feature 1..1002: note = AAI26466 variant
  source 1..1002: mol_type = other RNA
atgctattcctccaattcctactcctagccctcctcctccccggcggagataacgccgacgcatcccaagaacacgtcagcttccacgtaatccaaatcttctcattcgtcaaccaatcttgggcccgaggccaaggctccggctggctcgacgaactacaaacccacggctgggactccgaatccggcactataatcttcctacacaactggtcaaaaggcaacttctccaacgaagaactatccgacctagaactcctgttccgtttctaccttttcggcctaacccgcgaaatccaagaccatgcctcacaagactactccaaatacccctttgaagtccaagtcaaagccggctgcgaactccactccggcaaatcccccgaaggattcttccaagttgccttcaacggactcgacctcctatccttccaaaacaccacctgggtcccctcccccggctgcggatctctcgcccaaagcgtatgccacctcttaaaccaccaatatgaaggcgtcaccgaaacagtctacaacctcatccgatccacttgcccccgtttcctactcggactcctcgacgccggcaaaatgtatgtccaccgccaagtacgacccgaagcctggctcagctcccgcccctcccttggctccggccaactcctactcgtatgccacgcctccggcttctaccccaaacccgtatgggtcacctggatgcgaaacgaacaagaacaactcggcaccaaacacggcgacatcctgcccaacgctgacggcacatggtacctgcaagtcatcctagaagtcgcctctgaagaaccagcaggcctatcctgccgagtccgccactcctccctcggcggccaagacatcatcctctactggggccaccacttctccatgaactggatcgccctcgtcgtcatcgtccccctcgtcatccttatcgtcctagtactctggttcaaaaagcactgctcctaccaagacatactctaa

SEQ ID NO: 4093 - RNA, 1008 nt, synthetic construct
  misc_feature 1..1008: note = AAA59672 variant
  source 1..1008: mol_type = other RNA
atgggctgcctcctcttccttctcctatgggcactactccaagcctggggctccgccgaagtcccacaacgactcttccccctccggtgcctgcaaatttcatcattcgccaactccagctggacccgcaccgacggcctagcctggctcggcgaactccaaacacactcctggtccaatgactcagacaccgtccgctccctcaaaccatggtcccaagggaccttctccgaccaacaatgggaaaccctccaacacatcttccgagtctaccgctcctccttcacccgcgacgtcaaagagttcgccaaaatgctacgcctctcctacccactcgaactacaagtctccgcagggtgcgaagttcaccccggaaacgcctcaaacaacttcttccacgtcgcgttccaaggcaaagacatcctcagcttccaaggcacctcctgggaaccaacccaagaagcccccctgtgggtcaacctcgccatccaagtcctcaaccaagacaaatggacccgcgagaccgtacaatggctactcaacggcacctgcccccagttcgtcagcggcctcctagaatcaggcaaatccgaactaaaaaaacaagtcaaacccaaagcctggctctcccgaggcccctcccccggcccaggcagactcctcctagtctgccacgtatcaggcttctaccccaaacccgtctgggtcaaatggatgcgaggcgaacaagaacaacaaggcacacaacccggtgacatcctgccaaacgcagacgaaacctggtacctccgagccaccctagacgtcgtcgccggcgaagccgccggactctcctgccgcgtcaaacactcctctctcgaaggccaagacatcgtcctctactggggcggctcctatacatcaatgggactaatcgcccttgccgtcctcgcctgcctactcttcctactaatcgtcggcttcacatcccgcttcaaacgccaaacatcctaccaaggcgtactctaa

SEQ ID NO: 4094 - RNA, 1167 nt, synthetic construct
  misc_feature 1..1167: note = EAW52830 variant
  source 1..1167: mol_type = other RNA
atgctcctcctgttcctcctcttcgaaggcctttgctgccccggcgaaaacacagcagccccccaagccctccaatcctaccacctagccgccgaagaacaactctccttccgcatgctccaaacctcatcattcgccaaccactcctgggcccactccgaaggctccggatggctcggcgacctccagacccacggctgggacacagtcctcggcacaatccgctttctcaaaccctggtctcacggcaacttctccaaacaagaactaaaaaacctccaatccctcttccagctctacttccactccttcatccaaatcgtccaagcatcagcaggccaattccaactcgaataccccttcgaaatccaaattctcgcaggctgccgtatgaacgccccccaaatcttcctcaacatggcctaccaaggctcagacttcctatccttccaaggaatttcctgggaaccctcccccggcgccggaatacgcgcccaaaacatctgcaaagtcctcaaccgatacctagacatcaaagaaatccttcaatccctcctcggccacacctgcccccgcttcctagcgggactcatggaagccggcgaaagcgagctaaaacgcaaagttaaacccgaagcctggctttcctgcggtccatcccccggccccggacgcctccaactcgtctgccacgtcagcggcttctaccccaaaccagtctgggtaatgtggatgcgtggagaacaagaacagcgcggcacccaacgcggagatgtcctccccaacgccgacgaaacctggtacctacgagccaccctagacgtcgccgccggcgaagccgccggactctcctgccgcgtcaaacactcctcactcggcggccatgacctcatcatccactggggcggctactccatcttcctcatcctcatctgccttaccgtcatagtcaccctcgttatcctcgtagtcgtcgacagccgactaaaaaaacaatcaagcaacaaaaacatcctctcaccccacacaccctcccccgtcttcctcatgggcgccaacacccaggataccaaaaactcccgacaccaattctgccttgcccaagtctcctggatcaaaaatcgcgtactcaaaaaatggaaaacacgactcaaccaactatggtaa

SEQ ID NO: 4095 - RNA, 894 nt, synthetic construct
  misc_feature 1..894: note = AAA35581 variant
  source 1..894: mol_type = other RNA
atgaccacaccccgcaactccgtcaacggcaccttccccgccgaacccatgaaaggccccatcgccatgcaatctggcccaaaacccctcttccgccgcatgtcctccctagtaggccccacccaatcattcttcatgcgcgaatcaaaaaccctcggagcagtccaaatcatgaacggcctcttccacatcgccctcggaggcctcctcatgatccccgccggcatctatgcacccatctgcgtcacagtctggtaccccctctggggcggcataatgtacataatctccggctccctcctcgccgccaccgagaaaaactcccgcaaatgcctcgtcaaaggcaaaatgatcatgaactccctctccctcttcgccgccatctcgggcatgatcctctccatcatggacatcctaaacatcaaaatctcccacttcctcaaaatggaatccctcaacttcatccgcgcccacaccccctacatcaacatctacaactgcgaaccagccaacccctccgaaaagaactccccctccacccaatactgctactccatccaatcactcttcctaggaatactatcagtcatgctcatcttcgccttcttccaagaactcgtcatcgccggcatcgtcgaaaacgaatggaaacgaacctgctcccgcccaaaatcaaacatcgtcctcctctccgccgaagaaaagaaagaacaaacaatcgaaatcaaagaagaagtcgtcggcctcaccgaaacatcctcacaacccaaaaacgaagaagacatcgaaatcatccccatccaagaagaagaagaagaagaaaccgaaaccaacttccccgaaccgccccaagaccaagaatcctcccccatagaaaacgactcaagcccctaa

SEQ ID NO: 4096 - RNA, 1989 nt, synthetic construct
  misc_feature 1..1989: note = AAC18956 variant
  source 1..1989: mol_type = other RNA
atggaaagcaaaaccgaaaaatggatggaacgcatccatttaaacgtctcagaaagacctttcccaccccacatacaactacccccagaaatccaagaatcccaggaagtcaccctgacgtgcttactaaatttctcatgttacggctacccaatacaactccagtggctcctagaaggagtcccaatgcgccaagcagcagtcactagcacatcactcacaatcaagtccgtcttcacacgctcagaattaaaattctcaccccaatggtcccaccacggaaaaatcgtaacctgccaactccaagacgccgacggaaagttcctgtcaaacgacaccgtccagctgaacgtcaaacacactcccaaactagaaatcaaagtcacaccatccgatgccatagttcgagaaggcgactccgtcaccatgacctgcgaagtatcctcaaccaatccggagtacacaaccgtctcctggctaaaagacggaacctcgctaaagaaacaaaacacgttcaccctcaacctccgcgaagtgaccaaagaccaatccggcaaatactgctgccaagtcagcaacgacgtcggccccggccgctccgaagaagtattcctccaagtccaatacgcccccgaaccctcaaccgtccaaatcctacactcacccgcggtcgaaggatcacaggtcgagttcctctgcatgtccctcgccaaccccctacccaccaactacacctggtaccacaacggcaaagaaatgcaaggccgaacagaagagaaagtacacatacccaaaatcctcccctggcacgccggcacctactcttgcgtcgccgaaaacatcctcggcacaggacaacgcggcccgggcgccgaactggacgtccaatatccacccaagaaagtcactactgtcatccaaaaccccatgcccatacgcgaaggcgacaccgtcactctgtcctgcaactacaactcctcaaaccctagtgtaacacgctacgaatggaaaccccacggcgcatgggaagaaccgtcgctcggcgtcctcaaaatacaaaaagtcggatgggacaacacaacaatcgcctgcgcaagatgcaactcatggtgctcctgggcctcacctgtagccctaaacgtgcaatacgcgccacgtgacgtcagagtacgcaaaataaaacccctctccgaaattcactccggcaactccgtaagcctccaatgcgacttctctagctctcacccaaaagaagtacaattcttctgggagaaaaacggacgactcctcggtaaagaatcccaactcaacttcgatagcatatcccccgaagacgcaggctcatattcctgttgggtcaacaactcaataggccaaaccgcaagcaaagcctggacactcgaagtcctatacgcaccgcgacgcctccgcgtcagcatgtccccgggcgatcaagtaatggaaggtaaaagcgccacactacgttgcgaatccgacgccaaccctcccgtcagccactacacctggttcgactggaataaccaatcactaccctaccactcgcaaaaactacgacttgaacccgtaaaagtccaacactccggcgcttactggtgccaaggcaccaactccgtcggcaaaggacggtcacccctctcaaccctaaccgtctactactcacccgaaacgattggacgcagggtcgccgtcggactcggctcgtgcctagccatcctaatcctcgcaatatgcggcctgaaattacaaaggcgcgacgcagaatcatccgaaatgcaacgcccgccacgaacctgtgacgacactgtcacttacagcgcacttcataaacgccaagtcggcgactacgaaaacgtaatcccagatttccccgaggacgaaggcatccactatagcgagttaatccaattcggcgtcggcgaacgaccccaagcccaagaaaacgtcgactatgtcatcctcaaacactaa

SEQ ID NO: 4097 - RNA, 2544 nt, synthetic construct
  misc_feature 1..2544: note = AAB06448 variant
  source 1..2544: mol_type = other RNA
atgcacctactcggcccttggctcctcctcttagtcctcgaatacctagcattctctgacagttccaaatgggtatttgagcacccagagaccctctacgcctgggaaggcgcctgcgtttggattccatgcacatatcgcgcactcgacggagatctcgagtcattcatactattccataatcccgagtacaacaaaaacacaagcaaattcgacggcacccgcctatacgaatccacgaaagatggcaaggtaccctccgaacaaaaacgcgtacaattcctaggagacaagaacaagaactgcacactgtcaatacaccccgtccatctcaacgacagcggccaactaggcctgcgcatggagagcaaaacagaaaaatggatggaacgcatccacctaaacgtatccgaaaggcccttcccaccacacatccaactcccaccagaaatccaagaatcgcaagaagtcacgctaacatgcctcctaaacttcagttgctacggctaccccatccaactacaatggctactcgagggcgtgccaatgagacaagcggcagtcacatcaacaagcctcaccatcaaaagcgttttcacacgatccgagctaaaattcagcccccaatggagccaccacggaaaaatcgtaacttgccaactccaggatgccgacggcaaattcctctccaacgacacggtccaactcaacgtaaaacacacaccaaaactagaaatcaaagtaaccccatccgacgccatagtaagagagggtgactcagtcacaatgacctgcgaagtctcgagctcaaacccggaatacaccacagtttcctggctcaaggacggcacctccctcaagaaacagaataccttcacactgaaccttcgagaagtaacgaaagaccaatccgggaaatactgctgccaggtctccaacgacgtcgggcccggtcgatccgaagaagttttcctccaagtacaatacgcacccgaaccctcaaccgtacaaatccttcattccccggccgtagaaggtagccaagtcgagttcttatgcatgagcctcgctaacccactgccaaccaactacacctggtatcacaacggcaaagaaatgcaaggacgcacagaagaaaaagtacatatccctaaaattctaccctggcacgccgggacctactcatgcgtagccgaaaacatccttggaacaggacaacgcggccccggcgcagaactcgacgtacaatatcctcccaagaaagtgaccactgtcatccaaaaccccatgcccattcgcgaaggcgataccgtaacactgagctgcaactacaactcatcgaacccatccgtcacacgatacgaatggaaaccacatggcgcctgggaagaacccagcctaggcgttttaaaaattcaaaatgtaggctgggacaacacaacgatcgcctgcgcagcctgcaacagctggtgttcatgggctagccccgtagccctcaacgtacagtacgccccaagagacgtacgggtacgaaaaatcaaaccgctctcagaaatccactcaggcaacagcgtctcactccagtgcgacttctcatcctcacaccctaaagaagtccaattcttttgggagaaaaacggacgccttctcgggaaagaatcgcaactcaactttgactccatatccccagaagacgcaggcagctatagctgttgggtcaacaactcaatagggcaaacagcatccaaagcatggactcttgaagtactctacgccccacgccggctccgcgtctccatgtcaccaggagatcaagtcatggaaggcaaaagcgcaaccctcacctgtgaatcagacgccaatcccccggtcagccactacacctggtttgattggaacaaccaatccctgccctaccacagccaaaagctccgcctagaacccgtaaaggtccaacactcaggcgcctactggtgccagggcaccaactcagtcggtaaaggacgaagcccactttccacgcttaccgtctactactcccccgagactataggtagacgcgtagcagtcggacttggcagctgcctcgctatcctgatcctcgcaatatgcggactcaaactccagagacgctggaaacggacccaatcccaacaaggtctccaggagaactcctccggccagagcttcttcgtccgtaacaagaaagtccgcagagcacccctctccgagggcccccacagcctgggttgctacaaccctatgatggaagacggcatctcatataccacactacgtttccccgagatgaacatcccacgcacaggcgacgccgaatcctccgaaatgcaacgacccccacccgactgcgacgacaccgtcacatactccgcactccacaaacgtcaagttggcgactacgaaaacgtcatacccgacttccccgaggacgaaggaatacactactcggaactgatccaattcggagtcggcgaaagaccacaagcccaagaaaacgtcgactacgtcatactcaaacactag

SEQ ID NO: 4098 - RNA, 2544 nt, synthetic construct
  misc_feature 1..2544: note = ABK41939 variant
  source 1..2544: mol_type = other RNA
atgcacctccttggcccctggctactactactcgtcctagagtacctagccttcagcgactcctcgaaatgggtattcgaacaccccgaaaccctctacgcatgggagggagcctgcgtttggatcccgtgtacataccgagccctcgacggcgacctcgagtccttcatcctcttccacaacccagaatacaacaaaaacaccagcaagttcgacgggacccgcctatatgaaagtacgaaggacgggaaagtcccatccgaacaaaaacgagtacaatttctgggagacaaaaacaaaaactgcacactctcaatacaccccgtgcacctcaacgactccggccagctgggactacgtatggagtccaaaaccgaaaaatggatggaaagaatccacctcaacgtaagtgagagaccctttcccccacacatccaactacccccagaaatccaggaatcccaagaagtcaccctcacatgcctgctcaatttctcctgctacggctaccccatacagctccagtggctcctggagggagtcccaatgcgacaggctgccgtcaccagcacctccctcaccatcaaatccgtcttcacaaggtccgaactaaaattctccccgcaatggtctcatcacggaaaaatcgtaacctgccaacttcaagacgcagacggcaaattcctctcgaacgacacggtccaattaaacgtaaaacacaccccgaaattagaaataaaagtaacacctagcgacgccatcgtacgagaaggagactccgttacaatgacttgcgaagtaagctcctcaaaccccgaatacaccacggtctcgtggctaaaagatggcacatcactaaagaaacaaaacacattcaccctcaacctccgcgaagtaacaaaagaccaatccggcaaatactgctgccaagtatcaaacgacgtcggccccggccgcagtgaggaagtcttcctacaagtccaatatgcacccgaaccctccactgtccaaatcctgcactctcccgccgtggagggcagccaagtcgaatttctctgcatgagcctagcaaatcccctccctacaaactacacctggtatcacaatggcaaagaaatgcaaggcaggaccgaagaaaaagtacatatccccaaaatcctcccctggcacgccggcacctactcctgcgtcgccgaaaacatcctcggcaccggccagagaggccccggtgctgaactcgacgtacaatacccacccaagaaagtcaccaccgtcatacaaaaccccatgccaatccgcgaaggcgataccgtcaccctcagttgcaactacaactcctctaacccctcggtcacacgctacgaatggaaaccacacggcgcgtgggaagaaccctccctcggggtactcaaaatccaaaacgtcggctgggacaacacgaccatagcctgcgccgcctgcaactcctggtgctcctgggcatctccagtagccctaaacgtccagtacgcaccccgcgacgtccgagtaaggaaaataaaacccctctccgaaatacactcaggtaactccgtctcccttcaatgcgacttcagttcatcgcaccccaaagaagtccaattcttctgggagaaaaacggccgcctcctcgggaaagaatcgcaactaaatttcgactccatctcccccgaagacgccggatcatactcatgctgggtcaataactccataggacaaacggcaagtaaggcgtggaccctcgaagtattatacgctccccgcagactgagagtatcaatgtctcctggcgatcaagtcatggaaggcaaatccgccaccctaacctgcgaatcggacgcaaacccacccgtgtcccactacacgtggttcgactggaacaatcaatctctcccctaccacagccagaaactccgactcgaaccagtcaaagtacaacactccggagcatactggtgccaaggcaccaactcggtcggcaaaggtcgcagtcccctcagtacactcacagtctactactcacccgaaaccattggcagacgcgtcgcggtcggtctcggctcctgcctggccatcctcatcctcgccatttgcggcctcaaattacaacgccgatggaagcgaacacaatcccaacaaggcctccaagagaactcctcaggccagtccttcttcgtgcggaacaagaaagtccgacgagccccactaagcgaaggcccccactcactcggatgctacaaccccatgatggaagatggaatctcctataccaccctccgtttccctgaaatgaacatacccagaacaggagacgccgaatcgtcagagatgcaacgcccaccacccgactgcgacgacaccgtaacttattcggcactacacaaacgccaagtcggcgactacgaaaacgtcattcccgacttccccgaagacgaaggcatccactactccgaactaatccaatttggcgtaggagaaaggcctcaagcccaggaaaatgtcgactatgtaatcttaaaacactaa

SEQ ID NO: 4099 - RNA, 1605 nt, synthetic construct
  misc_feature 1..1605: note = CAE47548 variant
  source 1..1605: mol_type = other RNA
atgctacgcagacgcggatccccaggtatgggcgtccacgtaggcgcagccctcggcgccctgtggttctgtctcactggcgcactcgaagtacaagtacccgaagacccagttgtcgccctcgtcggaacagacgcaacactctgctgctccttctctcctgaacccggattcagcctcgcccaacttaatctcatctggcaactcacagacaccaaacaactcgtacactcattcgccgaaggacaagaccaaggctccgcatacgccaatcgaaccgccctattccccgacctacttgcccaaggaaacgcatccctccgccttcaacgcgttcgcgtcgccgacgaaggcagcttcacatgcttcgtctccatccgcgacttcggatccgcagcagtatccctccaagtagccgcaccatactccaagccatcaatgaccttagaacccaacaaagacctacgaccaggcgacaccgtaaccataacctgctcatcctaccaaggctacccagaagcggaagttttctggcaagacggccaaggcgtacccctcaccggcaacgtcaccacaagtcaaatggccaacgaacaaggcctattcgacgtccactccatcctccgagtcgtcctaggtgccaacggaacatactcctgccttgttcgcaaccccgtcctccaacaagacgcacattcctccgtcaccataactccacaacgatcccccaccggcgccgtcgaagtccaagtccctgaggaccccgtagtcgccctcgtaggaaccgacgcaaccctacgctgctcattcagtccagaaccaggtttctcactagcacaactaaatctgatctggcagctcaccgacaccaaacagctcgtacactcattcactgaaggccgcgaccaaggctccgcctacgccaaccgcacagccctattcccagatctacttgcccaaggcaacgcctccctacgcctacaacgcgtccgagtcgcagacgaaggatcctttacctgcttcgtcagcatcagagacttcggctccgccgcagtgtccctccaagtagccgccccatactccaaaccctccatgacccttgaacccaacaaagacctccgcccaggcgacaccgtaaccataacatgctcaagctacagagggtacccagaagccgaagttttctggcaagacggccaaggcgttcccttgaccggaaacgtaaccacctcacaaatggccaacgaacaaggcctcttcgacgtccactcagtcctacgcgtagtgcttggagccaacggcacctattcatgcctcgtccgcaaccccgtcttacagcaagacgcccatggctccgtcactatcactggccaacctatgaccttccctccagaagccttatgggtcaccgtcggcctctcagtctgcctcatcgccctcctagtcgcactagcattcgtctgctggcgcaagatcaaacaatcctgcgaagaagaaaacgccggcgccgaagaccaggacggagaaggagaaggctcaaaaacagccctacaaccacttaaacactccgactcaaaagaagacgacggccaagaaatagcatga

SEQ ID NO: 4100 - RNA, 639 nt, synthetic construct
  misc_feature 1..639: note = BAG57312 variant
  source 1..639: mol_type = other RNA
atgcccctcctcctcctactcccccttctctgggcagacctcacacaccgccccaaaatcctcatccccggcaccctcgaacccggccactccaaaaacctcacatgctccgtctcctgggcctgcgaacaaggcaccccacccatcttctcctggctctccgcagcacccacctccctaggcccccgcaccacccactcatccgtcctcatcatcacaccccgaccccaagaccacggcaccaacctaacctgccaagtcaaattcgccggcgccggcgtaaccaccgaacgaaccatccaactcaacgtcacctacgtcccccaaaaccccaccaccggcatcttccccggcgacggctcaggcaaacaagaaacacgcgccggcgtcgtccacggcgccatcggcggcgccggcgtcaccgccctcctcgccctatgcctctgcctcatcttcttcatcgtcaaaacacaccgccgcaaagccgcccgcaccgccgtcggccgcaacgacacccaccccaccaccggctccgcctcccccgtctccgacggcgcatcctggcaccccgtatgcccagccgacacctcatcccaatgcggcccaccctcctgccccatacaacatttccaaaactaa

SEQ ID NO: 4101 - RNA, 1095 nt, synthetic construct
  misc_feature 1..1095: note = AAK83654 variant
  source 1..1095: mol_type = other RNA
atgcccctcctcctcctcctccccctcctctgggccggcgccctcgcaatggacccaaacttctggctccaagttcaagaatccgtcaccgtacaagaaggactctgcgtcctcgtcccatgcaccttcttccaccccatcccctactacgacaaaaactcccccgtccacggctactggttccgtgaaggcgcaatcatatcccgcgactcccccgtcgctaccaacaaactcgaccaagaagtccaagaagaaactcaaggccgcttccgcctacttggcgaccccagccgcaacaactgctccctatccatcgtcgacgcccgccgccgcgataacggctcctacttcttccgcatggaacgtggcagcaccaaatatagctacaaatcgccccaactctccgtacacgtaactgacctcacccaccgcccaaaaatcctcatcccaggcaccctcgaacccggccattccaaaaacctaacctgctccgtctcctgggcttgcgaacaaggaacaccgcccatcttctcttggctctccgccgcaccaacctccctcggaccccgcacaacccactcatccgtcctcatcataaccccacgcccccaagaccacggcaccaacctcacatgccaagtcaaattcgccggagccggcgtaacaaccgaacgaaccatccaactaaacgtcacatacgtcccccaaaaccccaccactggcatcttcccaggcgacggatccggcaaacaagaaaccagagccggcgtagtccacggcgccataggcggagcaggcgtcacagccctcctagcactatgcctatgcctcatctttttcatcgtcaaaacccatcgccgaaaagccgcccgcaccgcagtaggccgcaacgacacccacccaacaacaggatcagctagcccaaaacaccaaaagaaatccaaactacacggcccaaccgaaacctcctcatgctccggagccgcccccaccgtagaaatggacgaagaactccactatgcctccctcaacttccacggaatgaacccctcaaaagacacctccaccgaatattccgaagtacgcacacaataa

SEQ ID NO: 4102 - RNA, 1095 nt, synthetic construct
  misc_feature 1..1095: note = CAD36509 variant
  source 1..1095: mol_type = other RNA
atgcccctactcctcctcctcccacttctctgggccggcgccctcgccatggaccccaacttctggctccaggtccaagaatccgtcaccgtccaagaaggcctctgcgtacttgtcccctgcaccttcttccaccccataccctactacgacaaaaactctcccgtccacggctactggttccgcgaaggcgcaatcatctctcgcgactcccccgtcgccaccaataaactcgaccaagaagtccaagaagaaacccaaggccgattccggctactaggcgacccctctcgcaacaactgctccctatccatcgtcgacgcccgccgacgagacaacggctcctacttcttccgcatggaacgcggctccaccaaatactcatacaaatccccccaactatcagttcacgtcaccgacctcacacaccgcccaaaaatactcatccccggcacactcgaacccggacactcaaaaaacctaacctgctccgtatcatgggcctgcgaacaaggaaccccacccatcttctcctggctctccgccgcccccacctccctcggcccacgaaccacccactcatctgtcctcatcataaccccacgtccccaagaccacggcacaaatttaacctgccaagtcaaattcgccggcgccggcgtcaccaccgaacgcaccatacaactaaacgtcacctacgtcccacaaaaccccaccaccggcatcttccccggcgacggatccggaaaacaagaaacccgcgcaggagtcgtccacggcgccatcggcggcgctggagtaacagcactcctcgccctctgcctctgcctcattttcttcatcgtcaaaacccaccgcagaaaagcagctcgcacagccgtaggacgcaacgacacccaccccacaaccggttccgcctcccccaaacaccaaaaaaaatcaaaactccacggccccaccgaaacctcatcctgctccggcgccgcccccaccgtcgaaatggacgaagaactccactacgccagcctcaatttccacggcatgaacccatcaaaagacacctcaaccgaatactcagaagtacgcacacaataa

SEQ ID NO: 4103 - RNA, 624 nt, synthetic construct
  misc_feature 1..624: note = AAA52295 variant
  source 1..624: mol_type = other RNA
atgcagagcgggacccattggagggtcttgggcttgtgcctgctctcggtcggggtctggggccaggacgggaacgaggaaatgggcggaatcacgcaaacgccctacaaagtgagcataagcggaaccacggtcatactcacgtgtccgcaatatcccgggagcgagatcttgtggcagcacaatgacaagaacataggcggagacgaggacgataaaaatatcgggagcgacgaagatcacttgagcttgaaagagttctcggaactagaacagagcgggtactatgtctgttacccacgcgggagcaagccagaggacgcgaacttttacttgtacttgcgcgcgcgcgtgtgcgagaactgcatggagatggatgtcatgagcgtggccacgatcgtgatcgtggacatatgcataaccgggggcttgctcttgctagtgtactattggtcgaaaaaccgaaaggccaaggcaaagcccgtgaccaggggagcgggcgcgggagggcgccagcgcgggcaaaataaagagcgaccgcccccggtaccgaacccggactacgaaccaatcaggaaaggacaaagggacttatactcaggcttgaaccagagaagaatctag

SEQ ID NO: 4104 - RNA, 495 nt, synthetic construct
  misc_feature 1..495: note = AAH25703 variant
  source 1..495: mol_type = other RNA
atgaaatggaaagcactattcaccgcagccatcctacaagcccaactccccatcaccgaagcccaatccttcggactcctcgaccccaaactctgctacctcctcgacggcatcctcttcatctacggcgtcatcctaaccgccctattcctccgagtaaaattctcacgcagcgcagacgcccccgcctaccaacaaggccaaaaccaactctacaacgaactcaacctcggccgccgcgaagaatacgacgtcctcgacaaacgccgaggccgcgaccccgaaatgggcggcaaaccccaacgccgcaaaaacccccaagaaggactctacaacgaactccaaaaagacaaaatggccgaagcctactccgaaatcggcatgaaaggcgaacgccgacgcggcaaaggccacgacggcctataccaaggcctctccacagccaccaaagacacctacgacgccctccacatgcaagccctccccccccgctaa

SEQ ID NO: 4105 - RNA, 2229 nt, synthetic construct
  misc_feature 1..2229: note = CCDS7897.1 variant
  source 1..2229: mol_type = other RNA
atggacaaattctggtggcacgccgcctggggtctctgcctcgtccctctctctctagcccaaatagatctaaacatcacatgccgcttcgccggcgtcttccacgttgagaaaaacggacgctactctatatcccgaaccgaagccgccgacctctgcaaagcatttaactccaccctccccactatggcccaaatggaaaaagccctctccatcgggtttgaaacatgccgatacggcttcatcgaaggccacgtagtcatcccccgcatacaccccaattctatatgcgccgccaacaacaccggcgtctacatattaacctcaaacacatcacagtacgacacttactgcttcaacgcatcagcgcccccagaagaagactgtacctccgtaaccgatcttcccaacgcattcgacggaccaatcaccatcacaatagtaaaccgcgacggaacacgctacgtccaaaaaggagagtaccgtacaaacccagaagacatctaccccagcaaccccacagacgacgacgtctcgtcaggatctagctcggaacgatcttccacgtcaggaggctacatattctacaccttctccacagtccacccgatcccagacgaagactcaccctggatcacagactccaccgatcgcatccctgccaccaccctgatgtccaccagcgccaccgcaactgaaacggccaccaagagacaagaaacgtgggactggttttcctggctctttctacccagcgagagcaaaaaccacctccataccacaacccaaatggcaggaacatcatcaaacacaatatcggcgggctgggaacccaacgaagaaaacgaagacgaacgcgatcgacacttatcattctccggctccggcatcgacgacgacgaagacttcatatccagcaccatatcaacaacaccccgcgccttcgaccacaccaaacagaaccaagactggacccaatggaacccatctcactccaaccccgaagtccttctccaaacaaccaccagaatgactgatgtagacagaaacggcaccacagcctacgaaggcaactggaacccagaagcacaccctccccttatccaccacgaacaccatgaagaagaagaaacaccccactccacctccaccatacaagctaccccctcttcaaccaccgaagaaacagcaacccaaaaagaacagtggttcggcaaccgctggcacgaaggctaccgccaaacaccgaaagaagactcccactccaccactggtacagcagcagcctccgcccacacaagccatcccatgcaaggacgcaccaccccgtccccagaagacagctcctggaccgactttttcaacccaatctcccacccaatgggccgaggccaccaagccggccgcaggatggatatggactccagccacagcatcaccctccaaccaacagccaaccccaacacaggactcgtcgaagacctcgaccgaaccgggccactgtccatgactacccaacaatccaactcccagtccttctccacttcccacgaaggactagaagaagacaaagaccacccaactacctcgacactcacctccagcaacagaaatgacgtcacaggtggacgacgcgacccaaaccacagcgaaggatcaaccacactcctcgaaggatacacctcccactacccgcacaccaaagaaagccgtacattcatcccagttacatctgctaaaacaggcagcttcggagtcacagcagtcacagtcggcgatagcaactcgaacgtcaaccgctccctctcaggcgaccaagacaccttccatcccagcggtggttcccacaccacccacggttcagaatcagacggccactcccacggctcccaagaaggcggcgccaatacaacctcaggtcccatccgaacgccccaaatacccgaatggttgataatccttgctagccttctcgcactggcactcatcctagccgtttgcatagccgtcaactcccgccgacgatgtggacagaaaaagaaactggttataaattcaggcaacggcgcggtcgaggaccgcaaaccctcaggcctcaacggcgaagcctccaagtcccaagaaatggttcacctagtcaacaaagaatcctccgaaacccccgaccaattcatgaccgctgacgaaacccgtaacctccaaaacgttgacatgaagatcggggtctaa

SEQ ID NO: 4106 - RNA, 2100 nt, synthetic construct
  misc_feature 1..2100: note = XM_006718388.1 variant
  source 1..2100: mol_type = other RNA
atggacaaattctggtggcacgcggcatggggcctctgccttgtcccactctcactggcccaaatagatctaaacatcacatgccgcttcgcaggcgtctttcacgtcgaaaaaaacggacgctactcaatctcccgaaccgaagccgcagacctctgtaaagcatttaacagcaccctccccaccatggcccaaatggaaaaagcacttagtatcggtttcgaaacctgccgctacggatttatagaaggacacgtagtcatcccccgcatccaccccaactccatctgcgccgccaacaacacaggcgtctatatactcacatcaaacacgtcccaatacgacacctactgctttaacgcctcagccccaccggaagaagactgcaccagcgtaaccgaccttccaaacgccttcgacggccccatcaccataaccatcgtcaaccgcgacggcacccgctacgtccaaaaaggcgaataccgcaccaaccccgaagatatataccccagcaacccaacagacgacgacgtatcctcaggctcctcctcagaacgatcctcaacaagcggcggctacatcttctacaccttctcaaccgtgcaccccatccccgacgaagactcaccctggatcaccgactccactgaccgcataccagccacaacccttatgagtacctctgccacagccaccgaaacagccaccaaaagacaagaaacttgggactggttcagctggctattcctccctagcgaatccaaaaatcacttacacaccaccacccaaatggccggcacatcctcaaacaccatatcagcaggttgggaacccaacgaagaaaacgaggacgaacgcgatcgacacctcagcttctccggttcaggcatagacgacgacgaggacttcatctcctccacaatctcaaccactccacgcgcctttgaccacacaaaacaaaatcaagactggacccaatggaacccgtcccattccaaccccgaggtcctcctccagaccaccacgagaatgaccgacgtcgacagaaacggtacaaccgcctacgaaggcaattggaacccagaagcccacccccctctaatccaccacgaacaccacgaagaagaagaaacaccacactcgacctccacaaccgcctcagctcatacctctcacccaatgcaaggtcgcacaaccccctcacccgaggactcgtcttggacagacttctttaaccccatctcacaccccatgggccgaggacaccaggctggtcgacgaatggacatggactcctctcattccatcacactccaacccacagccaaccccaacaccggcctagtcgaagatctcgaccgcaccggccccctctcaatgacaacccaacaaagcaactcccaaagtttctcaacctcacacgaaggacttgaagaagacaaagaccaccccaccacctcaacccttacctcctcaaaccgaaacgacgtcacaggaggacgccgcgaccccaaccactctgaaggctcaacaaccctcctagaaggatacacctcccactacccacacaccaaagaatccaggaccttcatccccgtaacctcagcgaaaaccggctccttcggtgtcaccgcagtaacagtcggcgacagcaactcaaacgtaaatcgttcactatccggtgaccaagacaccttccacccatcgggcggatcccacaccacccacggctccgaatcagacggccactcccacggctcccaagaaggaggcgccaacaccacgagcggacccatccgaaccccacaaatacccgaatggttaataatactcgccagcctactcgccctagcccttatcctagccgtatgcatcgccgtaaactcacgcagacgatgcggccaaaaaaaaaaactagtaataaacagcggcaacggggcggtcgaagaccgcaaaccatcaggcctcaacggcgaagcaagcaaatcccaagaaatggtccacctagtcaacaaagagtcatcagagaccccagaccaattcatgaccgccgacgaaacacgcaacctccaaaatgtcgacatgaaaatcggcgtctga

SEQ ID NO: 4107 - RNA, 1377 nt, synthetic construct
  misc_feature 1..1377: note = AAA35572 variant
  source 1..1377: mol_type = other RNA
atgaaccgcggcgtcccctttagacacctcctactcgtactccaactcgccctcctacccgccgcaacacaaggcaagaaagtcgtactcggcaagaaaggcgacaccgtcgaactaacctgcaccgccagccaaaagaaatcaattcaattccactggaaaaactcaaaccaaatcaaaatcctaggaaaccaaggatcgtttttaaccaaaggcccgagcaaactcaacgaccgagccgacagccgacgaagcctctgggaccaaggcaacttccccctcatcatcaaaaacctcaaaatcgaagactccgacacctacatctgcgaagtagaggaccaaaaagaggaggtacaactcctcgtcttcggtctcaccgccaactccgacacccacctcctccaaggccaatccctcaccctcacactagaatcacccccaggctccagcccatcagtccaatgccgctccccacgcggcaaaaacatccaaggaggcaaaaccctcagcgtaagccaactagagctacaagactcaggcacctggacgtgcacggtcctacaaaaccaaaagaaagtcgagttcaaaatcgacatagtcgtactcgctttccaaaaagcgtcctcgatagtctacaagaaagaaggcgaacaagtcgagttcagctttccactagccttcaccgtcgaaaaactcacaggctccggcgaactctggtggcaagccgaacgtgcatcgtcctccaaatcttggatcaccttcgatctcaaaaacaaagaagtatcggtcaaacgagtaacacaagaccccaaactccaaatgggcaagaaactaccactccatctcaccctaccccaggccctcccacaatacgccggatcaggaaacctcacgctcgccctggaagcgaaaacaggcaaactccaccaagaagtcaacctagtcgtcatgcgcgccacgcaactccagaaaaacctaacctgcgaagtatggggccccacctctcccaaactcatgctctccctaaaactagaaaacaaagaagccaaagtaagcaaacgcgaaaaagcagtctgggtcctaaatcccgaagcaggcatgtggcaatgcctgctatccgactccggccaagtcctactcgaatccaacatcaaagtcctcccaacatggtccaccccggtccaacccatggccctaatagtactcggaggagtcgccggcctactcctattcatcggcctcggaatcttcttctgcgtccgatgccgacaccgccgccgccaagcggaacgcatgtcccaaatcaaacgcctcctcagcgagaaaaagacatgccaatgcccacaccgattccaaaagacctgctctcccatctag

SEQ ID NO: 4108 - RNA, 186 nt, synthetic construct
  misc_feature 1..186: note = CAA44323 variant
  source 1..186: mol_type = other RNA
atgaaacgcttcctcttcctcctcctcaccatctccctcctcgtcatggtccaaatccaaaccggcctctccggccaaaacgacacctcccaaacctcctccccctccgcctcctccaacatctccggcggcatcttcctcttcttcgtcgccaacgccatcatccacctcttctgcttctcctaa

SEQ ID NO: 4109 - RNA, 186 nt, synthetic construct
  misc_feature 1..186: note = AAP35780 variant
  source 1..186: mol_type = other RNA
atgaaacgcttcctcttcctcctcctcaccatctccctcctcgtcatggtccaaatccaaaccggcctctccggccaaaacgacacctcccaaacctcctccccctccgcctcctcctccatgtccggcggcatcttcctcttcttcgtcgccaacgccatcatccacctcttctgcttctcctaa

SEQ ID NO: 4110 - RNA, 186 nt, synthetic construct
  misc_feature 1..186: note = ACS44650 variant
  source 1..186: mol_type = other RNA
atgaaacgcttcctcttcctcctcctcaccatctccctcctcgtcatggtccaaatccaaaccggcctctccggccaaaacgacacctcccaaacctcctccccctccgcctcctccaacatctccggcggcatcttcctcttcttcgtcgccaacgccatcatccacctattctgcttctcctaa

SEQ ID NO: 4111 - RNA, 954 nt, synthetic construct
  misc_feature 1..954: note = EAW93489 variant
  source 1..954: mol_type = other RNA
atgacagttgcccgcccctccgtcccagccgccctccccctcctcggcgaactcccccgactcctactactcgtcctcctctgcctccccgccgtctggggagactgcggcctaccccccgacgtcccaaacgcccaacctgccctagaaggccgaacatccttccccgaagacaccgtcatcacctacaaatgcgaagaatccttcgtcaaaatccccggcgagaaagactccgtcatctgcctcaaaggctcccaatggtccgacatcgaagaattctgcaaccaaaaatcatgcccaaacccaggcgaaatacgcaacggccaaatcgacgtccccggcggaatcctcttcggagccaccatctccttctcctgcaacaccggttacaaactcttcggctcaacatcctccttctgcctcatctcaggctcctcagtccaatggtccgacccactcccagaatgccgagaaatctactgcccagcacccccacaaatagacaacggcataatccaaggcgaacgcgaccactacggctaccgacaatcagtcacctacgcctgcaacaaaggcttcaccatgatcggcgaacactccatctactgcaccgtaaacaacgacgaaggcgaatggtcaggccccccccccgaatgccgcggcaaatccctaacctcaaaagtcccccccaccgtacaaaaacccaccaccgtcaacgtccccaccaccgaagtctcaccaaccagccaaaaaaccactaccaaaaccaccacaccaaacgcccaagccactcgctcaaccccagtatcccgcaccaccaaacacttccacgaaaccacccccaacaaaggctccggcaccacctccggaaccacccgcctactctccggccacacctgcttcaccctaaccggcctactcggcaccctagtcaccatgggcctactcacctaa

SEQ ID NO: 4112 - RNA, 882 nt, synthetic construct
  misc_feature 1..882: note = EAW93497 variant
  source 1..882: mol_type = other RNA
atgataggcgaacactcgatctactgcaccgtcaacaacgacgaaggtgaatggtcaggcccaccacccgaatgccgcggaaaatccctcacctccaaagtcccacccaccgtccaaaaacccaccaccgtaaacgtccccaccaccgaagtctcccccacctcccagaaaacaaccaccaaaaccacaactcccaacgcccaaggaaccgaaaccccctcagtcctccaaaaacacacaaccgaaaacgtctcagccacacgcacaccacccaccccacaaaaacccaccaccgtcaacgtccccgccaccatcgtcacccccacaccccaaaaacccacaacaatcaacgtacccgccaccggcgtctcctcaacaccccaacgtcacaccatcgtcaatgtctccgccaccggaaccctacccaccctacaaaaacccacccgcgccaacgactccgccaccaaatcaccagccgccgcccaaacctccttcatctcaaaaacactctcaaccaaaaccccctccgccgcccaaaaccccatgatgaccaacgcctcagcaacacaagccaccctcaccgcccaaaaattcaccaccgccaaagtcgccttcacccaatccccctccgccgctcgaaaatcaaccaacgtccactctcccgtaacaaacggccttaaatccacccaacgcttcccctccgcccacataaccgccacccgctcaacccccgtctcccgcaccaccaaacacttccacgaaaccacacccaacaaaggctccggcacaacctcaggtaccacccgactcctatccggccatacctgcttcaccctcaccggcctcctcggaaccctcgtcaccatgggcctcctcacctaa

SEQ ID NO: 4113 - RNA, 804 nt, synthetic construct
  misc_feature 1..804: note = EAW93493 variant
  source 1..804: mol_type = other RNA
atgatcggcgaacactccatctactgcaccgtcaacaacgacgaaggcgaatggtccggacccccccccgaatgccgaggcaaatccctaacctcaaaagtcccacccactgtacaaaaacccaccaccgtcaacgtccccacaaccgaagtatcccccacctcccaaaaaacaactaccaaaaccacaacccccaacgcccaaggcaccgaaaccccctcagtccttcaaaaacacactaccgaaaacgtctccgcaacccgaaccccccccaccccacaaaaaccaaccaccgtcaacgtaccagccacaattgtcacccctaccccccaaaaacccacaacaatcaacgtcccagccaccggagtctcatccaccccccaacgccacaccatcgtcaacgtctccgccaccggaacactcccaaccctccaaaaacccacccgagccaacgactccgccaccaaatccccagcagccgcccaaacctcattcatctccaaaaccctctccaccaaaaccccttccgcagcccaaaaccccatgatgaccaacgcctccgcaacccaagccaccctcaccgcccaaaaattcacaacagccaaagtcgccttcacccaatcccccagcgccgcccccacccgctccaccccagtctcccgcacaaccaaacacttccacgaaaccacccccaacaaaggctcaggcaccacctccggcaccacacgcctcctctcaggccacacctgcttcacccttaccggcctactaggtaccctcgtcacaatgggcctactcacctaa

SEQ ID NO: 4114 - RNA, 1146 nt, synthetic construct
  misc_feature 1..1146: note = AAA52168 variant
  source 1..1146: mol_type = other RNA
atgaccgtcgcacgcccatccgtccccgcagccctacccctcctcggcgaacttccacggctactcctcctcgtactgctctgcctcccagcagtctggggcgactgcggcctcccgcccgacgtccccaacgcccaacctgccctcgaaggccgcacttccttccccgaagacaccgtaataacctacaaatgcgaagaatccttcgtcaaaatacccggcgaaaaagacagcgtcatctgtcttaaaggctcccaatggtccgacatcgaagaattctgcaaccgctcatgcgaagtcccaacccgcctcaactccgcctccctcaaacaaccctacataacacagaactacttccccgtaggaacagtagtcgaatacgaatgccgccccggttaccgccgagaaccctccctaagccccaaactaacctgcctccaaaacctcaaatggtctaccgcagtagaattctgcaaaaaaaaatcctgcccaaaccccggagaaatccgaaacggccaaatcgacgtacccggcggaatcctcttcggcgctaccatctccttctcctgcaacaccggatacaaactcttcggctccacctcctccttctgcctcatctcaggttcctccgtccaatggtcagacccactccccgaatgccgcgaaatatactgccccgcccccccccaaatcgacaacggaatcatccaaggagaacgggaccactacggataccgacaatccgtaacctacgcatgcaacaaaggcttcaccatgattggcgaacactccatatactgcaccgtcaacaatgacgaaggcgaatggtcaggccccccacccgagtgccgcggcaaatcccttacatccaaagtcccacccacagtacaaaagccaacaacagtcaacgtacccaccaccgaagtcagccccacctcccaaaaaaccaccaccaaaaccaccacccccaatgcccaagccacccgcagcacacccgtatcccgaaccacaaaacacttccacgaaaccacaccaaacaaaggatctggcaccacatcaggcaccacccgactactctccggccacacctgcttcaccctcactggcctactcggcaccctagtcacaatgggcctccttacataa

SEQ ID NO: 4115 - RNA, 2577 nt, synthetic construct
  misc_feature 1..2577: note = CCDS73385.1 variant
  source 1..2577: mol_type = other RNA
atgctccaaaccaaagaccttatctggaccctcttctttctaggaaccgcagtatcccttcaggtcgacattgtgccgagccaaggagagatcagcgtgggcgaatcaaaattcttcctctgtcaagtagccggggacgctaaagacaaagacatatcctggttcagccccaacggtgaaaagctcacgccaaaccagcagcggatctccgtcgtatggaacgacgacagcagctcaaccctgacaatctacaacgcaaacatcgacgacgccggcatctacaaatgcgttgtaacaggagaggacggctccgaatcagaagccacggtaaacgtaaagatcttccagaaactaatgtttaaaaacgcccccaccccgcaggagttccgcgaaggcgaagacgcggtcatagtttgcgacgtggtcagctccctcccgccgacaataatctggaagcacaaaggacgcgatgtaatcctcaagaaagacgtacgcttcatagtcctgtcaaacaactacctacaaatacgcggaataaagaaaaccgacgaaggaacatacagatgcgaagggagaatactcgcgcgcggggaaatcaacttcaaagacatacaagtgatagtaaacgtcccgcccacaatccaagcccgccaaaacatagtaaacgcaacggccaacctcggacaaagcgtgaccctcgtatgtgacgctgaaggttttcccgaacccacaatgtcctggaccaaagacggcgaacaaatcgaacaagaagaagacgacgaaaaatacatcttcagcgacgacagctcccaactcactataaagaaagtcgacaaaaacgacgaagcggaatacatctgcatcgccgaaaacaaagcaggagaacaagacgccacaatccacctcaaagtcttcgcaaaaccaaaaatcacatacgtcgaaaaccaaacagcaatggaattagaggagcaagtcaccctcacatgcgaggcctccggcgacccaataccgtccataacctggcgcaccagcaccagaaacatatcatccgaggaaaaagccagctggacacgcccagagaaacaagaaacactggacggacacatggtagtgcggtcccacgcccgcgtcagcagcttaacactcaaaagcatccaatacacagacgccggagaatacatctgcacagcttccaacacaatcggacaagacagccaaagcatgtacctcgaggtccaatacgcccccaaactacaaggacccgtagcagtatacacatgggaaggcaaccaagtaaacataacctgcgaagtattcgcatatccaagcgccaccatcagctggttccgcgacggacagctactaccctcctccaactattcgaacatcaagatctacaataccccgagcgcctcctatctggaagtcacccccgacagcgaaaacgatttcggaaactacaactgtactgccgtcaaccgaatcggccaggaatcgctagagttcattctagtccaagccgacacaccctcctccccaagcatcgaccaagtagaaccctacagctccacagcccaagtacaattcgacgaaccagaagccacaggaggagtcccgatactcaaatataaagccgaatggcgggcggtcggcgaagaagtatggcactcaaaatggtacgacgccaaagaagccagcatggagggaatagtaacgattgtcggcctgaaaccagaaaccacatacgccgttcgcctcgccgcactcaacggaaaagggctaggggagatcagcgcagcatcggaatttaaaacacaaccggtccaaggcgaacccagcgcgcccaagctagaaggccaaatgggcgaagacggcaactcaatcaaagtcaaccttatcaaacaagacgacgggggatcaccaatccgccactacctagtacgataccgagcactctcctcagagtggaagcccgaaatccggctcccgtccgggtcagatcatgtaatgctgaaatcgctcgactggaacgccgaatacgaagtctacgtagtcgccgagaaccaacaggggaaaagcaaggctgcacacttcgtattcagaaccagcgcacaaccaaccgccatacccgcaaacggctcacccaccagcggcctcagcaccggagcaatcgtgggaatcctaattgtcatatttgtcctccttctggtcgtagtagacattacctgctacttcctcaataagtgcggattattcatgtgcatcgcagtcaacctctgcggtaaggccggcccaggagcgaaaggaaaagacatggaagaaggaaaagcagccttcagcaaggacgaaagcaaagaacccatcgtcgaagtccgaaccgaagaagaaagaacccctaaccatgacggtggcaaacacacagaaccaaacgagacaacacccctaaccgagccagagaaagggcccgtcgaagctaagccggaatgccaagaaacagagaccaaacccgcaccagcagaagtaaagacggtccccaatgacgccacacaaacaaaagaaaacgaaagcaaggcataa

SEQ ID NO: 4116 - RNA, 867 nt, synthetic construct
  misc_feature 1..867: note = ABK41933 variant
  source 1..867: mol_type = other RNA
atgggccacacccgccgccaaggtacatccccctccaaatgcccctacctcaacttcttccaactcctcgtactcgccggcctctcccacttctgctcaggcgtcatccacgtcacgaaagaagtcaaagaagtcgcaaccctctcctgcggacacaacgtctccgtcgaagaactcgcccaaacccgcatctactggcaaaaagagaaaaaaatggtcctcacaatgatgtccggcgacatgaacatctggcccgaatacaaaaaccgcactatcttcgacatcaccaacaacctctcaatcgtaatcctcgcactccgaccctcagacgaaggcacctacgaatgcgtcgtactcaaatacgaaaaagacgccttcaaacgcgaacacctcgccgaagtcaccctctccgtcaaagcagacttccccacaccctccatctccgacttcgaaatccccacctccaacatccgccgcattatctgctccacttccggaggcttccccgaaccccacctatcctggctcgaaaacggagaagaactcaacgctatcaacaccaccgtctcacaagaccccgaaaccgaactctacgccgtctcatccaaactcgacttcaacatgaccaccaaccactcattcatgtgcctcatcaaatacggccaccttcgagtcaaccaaaccttcaactggaacaccaccaaacaagaacacttccccgacaacctactcccctcctgggcaatcaccctcatctcagtcaacggcatattcgtcatctgctgcctcacctactgcttcgcaccccgctgccgcgaacgccggcgcaacgaacgcctccgacgcgaatccgtccgccccgtctaa

SEQ ID NO: 4117 - RNA, 867 nt, synthetic construct
  misc_feature 1..867: note = AAA36045 variant
  source 1..867: mol_type = other RNA
atgggccacacccgccgccaaggcacctccccctcaaaatgcccatacctcaacttcttccagctcctcgtcctcgccggcctctctcacttctgctccggagtcatacacgtcaccaaagaggtcaaagaagttgccaccctctcatgcggccacaacgtctccgtcgaagaactagcccaaacccgcatctactggcaaaaagaaaaaaaaatggtactcacgatgatgtccggcgacatgaatatctggcccgaatacaaaaaccgcaccatcttcgacatcaccaacaacctctccatcgttatcctcgccctccgcccctccgacgaaggcacctacgaatgcgtcgtcctcaaatacgaaaaagacgccttcaaacgcgaacacctcgccgaagtcaccctctccgtcaaagcagacttccccaccccttccataagcgacttcgaaatccccacctcaaacatacgccgcatcatctgctccacctcgggcggattccccgaaccccacctctcctggctagaaaacggcgaagagctcaacgccatcaacaccaccgtctcccaagaccccgaaaccgaactctacgcagtatcctccaaactcgacttcaacatgaccaccaatcactccttcatgtgcctcatcaaatacggccacctacgcgtcaaccaaacattcaactggaacaccaccaaacaagaacacttccccgacaacctcctcccctcctgggccataaccctcatctccgtcaacggaatcttcgtcatctgctgcctcacctactgcttcgccccacgctgccgagaacgccgccgcaacgaacgcctacgacgagaatcagtccgaccagtctaa

SEQ ID NO: 4118 - RNA, 990 nt, synthetic construct
  misc_feature 1..990: note = CCDS3009.1 variant
  source 1..990: mol_type = other RNA
atggacccacaatgcacaatgggcctgtccaacatcctcttcgtaatggccttcctcctatcaggcgccgcccccctcaaaatccaagcatacttcaacgaaaccgccgacctaccctgccaattcgccaactcacaaaaccaatcactctccgaactagtcgtcttctggcaggaccaagaaaacctcgtccttaacgaagtatacctcggcaaagaaaaattcgactccgtccacagcaaatacatgggacgaacatccttcgactccgactcctggaccctccgcctccacaacctccaaatcaaagacaaaggcctctaccaatgcatcatccaccacaaaaaacccaccggcatgatccgaatacaccaaatgaactccgaactctccgtcctagccaacttctctcaacccgaaatcgtcccaatctccaacatcacagaaaacgtatacatcaaccttacctgcagctcaatccacggctaccccgaacccaaaaaaatgtccgtcctactccgcacaaaaaactccaccatagaatacgacggcgtcatgcaaaaatcccaagacaacgtaacagaactctacgacgtcagcatctccctctccgtctccttccccgacgtaacctcaaacatgacaatcttctgcatcctcgaaaccgacaaaacccgcctcctctcctcccccttctccatcgaactcgaagacccccaaccaccccccgaccacatcccctggatcaccgccgtcctccccaccgtcatcatctgcgtcatggtcttttgcctaatcctatggaaatggaaaaaaaaaaaacgcccccgcaactcatacaaatgcggcacaaataccatggaaagagaagaaagcgaacaaacaaagaaacgagaaaaaatacacatccccgaacgctccgacgaagcccaacgcgtattcaagtcctccaaaacctcctcctgcgacaaatccgacacctgcttctaa

SEQ ID NO: 4119 - RNA, 708 nt, synthetic construct
  misc_feature 1..708: note = AAA59674 variant
  source 1..708: mol_type = other RNA
atggcactccccgtcaccgccctactcctacccctcgccctactcctacacgcagcccgcccctcccaattccgagtctcacccctcgaccgcacctggaacctcggcgaaaccgtcgaactcaaatgccaagtcctcctctccaaccccacctccggctgctcatggctatttcaaccccgcggcgccgccgcctcccccacattcctactctacctctcccaaaacaaacccaaagccgctgaaggcctcgacacccaacgcttctccggcaaacgcctcggcgacacctttgtcctcaccctctccgacttccgacgagaaaacgaaggctactacttctgctccgccctctccaactcaataatgtacttctcacacttcgtccccgtcttcctccccgccaaacccactaccacccccgcaccccgcccacccacaccagcccccactattgcctcgcaaccactctccctccgtcccgaagcctgccgccccgccgccggcggcgccgtccacacacgcggccttgacttcgcctgcgacatctacatctgggcacccctagccggaacctgcggcgtcctcctactctccctcgtcatcaccctatactgcaaccaccgcaaccgccgccgcgtctgcaaatgcccccgcccagtcgtaaaatcaggcgacaaaccctccctctccgcccgatatgtctaa

SEQ ID NO: 4120 - RNA, 2472 nt, synthetic construct
  misc_feature 1..2472: note = EAW57688 variant
  source 1..2472: mol_type = other RNA
atgaccgtccttcaagaacccgtacaagcagcaatatggcaagctctcaaccactacgcataccgcgacgcggtcttcctcgcagaacgtctatacgcagaagtgcactcggaagaagccctttttctcctcgctacctgctattaccgctcaggcaaagcctataaagcgtaccggttactaaaaggccactcctgcaccaccccacagtgcaagtatctcctagcaaaatgctgtgtcgacctctccaaacttgccgaaggagaacaaatcctatccggcggcgtgttcaacaaacaaaagtcacacgacgacatagtaacagagttcggtgattctgcctgtttcaccctatcattactaggccatgtatactgcaagactgacagactagcaaaaggctccgaatgctaccaaaagtccctctcccttaacccctttctatggtcacccttcgaatcgctctgcgaaatcggagaaaaaccagaccccgaccaaaccttcaaattcacctccctccagaacttctccaactgcctacccaactcctgcacaacccaagtaccaaaccactccctctcccaccgccagcccgaaaccgtcctcacagaaacaccacaggacaccatagaactcaaccgactcaacctagaatcaagcaacagcaaatactcgctcaacacagacagctccgtctcatacatcgactctgccgtaatatccccggacaccgtaccactcggtacaggcaccagcatcctctctaaacaagtacaaaacaagcccaaaaccggcagatcactgctcggcggccccgccgcactttcacccctcacaccgtccttcggaatcctccccctcgaaaccccttccccaggagacgggtcctatctccaaaactacaccaacaccccacccgtcatcgacgtcccatccaccggcgccccctccaagaaatccgtcgcaagaattggccaaacaggcactaaatcagtcttctcccagtccggtaactctcgcgaagtcacccccatacttgcccaaactcaatcatctggccctcaaacctcaaccactccccaagtgctatcccccaccatcacctccccacccaacgccctcccccgcagatcgagccgcctgttcacttctgactccagcaccacgaaagaaaactcgaagaaactcaaaatgaaattcccaccaaaaatcccaaaccgaaaaaccaagtccaaaacgaacaaagggggcatcactcaaccaaatataaatgattctctggaaatcacaaaactcgacagctcgattatctccgaaggcaaaatctctaccataaccccacaaatccaagcattcaacctccaaaaagccgccgcaggcctcatgagcctcctccgcgaaatgggtaaagggtacctcgccctatgttcctataactgcaaagaagcaataaacatccttagccatctgccctctcaccactacaacaccggctgggtactgtgccaaataggccgcgcttacttcgaactctccgaatacatgcaggccgagagaatattcagcgaagtaagacgaatagaaaactaccgtgtcgaaggcatggaaatatactccaccaccctatggcatctgcaaaaagacgtcgccctctccgtactctcgaaagacctcacagacatggataaaaactcccccgaggcgtggtgcgcagcaggtaactgcttctcactccaacgagaacacgatatagccatcaaattcttccaaagggcaatccaggtagaccccaactacgcttatgcatatacgctacttggccacgagttcgtcctcacagaagaactagataaagccctcgcatgctttagaaacgcaatccgcgttaacccccgccactacaacgcatggtacggattaggaatgatctactacaaacaggaaaaattctccctagccgaaatgcacttccaaaaagcccttgacatcaacccccaatccagtgtcctactctgccacatcggcgtcgttcaacacgcccttaagaaatcagaaaaagcactcgacaccctaaacaaagcaatcgtcatcgaccccaaaaaccccctatgcaaattccaccgcgcctcggtcctcttcgccaacgaaaaatataaatccgcgctccaagaactcgaagaactcaagcagatcgtccccaaagaatctctcgtctacttcctaatcggaaaggtgtataagaaactaggacaaacccacctagccctaatgaatttcagctgggccatggaccttgatccgaaaggcgccaacaaccaaatcaaggaagccatcgataaacgatacctccccgacgacgaagaaccaattacacaagaggaacaaattatgggcacagacgaatcgcaggaatcttccatgacagacgcagacgacacacaactccacgcggccgaatctgatgagttctag

SEQ ID NO: 4121 - RNA, 2475 nt, synthetic construct
  misc_feature 1..2475: note = AAB34378 variant
  source 1..2475: mol_type = other RNA
atgaccgtcctgcaggaacctgtacaagccgccatttggcaagccctcaaccactacgcataccgagacgctgtcttcttagcagaacgtctctacgcagaagttcacagcgaagaagcattattcctcctggcgacatgctactaccgctcaggcaaggcttacaaagcatacagactccttaaaggccactcctgcacaacaccccaatgcaaatatctcctcgccaaatgctgcgttgacctatcgaaactcgctgagggcgaacaaatcctatccggcggcgtgttcaacaaacaaaagtcccacgacgacatcgttaccgagttcggagattccgcctgcttcacactgtccctactcggacacgtttactgcaaaaccgaccgcctagcaaaaggatccgaatgctaccaaaaatccctctcactcaaccctttcctctggtcacccttcgaatccctctgcgaaataggagaaaaacccgaccccgaccaaacattcaaattcacctcactccaaaacttctccaactgcctacccaattcgtgcaccacccaggttccaaatcactccttgagtcaccgacaacccgaaaccgtcctaactgaaactccccaagacaccatcgaactcaaccgtctcaacctggaatcatctaactcgaagtactccctcaacaccgactcatccgtctcatacatcgacagcgccgtcatctcacccgacaccgttccactcgggaccggcacctcaatcctctctaaacaagtacaaaacaaacccaaaaccggaagatcactcctaggcggtccggccgccctatcacccctaaccccctccttcggaatcctaccgctcgaaacacctagccccggcgatggttcttacctacagaactacaccaacactccccctgtcatagatgtcccaagcaccggagcacctagcaagaaatccgtcgccagaataggccaaaccggtacaaaatccgtcttctcacaaagcgggaactcccgcgaagtgacgccaatactcgcccaaacacaatcatccggcccccaaacctccacaacgccccaagtcctcagccccaccatcacctccccacccaacgccctcccacgccgatcttcacgcctattcacctccgattccagcaccaccaaagaaaactccaagaaactcaaaatgaaattccctcccaaaatacccaaccgcaaaaccaaatccaaaaccaacaaaggcggaataacccaacccaacataaacgattccctcgaaatcaccaagctagactcctccataatctccgaaggaaaaatctcgaccatcactccccaaatccaagccttcaacctccaaaaagccgctgcagaaggcctgatgtccctgctccgtgaaatgggcaaaggttacctcgccctctgctcgtacaactgcaaagaagccatcaacatcctctcacacctcccatcccaccactacaacaccggatgggtcctctgtcaaataggccgagcatacttcgaactatccgagtacatgcaagccgaacgaatattctctgaagtcagacgcattgaaaactaccgagtagaaggaatggaaatatattcgaccacattgtggcatcttcaaaaagacgttgccctttcggtcctatcaaaagacctgacagacatggacaaaaactcgcccgaagcatggtgtgccgccggaaactgcttcagccttcaacgcgaacacgacattgcaatcaaattctttcaacgagcgatccaagtcgaccccaactatgcgtacgcctacaccctacttggccacgagttcgttcttaccgaagaactagacaaagccctcgcctgttttcgcaacgctatacgtgtcaaccctcgccactacaacgcctggtacggactcggcatgatatactacaaacaagaaaaatttagcctcgccgaaatgcacttccaaaaagctctcgacatcaacccacaatcatccgtacttctctgtcacatcggagtagtccaacacgcgctgaagaaatccgaaaaagcattggacaccctaaataaagccatcgtgattgaccccaaaaacccactctgcaaattccaccgcgcgtccgtcttattcgcaaacgaaaaatacaaatcagctctgcaggaactagaagaactcaaacagatcgtccccaaagaatcccttgtatacttcctcatcggtaaggtctacaagaaacttggccaaacacaccttgcactaatgaacttctcatgggccatggatctcgaccccaaaggcgcaaacaatcaaataaaggaagccatcgacaaacgatacctacccgacgacgaagaacccatcacccaagaagaacaaataatgggcactgacgaatcacaagaatcctccatgacagacgccgacgacacacaacttcacgccgccgaatctgacgagttctag

SEQ ID NO: 4122 - RNA, 1788 nt, synthetic construct
  misc_feature 1..1788: note = AAA51947 variant
  source 1..1788: mol_type = other RNA
atgcgagtcctcctcgctgccctaggcctcctcttcctcggcgcgctccgagccttcccccaagacagaccattcgaggatacctgccatggaaacccatcccattactacgacaaagccgtacgacgatgttgctacaggtgcccaatgggcttattcccaacacaacaatgcccgcaacgacctacagactgccgtaaacaatgcgagcccgactactacctagacgaagccgatcgctgcaccgcgtgcgtaacctgctcccgtgacgacctagtcgagaaaaccccttgcgcatggaactcaagccgcgtctgcgaatgccgccccggcatgttctgctcaacctcagccgtcaacagctgcgccagatgcttcttccactcggtttgcccagcaggcatgatcgtcaaattccctggcacagcacaaaagaacaccgtgtgcgaacctgcctcaccaggcgtcagcccagcctgcgcctccccagaaaactgcaaagaaccatcatcaggaactattccacaagccaaacccacaccagtatcaccagccaccagcagcgcatccaccatgccagtacgcggcggcacacgcctcgcccaagaagccgcctcaaaactcacaagagcacccgactcacccagctcagtcggacgcccttcatcagaccccggcctctccccgacccaaccctgtcctgaaggttcaggagactgccgaaaacaatgcgaaccagactactatctcgacgaagccggccgatgcactgcctgcgtctcatgctctcgcgatgaccttgtcgagaaaaccccctgcgcatggaacagttcccgaacatgcgaatgccgcccaggcatgatctgcgccacctcagccaccaactcatgcgcccgctgcgtaccctacccaatctgcgccgccgaaaccgtcactaaaccacaagacatggccgaaaaagataccacattcgaagccccacccctaggaacccaacccgactgcaaccccacacccgaaaacggcgaagcccccgcctccacaagcccaactcaatcactcctagtcgactcccaagcctcaaaaaccctccccatcccaacatcagcccctgtcgcgctaagctccaccggcaaacccgtcctagacgccggacccgtactattttgggtcatcctcgtactggtcgttgtcgtcggcagctccgccttcctcctctgccacagacgcgcctgccggaaacgcatccgacaaaaactacatctctgctacccagtccaaacctcccaaccaaaactcgaactcgtcgacagccgacccagacgttcatcaacccaacttcgaagcggcgcttccgtcaccgaaccagtggccgaggaacggggcctcatgtctcaacccctcatggaaacatgccactccgtaggggcagcctacctcgaatcactccccctccaagacgcctccccagccggaggaccctctagcccccgcgaccttcccgaaccccgagtaagcaccgaacacacaaacaacaaaatcgagaaaatctacatcatgaaagccgacacagttatcgtcggaaccgtcaaagcagaactccccgaaggtcgtggcctagccggacccgccgaacccgaactcgaagaagaactcgaagccgaccacacgcctcattaccccgaacaagaaaccgaaccacccctaggctcctgctccgacgttatgctatccgtcgaagaagaaggaaaagaagacccactacccaccgccgcgtccgggaaataa

SEQ ID NO: 4123 - RNA, 912 nt, synthetic construct
  misc_feature 1..912: note = EAW97060 variant
  source 1..912: mol_type = other RNA
atggccacctcccgctacgaaccagtagccgaaataggcgtcggcgcctacggcaccgtctacaaagcacgcgacccccactccggtcacttcgtcgccctcaaaagcgtccgagtccccaacggaggcggcggcggcggcggcctccccatctccacagtccgcgaagtcgccctcctccgacgcctagaagccttcgaacaccccaacgtagtccgactcatggacgtatgcgccacctcccgcaccgaccgcgaaatcaaagtcaccctagtcttcgaacacgtcgaccaagacctccgaacttacctcgacaaagccccaccacccggcctccccgccgaaaccataaaagacctcatgcgtcaatttctccgcggactagacttcctccacgccaactgcatagtccaccgagacctcaaacccgaaaacatcctagtaaccagcggaggaaccgtcaaactcgcagacttcggcctcgcccgcatctattcataccaaatggccctcacccccgtagtcgtcaccctctggtaccgagcccccgaagtcctcctccagtcaacatatgccaccccagtcgacatgtggtccgtcggctgcatcttcgccgaaatgttccgccgcaaacccctattctgcggtaactccgaagcagaccaacttggcaaaatcttcgatctaatcggcctacccccagaagacgactggccccgagacgtctccctcccccgcggagcatttcccccacgcggcccaagacccgtacaatccgtcgtccccgaaatggaagagtccggcgcacaactcctcctcgaaatgctaacattcaacccccacaaacgaatctctgcattccgtgcactccaacactcctacctacacaaagacgaaggaaaccccgaataa

SEQ ID NO: 4124 - RNA, 912 nt, synthetic construct
  misc_feature 1..912: note = AAA35673 variant
  source 1..912: mol_type = other RNA
atggccacctcccgctacgaacccgtagccgaaatcggagtcggcgcctacggcaccgtctacaaagcccgagacccccacagcggccacttcgtagccctcaaatccgtccgagtccccaacggcggaggaggcggcggaggcctacccattagcaccgtccgcgaagtagccctcctccgcagactcgaagcattcgaacacccaaacgtcgtccgcctcatggacgtatgcgccacatcccgcaccgaccgcgaaataaaagtcaccctagtcttcgaacacgtagaccaagacctccgcacctacctcgacaaagcacccccacccggactccccgccgaaacaatcaaagacctcatgcgacaattcctacgcggcctagacttcctacacgccaactgcatcgtccaccgcgacctcaaacccgaaaacatcctcgtcacctccgggggcaccgtaaaactcgccgatttcggcctcgcccgaatctactcttaccaaatggccctaacccccgtcgtcgtcaccctctggtaccgtgcccccgaggtcctcctacagtccacctacgccacccccgtcgacatgtggtccgtcggctgcatcttcgccgaaatgttccgccgaaaacccctattctgcggcaacagcgaagccgaccaactaggcaaaattttcgacctcatcggcctacccccagaagacgactggccccgagacgtatcactcccccgcggcgccttcccaccccgaggaccccgccccgtacaatcagtcgtaccagaaatggaagaatccggcgcccaactcctcctcgagatgctcacgttcaacccccacaaacgaatctccgccttccgcgccctccaacactcatacttacacaaagacgaaggcaaccccgaataa

SEQ ID NO: 4125 - RNA, 690 nt, synthetic construct
  misc_feature 1..690: note = AAB50213 variant
  source 1..690: mol_type = other RNA
atggacgtctgcgcaacctcccgaaccgatcgcgaaatcaaagtcaccctcgtcttcgaacacgtcgaccaagacctccgcacctacctcgataaagcacctccacccggcctccccgccgaaaccatcaaagacctcatgcgacaattcctccgcggcctcgacttcctccacgccaactgcatcgtccaccgcgacctcaaacccgaaaacatcctcgtcacctccggcggcaccgtcaaactcgccgacttcggcctagcccgcatctactcctaccaaatggcactcacccccgtcgtcgtcaccctctggtaccgcgcccccgaagtcctccttcaatccacctacgccacacccgtcgacatgtggtccgtcggctgcatcttcgccgaaatgttccgccgcaaacccctcttctgcggcaactccgaagccgaccaactaggcaaaatcttcgacctcatcggcctcccacccgaagacgactggccccgcgacgtctccctcccacgcggagccttcccaccccgcggaccccgcccagtccaatcagtcgtccccgaaatggaagaatccggcgcccaactcctcctagaaatgctcaccttcaacccccacaaacgcatctccgccttccgcgccctccaacactcctacctccacaaagacgaaggcaaccccgaataa

SEQ ID NO: 4126 - RNA, 336 nt, synthetic construct
  misc_feature 1..336: note = AAH15669 variant
  source 1..336: mol_type = other RNA
atggccacgagcaggtacgagcccgtggccgagatcggggtcggggcctatggcacggtctataaagcgcgcgatccccatagcgggcactttgtcgcgctcaagagtgtgcgcgtgcccaatggcgggggcgggggcgggggcttgcccataagcacggtcagggaagtggccctgctaaggcgcttggaagcgttcgagcacccgaacgtggtcaggctcatggacgtgtgcgcgacctcgcgcacggacagggaaataaaaaggtgctttgtcgagagcttgagctcggtcgagaccttgaaaccgacctcgtgggcgaaatcgctcacgtga

SEQ ID NO: 4127 - RNA, 429 nt, synthetic construct
  misc_feature 1..429: note = ACY78326 variant
  source 1..429: mol_type = other RNA
atggaacccgccgccggctcctcaatggaaccctcagccgactggctcgccacagccgccgccagaggccgagtcgaagaagtccgcgccctcctcgaagccggcgcactccccaacgcccccaactcctacggccgccgcccaatacaagtcatgatgatgggctcagccagagtcgccgaactactcctactccacggcgccgaaccaaactgcgccgaccccgcaacactaacccgccccgtccacgacgccgcccgcgaaggcttcctcgacaccctagtcgtcctccaccgcgccggcgccccctgcgccatgcccggagccgtctgcccctggacatggctacgctcatgggccatcgccatgtcccacggaacctgcgccagactccgcggcgcacccgaagccgtaaccatgcccgcataa

SEQ ID NO: 4128 - RNA, 351 nt, synthetic construct
  misc_feature 1..351: note = EAW58598 variant
  source 1..351: mol_type = other RNA
atggagccggcggcggggagtagtatggagccgagtgcggattggttggcgacggcggcggcgagggggagggtggaggaggtgagggcgttgttggaggcgggggcgttgccgaatgcgccgaatagttatgggaggaggccgatacaggtggggagggggagtgcggcgggggcgggggatggggggaggttgtggaggacgaagtttgcgggggagttggagagcgggagtgcgagcatattgaggaagaaggggaggctgccgggggagtttagtgagggggtgtgtaatcataggccgccgccgggggatgcgttgggggcgtgggaggcgaaggaggaggagtag

SEQ ID NO: 4129 - RNA, 471 nt, synthetic construct
  misc_feature 1..471: note = AFN61598 variant
  source 1..471: mol_type = other RNA
atggaaccggcagcgggctcgagcatggaaccgagcgcggactggctagcgacagcggccgcgagagggagagtggaagaggtcagggccttgctagaggccggggcactgccaaatgcaccgaactcgtacgggcgaaggccaatacaagtgatgatgatggggagcgcaagagtggccgagctattgctattgcacggagccgagccaaattgcgcggacccggcaacgctaacgcgcccggtacatgacgcggccagggaagggttcttggacacgctagtggtactgcacagggccggggccaggctagatgtcagggacgcgtgggggcgattaccagtggacctggcagaggaattgggacatagagatgtcgcaagatatctaagggccgcggcagggggaacgagagggagcaatcacgcgcgaatagacgcggcagagggcccgagcgatataccggactag

SEQ ID NO: 4130 - RNA, 327 nt, synthetic construct
  misc_feature 1..327: note = CCQ43815 variant
  source 1..327: mol_type = other RNA
atggaagtgatgatgatggggagcgcgagagtggcagagctattgctattgcacggggcagagccaaattgcgcggacccggcaacgctaacgagaccggtacatgacgcggcaagggaagggttcttggacacgctagtggtattgcacagagcaggggccaggctagatgtaagggacgcgtgggggcgattgccagtggacttggccgaggaattgggacatagagatgtagcgagatatctaagggcagcggccgggggaacgagagggagcaatcacgcgcgaatagacgcggcagagggaccgagcgatataccggactag

SEQ ID NO: 4131 - RNA, 399 nt, synthetic construct
  misc_feature 1..399: note = AAA82236 variant
  source 1..399: mol_type = other RNA
atggtgcgcaggttcttggtcacgctcaggatcaggcgcgcgtgcgggccaccgcgcgtgcgcgtgttcgtggtccatatcccacgcttgaccggggaatgggccgcgcccggggccccagccgcggtcgcgctcgtgctcatgctcttgcgctcgcaaaggctcgggcaacagcccctgcccaggcgcccgggccatgacgatggccagcgcccgagcgggggcgcggccgcggccccgcgcaggggcgcgcaattacgcaggcccaggcactcgcacccgaccagggccagacgctgtcccgggggcttgcccgggcacgcgggcggggccgcgcccggacgcggggccgcgggcagggccaggtgcttaggcccaagcgcgcgagggcccgggtga

SEQ ID NO: 4132 - RNA, 2109 nt, synthetic construct
  misc_feature 1..2109: note = CCDS12584.1 variant
  source 1..2109: mol_type = other RNA
atggaatcaccctccgcaccaccccaccgttggtgcataccatggcagcggctactccttaccgccagcctactcaccttttggaatccccctacaacggccaaactcaccattgaatcaacccccttcaacgtcgctgaaggtaaggaggtactacttctagtccacaaccttccacaacacctcttcggttactcctggtacaaaggggaacgcgtcgacggcaaccgtcaaatcatcggctatgtcattggaacccaacaggccacccctggccctgcatattccggccgcgaaatcatttaccccaacgcttccctgctaatccagaacataattcaaaacgacaccggcttctacaccctacatgtcatcaaaagtgacctcgtcaacgaagaagccactggccaattcagagtctatcccgaactaccaaaaccctcaatctccagcaacaacagcaaacccgttgaagacaaagacgccgtcgcattcacatgcgagccggagacccaagacgccacctacctttggtgggtaaacaaccaatcactcccagtatctccccgcctccaactctccaacggaaacagaaccctcaccctcttcaacgtcacacgcaacgacaccgcatcctacaaatgcgaaacacaaaaccccgtatctgcccgccgctcagactccgtaatcctcaacgtgctctacggccccgatgcgcctacgatctcacccctcaacacctcctaccgatccggcgaaaacctcaacttatcatgccacgccgcctctaacccacccgcacaatactcctggttcgtaaacggcaccttccaacaatccacgcaagaactctttatccccaacataaccgtaaataactctggatcttatacctgccaagcccacaactcggacaccggcctaaaccgcaccaccgtcacaaccataaccgtctacgcagaacctccaaagccctttatcaccagcaacaactccaacccggtcgaagacgaagacgccgtcgcattaacctgcgaaccagaaatccaaaataccacctacctttggtgggtcaacaaccaatctttacccgtctcaccccgtctgcaactttccaacgacaaccgcactctaaccctcctatccgtaacacgcaacgacgtaggcccatacgaatgcgggatccaaaatgaactctccgtcgaccactccgatcccgtcatcctcaacgtcctctacggccccgacgaccctaccatctcaccgtcctacacctactaccgtccgggcgtaaacctatccctctcctgccatgcagcctctaatcccccggcccaatactcctggctcatcgacggcaacatacaacaacacacacaagaactttttatctcaaacatcacagagaaaaactcaggcctctacacatgccaagccaacaactccgcctccggccactcacgtaccacagtcaagaccatcacagtatctgcagaactcccaaaacccagtatatcctccaataattccaaaccagtcgaagataaagacgcagtcgccttcacatgtgaacccgaagcccaaaacaccacatacctctggtgggtcaacgggcaatctctcccagtctccccgcgcctccaactctccaacggcaaccggaccctcacactatttaacgtcacccgcaacgatgccagagcctacgtctgtggcatacaaaactccgtctcagccaaccgatccgaccccgtcaccttagacgtcctctatggcccagacacacccataatatcccctcccgactcctcctacctatccggcgccaacctcaacctctcatgccactccgcctcaaaccccagcccccaatactcctggagaataaacggaataccccaacagcacacgcaagtcctctttatcgcaaaaatcactccaaacaacaacggaacctatgcatgcttcgtcagcaatctagctaccggccgaaacaactcgatagtcaaatccataactgtaagcgcatccggcaccagccccggactatccgctggagccaccgtcggaatcatgataggcgtcctcgtcggcgtcgccctaatctaa

SEQ ID NO: 4133 - RNA, 1035 nt, synthetic construct
  misc_feature 1..1035: note = AAA51739 variant
  source 1..1035: mol_type = other RNA
atgggcccaccctcagccccaccctgccgcctacacgtcccctggaaagaagtcctcctcacagcctcactcctcaccttctggaacccacccaccacagccaagctaaccatcgaatccacccccttcaacgtagccgaaggcaaggaagtcctactacttgcccacaacctaccccaaaaccgaatcggctactcatggtacaaaggcgaaagagtagacggcaactccctcatagtcggatacgtcatcggcacccaacaagccacacccggccccgcctactcgggccgcgaaaccatctatcccaacgcctccctcctcatccaaaacgtaacccaaaacgacaccggcttctacaccctccaagtaatcaaaagcgacctcgtcaacgaagaagccaccggccaattccacgtctaccccgaactccccaaaccatccatttcctcaaacaactcaaaccccgtagaagacaaagacgccgtcgccttcacatgcgaaccagaagtccaaaacaccacctacctatggtgggtcaacggccaatccctacccgtctctccccgcctccaactatccaacggcaacatgaccctcacactcctatccgtcaaacgaaacgacgccggctcctacgaatgtgaaatccaaaaccccgcctcagctaaccggtcggaccccgtcaccctcaacgtcctatacggccccgacggccccaccatatccccctccaaagccaactaccgccccggcgaaaatctcaacctctcctgccacgcagcatccaacccacccgcccaatactcctggttcatcaacggcactttccaacaatcaacccaagaactcttcatacccaacatcaccgtaaacaactccggatcctacatgtgccaagcccacaactcagccaccggtctcaaccgtacaaccgtcaccatgatcaccgtctccggctcagcacccgtactctccgcagtcgccaccgtcggcatcaccatcggcgtcctcgcccgcgtcgccctcatctaa

SEQ ID NO: 4134 - RNA, 1173 nt, synthetic construct
  misc_feature 1..1173: note = AAB04533 variant
  source 1..1173: mol_type = other RNA
atgggtgccacaacaatggaccaaaaatccctctgggcaggcgtagtagtcctcctcctgctccagggcggctccgcctacaaactcgtctgctacttcaccaactggtcccaagaccgacaagaacccggtaagttcacccccgaaaacatcgacccctttctatgctcgcacctcatatacagcttcgcctccatcgaaaacaacaaagtcataatcaaagacaaatccgaagtcatgctctaccaaaccatcaactcactcaaaactaaaaaccccaaactcaaaatactcctctccataggcggctacctattcggctcaaaaggattccaccccatggtagactcctccacatcacgcctcgagttcatcaactccatcatcctcttcctccgcaatcataatttcgacggcctcgacgtatcatggatctaccccgaccaaaaagaaaacacacacttcaccgtcctcatccacgaacttgccgaagccttccaaaaagacttcaccaaatccaccaaagaacgtctactcctcaccgccggcgtctccgccggccgccaaatgatagacaactcataccaagtcgaaaaactagccaaagacctcgacttcataaacctcctctccttcgacttccacggctcatgggaaaaacccctcatcacaggccacaacagccccctatccaaaggatggcaagaccgcggcccatcctcctactacaacgtcgagtacgccgtaggctactggatccacaaaggcatgccaagcgaaaaagtagtcatgggcatcccaacctacggccacagcttcacactcgccagcgcagaaaccacagtcggcgcaccagcaagcggacccggagccgccggaccaatcacagaatcctccggcttccttgcctactacgaaatctgccaattcctcaaaggcgccaaaatcacccggcttcaagaccaacaagtcccatacgcagtcaaaggaaaccaatgggtcggctacgacgacgtcaaatccatggaaacaaaagtacaatttctaaagaacctcaaccttggcggagccatgatctggtcaatagacatggacgacttcacaggaaaaagctgcaaccaaggcccctaccccctcgtccaagctgtcaaacgatcgctcggctcactctga

SEQ ID NO: 4135 - RNA, 2832 nt, synthetic construct
  misc_feature 1..2832: note = AAD40367 variant
  source 1..2832: mol_type = other RNA
atgactcagcgctcgatcgcgggtcccatatgcaacctcaaattcgtaaccctcctcgttgctctctcatccgagctacccttcttaggtgccggcgtacaactccaagacaacggctacaacggccttctgatcgccattaacccccaagtcccagagaaccaaaacctcatatccaacatcaaagagatgattaccgaagcctccttctacttatttaacgctacaaaacgacgcgttttcttccgaaatataaaaatccttataccggccacctggaaagccaacaacaactccaaaatcaaacaagagtcatacgaaaaggctaacgttatcgtcaccgactggtacggagcccacggagatgacccatacaccctccagtaccgcggttgcggaaaagaaggcaaatacatccacttcacacccaacttccttctaaacgacaacctcaccgctggctacgggtcccgcggccgcgtattcgtacatgaatgggcccacctaagatggggcgtgttcgacgaatacaataacgacaaacccttttacataaacggccaaaaccagataaaagtcacgcgatgttcttcagatattactggcatcttcgtctgcgaaaaaggcccctgcccacaggaaaactgcatcatttctaaactcttcaaagaagggtgcaccttcatttacaattccacacaaaacgccaccgccagtataatgttcatgcaatcgctctcctcagttgtcgagttctgtaacgcttccacccacaatcaggaagcacccaacctccagaaccaaatgtgcagcctccgctccgcgtgggacgtcatcactgacagcgccgacttccaccattctttcccaatgaatggcaccgaacttcccccacctcctacattctccctggtccaagccggcgacaaagttgtctgtctcgtcctcgacgtctcctcgaagatggccgaggcagaccgcctcctccaactccaacaagctgccgagttctacctaatgcagatagtcgaaatccacacctttgtaggcatcgccagcttcgacagcaaaggagaaatcagggcccagcttcaccaaatcaacagcaacgacgaccgaaaactcctagttagctatctccccaccacagtatcggccaagacagacatctccatctgttccggcctcaagaaaggattcgaggtagtcgaaaaactcaacggcaaggcctacggctcagtaatgatacttgtcacctccggggatgacaaactcctaggcaactgtctacccaccgttctctcatccggatcaaccatccattctatcgccctcggctcatcagccgcacccaacctcgaagaactttcccgcctgacaggcggactaaaattctttgttcccgacatctcaaactctaactccatgatcgacgcattctcccgcatatccagcggaacaggcgacatattccaacaacacattcaactcgaaagcaccggtgaaaacgtcaaacctcaccaccaactcaaaaacacggtcacagtagataatactgtaggaaacgacaccatgttcctggtaacatggcaggcatcaggacctcccgagatcattctattcgaccccgacggacgcaaatactatacaaacaactttatcacaaacttaacattccggaccgcctcactctggattcctggcactgccaaacctggccactggacatacaccctaaacaatacacaccactccctccaagcactaaaagtcacggtcacatcacgcgccagcaattcagcagtacctcccgccaccgtcgaagcatttgtcgaacgcgactctctccatttcccccacccagtaatgatctacgctaacgtcaaacaaggcttctacccaatcctaaacgccaccgtcactgcaactgtagaaccagagacaggcgaccctgtaaccctccgtctcctagatgacggcgccggcgcagacgttataaagaacgacggaatctacagcagatacttcttctccttcgccgccaacggccgttattcccttaaagtccacgtaaaccactccccttccatatccaccccagcccactcaatccccggcagtcacgccatgtacgtaccaggctacaccgccaacggaaacatccaaatgaatgcccctcgcaaatccgtcggacgcaacgaagaggagcgcaaatggggtttctctcgagtaagctccggcggttctttctcagtactcggcgtccccgcaggccctcacccagacgttttccctccctgcaaaattatcgacctcgaggccgtaaaagtcgaagaagaactcaccctctcctggaccgcccccggagaagatttcgaccaaggacaagccacgtcatacgaaatccgtatgtccaaatcactccagaacatccaggacgacttcaacaacgccattctagtcaacacctctaaacgcaacccccaacaagccggcatacgggagatattcactttctcaccacaaatctccacgaacggccccgaacaccaacccaatggtgaaacccacgaatcacaccgcatttacgtagcaattcgagctatggaccgaaactcactccaatcagccgtttccaacattgcccaagcccctctattcatcccacccaactccgaccccgtgcccgcccgcgactacctaattctgaaaggcgtattgacagccatggggctcatcggcataatctgcctcatcatcgtcgtcacccatcacacactatcgcgcaaaaagcgggccgacaagaaagaaaacggtacaaagctcctctga

SEQ ID NO: 4136 - RNA, 708 nt, synthetic construct
  misc_feature 1..708: note = AAF82135 variant
  source 1..708: mol_type = other RNA
atggaggaagagacccacaccgacgccaagataagggccgagaacgggaccgggagctcgcccaggggcccgggctgcagcctgcgccatttcgcgtgcgagcaaaacctcttgagcagacccgatggctcggcctcgttcctgcaaggggacacaagcgtgctcgcgggcgtgtacgggccagcagaagtgaaagtgagcaaggaaatattcaacaaagcgaccttagaagtgatcttgcgcccgaaaataggcctacccggggtcgccgagaaaagcagggaaaggctcatacgcaatacctgcgaagcggtcgtgctcgggaccttgcacccgcgcacgagcataaccgtggtcctgcaagtagtctcggacgcaggctcgctcctagcctgctgcctgaacgcggcctgcatggcgctcgtagacgcgggcgtacccatgcgcgcactcttctgcggagtcgcgtgcgcactcgatagcgatggcacgctcgtgctcgaccccacgagcaagcaagaaaaagaggccagggccgtgctcacgttcgcgctcgacagcgtcgaaaggaaattgctcatgagctcaacaaagggcctatactcggacacggaattgcaacagtgcttggccgcggcccaggcagcgagccagcacgtattcagattctatcgcgaaagtctacaaaggcgctacagcaaaagttag

SEQ ID NO: 4137 - RNA, 1752 nt, synthetic construct
  misc_feature 1..1752: note = CCDS6312.1 variant
  source 1..1752: mol_type = other RNA
atggaagtcgcagcaaactgctcactgcgagtgaaacggccactcctagacccccgcttcgaaggctacaaacttagcctcgaacccctaccctgttaccaattagaactagacgcagccgtcgccgaggtcaaactccgcgacgaccaatacaccctagaacacatgcacgccttcggtatgtacaattacctccactgcgactcatggtaccaagacagcgtatattatatcgacaccctcggaagaataatgaacctcaccgtaatgctagacaccgccctcggcaaaccacgagaggtattccgcctaccaaccgacctgaccgcctgcgacaaccgactatgcgcctccatccacttttcctcctcaacctgggtaaccctctccgacggcacaggccgactctacgtcatcggcaccggcgaacgtgggaactccgcctccgaaaaatgggaaatcatgttcaacgaagaactcggcgaccccttcatcataatacactcaatttccctcctcaacgccgaggaacactccatagccacacttctcctccgaatcgaaaaagaggaactcgacatgaaaggctcaggattctacgtatcgctggaatgggtaaccatctcaaagaaaaaccaagacaacaagaaatacgaaatcatcaaacgcgacatcctacggggcaaaagcgtcccacattacgctgccatagaaccagacggcaacggactcatgatcgtctcctacaaatccctgaccttcgtacaagctggccaagacctcgaggaaaacatggacgaagacatatcagagaaaataaaagaacccctctactactggcaacaaacagaagacgacctaaccgtcaccatccgactccctgaagacagcaccaaagaggacatccaaatccaatttctacccgaccatatcaacatcgtcctgaaagaccaccaattcctagaaggtaaactgtactcctccatcgaccacgaatccagcacctggatcatcaaagaatcaaactccctcgaaatctccctcatcaagaaaaacgaaggcctaacctggcctgagctagtaataggcgacaaacaaggcgaactcatccgcgactccgcacagtgcgccgccatcgcagaacgcctcatgcacctaacaagcgaagaactcaaccccaacccagacaaagaaaaaccaccctgcaacgcccaagaactagaagaatgcgacatcttcttcgaagagagctctagcctctgccgattcgacggcaacacactcaaaaccacacacgtagtcaacctaggctcaaaccaatacctattctcagtcatcgtagaccccaaagaaatgccctgcttctgcctccgccacgacgtcgacgccttgctctggcaaccccactcctcgaaacaagacgacatgtgggagcacatcgcaacattcaacgccctcggctacgttcaagcctccaagcgagacaagaaatttttcgcgtgcgccccaaattactcctacgctgccctctgcgaatgcctccgccgcgtcttcatttaccggcaacccgcccccatgagcacagtcctatacaaccgcaaagagggccgccaagtcggccaagtcgcaaaacaacaagtagcctcactcgagactaacgaccccattctcggcttccaagcaaccaacgagcgactcttcgtcctcaccacgaaaaacctcttcctcatcaaagtcaatacagagaactaa

SEQ ID NO: 4138 - RNA, 1563 nt, synthetic construct
  misc_feature 1..1563: note = CCDS41288.1 variant
  source 1..1563: mol_type = other RNA
atgtcctcacccctagcctccctctccaaaacacgcaaagtaccccttccatcagagcccatgaacccaggccgacgcggcatacgcatctacggcgacgaagacgaggtagacatgttatccgacggctgcggcagcgaggagaaaatatcagtaccatcctgctacggaggaatcggcgccccagtatcacgacaagtccccgcctcacacgactccgaactcatggcattcatgactagaaaactttgggacctcgaacaacaagtcaaagcacagaccgacgaaatcctatcaaaagaccagaaaatagcagccctggaagatcttgtccaaacactcagaccccaccccgctgaagccactctccaacgccaagaagaactcgaaaccatgtgcgtacaactacagcgtcaagtccgcgaaatggaacgcttcctatccgactacggcctccaatgggtcggagaacccatggaccaagaagacagcgaatcaaaaaccgtcagcgaacacggcgagcgcgactggatgaccgctaagaaattctggaaacccggagactccctcgcccctcccgaagtcgacttcgacagactcctcgcctcactccaagacctctccgaattagtcgtcgaaggcgatactcaagtcacccccgttcccggcggtgcacgactgagaaccctcgaaccaatccccctcaaactctaccgcaacggaataatgatgttcgacggcccattccaacccttctacgacccctccacccaaagatgcctacgcgacatcctagacggattcttcccctcagaacttcaaagactataccccaacggagtaccattcaaagtctctgacctccgtaatcaagtctacctcgaagacggcctcgacccattccccggcgaaggacgagtcgtcggacgacaactcatgcacaaagcactcgaccgcgtcgaagaacaccccggctctcgaatgacagccgaaaaattcctcaaccgcctccccaaattcgtaatacgtcaaggagaagtaatagacattcgaggccccatacgcgacaccctccaaaactgctgcccacttcccgcccgcatacaagaaatagtcgtagaaacaccaacactcgcagcagaaagagaacgctcacaagaatcccccaacacccccgcaccacccctctcaatgcttcgcatcaaatccgaaaacggcgaacaagccttcctactcatgatgcaacctgacaacacaataggcgacgtccgcgcgctcctcgcccaagccagggttatggacgcctctgccttcgaaatattctcaaccttcccgcccaccctctaccaagacgacacactcacactacaggcagccggactcgtacccaaagccgccctactcctccgagcacgacgagcacccaaaagctcactcaaattctcccccggcccctgccccggccccggacccgggccctcacccggtcccggccccggtccctcacccggcccaggccccggcccctcaccctgccccggaccatcaccatctccccaataa

SEQ ID NO: 4139 - RNA, 429 nt, synthetic construct
  misc_feature 1..429: note = AAA88022 variant
  source 1..429: mol_type = other RNA
atggcgaccaaaatcgacaaagaggcctgccgcgcggcctacaacctggtcagagacgacggctcggccgtaatctgggtcacattcaaatacgacggctcgaccatagtcccaggcgaacaaggggccgaataccagcacttcatccagcaatgcaccgacgacgtacgcctgttcgcattcgtacgcttcaccacaggcgacgccatgagcaaacgctcaaaattcgccctgatcacatggataggcgaaaacgtaagcggactccagcgcgcaaaaacaggcacagacaaaaccctggtcaaagaagtagtccaaaacttcgccaaagaattcgtcataagcgaccgcaaagaactggaagaagacttcatcaaaagcgaactcaaaaaagcaggcggggccaactacgacgcccagaccgaataa

SEQ ID NO: 4140 - RNA, 495 nt, synthetic construct
  misc_feature 1..495: note = CCQ43891 variant
  source 1..495: mol_type = other RNA
atggccacgcgcgacccctgggtctggatggcgagcccggactttcaagcacgaaagggaaagcgcgtgcaccaggaaacgctcgcacccggagaaacaaaagataaaatggaattgctagggctaaggggaccgctcgatctcttgggcccgggagcgctcctggccacgctcgggaaaatggccccgggagagcacaaggcccagcgcgcgccaaaggaatcgccagataaaacagccaggtgggcgcaaagggacccgcaagggcccagagtctcactcgagtacctggaaaggcgagcgacaatgggccatcaagcgagcctggaccatcaagggcccagggcctcgcaaggggcctggggattgggcgagcgaacggtctggaccgtgccacaggacaggcgcgggagcttggcaacggaagcgcgaatggaactgcaagggcccggggtcccgcaagcgagcagagcatcgagagagacccagtggtaa

SEQ ID NO: 4141 - RNA, 1623 nt, synthetic construct
  misc_feature 1..1623: note = AAO18361 variant
  source 1..1623: mol_type = other RNA
atgggaccaggggagagagcagggggagggggagacgcgggaaagggaaatgcggcaggaggagggggaggagggaggagcgcgacgacagcagggagtagagcggtaagtgcactatgcctgttgctgtcagtggggagtgcagcagcatgcttgctcttgggagtgcaagcggcagcgctacagggaagagtagcagcattggaagaggagagggagctgctgagaagggcaggaccgccaggggcgttggacgcgtgggcagaaccgcatctagaaagacttttgagggagaagctggacgggttggcgaaaataaggacggcgagggaggcgccgagtgagtgcgtatgcccaccggggccgccagggaggagaggaaaaccagggagaagaggagacccggggccgccgggacaaagtggaagggacgggtatccagggcccttaggcttagacgggaaaccaggattgccggggccaaagggagaaaaaggagcaccgggagatttcggcccgagaggagaccaggggcaggatggagcggccggtccgccaggaccgccagggccaccgggggcgagagggccaccgggggataccggaaaagatggaccgagaggggcacaaggaccagcaggaccaaaaggggaaccaggacaggatggagagatggggccgaagggaccgcccgggcccaagggggagccgggggtgccgggaaagaagggggacgacggaacaccgagccaaccgggcccaccggggccgaagggggagccagggagcatggggccaagaggagaaaatggagtggacggagcgccgggaccgaagggggaaccgggacataggggaacggatggagcggcaggaccaaggggagcgccgggactgaagggggaacagggggacacggtagtaatagactacgacggaaggatactggacgcgctaaaaggaccgccaggaccacagggtccaccaggaccgccgggaataccgggggcaaagggtgagctggggctaccgggggcaccgggaatcgatggggagaaaggaccgaagggacaaaaaggggacccaggagagccggggccggcggggctgaagggggaagcgggagagatgggactgagtgggctgcctggggctgatgggctgaaaggagaaaaaggagagagtgcgagtgacagtctacaagagagtttagcacaactaatagtggagccggggccaccaggaccgccagggcctccaggaccaatggggctacaggggatacaggggccaaaggggctagatggggcaaagggagagaaaggcgcaagcggagagcgagggcctagtggactgccggggccagtaggaccacccggactaataggattaccaggaacaaagggagaaaaggggagaccaggagagccggggctggacggattcccaggacctagaggggaaaaaggggatagatcagagagaggtgaaaagggggaaagaggggtgccaggaagaaaaggagtgaaggggcagaagggggagccagggccgccggggctggatcagccgtgcccggtcggaccggatggactgccggtaccaggatgctggcacaaatga

SEQ ID NO: 4142 - RNA, 492 nt, synthetic construct
  misc_feature 1..492: note = CAG25548 variant
  source 1..492: mol_type = other RNA
atgctcgcccgcgccctcctcctctgcgccgtcctcgcactatcccacaccgccaacccctgctgctcacacccctgccaaaaccgcggcgtctgcatgtccgtcggcttcgaccaatacaaatgcgactgcacccgcaccggcttctacggcgaaaactgctccacccccgaattcctcacccgcatcaaactcttcctcaaacccacccccaacaccgtccactacatcctaacacacttcaaaggcttctggaacgtcgtcaacaacatccccttcctccgcaacgccatcatgtcctacgtcctcacctcccgctcccacctaatcgactccccccccacctacaacgccgactacggctacaaatcctgggaagccttctccaacctctcctactacacccgcgccctcccccccgtccccgacgactgccccacccccctcggcgtcaaagccctccacgcctccgtcttccaagaccgctcataa

SEQ ID NO: 4143 - RNA, 1632 nt, synthetic construct
  misc_feature 1..1632: note = AAC50809 variant
  source 1..1632: mol_type = other RNA
atgggcacctccctctccccaaacgacccctggccactcaacccactctccatccagcaaacaaccctcctactgctcctatccgtcctcgccactgtccatgtcggacaacgattactccgccaaagacgacgccaacttcgctcagcacccccaggtcccttcgcctggcccctcatcggcaacgccgccgccgtcggacaagccgcccatctatccttcgcccgcctagcacgacgatacggcgacgtcttccaaattcgtctaggttcctgcccaatcgttgtccttaacggagaaagggccatacaccaagccctagtccaacaaggtagcgccttcgccgaccgtccagcattcgcctcattccgcgtcgtctccggcgggagatccatggccttcggccactactcagaacactggaaggtccaacggcgcgccgcacactccatgatgcgcaacttcttcacccgccaaccccgatcccgccaagtcctcgaaggacacgtcctatccgaagcccgcgagctagtcgccctacttgtccgcggctccgccgacggcgcattcctagacccccgcccacttaccgtagtagccgtagccaatgtcatgagcgcagtctgcttcggctgccgatactcacacgacgaccccgaatttcgcgaactcctctcccataacgaagaatttggccgcacagtcggcgctggctccctagtcgacgtaatgccatggctacaatacttccccaacccagtccgcaccgtcttccgagagttcgaacaactcaaccgcaacttctcaaacttcatcctagacaaattcctccgccactgcgaatcactccgccccggcgcagcccctcgtgacatgatggacgccttcatcctctccgccgaaaagaaagcagccggagactcacacggcggcggagccagactcgacctcgaaaacgttcccgccaccatcaccgacatcttcggcgcttcccaagacacactctccaccgcccttcaatggctattactactgttcacgcgctaccctgatgtccaaacccgcgtacaagctgaactcgaccaagttgtcggccgcgaccgcctcccctgcatgggcgaccaaccaaacctcccttatgtcctcgccttcctttatgaagccatgcgattctcatccttcgttcccgtcactatcccccacgcaaccaccgccaacacttcagtactcggataccacatacccaaagacaccgtagtctttgtcaaccaatggtccgtcaaccatgaccctctcaaatggcccaaccctgaaaacttcgaccccgcccgattcctcgacaaagatggcctcatcaacaaagacctaacttctcgtgtcatgattttctcagtgggcaaacgccgctgcataggagaggaactctcaaaaatgcaactcttcctcttcatctctatacttgcccaccaatgcgacttccgagccaaccccaacgaacccgctaaaatgaacttttcttacggccttactataaaacccaaatccttcaaagtcaacgtcacccttcgcgaaagcatggaactactcgactctgccgtccaaaacctacaagccaaagaaacctgccaataa

SEQ ID NO: 4144 - RNA, 333 nt, synthetic construct
  misc_feature 1..333: note = NM_001129828 variant
  source 1..333: mol_type = other RNA
atgtggatgggactcatccaactagtcgaaggcgtcaaaagaaaagaccaaggattcctagaaaaagaattctaccacaaaaccaacatcaaaatgcgctgcgaattcctcgcctgctggcccgcattcacagtcctaggcgaagcctggcgcgaccaagtcgactggagcagactcctccgcgacgccggactcgtcaaaatgagccgaaaaccccgcgccagctcccccctaagcaacaaccacccccccacccccaaacgcttcccacgccaacccggccgcgaaaaaggccccataaaagaagtccccggcaccaaaggcagcccctaa

SEQ ID NO: 4145 - RNA, 384 nt, synthetic construct
  misc_feature 1..384: note = NM_001129826 variant
  source 1..384: mol_type = other RNA
atgtggatgggcctcatccaactcgtcgaaggcgtcaaacgcaaagaccaaggcttcctcgaaaaagaattctaccacaaaacaaacatcaaaatgcgctgcgaattcctagcctgctggcccgccttcaccgtcctaggcgaagcctggcgcgaccaagtcgactggtcccgcctcctccgcgacgccggcctcgtcaaaatgtcccgcaaaccccgcgcctcctcccccctctccaacaaccacccccccacccccaaacgccgcggctcaggccgccaccccctcaaccccggccccgaagccctctccaaattcccccgccaacccggccgcgaaaaaggccccatcaaagaagtccccggcaccaaaggctccccctaa

SEQ ID NO: 4146 - RNA, 570 nt, synthetic construct
  misc_feature 1..570: note = AAI40914 variant
  source 1..570: mol_type = other RNA
atgaccgataaaacggaaaaggtcgcggtcgatcccgagaccgtgttcaagcgcccgcgcgagtgcgatagcccgagctatcaaaagcgccagcgcatggccctgctcgcgcgcaagcaaggggccggggactcgctcatagccgggagcgcaatgtcgaaagcgaaaaagctcatgaccgggcacgcgatcccgccctcgcaattggactcgcaaatagacgatttcacgggctttagcaaggacaggatgatgcaaaagcccgggagcaatgccccggtcgggggcaatgtcacgagctcgttctcgggcgatgacttggaatgtcgagaaaccgcgagctcgcccaagagccagcgcgagatcaatgccgatatcaagcgcaagctcgtgaaagagctcagatgcgtgggccagaaatatgaaaagatctttgaaatgctcgagggcgtgcaagggccaacggccgtgcgcaagcgctttttcgagagcataataaaggaagcggccagatgcatgcgcagggactttgtcaagcacttgaaaaagaaattgaaaaggatgatatga

SEQ ID NO: 4147 - RNA, 795 nt, synthetic construct
  misc_feature 1..795: note = AAH20662 variant
  source 1..795: mol_type = other RNA
atgctccgcctcctccgcctcgccctcgccttctacggtcgcacagccgaccccgccgaacgccaaggccctcaacaacaaggcctcccacaaggagacacccaactcaccaccgtccaaggcgtcgtcacctccttctgcggcgactacggcatgatcgacgaatcaatctacttctcctccgacgtcgtcaccggaaacgtccccctcaaagtcggtcaaaaagtcaacgtagtcgtcgaagaagacaaaccccactacggcctccgcgccatcaaagtcgacgtcgtaccccgacacctatacggcgccggcccctccgactccggcaccagagtcctcatcggctgcgtaacctccatcaacgaagacaacatatacatctccaactccatctacttctcaatcgccatcgtttccgaagacttcgtcccctacaagggcgacctactcgaagtcgaatactccaccgaacccggcatctccaacatcaaagcaacctccgtcaaacccatacgctgcatccacaccgaagaggtctgcataacctcagtacacggccgcaacggcgtcatcgactacaccatcttcttcacactcgactccgtcaaactccccgacggctacgtcccccaagtagacgacatcgtcaacgtcgtaatggtcgaatccatccagttctgcttcatatggcgcgcaatctccataaccccagtccacaaatcctcctccggattccaagacgacggcggcctcggacgccccaaacgcgaaagacgctcccaatcaatataa

SEQ ID NO: 4148 - RNA, 2844 nt, synthetic construct
  misc_feature 1..2844: note = CCDS735.1 variant
  source 1..2844: mol_type = other RNA
atgagcctaccctctcgtcagacagcgatcatcgtcaacccaccaccacccgaatacattaataccaagaaaaacggccgactaacgaaccaactccaatacttacagaaagtcgtgctaaaggacctgtggaaacactcattctcctggcccttccaacgaccagtcgacgccgtcaaacttcaactcccagattactataccatcatcaaaaacccaatggacctaaacacaatcaagaaacgcttagaaaacaaatactacgccaaggcctccgaatgcatagaagacttcaacacgatgttctccaactgctacctatacaacaaacctggagacgacatcgtacttatggcccaagcgcttgagaaactcttcatgcaaaagctctcacagatgccccaggaagaacaagtcgtcggcgtcaaagaacggataaagaaaggcacccagcagaacatcgcagtctcgagcgccaaagaaaaatcaagccctagcgcgaccgaaaaagtcttcaaacaacaagaaatcccctcagtcttccccaaaacaagtatatcgccgctcaacgtcgtacaaggagcgtccgtaaactcctcaagccaaacagctgcccaggtcaccaaaggagtaaaacgcaaagctgacaccaccacacccgccacttcagcagtaaaggcttcctccgagttcagccccaccttcactgaaaagtccgtggccctaccacccatcaaggagaacatgcccaaaaacgtcctacccgactcccagcaacaatataacgtagttaagaccgtgaaagtcaccgaacaactccgacactgctccgagatcctcaaggagatgctcgcaaagaaacacttttcatacgcatggcccttctacaaccccgtcgacgttaacgcactcggactccacaactactacgacgtagttaaaaacccgatggacctcggcacgataaaggagaaaatggacaaccaagaatacaaagatgcatacaaatttgcagcagacgtacgcctgatgttcatgaactgctacaaatacaaccctccagaccatgaagtagtaacaatggcacgcatgctacaagacgtcttcgaaactcacttctccaaaatcccgatcgaaccagtagagagcatgccactatgctacatcaagacagatatcacagaaacaacgggccgagaaaacacaaatgaggcttccagcgaaggcaactcctccgacgactccgaagatgaacgagtaaaacgcttagcaaagctacaagagcaactaaaagcagtccatcagcagctccaggtcctctcacaggtcccctttcgaaagctaaacaaaaagaaagagaaaagcaagaaagaaaagaagaaagaaaaggtcaacaactcgaacgaaaacccccgcaaaatgtgcgaacaaatgcgactcaaagaaaagagcaagcgtaaccaacccaagaaacgcaaacaacaattcataggccttaaatccgaggacgaagacaatgccaaacctatgaattacgacgaaaaacgacagctaagtctgaacatcaataaactgcccggagacaaactcgggcgcgtagtacacataatccaatcccgagaaccctcgctaagcaactccaaccccgacgagatcgaaattgacttcgaaaccctcaaagccagcacactacgagaactcgagaaatacgtctccgcctgcttgcgaaaacgccccctcaaacccccagctaaaaagatcatgatgagcaaagaggaactgcattcacagaagaaacaagaactggaaaaacgcctcctcgacgtgaataaccaactcaacagccgcaaacgccaaaccaaatccgataaaacccagccaagtaaagcagtagaaaacgtgtcacggctatccgagtcctcaagctcaagctcctcctcatccgaatcagaaagctcctcctccgacctatcctcgagtgattcatccgacagcgaatcagaaatgttccccaaattcacggaggtcaaacccaacgacagcccctcaaaggaaaacgttaaaaagatgaagaacgaatgcataccacccgaaggccgcacgggcgtcacccaaatcggctactgcgtacaagacacgacctcagccaacaccacgctcgtccaccaaacaaccccctcccacgtgatgcccccaaaccaccaccaactggcattcaactatcaagaactcgaacatctacaaactgtcaaaaacatctctcccctccaaatcctgccaccgtccggggactccgaacaactctcaaacggcataaccgtaatgcacccctcaggagactccgacaccaccatgttggagagcgaatgccaagccccagtacaaaaagacattaaaatcaaaaatgccgactcatggaagtccctcggaaaacccgtcaaaccctccggggtcatgaaatcctcagacgaactcttcaaccaatttcgcaaggcagccatcgagaaagaagtaaaagccagaacacaagaactcatacgtaaacacctcgaacaaaacaccaaagaactgaaagcctcccaagaaaaccaacgcgacctcgggaacgggctaaccgtagaatcattctcgaacaagatacaaaacaaatgttcgggagaagaacaaaaagaacaccaacaatcttccgaagcacaggacaaaagcaaactctggctactcaaagaccgagacctagccagacaaaaagagcaagaacgccgacgcagagaggccatggtgggaactatcgacatgacgctccagtccgacatcatgacaatgttcgaaaacaacttcgactaa

SEQ ID NO: 4149 - RNA, 543 nt, synthetic construct
  misc_feature 1..543: note = CCDS35455.1 variant
  source 1..543: mol_type = other RNA
atgcaagcggaagggcgaggaacagggggctcaaccggggacgcagacgggcccgggggcccaggcatacccgacggcccgggcgggaacgcgggcggacccggagaagcgggcgcgaccgggggcaggggcccgcgcggagccggggccgcgcgcgcgagcggacccaggggcggagccccgcgcgggccccatggcggagccgcgagcgcgcaagatgggaggtgcccgtgcggcgccaggcgaccggactcgcgcttgctcgagctccatatcacaatgccgttctcgagcccgatggaggccgagctcgtgcgcaggatcttgagcagagacgcggccccgctcccgcgcccgggcgcggtcctgaaagatttcacggtctcaggcaacctcctgttcatacgactgacagcggccgatcacaggcaattgcaattgagcataagctcgtgcctgcaacagctatcactcctgatgtggatcacgcaatgtttcttgcccgtgttcctggcccaggccccgagcgggcaaaggcgctag

SEQ ID NO: 4150 - RNA, 633 nt, synthetic construct
  misc_feature 1..633: note = CAA10196 variant
  source 1..633: mol_type = other RNA
atgcaagcggaagggcaagggacagggggatcgacaggggacgcggacgggccagggggaccgggcatacctgatggaccaggagggaacgcgggagggccaggggaagcgggcgcgacagggggaaggggcccgagaggggcaggggcagcaagagcaagcgggccaagaggaggagccccgcgagggccacatggaggagcagcgagcgcgcaagatggaaggtgcccgtgcggggcaaggagaccggacagtcgattgctacagctacatataacgatgccgttctcgagtccaatggaggccgagctggtgcgaaggatattaagcagggacgcggcaccgctaccacgcccgggagcggtattaaaagatttcacggtatcgggaaatctattattcatgagcgtgagagatcaagatagagagggagcgggaaggatgagagtagtgggatggggattgggatcggcatcgcccgaaggacaaaaagcgcgagatctaaggacaccgaaacataaagtgagcgagcaaaggccagggacaccgggaccgcccccaccagagggagcgcaaggggacgggtgcaggggagtggcctttaacgtaatgtttagcgcgccacatatatag

SEQ ID NO: 4151 - RNA, 1992 nt, synthetic construct
  misc_feature 1..1992: note = CCDS13459.1 variant
  source 1..1992: mol_type = other RNA
atggccgctaccgaaatatccgtcctatcagaacaattcacaaagataaaagaactcgaactcatgcctgaaaaaggactcaaagaagaagaaaaagacggcgtatgcagagaaaaagaccaccggagccccagcgaattagaggccgaacgcacaagcggagcattccaagactccgtgctggaagaagaagtagaactcgtgctagcaccctcagaagaaagcgaaaagtacatactcaccctccaaacagtccatttcacatcagaagccgttgaactccaagacatgtccctactaagcatccaacagcaagaaggtgtacaagtcgtggttcagcaacccggacccggactgctctggctagaggaaggtcccaggcaatcgctgcaacaatgcgtagccataagcatacagcaagaactatactcaccccaggagatggaagtcctacagttccacgcactcgaagaaaacgtaatggtcgcctccgaggactcaaagctcgccgtctcactcgcggagaccaccggcctgatcaaactcgaggaagaacaagagaaaaaccaactcctcgccgaacgcaccaaggaacaactattcttcgtagaaaccatgtccggcgatgaacggagcgacgaaatcgtactcaccgtctcaaactccaatgtagaagaacaagaggaccaaccgacagccggccaagccgacgccgaaaaggctaaaagcaccaaaaaccaaagaaaaacaaaaggcgccaaaggcaccttccactgcgacgtctgcatgttcacctcctcgaggatgagctcattcaacaggcacatgaaaactcacacctcagagaaaccgcacctgtgccatctctgcctaaaaaccttccgcaccgtaaccctactcaggaaccacgtcaatacccacacaggaacccgaccctacaaatgcaacgactgcaacatggccttcgtcacatctggcgaactcgtacggcaccgccgatacaagcacacccacgaaaaaccgttcaaatgctcaatgtgcaaatacgccagcgttgaagcctccaaacttaaacgccacgtacgcagccacacgggcgaaagaccgtttcaatgctgccaatgctcatacgcatcacgagacacctacaaactaaaaagacacatgcgaacacactccggagaaaaaccctacgaatgccacatatgccacacacgcttcacccagtccgggaccatgaaaatccacatcctccaaaaacacggagaaaacgtacccaaatatcaatgcccccactgcgcaaccataatcgcccgcaaatctgacctgcgagtccacatgcgcaacctgcacgcctacagcgctgccgaactaaaatgccgatactgcagcgcagtattccacgaacgctacgcactaatccaacaccaaaagacgcacaaaaacgaaaaacgcttcaaatgcaaacactgctcctacgcctgcaaacaagagagacacatgaccgcccacatcagaacccacaccggagagaaacccttcacatgcctctcatgtaacaaatgcttccgccaaaaacaactcctcaacgcacactttcgaaaataccatgacgcgaacttcattccaacagtctacaaatgcagcaagtgcggcaaaggcttcagcagatggatcaacctacaccgccactccgaaaaatgcggctccggagaggccaaatccgccgcctccggcaaaggaaggcgcactcgcaaacgcaaacaaacaatcctaaaagaagcaaccaaaggccaaaaagaggcagccaaaggctggaaagaagccgccaacggagacgaggccgccgcggaagaggcaagcacaacaaaaggagaacaattccccggcgagatgttcccagtagcatgccgcgagacaacagcccgcgtcaaagaagaagtcgacgaaggagtaacatgcgaaatgctactcaacaccatggacaagtaa

SEQ ID NO: 4152 - RNA, 2148 nt, synthetic construct
  misc_feature 1..2148: note = CCDS11368.1 variant
  source 1..2148: mol_type = other RNA
atgtcacaagttatgtcctcccccttgctcgccggtggacacgccgtatccctcgccccctgcgacgaaccgcgccgcaccctccaccccgccccctccccctctcttcctccccaatgctcctactacaccaccgaaggctggggcgcacaagcattaatggcccctgtaccctgcatgggacccccaggccgactccaacaagcaccccaagtcgaagccaaggctacctgcttcctcccatcgcccggagaaaaggccttaggcacccctgaagatttagactcctacatagacttttctcttgaatctctcaaccaaatgatactcgaactcgaccccacattccaactactcccacccggcaccggaggatcccaggccgaattagctcaatcaacaatgtccatgcgaaagaaagaagaatccgaagccctagacatcaaatatatcgaggtcaccagcgcacgctctcgctgccacgacggaccccaacattgttcctctcccagcgtaacaccccctttcggatcacttcgctccggtggtttacttctctcacgtgacgtcccccgtgaaacccgatcttcctcggaatcactcatcttctcaggcaaccaaggccgcggccaccaacgccccctcccacccagcgaaggactctcaccccgccctcccaactccccctccatctccataccctgcatgggctctaaagcatcttctccccacgggctcggctcccccttagtagccagcccccgcctcgagaaaagattaggcggactagcccctcaaagaggttccagaatatccgttctctccgcttccccagtctccgacgtatcctacatgttcggcagctcccagtccctgctccactcctccaactcctcacaccaatcatcatctcgctcactcgaatccccggcaaactcctcctcctcactacactccctcggatctgtatcgctctgcacccgaccctccgacttccaagcgccccgaaacccaaccctcaccatgggccaaccccgcacaccacacagcccacccctcgccaaagaacacgcctccagctgcccaccatcgataaccaactccatggtagacatcccgatagtattaataaacggctgccctgaacccggatcttcccctccacagcggacccctggccatcaaaattccgtccaaccaggcgccgcgtccccctcgaacccctgccccgccactcgttcgaactcacaaacactctccgacgcccctttcacaacctgtccagaaggcccagcacgtgacatgcaacccacaatgaaattcgtgatggatacatcaaaatactggttcaaacccaacatcaccagagaacaagcaatcgaactactacgcaaagaagaaccaggcgcattcgtcatacgcgactcctcctcatacaggggcagctttgggctcgccctcaaagtgcaagaagttccagcctctgcccaatctcgccccggcgaagactcaaacgacctcatccgccatttcctaatagaatcctccgcaaaaggagtccacctcaaaggcgccgacgaagaaccatacttcggatccctctcagccttcgtatgccaacactccataatggccctagcactaccgtgcaaactcaccataccccagcgagagctaggcggcgcagacggagcctccgactccacagacagtccggcatcctgccaaaagaaatcagccggctgtcacactctctacctctcttcagtttccgtcgaaaccctcacaggtgcccttgctgtacaaaaagccatctccaccacattcgaaagggacatactacccacccccacagtcgtccacttcaaagtaaccgaacaaggcatcaccctaaccgacgtacagcgcaaagtattcttccgtcgacactacccactgaccacgctacgattctgcggcatggacccagaacaacgaaaatggcaaaaatactgcaaaccctcatggatcttcggcttcgtagccaaatcccaaaccgaaccccaagaaaacgtctgccacctattcgccgaatacgacatggtgcaacccgcctcccaagtgatcggccttgtcacggccctactacaagacgcagaacgcatgtaa

SEQ ID NO: 4153 - RNA, 1302 nt, synthetic construct
  misc_feature 1..1302: note = AAH06510 variant
  source 1..1302: mol_type = other RNA
atggccctacgcgtcacccgcaacagcaaaattaacgcagagaacaaggccaagatcaacatggccggcgccaaacgagtccccacagcccccgctgccacctccaagcccggcctacgccccagaaccgcactcggcgacatcggcaacaaagtcagcgaacaattacaagcaaaaatgcccatgaaaaaggaagccaaaccttccgcaaccggcaaagtcatcgacaagaaactccccaaacccctcgaaaaagtcccaatgctcgtgccagtcccagtctccgagccagtaccagagcccgaaccagaacccgaaccagaacccgttaaagaagaaaaactctccccagaacctatcctagtagataccgcctctccctcacccatggaaacgtccggctgcgcaccagcagaagaagacctatgccaagccttcagcgacgtcatcctcgccgtcaacgacgtcgacgccgaagacggcgccgaccccaacttatgctcggaatacgtgaaagacatctacgcctacctgcgccaactcgaagaagaacaagcagtaagacccaaatacctcctcggccgcgaagttaccggcaacatgcgcgcaatactaatagactggctagtccaagtacaaatgaaattccgcctactacaagaaacaatgtacatgaccgtctcaataatcgaccgcttcatgcaaaacaactgcgtcccaaagaaaatgctccagctagtaggcgtaaccgccatgttcatcgcctcaaaatacgaagaaatgtacccacccgaaatcggggacttcgccttcgtcacagacaacacatacaccaaacaccaaatacgccaaatggaaatgaaaatcctacgcgccctaaacttcggactcggacgacccctccccctccacttcctccgccgcgcatccaaaataggagaggtcgacgtcgaacaacacacactcgccaaatacctaatggaactaacaatgctagactacgacatggtacacttcccaccctcccaaatagccgccggcgccttctgcctcgctctaaaaatcctggacaacggcgagtggacacccaccctccaacactacctatcgtacacagaagaatccctgcttcccgtcatgcaacacctcgccaaaaatgtcgtcatggtcaaccaaggactcaccaaacacatgacggtcaaaaacaaatacgccacctccaaacacgcaaaaatcagcacccttccccaactgaactcagccctggtacaagacctcgcaaaagcagtggccaaagtataa

SEQ ID NO: 4154 - RNA, 888 nt, synthetic construct
  misc_feature 1..888: note = AAA58392 variant
  source 1..888: mol_type = other RNA
atggagcaccagctcctgtgctgcgaagtggaaacgatcaggcgcgcgtacccggacgcgaacctgctcaacgaccgggtcctgcgcgcgatgctcaaagcagaagaaacctgcgccccgagcgtaagctacttcaaatgcgtccaaaaggaagtgctcccaagcatgcgcaaaatcgtagccacatggatgctcgaagtctgcgaagaacaaaagtgcgaagaagaggtcttccccctggccatgaactacctcgatcgcttcctctcactcgagccagtcaaaaagagccgactccagctcctaggcgcaacctgtatgtttgtcgcgagcaagatgaaggaaacgatcccgctcacagccgaaaaactatgcatatacacggacaacagcatacgcccagaagaactcctacaaatggaactactcctagtcaacaaactaaaatggaacctggccgcaatgacgccccacgacttcatcgaacacttcctctcaaaaatgcccgaggccgaagaaaacaaacagatcatacgcaaacacgcgcaaacattcgtggccctgtgcgcgaccgacgtcaaattcataagcaacccgcccagcatggtcgccgcaggaagcgtcgtcgcggccgtccaagggctcaacctcagaagcccgaacaacttcctgagctactacaggctcacgcgcttcctatcccgcgtaatcaaatgcgaccccgactgcttacgcgcatgccaggaacagatcgaggccctgctcgagagctcgctcaggcaagcgcaacagaacatggacccgaaagcggccgaggaagaggaagaggaagaggaagaagtcgacctcgcgtgcacgcccacggacgtacgagacgtcgacatctag

SEQ ID NO: 4155 - RNA, 651 nt, synthetic construct
  misc_feature 1..651: note = AAA36601 variant
  source 1..651: mol_type = other RNA
atgctccgcctctccgaacgcaacatgaaagtcctcctcgccgccgccctaatagccggctcagtattcttcctcctactacccggcccctccgccgcagacgaaaagaagaaaggccccaaagtcacagtcaaagtctacttcgacctccgaatcggcgacgaagacgtcggccgcgtcatcttcggcctcttcggcaaaaccgtaccaaaaaccgtcgacaacttcgtcgcactcgccacaggcgaaaaaggcttcggctacaaaaactccaaattccaccgcgtcatcaaagacttcatgatccaaggcggcgacttcacccgcggcgacggcaccggcggcaaatcaatctacggcgaacgcttccccgacgaaaacttcaaactcaaacactacggccccggctgggtctccatggccaacgccggcaaagacaccaacggcagccaattcttcataacaacagtcaaaacagcctggctagacggcaaacacgtcgtcttcggcaaagtcctcgaagggatggaagtagtacgcaaagtcgaaagcacaaaaaccgactcccgcgacaaacccctaaaagacgtcatcatcgccgactgcggcaaaatcgaagtcgaaaagcccttcgccatcgcaaaagaataa

SEQ ID NO: 4156 - RNA, 1044 nt, synthetic construct
  misc_feature 1..1044: note = AAD10634 variant
  source 1..1044: mol_type = other RNA
atgccccgcgggcaaaaatccaaactccgagcccgagaaaaacgccgcaaagcccgagaagaaacccaaggcctcaaagtagcccacgcaaccgcggccgaaaaagaagaatgcccatccagctcgcccgtcctcggagacacacccacctcctcccccgctgccggaataccccaaaaaccccaaggtgcacccccaaccaccaccgccgcagccgccgtcagctgcaccgaatccgacgaaggagccaaatgccaaggagaagaaaacgcctccttctcccaagcaaccacatcaaccgaatcatccgtcaaagaccccgtcgcctgggaagccggcatgctcatgcacttcatcctacgcaagtacaaaatgagagaacccataatgaaagcagacatgctcaaagtcgtcgacgaaaaatacaaagaccacttcacagaaatcctcaacggcgcctcacgccgcctcgaactcgtcttcggcctagacctaaaagaagacaaccccagcggccacacctacacgctcgtctccaagctaaacctcacaaacgacggcaatctctccaacgactgggacttcccccgcaacggactcctaatgccactcctcggagtcatcttcctaaaaggaaactcagcaacagaagaagaaatatggaaattcatgaacgtactcggagcctacgacggcgaagaacacctcatctacggcgaaccccgcaaattcataacacaagacctcgtacaagaaaaatatctcaagtacgaacaagtcccaaacagcgacccaccccgataccaattcctatggggaccccgcgcatacgcagaaaccaccaaaatgaaagtcctcgagttcctcgccaaaatgaacggcgccacaccccgagacttcccctcccactacgaagaagccctccgagacgaagaagaacgcgcccaagtaagaagctccgttcgcgccaggcgccggaccacagccaccacattccgcgcacgctcccgcgcacccttcagccgcagctcgcacccaatgtaa

SEQ ID NO: 4157 - RNA, 2436 nt, synthetic construct
  misc_feature 1..2436: note = BAF91373 variant
  source 1..2436: mol_type = other RNA
atggaatcgcagggagtcccaccaggtccttaccgcgccacaaaactttggaacgaagttacaacatcattccgagctggaatgcctctaagaaaacaccgccaacacttcaagaaatacggcaactgcttcaccgccggcgaagccgtagactggctctacgacctcctacggaacaactcgaacttcggcccagaagtcacccggcaacagaccatccaactccttcgcaaatttctcaaaaaccacgtcatcgaggacatcaaaggccgatggggctcagaaaacgtcgacgacaacaaccaactcttccgcttcccagccacgtcacccctcaaaacactcccccgccgctatcccgaactacgcaaaaacaacatcgaaaacttttccaaagataaagactccatcttcaaactcagaaacttatccagacgcacccccaagcgtcacggcctccacttgtcacaagaaaacggcgagaaaataaaacacgaaatcatcaatgaagaccaagaaaatgccatagacaaccgcgaactctcgcaggaagacgtagaagaagtatggcgatacgtcatcctcatctacctccagaccattcttggagtgccatccctcgaagaggtcatcaaccccaaacaagtcatcccacagtacataatgtacaacatggcaaacactagcaagcgcggcgtagtgatactacaaaataaatccgacgacctcccccactgggtcctatccgccatgaaatgcctagccaattggccccgatcaaacgacatgaacaaccccacatacgtgggcttcgaacgcgatgtcttcagaaccattgctgactacttcctcgacctcccagaaccccttctcaccttcgagtactatgaactcttcgttaacatactcgtagtatgcggctacatcacggtatccgaccgctccagcggaatccacaaaatccaagacgacccccaatcctccaaattcctacacctcaacaacctcaactctttcaaatccaccgaatgccttctcctatcactactacatcgtgagaaaaacaaagaagaatcagactcaacagaacgcctacaaatctcaaaccccggattccaagaacggtgcgctaagaaaatgcaactcgtcaaccttcgcaaccgacgagtctccgccaatgacatcatgggcggttcctgccacaacctcatcggcctctccaacatgcacgacctctcaagtaactccaaaccccgatgctgcagcctcgaaggcatcgtcgacgtacccggaaacagctccaaagaggcatcaagcgtattccaccagagctttcccaacatcgaaggtcaaaacaacaaactattccttgaatctaaacccaaacaggagttcttacttaacttacattctgaggaaaacatacaaaaacccttctcggctggcttcaagcgcacctccacactcactgtccaagatcaggaggaattatgtaacggcaaatgcaaatccaagcaactctgccgatcccaatcactcctgctccgatccagcacacgacgaaattcatatataaacacgccggtcgccgaaataatcatgaagcccaacgtaggacagggctccacctcagtacaaaccgccatggagtctgaactcggcgaatcctcggccacgatcaacaaacggctatgcaagtcaacaatcgaactatctgaaaatagcctccttcccgcttcatctatgctgacaggcacccaatccctactccaaccccacctcgaacgtgttgctatcgacgccctacaactatgctgtctcctcctccctcccccaaaccgaagaaaactacaactcctcatgcgcatgatttcccgcatgtcccaaaacgtggacatgccaaaactccacgacgccatgggcacccgttcactcatgatacacaccttctcccgctgcgttctctgctgcgcagaagaagtcgacctagatgaactactggcaggacgcctagtctctttcctcatggaccaccaccaagaaatcctccaagtcccctcctacctacaaacagcggtcgaaaaacacctagactacctcaagaaaggccacatcgaaaatcccggcgacggactattcgccccactcccaacctactcctactgcaaacaaatatccgcacaagagttcgatgaacagaaagtttcaacctcacaagccgcaatagcagaacttctagaaaacatcatcaaaaaccgctcgctgcccctaaaagaaaaacgaaagaaactaaaacaattccagaaagaataccccctcatataccagaaacgctttcccactactgaatccgaagccgccctattcggcgacaaacccaccataaaacaacccatgctaatcctaagaaaacccaaattccgatcgctccggtaa

SEQ ID NO: 4158 - RNA, 297 nt, synthetic construct
  misc_feature 1..297: note = AAA46940 variant
  source 1..297: mol_type = other RNA
atgcacggcgacacccccaccctacacgaatacatgctcgacctccaacccgaaaccaccgacctctactgctacgaacaactcaacgactcctccgaagaagaagacgaaatcgacggccccgccggccaagccgaacccgaccgcgcccactacaacatcgtcaccttctgctgcaaatgcgactccaccctccgcctctgcgtccaatccacccacgtcgacatccgcaccctcgaagacctcctcatgggcaccctcggcatcgtctgccccatctgctcccaaaaaccctaa

SEQ ID NO: 4159 - RNA, 318 nt, synthetic construct
  misc_feature 1..318: note = AAA46947 variant
  source 1..318: mol_type = other RNA
atgcacggccccaaagccaccctccaagacatcgtcctccacctcgaaccccaaaacgaaatccccgtcgacctactctgccacgaacaactctccgactccgaagaagaaaacgacgaaatcgacggcgtcaaccaccaacacctccccgcccgccgcgccgaaccccaacgccacaccatgctctgcatgtgctgcaaatgcgaagcccgcatcaaactcgtcgtcgaatcctccgccgacgacctccgcgccttccaacaactcttcctaaacaccctctccttcgtctgcccctggtgcgcctcccaacaataa

SEQ ID NO: 4160 - RNA, 297 nt, synthetic construct
  misc_feature 1..297: note = AAA46951 variant
  source 1..297: mol_type = other RNA
atgcgcggcgaaacccccaccctccaagactacgtcctcgacctccaacccgaagccaccgacctccactgctacgaacaactccccgactcctccgacgaagaagacgtcatcgactcccccgccggccaagccgaacccgacacctccaactacaacatcgtcaccttctgctgccaatgcaaatccaccctccgcctctgcgtccaatccacccaagtcgacatccgcatcctccaagaactcctcatgggctccttcggcatcgtctgccccaactgctccacccgcctctaa

SEQ ID NO: 4161 - RNA, 294 nt, synthetic construct
  misc_feature 1..294: note = AAA46959 variant
  source 1..294: mol_type = other RNA
atgcgcggccacaaacccaccctcaaagaatacgtcctcgacctctaccccgaacccaccgacctctactgctacgaacaactctccgactcctccgacgaagacgaaggcctcgaccgccccgacggccaagcccaacccgccaccgccgactactacatcgtcacctgctgccacacctgcaacaccaccgtccgcctatgcgtcaactccaccgcctccgacctccgcaccatccaacaactcctcatgggcaccgtcaacatcgtctgccccacctgcgcccaacaataa

SEQ ID NO: 4162 - RNA, 300 nt, synthetic construct
  misc_feature 1..300: note = AAA46967 variant
  source 1..300: mol_type = other RNA
atgcacggcgaaatcaccaccctccaagactacgtcctcgacctcgaacccgaagccaccgacctctactgctacgaacaactctgcgactcctccgaagaagaagaagacaccatcgacggccccgccggccaagccaaacccgacacctccaactacaacatcgtcacctcctgctgcaaatgcgaagccaccctacgactctgcgtccaatccacccacatcgacatccgcaaactagaagacctcctcatgggcaccttcggcatcgtctgccccggctgctcccaacgcgcctaa

SEQ ID NO: 4163 - RNA, 330 nt, synthetic construct
  misc_feature 1..330: note = AAA47051 variant
  source 1..330: mol_type = other RNA
atgcgcggccccaaacccaccctccaagaaatcgtcctcgacctctgcccctacaacgaaatccaacccgtcgacctcgtctgccacgaacaactcggcgaatccgaagacgaaatcgacgaacccgaccacgccgtcaaccaccaacaccaactcctcgcccgccgcgacgaaccccaacgccacaccatccaatgctcctgctgcaaatgcaacaacaccctccaactcgtcgtcgaagcctcccgcgacaccctccgccaactccaacaactcttcatggactccctcggcttcgtctgcccctggtgcgccaccgccaaccaataa

SEQ ID NO: 4164 - RNA, 321 nt, synthetic construct
  misc_feature 1..321: note = CAA52574 variant
  source 1..321: mol_type = other RNA
atgcatggcccgcgcgagaccttgcaagagatcgtgctccatctcgagccccagaacgagctcgatcccgtggacttgctctgttacgagcaactgagcgagagcgaggaagagaacgatgaagcggacggggtctcgcacgcacaattgcccgcgcgcagggccgagccccagcgccataaaatactctgtgtctgttgcaagtgcgatggcaggatcgagctcacggtcgagagctcggccgaggacttgcgcacgctccagcaattgttcttgagcacgctctcgttcgtgtgcccgtggtgtgccacgaaccagtga

SEQ ID NO: 4165 - RNA, 306 nt, synthetic construct
  misc_feature 1..306: note = M62877.1 variant
  source 1..306: mol_type = other RNA
atgcgcggcaacgtcccccaactcaaagacgtcgtactccacctcaccccccaaaccgaaatcgacctccaatgctacgaacaattcgactcctccgaagaagaagacgaagtcgacaacatgcgcgaccaactccccgaacgacgcgccggccaagccacctgctaccgcatcgaagccccctgctgccgctgctcctccgtcgtccaactcgccgtcgaatcctcaggcgacaccctccgcgtcgtccaacaaatgctcatgggcgaactctccctcgtctgcccctgctgcgccaacaactaa

SEQ ID NO: 4166 - RNA, 300 nt, synthetic construct
  misc_feature 1..300: note = CAA52586 variant
  source 1..300: mol_type = other RNA
atgcgaggcgacaaagccaccatcaaagactacatcctcgacctccaacccgaaaccaccgacctccactgctacgaacaactaggcgactcctccgacgaagaagacaccgacggcgtcgaccgccccgacggccaagccgaacaagccacctccaactactacatcgtcacctactgccactcctgcgactccaccctccgcctctgcatccactccaccgccaccgacctccgcaccctccaacaaatgctcctcggcaccctccaagtcgtctgccccggctgcgccagactctaa

SEQ ID NO: 4167 - RNA, 318 nt, synthetic construct
  misc_feature 1..318: note = CAA52597 variant
  source 1..318: mol_type = other RNA
atgcacgggaaagtgcccacgctccaggacgtggtcctggaattgaccccgcaaacggaaatagacttgcaatgtaacgagcaattggactcgagcgaggacgaggacgaggacgaggtcgatcacttgcaagagcgcccgcaacaggccagacaagcgaaacagcacacgtgctatctcatacacgtgccctgttgcgagtgcaagttcgtggtccagctcgatatccagagcacgaaagaggacctgcgcgtagtccagcaattgctcatgggcgcgctcacggtcacgtgcccgctctgtgcctcgagcaattga

SEQ ID NO: 4168 - RNA, 297 nt, synthetic construct
  misc_feature 1..297: note = AAF13691 variant
  source 1..297: mol_type = other RNA
atgcgaggcaacaaccccaccctccgcgaatacatcctcgacctccaccccgaacccaccgacctcttctgctacgaacaactctgcgactcctccgacgaagacgaaatcggcctcgaccgccccgacggccaagcccaacccgccaccgccaactactacatcgtcacctgctgctacacctgcgacaccaccgtccgcctctgcatcaactccaccaccaccgacgtccgcaccctccaacaactcctcatgggcacctgcaccatcgtctgcccctcctgcgcccaacaataa

SEQ ID NO: 4169 - RNA, 324 nt, synthetic construct
  misc_feature 1..324: note = ACL12335 variant
  source 1..324: mol_type = other RNA
atgcacggccccaaagccaccctctgcgacatcgtcctcgacctcgaaccccaaaactacgaagaagtcgacctcgtctgctacgaacaactccccgactccgactcagaaaacgaaaaagacgaacccgacggcgtcaaccaccccctcctcctcgcccgccgcgccgaaccccaacgccacaacatcgtctgcgtctgctgcaaatgcaacaaccaactccaactcgtcgtcgaaacctcccaagacggcctccgcgccctccaacaactcttcatggacaccctctccttcgtctgccccctctgcgccgccaaccaataa

SEQ ID NO: 4170 - RNA, 318 nt, synthetic construct
  misc_feature 1..318: note = AAA79500 variant
  source 1..318: mol_type = other RNA
atgcacgggaaagtgcccacgctccaggaagtgatcttggaattggccccgcaaacggaaatagacctgcaatgtaacgagcaactggactcgagcgaggacgaggacgaggacgagatcgatcacctcctggagcgcccgcaacaggccaggcaagcggaacagcacaagtgctatctcatacacgtgccctgttgcaagtgcgagctcgtggtccagctcgatatccagagcacgaaagaggaattgcgcgtggtccagcaactgctcatgggcgcgctcacggtcacgtgcccgctctgtgcctcgagcaagtga

SEQ ID NO: 4171 - RNA, 1392 nt, synthetic construct
  misc_feature 1..1392: note = AAF80488 variant
  source 1..1392: mol_type = other RNA
atgggcaaagagaaaacccacataaacatcgtcgtgataggacacgtagactcaggcaaaagcacaaccaccggccacctcatctacaaatgcggaggcatagacaaaagaacaatcgaaaagttcgaaaaagaagcagccgaaatgggcaaagggagcttcaaatacgcctgggtactagacaaactaaaggccgaacgcgagcgaggaataacgatcgacatcagcctatggaaattcgaaacgaccaaatactacataacaatcatagacgcgcccgggcacagagacttcatcaaaaacatgatcacgggaaccagccaagccgactgcgcagtcctcatcgtggcggccggagtaggagagttcgaagcaggcataagcaaaaacggacaaacaagagaacacgccctcctagcctacaccctgggagtcaagcaactaatcgtcggcgtcaacaaaatggacagcacagaacccgcatacagcgaaaaacgctacgacgaaatcgtcaaggaggtaagcgcatacataaagaaaatcgggtacaaccccgccacagtccccttcgtcccaatatccggctggcacggagacaacatgctagaaccaagcccaaacatgccctggttcaaaggctggaaagtcgaaagaaaagaaggcaacgccagcggcgtaagcctactcgaggccctagacacaatcctacccccaacccgccccacggacaaacccctccgcctacccctgcaagacgtctacaaaatcggaggcatcggcaccgtccccgtcggaagagtcgaaaccggaatactgcgaccaggcatggtagtaaccttcgccccagtaaacatcacaaccgaagtaaaatcagtggagatgcaccacgaagccctatcagaagcactccccggggacaacgtgggattcaacgtcaaaaacgtatcagtcaaagacatacgccgcggcaacgtctgcggcgacagcaagagcgacccaccccaagaagccgcacaattcacgagccaagtaatcatactaaaccacccaggccagatatcagcgggatacagccccgtaatcgactgccacacagcccacatagcctgcaaattcgccgaactaaaagagaaaatagaccgaagatcaggcaagaagctcgaagacaacccaaagagcctcaaaagcggagacgcagcgatcgtggaaatggtccccggcaagccaatgtgcgtagaatcattctcacaatacccgcccctaggccgattcgccgtccgcgacatgaggcaaaccgtcgcagtcggagtcatcaaaaacgtcgagaagaaaagcggaggcgcaggaaaagtaacaaaaagcgcccaaaaagcacaaaaagcaggaaagtga

SEQ ID NO: 4172 - RNA, 2919 nt, synthetic construct
  misc_feature 1..2919: note = EAW51573 variant
  source 1..2919: mol_type = other RNA
atggacacagacctatatgacgagttcggtaactacataggccccgaactagactcggacgaggacgacgacgaacttgggcgagaaacaaaagacctagatgaaatggacgacgatgacgacgacgacgacgtaggcgatcacgacgacgaccatcccggaatggaagtcgtcctccacgaagataagaaatattaccccaccgccgaggaagtctacggaccagaagtcgaaacaatcgtccaagaagaagacacacaacccctcaccgaacccatcatcaaacccgttaaaacaaagaaatttaccttaatggaacaaactttacctgtcacggtatatgaaatggacttcctggccgacctaatggacaacagcgagttaatccgtaacgtcaccctctgcggacacctccaccacgggaaaacatgctttgttgactgcctcatcgaacaaactcacccagaaatacgcaaaaggtacgatcaagacctctgttacacagacatccttttcactgagcaagaacgaggcgttggtataaaatccacccccgtcaccgtcgtcctacccgacaccaaagggaaatcgtacctattcaatataatggacacacccgggcacgtcaacttttccgacgaggtcaccgccggcctgcgaatctccgacggcgtcgttctgttcatcgacgcagccgaaggggtaatgctcaacacagagcgcctaataaaacacgcagtacaagagagactagcagtcaccgtatgcataaacaagatcgaccgactaatactcgaactaaagctcccgccaactgacgcatattacaaactccgccatatcgtcgacgaagttaacggacttatatcaatgtattcaaccgacgaaaatctcattctttccccactacttggcaacgtctgtttctccagctcccaatactcaatatgcttcaccctaggtagcttcgccaaaatctacgccgacaccttcggagacattaactaccaagagttcgccaaacggctctggggagacatctattttaaccccaaaacacgaaaattcaccaagaaagcgccaacctcatcaagtcaacgatcgttcgtcgagttcatcctcgaacccttatacaaaatcctagcccaagtggtcggcgatgtcgacacctccctaccaagaaccctggacgaactgggcatccacctcacgaaagaagaactcaaactaaacatacgacccctcctccgattagtatgcaagaaattctttggcgagtttacaggattcgtcgacatgtgcgtacaacacataccctcccccaaagtcggagccaaacccaaaatcgaacacacctacacgggaggagtcgactccgacctcggagaagctatgagcgactgtgacccagatggcccactaatgtgccacacaaccaaaatgtactcaacagacgacggcgttcaattccacgccttcggccgggtactctccggcaccatccacgcaggccagccagtgaaagtgctcggagaaaattacaccttggaagacgaagaagactcacaaatctgcacagtaggccgactctggatatcagtcgcccgctaccacatcgaagtaaatcgggtccccgccggaaattgggtactaatcgaaggcgtcgaccaaccaatagtcaagacggccactataaccgaaccacgcggtaacgaagaagcgcaaatattccggccattaaaatttaacaccacatccgtaatcaaaatcgcagtagaaccagttaacccctccgaactacccaaaatgctagacggcctccgcaaagtaaacaaatcataccccagcctcactacaaaagtagaggaatcgggcgaacacgtcatactaggaaccggagaactctatctagactgcgtcatgcacgatcttcggaaaatgtactccgagatcgacataaaagtcgcagaccccgtcgttacattctgcgaaacagtcgtcgaaacctcctcactcaaatgctttgccgaaacacctaacaagaaaaacaaaatcactatgatcgcggagccactagaaaaaggtctagcggaggacatcgaaaacgaagtcgtgcaaatcacctggaaccgaaagaaacttggcgagttcttccaaactaaatacgactgggaccttctagcggcccgctctatctgggcattcggacccgacgcaaccggcccaaacatcctagtagacgacaccctcccatccgaagtcgacaaagcactactaggctcggtaaaagactcaatagtgcaaggattccaatggggtacccgtgaaggacctctatgcgacgagctcatccgcaacgtaaaattcaaaatcctcgacgcagtcgtcgctcaagaacccctacaccgaggaggtggccagataatacccacggccagacgtgtggtctactcagctttcctaatggcgacccctcgcctcatggaaccctattacttcgtcgaagtacaggcccccgccgactgcgtgagcgccgtctacactgtactcgcccgtcgaagaggacacgtgacccaagacgcgcccatccccggctccccgctatacacaataaaagcattcatcccggcaatcgactccttcggcttcgaaacagacctcagaacccacacacagggccaggcattctctctctccgtcttccaccactggcaaatcgttccgggggaccccctggacaaatcaatagtcataaggcccctcgagccccaacccgcgccccatctagcccgcgagttcatgatcaaaacacgcaggagaaaaggactctctgaagatgtctcaataagcaaattcttcgatgacccaatgctactcgagctcgccaaacaagacgttgtgctcaactacccaatgtaa

SEQ ID NO: 4173 - RNA, 1971 nt, synthetic construct
  misc_feature 1..1971: note = EAW50963 variant
  source 1..1971: mol_type = other RNA
atgcgcccatcaggaaccgcaggcgcagcgctcctggcactactcgccgccctttgtcccgcctcccgcgcactcgaagaaaagaaagtctgccaaggaacgagcaataaactaacccaactagggacattcgaagaccacttcctatctctccaacgaatgttcaacaattgcgaagtcgtcctcggtaacctagagatcacatacgtacaaagaaactacgacctatcattcctcaaaaccatacaagaggtcgcaggctacgtactcattgcgctgaacacagtcgagcgaatccccctcgaaaacctacaaataatccggggcaacatgtactacgaaaacagttacgccctagccgtgctaagcaactacgacgccaacaaaaccggcctcaaagaactaccaatgagaaacctccaagaaatcctacacggcgccgtgcgcttttcaaacaaccctgccctctgcaacgtagagagcattcaatggcgcgacatagtctcatcagacttcctaagcaacatgtccatggacttccaaaaccacctcggatcatgccaaaaatgtgacccctcctgccccaacggctcatgctggggagcaggcgaagaaaactgccaaaaactaacaaaaatcatatgcgcgcaacaatgctcaggccgctgccgcggcaaaagcccgagcgattgctgccacaatcaatgcgccgccggctgcacaggcccccgggaatccgactgtcttgtctgccgaaaattccgcgacgaagcaacctgcaaagacacatgcccacccctcatgctctacaaccccacaacttaccaaatggacgtcaaccctgagggcaagtactcattcggcgccacatgcgtgaaaaagtgcccccgcaactacgtagtcaccgaccatggctcatgcgtcagagcctgcggagcagactcatatgaaatggaagaagacggagtacgaaagtgcaagaaatgcgaagggccatgccgaaaagtgtgcaacgggataggaataggcgagttcaaagacagcttatcaatcaacgcaaccaacatcaagcacttcaaaaactgcacatcaatctcgggcgaccttcacatactccccgtagccttccgcggagacagcttcacccacactcccccacttgacccacaagaactcgacatacttaaaaccgtcaaagaaataactggatttctactcatacaagcctggccagaaaacagaactgacctccacgccttcgaaaacctagaaataatacgaggccgaacgaaacaacacggccaattctcacttgccgtcgtctcacttaatatcacctcactaggcctgcgttcactcaaagaaatctccgacggcgacgtcatcatctcaggcaacaaaaacctctgctacgccaacacaataaactggaagaaactattcggaaccagcggccagaaaaccaaaatcatctcgaaccgaggagaaaactcctgcaaagccacaggccaagtctgccacgcactctgctcacccgaaggctgctggggccccgaaccgcgcgactgcgtctcctgccgcaatgtctcccgcggccgagaatgcgtcgataaatgcaacctcctagaaggcgaaccgcgcgagttcgtggaaaactccgaatgcatacaatgccaccccgaatgcctaccccaagccatgaacataacctgcacgggccgaggacccgacaactgcatccaatgtgcacattacatcgacgggccacactgcgttaaaacctgccccgcgggcgtcatgggcgaaaacaacaccctggtctggaaatacgccgacgccggccacgtctgccacctctgtcaccccaactgcacctatggctgcacaggcccaggtctcgaaggctgcccaaccaacggatcatacatagtaagccacttcccgcgatccttctacaaaatgtctgtccac

SEQ ID NO: 4174 - RNA, 3411 nt, synthetic construct
  misc_feature 1..3411: note = ADL28125 variant
  source 1..3411: mol_type = other RNA
atgagacccagcggcacagctggcgcagcactactggccctcctggcagctctctgccccgcatcccgtgccctggaagaaaagaaagtctgccaagggaccagcaacaaactaacccaactgggcacattcgaggaccacttcctctcactccagcgcatgttcaacaactgcgaagtcgtgctaggcaacctagaaatcacctacgtacagcgaaattacgacctttccttcctgaaaaccatacaagaagtcgctgggtacgtgctcatcgcactaaataccgtcgagagaatacctctagaaaacttacaaatcatacggggaaacatgtattacgaaaactcctatgcgctagctgtccttagtaattacgacgcaaacaaaacgggcctcaaagaactccccatgcgaaatctacaagaaattcttcacggagcggtacgctttagcaataacccagcactatgcaacgtcgaaagtatccaatggcgcgatatcgtatcttccgacttcctgagcaacatgagcatggacttccaaaaccacctgggcagctgccaaaaatgcgaccccagctgtccaaacggcagctgctggggcgcgggcgaagagaactgccaaaaactcacaaaaataatctgcgctcaacaatgtagcgggcgctgccgcggaaaatccccctcagactgctgccacaaccagtgcgccgccggctgtacaggaccacgcgaatcagactgcctggtgtgccgcaaattccgagacgaagcaacctgcaaagacacatgcccaccattaatgctctacaaccccacaacataccaaatggacgtcaacccagaaggcaaatactcgttcggagccacatgcgtcaagaaatgtccaaggaactacgtcgtaaccgatcacggctcctgcgtacgcgcatgcggcgccgattcttacgaaatggaagaggatggagtacgcaaatgcaagaaatgcgaaggtccctgccgtaaagtatgcaatggcatcggcatcggagagtttaaagactcactgtccatcaacgctacaaacataaaacacttcaaaaactgcaccagtatctccggggaccttcacatcctcccagtcgctttccgaggcgacagcttcacacacaccccaccccttgacccccaagaacttgacattctcaagacagtaaaagaaatcacaggtttcctacttatccaagcatggcccgaaaacagaaccgacctccacgcattcgaaaatctcgaaatcatacgcgggcgcaccaagcaacatgggcagttctcgctggcagtggtgagcctaaacatcacatcgctcggcctccggtccctaaaggagatctccgacggcgacgtcatcatcagtggcaataagaacctctgctatgcaaacacaatcaactggaagaaattattcggcacctcgggccagaaaacaaaaatcatctccaaccgtggcgaaaactcctgcaaagccaccggccaggtatgccatgccctatgcagccccgaaggctgctgggggcccgagccccgcgactgcgtttcctgccgaaacgtatcgaggggtcgcgaatgcgtcgacaaatgcaatctcctagaaggagagccccgcgagttcgtcgaaaactccgaatgcatacagtgccaccccgaatgccttccccaggctatgaacataacatgcactggaagaggccccgataattgtatacaatgcgcccattacatcgatggtccacactgcgtcaaaacatgtcccgccggcgtgatgggcgaaaacaacaccctagtatggaaatatgccgacgctggtcacgtctgccacctctgccacccaaactgcacctacgggtgcacaggacctggcctcgaaggctgtccgactaacggaccgaaaattccctccatcgccacaggaatggtgggcgccctactcctattactcgtcgtagcactaggcataggcctattcatgcgccgccgccacatcgtacgcaaacgaaccctacgacgcctgttgcaagaacgcgaattggtcgaaccactaaccccctcaggcgaagccccgaaccaggcactccttagaatcctgaaggaaacagagtttaaaaagattaaagtcctaggctccggagcgttcgggacggtttacaaaggactatggatccccgagggcgaaaaggtcaaaatccccgtcgcaatcaaagagctacgcgaagctacttcaccgaaagccaacaaagaaatcctcgacgaggcctacgtgatggcgtccgtcgacaacccccacgtctgcagactcctcgggatatgccttacatccacggtccaactcattacacagctcatgcccttcggatgcctcctagactacgtacgagaacacaaagacaatataggatcacagtatctactcaactggtgcgtccaaatcgcaaaaggaatgaactacctcgaggaccgacggctagtacaccgagatctcgccgcaagaaacgtcctagtaaaaaccccacaacacgtgaaaatcacagacttcggcctagcgaaacttctaggagcagaggagaaggaataccacgccgagggaggcaaagtgccaataaaatggatggccctggagtcaatactacaccgaatctacacccaccagtcagacgtctggagctacggagtcacagtctgggaattgatgaccttcggctccaaaccctacgacggaataccggccagcgaaatcagcagcatcttagaaaagggagaaagactcccacaaccgcccatatgcaccatcgatgtatacatgataatggttaaatgctggatgatagacgcagactcccgtcccaaattccgcgaactcatcatcgagttctccaaaatggcacgcgacccccaacgatacctggtaatccaaggggacgaacgaatgcacctacccagtccaaccgacagcaacttttaccgagcactaatggacgaagaagacatggacgatgtagtcgacgctgacgaatacctaatcccgcaacaagggttcttctcttctcccagcacatcgcgaacacccctactgtcaagcctttcagccacatcaaacaactccaccgtcgcctgcatcgatcgcaatggtcttcagtcctgcccaatcaaagaagactccttcctccagcgctactccagcgaccccaccggagcgctaacagaagactctattgacgatacattccttccagtcccgggggaatggctcgtgtggaaacaatcctgctcgtccaccagctccacccacagcgccgcagcatccttacagtgcccctcccaggtcctccctcccgcatcccccgaaggcgaaaccgtggcggacctgcaaacgcaataa

SEQ ID NO: 4175 - RNA, 150 nt, synthetic construct
  misc_feature 1..150: note = CCO13722 variant
  source 1..150: mol_type = other RNA
atgtgcgccacctgcgccatccaaaccgcccccaccggccccaacaaatcctccctctccgacttctccctccccctcaaactccacttcctctccaccatctccatctcccccttcgcctccaacaaagtcctcaccctcttcatctaa

SEQ ID NO: 4176 - RNA, 1218 nt, synthetic construct
  misc_feature 1..1218: note = CCDS47587.1 variant
  source 1..1218: mol_type = other RNA
atgcgcccctccggcaccgctggcgccgctctactcgccctactcgcggccctctgccccgcctccagagcactcgaagaaaaaaaagtatgccaaggaacctcaaacaagcttacccaactcggcacattcgaagaccacttcctatccctccaacgcatgttcaacaactgcgaagtagtcctaggcaacttagaaataacctacgtccaacgcaactacgacctatccttcctcaaaaccatccaagaagttgctggctacgtccttatagccctcaacaccgtcgaacgcatccccctcgagaacctacaaatcatccgcggcaacatgtattacgaaaattcctacgcactcgcggttctatccaactacgacgccaataaaaccggcctcaaagaacttcccatgcgcaacctacaagaaatcctccacggcgccgtacgcttctccaacaacccagccctatgcaacgtagaatccatccaatggcgagacatcgtctcctctgacttcctctcaaacatgtccatggacttccaaaaccacctcggctcatgccaaaaatgcgatccctcctgcccaaacggctcctgctggggcgccggcgaagaaaactgccaaaaactaaccaaaataatctgcgcccaacaatgctccggcagatgccgaggcaaaagcccatcggactgctgccacaaccaatgcgccgccggttgcaccggcccccgcgaatccgactgtcttgtatgccgcaaattccgcgacgaagccacctgcaaagatacgtgcccccccctcatgctatacaacccaacaacctaccaaatggacgtcaatccagaaggcaaatacagcttcggcgccacatgcgtaaaaaaatgcccccgcaactatgtcgtcaccgaccacggatcctgcgtccgtgcctgcggcgccgacagctacgaaatggaagaagacggagtccgcaaatgcaaaaaatgcgaaggcccctgccgcaaagtctgcaacggcatcggcataggagaattcaaagactccctctcaataaacgccacaaacatcaaacacttcaaaaactgcacctccatctccggcgacctacacatcctgcccgtcgcattccgaggcgactccttcacccacaccccccccctcgacccacaagagcttgacatactcaaaaccgtcaaagaaatcacaggcctctcataa

SEQ ID NO: 4177 - RNA, 3633 nt, synthetic construct
  misc_feature 1..3633: note = AAG35789 variant
  source 1..3633: mol_type = other RNA
atgcgtccctccggcaccgccggcgcagccctcctcgcacttctagctgcactatgtcccgcttccagagcactcgaagaaaagaaagtatgccaaggaacatcaaataaactcacacaactcgggaccttcgaagatcactttctctcgctacaacgcatgttcaacaactgtgaagtggtcctgggcaatctagaaatcacctacgtacaacgcaactacgacctctcatttcttaaaaccattcaggaagtcgccgggtatgtcctaatcgccctcaacactgtcgaacgcatcccccttgaaaaccttcaaataataagaggaaacatgtactacgaaaacagttacgccctagcagtcctaagcaactacgatgcaaacaaaactgggcttaaagaactacccatgagaaacctgcaagaaatactacacggagcagtgcgcttctccaacaacccagccctctgcaacgtggagtccatacaatggcgagacatcgtgtccagcgacttcctaagcaacatgtctatggacttccaaaaccacctcgggagctgccagaaatgcgatcctagctgtcccaacggaagctgctggggagcaggagaggaaaattgccaaaaactaacaaagataatctgtgctcaacagtgtagcggtcgatgccgcggaaaatccccatcagactgctgtcacaaccagtgcgccgcaggctgcacgggcccccgggaatcagactgcctcgtctgcagaaaattccgcgacgaagctacatgcaaggacacctgtccacccctcatgctctataatcccacgacatatcaaatggacgtaaaccccgagggtaagtactccttcggagcaacctgcgtaaagaaatgcccccggaactacgtcgtaacagaccatggcagctgcgtccgagcttgcggggccgactcatacgaaatggaagaagatggcgttcgaaaatgcaagaaatgcgagggaccatgccgcaaagtatgcaacggcatcggcataggagaatttaaagactcactcagcatcaacgcgacaaacatcaaacacttcaaaaattgcacctccattagtggcgatctacacatattacctgttgcgtttcgcggcgactctttcactcacactcccccgcttgacccacaagaactggatatcctcaaaaccgtcaaggaaataaccggctttctcttaatccaagcatggcccgaaaaccgaactgacttacatgcattcgagaatttggaaatcattcgaggccggacgaagcagcacggccagttctcactcgccgtagtgtcactcaacattacctcgctcggcctccgctcacttaaggaaatcagcgacggggacgttatcatctcaggaaacaagaacctgtgctacgcgaatacaataaactggaagaaactattcggaacatcaggccagaaaacaaaaatcatcagcaaccgaggtgagaactcatgcaaagcaacggggcaagtctgccatgcgctctgctccccagaagggtgctggggccccgaacctcgcgattgcgtctcctgccgcaatgtatcccgcggccgagaatgcgttgacaaatgtaacctactagaaggcgaaccccgcgagttcgtagaaaacagcgaatgcatccaatgccacccggaatgccttccccaggcaatgaacattacatgtacaggacgcggacccgacaactgtatccagtgcgcacactacatagatggaccccactgtgtaaaaacctgcccagccggcgtcatgggagaaaacaacaccctagtatggaaatacgcagacgcgggccacgtatgccatctctgccaccctaactgtacctacggctgcacaggcccaggcctcgaaggctgtccaactaacggacctaaaatacccagcatagccaccggcatggtcggcgcactactactacttctagtcgtagccctcggaatcggccttttcatgcgccgcagacatatcgtgcgcaaacgaaccctaaggcgtctcctacaagaaagggagcttgtcgagccactcacacctagcggcgaagctcccaatcaagcactactacgcatcctcaaagaaacagagttcaagaaaataaaagtactaggctcgggggcattcggaacagtatacaaaggactctggatcccagaaggagaaaaagtaaaaatacccgtcgcaattaaagaactccgagaagcaacctcacccaaagcaaataaggaaatactagacgaagcatacgttatggcctccgtcgacaacccccacgtctgccgcctcctcgggatctgccttacgtcgaccgtccaactcatcacccagctaatgccgttcggatgtctactagactacgtacgagaacacaaggacaacataggaagccagtatctcctaaactggtgcgtccaaatagcaaaaggcatgaactaccttgaagacaggcgtctcgtccaccgagacctagccgcccgcaacgtcttagtgaaaactccacaacatgtaaagatcacggactttggactagccaaacttctcggcgcagaagaaaaagagtaccacgcagagggaggaaaagtccccatcaaatggatggccctcgaatccatactccaccgcatctacacccaccaatcagacgtctggagctacggagtgaccgtttgggaactcatgacctttggcagtaaaccgtatgacggcataccagcgagcgaaatatcctcgatattagagaaaggcgaaaggctcccccaaccgcccatctgcacaatcgacgtctacatgatcatggtcaaatgctggatgatagacgcagacagcagacccaagttccgggaactaatcatcgagttctccaaaatggcccgggaccctcaacggtacctcgtaatacagggcgatgaacgcatgcacctaccctccccaaccgatagtaatttttatcgagcactcatggatgaagaagacatggacgacgtcgtcgacgccgatgaatacctcatccctcaacaaggcttctttagcagcccctctacatcacgaacaccactgttaagctccctttcagcaacaagcaacaactcgaccgtcgcatgcatcgaccgcaacggcctgcaatcatgcccaatcaaagaagactccttcctgcaacgctactcctcagaccctacaggcgcactaacagaagattccatcgacgacacattcctaccagtaccagaatacatcaaccaaagcgtaccaaaaaggccagcaggatccgtccagaatcccgtataccataaccaacccctcaaccctgcaccgagccgagacccccactaccaagacccccatagtaccgccgtcggcaacccagaatacctaaacaccgtccaacctacatgcgttaacagcacattcgacagcccggcacactgggcacaaaaaggatcgcaccaaatctcgttagacaacccagactaccaacaagacttcttccccaaagaagccaaacctaacggaattttcaaaggatccaccgccgaaaacgcagaatacctacgcgtcgcaccacaatcaagcgaatttattggggcttga

SEQ ID NO: 4178 - RNA, 1395 nt, synthetic construct
  misc_feature 1..1395: note = AAI18666 variant
  source 1..1395: mol_type = other RNA
atggcagccgaagacgtaatcatctgcgcacaacaatgctcgggccgatgccggggcaaatccccatcagactgctgccacaatcaatgcgctgccggctgcacaggcccacgcgaatcagactgcctagtctgccgaaaattcagagacgaagcaacctgtaaagacacatgcccgccccttatgctctataaccccaccacctaccaaatggacgtaaaccctgagggcaaatactctttcggagcaacctgcgtcaagaaatgcccacgaaactacgtcgtcaccgaccacggatcgtgcgtccgcgcctgcggcgcagactcatacgaaatggaagaagacggagtccgaaaatgcaagaaatgtgaaggaccatgccgcaaagtctgcaacggcatcggcataggcgaatttaaagactcactctcaatcaacgccacaaacataaaacacttcaaaaactgcaccagcatttccggcgacctacacatactcccagtcgccttccgcggcgacagcttcacccacaccccacccctagacccccaagaactcgacatcctcaaaaccgtaaaagaaatcaccggcttcctcctaatccaagcctggccagaaaaccggaccgacctccacgccttcgaaaacctcgaaataatccgcggccgcaccaaacaacacggacaattctcccttgccgtagtctccctcaatattaccagccttggcctccgctcgctcaaagaaatttccgatggagatgtcatcatatccggaaacaagaacctatgctacgccaacaccatcaactggaagaaactcttcggcacctccggacaaaagaccaaaatcatcagcaaccgcggggaaaacagctgtaaagccaccggccaagtctgccacgccctatgctcccccgaaggatgctggggccccgaaccgcgcgactgcgtatcctgccgcaacgtctcccgaggccgagaatgcgtcgacaaatgcaacctactcgaaggagaaccccgcgagttcgtcgaaaactcagaatgcatccaatgccatcccgaatgcctaccccaagccatgaatataacctgcacaggccgaggccccgacaactgcatccaatgcgcccactacatcgacggcccccactgcgtcaaaacctgccccgccggcgtcatgggtgaaaataatacactcgtctggaaatacgccgacgccggccacgtatgccatctttgccacccaaactgcacctacggctgtaccggccctggactcgaaggctgccccaccaacggaccaaaaatcccgtccattgcaaccggaatggtaggcgccctactcctactactcgtagtagccctaggtatcggacctctccacggtcgatga

SEQ ID NO: 4179 - RNA, 3276 nt, synthetic construct
  misc_feature 1..3276: note = AAH94761 variant
  source 1..3276: mol_type = other RNA
atgcgaccctcgggcaccgcaggagcggccttactcgcactactggcagcactctgccccgccagccgagccttagaagagaagaaagtatgccaaggcacatccaacaaactaacccaactaggcaccttcgaagaccactttctgtccctacaaaggatgttcaacaactgtgaagtggtcctaggcaacctcgaaataacatacgtccaacgcaactacgacctctccttccttaaaaccatccaagaagtcgccggctacgtactcatcgcactaaacacggtcgaaaggatcccgctggaaaatctacagatcatccgcggtaacatgtactacgaaaattcatacgccctagccgtactatcgaactacgacgcaaacaaaaccggtcttaaagaactaccaatgcgaaacttgcagggccaaaaatgtgaccctagctgccctaacggcagctgctggggcgccggtgaagagaactgccagaaactaactaaaatcatctgcgcccagcaatgttccggccgatgccgaggaaagtcacccagcgattgctgccacaaccagtgcgccgctggatgcaccggtccaagggaatccgactgcctcgtgtgcagaaagttccgcgacgaggcaacatgtaaagacacctgtcccccgctaatgctctataacccaaccacgtaccaaatggacgtaaacccagaggggaagtacagcttcggagctacgtgcgtcaagaaatgcccgcggaactacgtcgtaaccgaccatggctcgtgcgtacgcgcatgcggcgcggacagctacgaaatggaagaagacggcgttcgaaaatgcaagaaatgcgagggcccgtgccggaaagtatgcaacggcattggcataggcgaatttaaagactcactgtcgataaacgccactaacatcaaacacttcaaaaattgcacttccatatccggcgacctccatattctccccgtggctttccgcggcgacagcttcacgcatacaccacccctcgatccccaagaactcgacattctaaaaaccgtaaaagaaatcactggctttctcctaatccaggcttggcccgaaaaccgaacagacctacacgcttttgagaacctagaaataatacgtggccgcactaaacaacatggccaattctcactagccgtggtctcgttgaacattaccagcctcggcctcaggtccctaaaagaaatctccgacggcgatgttataatatccggcaacaagaacctctgctacgccaataccatcaattggaagaaattatttggcaccagtggccagaaaaccaagataatctccaaccgaggagaaaactcatgcaaagccaccggtcaagtatgccacgcactctgcagcccagaaggctgctggggacccgagccccgagattgcgtttcctgccgcaacgtcagccgcggccgagaatgcgtcgacaaatgcaacctcctcgagggcgaaccgcgcgagttcgtagaaaacagcgagtgcatacaatgtcaccccgaatgccttccccaagcaatgaacatcacttgtaccggcaggggacccgacaactgcatacaatgcgcccactacatagacggacctcactgcgtaaaaacctgcccagccggagtcatgggcgaaaacaacaccctggtatggaaatatgccgatgccggccacgtgtgccacctctgccaccccaactgtacttacggatgtacaggccccggtctagaggggtgtcctaccaacggccccaagatcccaagcatagcaaccggaatggtcggggccctgctactcctcctagtagtcgccctaggcataggcctattcatgcgccgaagacacatcgtccgcaaacgtacgctccgccgtttactgcaagaacgagaactcgtcgagcccctgaccccctccggagaagcaccgaaccaagcactactgcgtatccttaaggaaaccgaatttaaaaagatcaaagtcttaggctcaggggcattcggaacagtatacaaaggattatggatcccagagggagaaaaagtcaaaatacccgtcgccatcaaagaactacgggaagcaaccagccccaaagccaacaaagagatactagacgaagcatacgtaatggcctccgttgacaacccgcacgtttgccgcctactaggaatatgcctaacgtcaacagttcaactcataacacagctgatgcctttcggatgcctcctcgactacgtacgtgaacacaaggacaacatcggatcacaatacctactcaactggtgtgtccaaatcgcgaaaggaatgaactatcttgaagaccgacgactcgtccacagagacttagccgcacgcaacgtcctagtaaaaacgccccaacacgtaaaaataaccgatttcggccttgcaaagctcctaggcgccgaagaaaaggaataccacgcagaaggcggaaaagtgcccatcaaatggatggcactagaatccatcctacaccgcatctacacccaccaaagtgacgtctggtcctacggagtcacggtctgggaacttatgaccttcggatctaagccatacgacgggataccagcctcagaaataagctcaatactggaaaaaggcgaaagactcccccaacctcccatatgcacaatcgacgtctacatgatcatggttaaatgctggatgatcgacgccgactccaggcccaaatttcgcgaactaattatagagttcagtaaaatggcacgagacccacagcgctacctagtcatccaaggcgacgaaaggatgcacctaccgtcaccaactgactcaaacttctaccgcgccctcatggacgaagaagacatggacgacgtcgttgacgcggatgaatacctcattccccaacaaggtttcttctcatctccctccacatcacgcactcccctcctctccagcctaagcgccacctctaacaactccacagtagcatgcatcgaccgaaatggactacaaagctgccccatcaaagaagactccttcctacaacgatactcatccgatcccaccggagctctaacggaggacagcatagacgacacatttttaccagtacccggagaatggctcgtctggaaacaaagctgctcctccacatcatccacgcactccgccgccgcttcactacaatgccccagccaagtccttcccccggcatcgccagaaggggaaaccgtcgccgacctgcaaacccaatga

SEQ ID NO: 4180 - RNA, 216 nt, synthetic construct
  misc_feature 1..216: note = CAA34902 variant
  source 1..216: mol_type = other RNA
atgcgcccgagcgggaccgcgggcgcggccttgctcgcgctcttggccgcgctctgtcccgcgagcagggccttggaagagaaaaagggcaagggcgtgagcaggcgcttgcccaggcgcccgcgcatagccccgcgcacgccccagcccgcgcaaccgcgcacgggcgcgcccgcgcgcgcgcgcgcgcccgcgcgcccgttcttgttcccgtga

SEQ ID NO: 4181 - RNA, 720 nt, synthetic construct
  misc_feature 1..720: note = AAH10992 variant
  source 1..720: mol_type = other RNA
atgccactaggccacatcatgcgcctagacctagaaaaaatcgcgctcgaatacatagtaccatgcctacacgaagtcggcttctgctacctggacaacttcctaggagaagtcgtcggtgactgcgtactagaacgcgtaaaacaactccactgcaccggcgcactccgagacggacaactagccggacccagagccggagtctccaaacgccacctacgcggagaccaaatcacatggataggcggcaacgaagaagggtgcgaagccatcagcttcctcctaagcctaatcgaccgcctggtcctgtactgcggctcccgcctaggcaaatactacgtcaaagaacgaagcaaagccatggtcgcatgctaccccggaaacggaaccggatacgtacgccacgtcgacaaccccaacggagacggacgctgcatcacatgcatatactacctcaacaaaaactgggacgccaaactccacggcggaatcctacgcatcttcccagaaggcaaatcattcatcgccgacgtcgaacccatattcgacagactcctattcttctggagcgaccgcagaaacccccacgaggtccaaccctcatacgcaaccagatacgcaatgacagtctggtacttcgacgcagaagaacgcgcagaagcgaaaaaaaaattccgcaacctcacccgcaaaaccgaatccgcactaacagaagactaa

SEQ ID NO: 4182 - RNA, 1566 nt, synthetic construct
  misc_feature 1..1566: note = BAH13456 variant
  source 1..1566: mol_type = other RNA
atggccaccagtctccacgaaggacccacaaaccaactggacctgctcatccgtgctgtcgaagcctccgtccacagctccaacgcacactgcaccgataaaacaatcgaagccgccgaagcactcctacacatggaatctccaacctgcctgagagactccagatccccagaatttatacacgcagccatgcgacccgacgtcataaccgaaaccgttgtcgaagtatcaacagaggaatccgaacccatggataccagcccaatacctacctcaccagactcccacgaaccaatgaagaaaaagaaagtcggccgcaaacccaaaacccaacaatcacccatctctaacggctcgcccgaactaggaataaagaagaaaccacgcgaaggcaaaggaaacacaacatacctctgggagttcctccttgacctcctccaagacaaaaacacatgcccacgttacataaaatggacccaacgagaaaaaggcatcttcaaactcgtcgattccaaagccgtctccaaactatggggaaaacacaaaaacaaacccgacatgaactacgaaaccatgggacgcgccctccgatactactaccaaagagggatactagcaaaagtcgaaggccaacggctcgtctaccaattcaaagacatgcccaaaaacatcgtcgtcatcgacgacgacaaatccgaaacctgcaacgaagacctggccggcaccaccgacgaaaaatccctcgaacgcgtaagcctttccgcagaatcgctactaaaagcggccagctccgtccgatccggtaaaaactccagtcccatcaactgctcccgcgcagaaaaaggagttgcccgcgtcgtcaacatcacatcccccggacacgacgcctcatcacgcagccccaccactacagcctccgtctccgcgacagcagcccccagaacagtccgagtcgctatgcaagtccccgtcgtcatgacttccctcggacagaaaatatccacagtcgccgtacaatcagtcaacgctggcgccccactcataacaagcacatccccgaccacagccacctccccaaaagtcgtcattcaaaccatccccacagtaatgcccgcctcaactgaaaacggtgacaaaatcacaatgcagcccgcaaaaataatcaccatcccggccactcaactcgcccagtgccaactccaaaccaaatccaacctcacaggatccggctctattaacatcgtcggcacacccctagccgtccgcgccctgaccccagtaagtatcgcccacggcacaccagtaatgcgcctctctatgccaacccaacaagcctccggccaaaccccaccccgagtcatctccgcagtaatcaaaggccccgaagtcaaatccgaagctgtcgccaaaaagcaagaacacgacgtaaaaaccctccaacttgtcgaagaaaagcccgccgacggcaacaaaaccgtcactcacgtcgtcgtcgtctccgccccctcagccatcgcccttccagtcaccatgaaaaccgaaggcctggtaacctgcgaaaagtaa

SEQ ID NO: 4183 - RNA, 810 nt, synthetic construct
  misc_feature 1..810: note = BAC67168 variant
  source 1..810: mol_type = other RNA
atggccgccgccctcttcgtcctcctcggattcgcccttctaggcacccacggcgcatcaggagcggccggcaccgtcttcaccaccgtagaagacctaggctccaaaatcctactcacctgctccctcaacgactcagccacagaagtaaccggacacagatggctcaaaggaggcgtagtcctcaaagaagacgccctccccggacaaaaaaccgaattcaaagtcgactccgacgaccaatggggcgaatactcatgcgttttcctaccagaacccatgggcaccgccaacatccaactccacggcccccccagagtcaaagcagtcaaatccagcgaacacataaacgaaggcgaaaccgccatgctggtatgcaaatcagaatcagtcccacccgtaaccgactgggcatggtacaaaatcaccgacagcgaagacaaagccctcatgaacggctccgaatcgcgattcttcgtctcatcaagccaaggacgcagcgaactccacatcgaaaacctcaacatggaagcagaccccggccaataccgctgcaacggcacctcctcaaaaggcagcgaccaagcaatcatcaccctccgcgtccgctcacacctcgccgccctctggcccttcctaggcatcgtagccgaagtcctcgtcctagtcaccataatattcatctacgaaaaacgacgcaaacccgaagacgtcctagacgacgacgacgccggctctgccccactcaaaagctccggccaacaccaaaacgacaaaggcaaaaacgtccgacaacgcaactccagctag

SEQ ID NO: 4184 - RNA, 945 nt, synthetic construct
  misc_feature 1..945: note = AAA35723 variant
  source 1..945: mol_type = other RNA
atggccccaccccaagtcctcgccttcggactactcctggcagccgccaccgccaccttcgccgccgcccaagaagaatgcgtatgcgagaactacaaactcgcagtcaactgcttcgtcaacaacaaccgccaatgccaatgcacctccgtcggagcgcaaaacaccgtcatctgcagcaaactcgcagccaaatgcctagtcatgaaagcagaaatgaacggcagcaaactcggccgccgcgccaaacccgaaggcgcactacaaaacaacgacggcctctacgaccccgactgcgacgaatcaggcctcttcaaagccaaacaatgcaacggcacctccatgtgctggtgcgtcaacacagccggcgtcaggcgaaccgacaaggacacagaaataacatgcagcgaacgcgtacgcacatactggatcatcatcgaactaaaacacaaggcccgcgaaaaaccctacgactccaaatccctacgcaccgccctccaaaaagaaatcacaaccaggtaccaactcgaccccaaattcataaccagcatactatatgaaaacaacgtaatcacaatcgacctcgtacaaaactcctcccagaaaactcaaaacgacgtcgacatcgcagacgtagcctactacttcgaaaaagacgtaaaaggagaatccctctttcacagcaagaaaatggacctaaccgtcaacggcgaacaactcgacctcgaccccggacaaaccctaatctactacgtcgacgaaaaagccccggagttcagcatgcaaggcctcaaagccggagtcatcgcggtaatagtcgtagtcgtcatcgccgtagtcgccggaatcgtcgtacttgtcatctcacgtaagaaacgaatggccaaatacgaaaaagccgaaatcaaggaaatgggcgaaatgcaccgcgaactcaacgcctaa

SEQ ID NO: 4185 - RNA, 2931 nt, synthetic construct
  misc_feature 1..2931: note = CCDS169.1 variant
  source 1..2931: mol_type = other RNA
atggaacttcaagcggcccgagcctgtttcgccctcctatggggctgcgccctcgcggctgcggccgccgcccaaggaaaagaggtagttctactagacttcgcggcagcgggcggggaactgggatggctcactcacccgtacgggaaaggctgggatctcatgcaaaacatcatgaacgatatgcccatctacatgtactccgtatgcaacgtcatgagcggagaccaggataactggctacgcacgaactgggtctaccgcggggaagccgaacgcatcttcatagaactcaagttcacagtacgcgactgcaactccttcccaggaggggcctccagctgcaaagaaaccttcaacctgtactacgccgagagcgacctggactacgggacaaacttccagaaaagactattcacgaaaatagatacaatagctccagacgaaatcaccgtctcgagcgacttcgaggcacgccacgtgaaattaaacgtagaggagcgctctgtaggcccactaacccgaaaggggttctacctagcgttccaggacataggcgcgtgcgttgcattgctatcggtcagggtatactacaagaaatgcccagagctgctccaaggactcgcgcacttccccgaaaccatcgccggctccgacgcccccagtcttgccacagtcgcggggacctgcgtggaccacgccgtggtacctccaggcggcgaggaaccccgcatgcactgcgcagtagacggtgaatggctcgttcccataggacagtgcttatgccaagcaggatacgaaaaagtggaagacgcttgccaagcgtgctcccccgggttcttcaaattcgaagcgagcgaaagcccctgtctggaatgcccggagcacactctcccctcgcccgaaggggccacatcctgtgagtgcgaagaaggattcttcagagcaccccaagacccagccagcatgccctgcaccagaccaccatcggcgccccattacctaacagctgtcggaatgggagctaaagtagaactaagatggacacccccacaagacagcggcgggcgagaagacatcgtatattcagtaacatgcgagcaatgttggccggaatccggagaatgcggaccgtgtgaagcaagcgtaagatacagcgaaccaccccacggactcacacgcacgagcgtgacagtgagcgacctcgaaccccacatgaactacaccttcacagtagaagctagaaacggggtgtcaggactcgtaactagccgtagcttcagaacggcctctgtcagcataaaccaaacagaacccccaaaagtcagactcgagggacgatcaaccaccagcctatcggtcagttggtccatcccgcccccgcaacagagccgagtttggaaatacgaagtcacttaccgcaagaaaggagactccaatagctacaacgtacgaagaacagaaggcttctcggtcaccctagacgacctggctccggacactacatacttagtgcaagtccaggcactcacccaagaaggtcaaggcgcgggtagcaaagtacacgagttccaaaccctgagcccagaaggctccggaaacctggccgtcataggaggcgtagccgtcggcgtcgtactactactcgtcctcgctggggtcggattctttatccaccgacgccgcaaaaatcaacgcgcgcgccaaagcccggaagacgtctactttagtaaatccgaacaactcaaacccctaaaaacgtacgtcgacccccacacatacgaagaccccaaccaagccgtactcaaatttaccacagaaatccatcccagctgcgtgacacggcaaaaagtaataggcgcaggagagttcggcgaagtctacaaaggcatgctaaagacatcctccggcaagaaagaagtccccgtggccataaaaacactcaaggcgggctacacagaaaaacaaagagtagacttcctgggagaagccggtatcatgggacaattctcccaccacaatatcatccgactggaaggcgtgatcagcaaatataagccaatgatgatcataaccgaatacatggaaaacggtgcactagacaaattcctccgagaaaaagacggagagttctccgtactccagctagtagggatgctcagaggtatagctgcaggcatgaagtacctagcaaatatgaactatgtacaccgcgacctagcggcaaggaacatactcgtcaactccaacctcgtctgtaaagtcagcgacttcggactctcacgagtgctcgaagacgacccggaagcaacatacacgacctcaggtggcaaaatacccataagatggacagccccagaagcaatcagctaccgaaaattcaccagcgcaagcgacgtctggagcttcggaatcgtcatgtgggaagtaatgacatacggcgaacgaccgtactgggaacttagcaaccacgaagtaatgaaagcaataaacgacggattccgcctcccgacaccgatggactgtccaagcgcaatctatcaacttatgatgcaatgctggcaacaagaacgagcacgtcgtcccaaattcgcagacatagtctcgatactcgacaaactgatacgggcccccgactcactgaaaaccttagcagactttgacccacgtgtgagcatcagattaccatcgacctccggctcggaaggggtacccttcaggaccgtaagtgaatggctggaatctataaaaatgcaacaatacacagaacacttcatggcagccggctacacggcaatagaaaaagtcgtgcaaatgaccaatgatgacattaaacgaattggcgtgcgattaccaggccaccaaaagagaattgcgtactcactattggggctgaaagaccaagtaaatacagtcggcatccctatataa

SEQ ID NO: 4186 - RNA, 2952 nt, synthetic construct
  misc_feature 1..2952: note = AAG43576 variant
  source 1..2952: mol_type = other RNA
atggactgccagctgagcatcttactgctgctctcctgctcggtgctggactccttcggcgagctgatcccccaaccgagcaacgaggtcaacctgctggactccaagaccatccagggggaactggggtggatctcatacccctcccacggatgggaggaaatcagcggcgtggatgagcactacacccccatacgcacgtaccaggtgtgcaacgtcatggaccactcccagaacaactggctgcggaccaactgggtgccccgcaacagcgcccagaaaatctacgtggagctaaaattcaccctgagagactgtaacagcatccctctcgtcttggggacctgcaaggagacattcaacctgtactacatggagagcgacgacgaccatggcgtgaagttccgcgagcaccagttcaccaagatcgacaccatcgcagcggacgagtcgttcacccagatggacctcggcgaccggatcttgaagctgaacacggagatccgcgaggtgggccccgtcaacaagaagggcttctacctcgccttccaggacgtgggtgcctgcgtggccctggtctcagtacgggtgtacttcaagaaatgccccttcaccgtcaaaaacctggcaatgtttcccgacacagtgccgatggactcccagtccctagtggaagtccgcggctcctgcgtgaacaacagcaaggaggaggaccctccccggatgtactgctccaccgagggagagtggctggtgcccatcggtaagtgcagctgcaacgctggctacgaggagcgcgggttcatgtgtcaggcctgccggcccggcttctacaaggccctggatgggaatatgaagtgcgccaagtgcccgccccacagctccacgcaggaggatggcagcatgaactgccgctgcgagaacaactacttccgggctgacaaggacccgccctccatggcctgtacccgcccgcccagcagcccccggaacgtcatctctaacataaacgagacatccgtgatattagactggtcctggcccctggacaccggcgggcgcaaagacgtaacctttaacatcatctgcaagaagtgcggctggaacatcaagcagtgcgagccctgctcccccaacgtccggttcttgccacgccaattcgggctcaccaataccaccgtgacggtgaccgacctgctggcccacaccaactacacctttgagatcgacgccgtgaacggcgtgagcgagctctccagcccgccaagacaattcgccgcggtctctatcacgaccaaccaggccgcccccagccccgtactcaccatcaagaaggaccgcacctcccggaacagcatctccctgagctggcaggagcccgagcaccccaacgggatcatcctagattacgaggtcaagtactatgagaagcaggagcaagagacgtcctacaccatcctgcgggcccgcggcaccaatgtcactatcagcagcctgaagcccgacacgatctacgtgttccagatccgggcccgcaccgcggccggctacggaaccaactcccggaagttcgagttcgagaccagcccggactccttcagcatctccggcgaaagctcccaggtggtcatgatcgccatctcggccgccgtcgccatcatcttgctgactgtggtcatctacgtactcatcggtcgcttctgtggctacaagagtaagcacggggccgacgagaagcggctccacttcggcaacggccacctgaagctccccgggctccgcacttacgttgacccccacacctacgaggaccccacccaggccgtccacgagttcgcgaaggagctggacgccaccaacatcagcatcgacaaagtggtgggcgcgggggagttcggcgaggtctgctccgggagactcaaactcccgagcaagaaggagatctccgtggccatcaagacgctgaaggtgggctacaccgagaagcaacgcagggacttcctgggcgaggcaagcataatggggcagttcgatcacccaaacatcatccgcctcgagggcgtcgtcaccaagtctaaaccggttatgatcgtcaccgagtacatggagaacgggagcctggactccttcctgcgaaagcacgatgcccagtttacggtgatccagctagtgggtatgctccgcggcatcgctagcgggatgaagtacctgagcgatatgggctacgttcatcgggacctggccgcccgcaatatcctcatcaactccaatctagtgtgcaaggttagcgacttcggactgagccgggtcctcgaggacgaccccgaggccgcctacaccaccaggggagggaagatcccgatcagatggaccagccccgaggcgatcgcataccgcaagttcacttccgccagcgacgtgtggtcctacggcatcgtgctgtgggaggtcatgagctacggcgaacggccctactgggagatgtccaaccaggatgtaattaaagccgtggacgaggggtaccgcttacccccgcccatggactgccccgccgcgctctatcaactgatgctggactgctggcagaaggaccgaaacaatcggcccaagttcgagcagatcgtcagcatcctagacaagctgatccgcaacccgggctccctgaagatcatcacctcggccgccgcccggcctagcaacctcctgctggaccagagcaacgtggacatcaccaccttccgcacgaccggggactggcttaacggcgtgtggaccgcccactgcaaggagatcttcaccggggtcgagtacagcagctgcgacactatcgcgaaaatctccaccgacgacatgaaaaaggtgggtgtgactgtcgtgggcccccaaaagaagatcatcagctccatcaaggctttagagacgcagagcaagaacgggcccgttccggtctga

SEQ ID NO: 4187 - RNA, 2952 nt, synthetic construct
  misc_feature 1..2952: note = AAH63282 variant
  source 1..2952: mol_type = other RNA
atggactgccaactcagcatactcctcctcctctcctgctccgtcctcgactccttcggcgaacttataccccagccaagcaacgaagtcaacctcctcgacagcaaaaccatacaaggagaactaggatggatcagctaccccagccacggttgggaggaaatctcaggggttgacgaacactacaccccaattagaacctatcaagtctgcaacgtaatggaccacagccagaacaattggctccgcaccaactgggttccaaggaacagcgctcagaaaatctatgtagaactgaaattcacattaagagactgcaactccatccccctcgtactaggaacgtgcaaggaaacattcaacctctactacatggaaagcgacgacgaccacggcgtgaaattccgcgagcaccaattcacgaaaatagacacaatagcagccgacgagagcttcacccaaatggacctaggcgaccgaatactgaaactaaacacagaaatccgtgaagtcgggcccgtcaacaagaagggcttctaccttgcattccaagatgtaggagcctgcgtagccctagtctccgtccgagtgtacttcaaaaagtgcccattcaccgtcaaaaacctagccatgtttcccgacaccgtccccatggactctcaatccctcgtagaagttcgcggctcctgcgttaataattccaaagaagaagacccaccacgcatgtactgctccactgaaggcgagtggctcgtacccataggtaagtgctcctgcaacgctggatacgaggaaagaggcttcatgtgccaagcctgcagaccgggcttctacaaagcactcgacggaaacatgaagtgcgccaaatgtcccccacactcatctacacaagaagacggctccatgaactgccgctgcgagaacaactacttccgcgccgacaaggatccaccctcaatggcctgcacccgacccccatcgtcccccagaaacgtcatctccaacataaacgagaccagtgtgatcctcgactggagctggccattagacacagggggcagaaaagacgtgacatttaacatcatatgcaagaaatgcgggtggaatatcaaacaatgcgaaccctgcagccccaacgtccgcttcctgcccagacaatttggtttaaccaacaccaccgtcaccgtcaccgacttactcgcacacacgaactataccttcgaaattgacgcagtcaacggtgtaagcgagctaagctccccaccccggcaattcgcagcagtctcaatcaccaccaaccaggcagcaccctcaccagtcctcacaatcaaaaaggatcgcacatcccgcaacagcatatccctctcgtggcaagagcccgaacaccccaacggtataatactagactacgaagtcaagtactacgaaaaacaagaacaagaaacttcatatacaatcctccgtgcacgtggaaccaacgtcaccatctcctccctaaaacccgacaccatctacgtcttccagatacgcgcacgcacagccgcaggatacggcacaaactccagaaaattcgagttcgaaacctcaccagactcattcagcatatccggggaatcaagccaagtcgtcatgatagccatctcagccgcagtagccatcatattactaacagtcgtcatatacgtcctaatagggcgcttctgcggttacaagtccaaacacggggcagacgaaaaacgcctgcacttcggcaacggccacctcaagctcccgggcctccgcacatatgtcgacccccacacctacgaggaccccactcaaacggtacacgaatttgctaaagaattagacgccacaaatatatcgatcgacaaagtcgtaggcgcgggcgagtttggagaagtatgcagcggccgcctaaaactaccatcaaagaaagagatcagtgtggcgataaaaacgctcaaagtaggctacaccgaaaaacagcgacgagacttcctaggagaagccagcatcatggggcaattcgaccacccgaacatcatccgattagagggcgtggtcacgaagtccaaacccgtaatgatcgtcacagaatacatggaaaacgggagcctagattccttcctccggaaacacgacgcccaattcacagtaatacaactcgtaggcatgctacgcggcatcgcctcagggatgaagtacttaagcgacatgggatacgtccacagagacctcgctgcacgaaatatattaatcaatagcaacctagtttgcaaagtctccgacttcggactcagccgagtcctagaagacgatccggaagcagcctacaccacacgcggcggcaaaataccgatacgatggaccagccccgaggcaatagcctaccgcaaattcacctcagcctccgatgtatggagctacggcatagtcctctgggaggtcatgagttacggagaacgaccatactgggaaatgtcaaaccaggacgtaatcaaggcggtagacgaaggatacagattacccccacccatggactgcccagcagcactctatcaactaatgctagactgctggcaaaaagaccgaaacaaccgtccaaaattcgaacaaatcgtcagtatactcgacaaactcatccgcaaccccggaagtctgaaaataatcaccagcgcggccgccaggccatcgaacctcctcttagaccaatcaaacgtcgatataacgacattccggaccacaggggattggctcaacggagtctggacagcacactgcaaagagatcttcaccggagtcgagtacagctcatgcgacacaatagcaaaaatatcgacagacgacatgaagaaagtcggtgtcacagtagtcggcccccaaaagaaaataatctcatccatcaaagcactcgaaacccaatccaaaaatggccctgtaccagtctaa

SEQ ID NO: 4188 - RNA, 1389 nt, synthetic construct
  misc_feature 1..1389: note = BAG54127 variant
  source 1..1389: mol_type = other RNA
atgccgatgtccaccatcctacctgtcacttccccctgcctcccagccacaggcgtcactgtatgggaactcatgaccttcggcgcagaaccatacgccggcctcagactcgcagaagtccccgaccttctagaaaaaggtgaaagactcgcccaaccacaaatctgcacaatagacgtctatatggtcatggtcaaatgctggatgatcgacgaaaacatccggccaacattcaaagaactagcaaacgaattcacccgcatggcacgagacccaccccgctacctcgtcataaaaagagaatcaggcccaggaatcgcccccggacccgaaccccacggcttaaccaacaaaaaactcgaagaagtcgaactagaaccagaactcgacctcgacctcgacctcgaggcagaagaagacaacctcgccaccaccaccctaggaagcgcactatccctcccagtaggcacacttaaccgcccgcgcggctcacagtcactcctctctcccagctccggatacatgcccatgaaccaaggtaacctcggagaaagctgccaagaatccgccgtctctggcagctctgaacgctgcccccgcccagtctccctccaccccatgccacgaggatgcctcgcttccgaatcctctgaaggccacgtaaccggatcagaagctgaactacaagaaaaagtcagcatgtgccgctcacgcagccgatcccgatccccacgcccaagaggcgactctgcctaccactcccaacgacactccctactcactccagtaacacccctctccccccccggcctagaagaagaagacgtcaacggctacgtaatgccagacacccacctaaaaggcaccccatcctcccgcgaaggaaccctctcaagcgtcggattatcatccgtcctaggcaccgaagaggaagacgaagatgaagaatacgaatacatgaaccgcagaagacgacactctcccccccaccccccccgcccctcatccctcgaagaactcggctacgaatacatggacgtcggatcagacctttccgcctccctcggctccacccaatcatgccccctccacccagtacccatcatgccaaccgccggaacaacccctgacgaagactacgagtatatgaacagacaaagagacggcggaggaccaggaggcgactatgcagccatgggcgcctgccccgcctccgaacagggttacgaagaaatgcgcgccttccaagggcccggccaccaagccccccacgtccactacgcacgactcaaaaccctccgctcactagaagcaacagattccgcattcgacaatccggactactggcactcccgactcttccccaaagcaaacgcacaacgcacctaa

SEQ ID NO: 4189 - RNA, 2766 nt, synthetic construct
  misc_feature 1..2766: note = BAG57868 variant
  source 1..2766: mol_type = other RNA
atgcgcgcaaatgacgcccttcaagtcctcggcctactatttagtctcgcaaggggctcggaagtcggcaacagccaagccgtctgcccgggcaccctcaacggactatccgtcacaggggacgccgaaaaccaataccaaactctatacaaattatacgaacgttgcgaagtcgtgatgggcaacctagaaatcgtgctaacaggccacaacgccgacctctcattcctgcagtggatccgggaagtaaccggatacgtactcgtcgccatgaacgaattttcaaccctaccactacccaaccttcgcgtcgtacgtggcacccaagtctacgacggcaaattcgccatattcgtaatgctcaactacaacacaaacagctcacacgcccttcgccaactccgactcacccaacttaccgaaatcctctccggtggcgtatacatagagaaaaatgataaactctgccacatggacaccatagactggcgcgacatagtccgcgaccgagacgccgaaatcgtcgtgaaagacaacggccgatcgtgtcccccatgccacgaagtctgcaaaggcagatgctggggaccaggctcagaagactgccaaaccctaacgaaaaccatctgcgctccccaatgcaacggacactgcttcggccccaacccgaaccaatgctgccacgacgaatgcgccggcgggtgctctggcccccaagacactgactgtttcgcgtgtcgccacttcaatgactctggcgcctgcgtcccacgatgccctcaaccgctagtatacaacaaacttacgttccaactggagcccaacccgcacaccaagtaccaatacggaggagtatgcgtagcctcctgcccgcacaacttcgtggtcgaccaaaccagttgcgtccgtgcctgcccacccgacaagatggaggtcgacaaaaacgggctcaaaatgtgcgagccctgcggcggtctctgccccaaagcctgcgaaggaacaggatccggctcccgattccaaactgtagactcatccaacatagacggcttcgttaattgcacaaagatactcggaaacctcgacttcctaatcaccggactaaacggggacccctggcacaaaatacccgcactcgaccccgaaaaactaaacgtcttccgaaccgtccgcgaaatcacaggatacctcaacatacaatcatggccaccccacatgcacaatttctccgtcttcagcaacctcaccaccatcggtggccgaagcctgtacaaccgaggattttcactcctcataatgaaaaacctcaatgtcacatcccttggtttccgttccctcaaagaaataagcgccggtcgcatctacatatctgcaaaccgccagttgtgctaccaccacagtctcaactggacaaaagtactcagaggccccaccgaggagcgactagacataaaacacaaccgcccccgccgagactgcgttgccgaaggcaaggtatgcgaccccctctgctcaagtggtggctgctggggccctggacccgggcaatgcctgtcctgtcgaaactattcccggggcggggtctgcgtaacccactgtaatttccttaacggcgaaccaagggaatttgcacacgaggctgaatgcttctcgtgccaccccgaatgccaacccatggaaggaaccgctacatgtaatggctccggctcggacacctgtgcacaatgcgcgcacttccgagacgggccccactgcgtatcctcctgtccacacggcgtacttggcgccaaaggcccaatctacaaatatcccgacgtccagaatgagtgcagaccatgccacgaaaactgcacacagggctgtaaaggccccgaactacaagactgcctaggacaaaccctcgtgttgatcggcaaaacacatctaaccatggcccttaccgtgatcgccggactcgtcgtcatcttcatgatgctaggcggcacctttttatactggagaggtcgcagaatacaaaacaaacgagcaatgcgacgatacctcgaacgaggagaatccatcgaaccactagacccctccgaaaaggccaacaaagtcctcgcccgcatattcaaagaaaccgaactccgaaaactgaaagtcctcggaagcggcgtattcggcaccgttcacaaaggcgtatggatacccgaaggcgaaagcataaagatcccagtctgcatcaaagtaatcgaagacaaatccggacgacaatcattccaagcagtaacagaccacatgctcgccatcggctccctagaccacgcccacatagtccgcctactaggactatgcccaggatcatccctacaactcgtgacgcaatacctcccacttggttcgctcctcgaccacgtccgccaacaccgcggagcccttgggccacagctgctcctcaactggggcgttcaaatcgccaaaggcatgtactacctagaagaacacggaatggtccaccgaaacctcgccgcccgaaacgtcctcctaaaatccccctcccaagtccaggtcgccgatttcggcgttgccgacctacttcctcccgacgataaacagctcctttactcagaggccaaaacccccattaaatggatggcactagaaagcatccacttcggcaaatacacccaccaatccgacgtatggtcctacggccaatgcatctggatgccctccctcccaagccttgccccagtatcaaacctccccttcgaaacgcccagctag

SEQ ID NO: 4190 - RNA, 3927 nt, synthetic construct
  misc_feature 1..3927: note = AAB59446 variant
  source 1..3927: mol_type = other RNA
atgaagcccgctacgggactctgggtctgggtatctctcctagtggccgcgggtaccgtccaacccagcgactcccagtcagtatgcgctggcacagaaaacaagctaagctcactatcggacctggaacaacagtaccgtgcattaagaaaatactatgaaaactgcgaagttgtaatgggaaacctcgagataacttccatcgaacacaaccgtgatctctccttcctaagaagcgtacgagaagtcaccggctacgtcttagtcgcactaaaccaattcagatacctaccactagaaaacctaagaataatccgaggcaccaaactctacgaagaccgctacgcactggctatattcctcaactaccgcaaagacggcaactttggacttcaagaactcggccttaaaaacctgaccgagatcttgaacggcggcgtctacgtcgatcaaaacaaattcctctgctacgccgacacaattcattggcaagatatcgtgcgcaacccttggccctccaatctaactcttgtctccaccaatggatcctcaggctgcgggcgctgccacaaaagctgtaccggccgctgctggggacctaccgaaaaccattgccaaaccctcacgcgaactgtttgcgcagaacagtgcgacggaagatgctacggcccttacgtatctgactgctgtcaccgagaatgtgccggaggctgttcaggtccgaaagacaccgactgttttgcctgcatgaacttcaacgactccggcgcctgcgtaacccagtgcccacagacctttgtatacaacccgacaacctttcaactcgagcataatttcaatgccaaatacacatacggagcattctgcgtcaagaaatgcccacacaactttgtagtcgacagcagttcctgtgtccgcgcctgtccctcatccaaaatggaggtagaggaaaacgggatcaaaatgtgtaaaccctgcacagacatatgccccaaagcatgcgatggcatcggaacaggctccctcatgtcagcacaaaccgtagacagctccaacatagacaaatttattaattgcactaaaattaacggtaacttaatattcctcgttaccggaatccatggggatccgtacaacgcgatagaggcaatagatcccgaaaagctcaacgtcttccgcactgtccgcgagatcaccggctttttaaacattcaatcctggccccctaacatgactgacttcagcgtgttcagtaacctcgtaaccatcggaggacgcgtgctatactcaggcctatcgctcctcatactcaaacaacaaggcattacatccctccaattccaatcgctaaaagaaatttcagcgggcaatatatacatcaccgataattccaacctctgctattaccacactatcaactggaccacactcttctcaacaataaaccaacgaatcgtaatccgcgacaaccggaaagccgaaaactgcacagcggaaggcatggtatgcaaccacctctgcagcagtgatggctgctggggaccgggtcctgaccagtgcctatcctgcagacgattctcacgcggccgcatatgcatagagtcgtgcaatctttacgacggcgagttccgagagttcgaaaacggaagcatctgcgtcgaatgcgacccccaatgcgaaaagatggaggacggcctactaacatgccatggcccgggacccgacaactgcacaaaatgctcacacttcaaagacggccccaactgcgtagagaaatgtcctgacggactacaaggcgctaacagttttatctttaaatacgccgatccagaccgcgaatgccacccatgccaccctaactgcacccaaggctgcaacggccctactagccatgactgtatatactacccatggaccgggcattcgacccttccccaacacgccagaaccccactcatagccgctggagttatcggcggattgttcatcctagtcatcgtgggccttacgttcgccgtttatgtccgccgcaaatctatcaaaaagaaacgcgccctccgtcgcttcctagaaacagagcttgtcgaaccactcacgccatcgggcaccgcaccaaaccaagcgcaactcagaatcctcaaagaaaccgagctcaaacgtgtaaaagttctaggcagcggagccttcggcacagtctacaagggtatctgggtcccagaaggcgagactgtcaaaatcccagtagccatcaaaatactaaatgaaaccacaggccccaaagcaaacgttgagttcatggacgaagccctcatcatggcatcaatggaccacccgcacctagtccgcctcctcggagtctgtctttcgccaaccattcagctagtgacccagctcatgccccatggctgtcttctcgaatacgtccacgaacacaaagataatatcggatcccaactacttcttaattggtgcgtacaaatagccaaaggaatgatgtacctcgaagaacgacgcctcgtccaccgcgatctagcagcccgtaacgtgctagtaaagtcacccaaccacgtaaaaatcaccgacttcgggctcgcacgcctacttgaaggcgacgaaaaagagtataacgcagacggaggcaaaatgccaatcaaatggatggcgctagaatgcatccactaccgaaagttcacccatcaatcagacgtttggtcttacggagtcactatctgggaacttatgacattcgggggcaagccatacgacggcattcccacccgcgagattcccgacctcctcgaaaaaggcgaacgactaccccaaccacccatatgcaccatcgacgtatacatggtaatggtaaaatgctggatgatcgacgccgatagccgcccaaaattcaaagaactagctgcagagttcagccgcatggcccgggatccgcaacggtacttagtgatccagggggacgacagaatgaaactcccctcccccaacgactcaaaattcttccagaacttattggacgaagaagacctcgaagacatgatggatgcggaagaatacctcgtacctcaggcctttaacatacccccaccaatatacacatcccgagcgcgtatcgactcaaatcgatctgaaatcggccactctccaccacccgcttacacgcccatgagtggtaaccaattcgtatacagagacggtggatttgccgccgaacagggagtctcagttccctatcgagcccccacatcaaccattccggaagctcccgtcgcccaaggcgccaccgccgaaatatttgatgacagctgttgcaacggaaccctccgcaaaccggtcgcaccacacgtccaggaagactcctcgacccagcgctactccgccgaccccacagtcttcgccccggaacgcagcccccgcggcgaacttgacgaagaaggctacatgacccctatgcgcgacaagcccaaacaggaatatttaaaccccgtagaagagaaccccttcgtctcccgccgcaagaacggagatttacaagcccttgacaatccagaataccacaacgcctccaatggaccacccaaagccgaagacgaatacgtaaacgaacccctataccttaacaccttcgcaaacaccctaggcaaggccgagtacctcaaaaacaacatactatccatgcccgagaaagccaagaaggctttcgacaaccctgactactggaatcattccctaccgccccgcagtaccctacaacaccccgactacttgcaagaatacagcacgaaatacttctataaacagaacggacgcatacgaccaatagtagcggaaaatcccgaatacctgtccgagttctcactcaagccagggaccgttctaccacctccaccctatcgccaccgcaatactgtcgtctag

SEQ ID NO: 4191 - RNA, 1461 nt, synthetic construct
  misc_feature 1..1461: note = CCDS46648.1 variant
  source 1..1461: mol_type = other RNA
atgatccaaacagtaccagaccccgccgcccacatcaaagaagccctctccgtagtctccgaagaccaatcactattcgaatgcgcctacggaacgccccacctcgccaaaaccgaaatgaccgcctcctcatcctccgactacggacaaacctccaagatgtctccccgagtccctcaacaagactggctatcccaacccccagcccgagtcactatcaaaatggaatgcaacccttcccaagttaacggctcccgtaactcacccgacgaatgctccgtcgccaaaggcggcaaaatggtcggctcccccgacacagtaggaatgaactacggctcatacatggaagaaaaacacatgccccctccgaacatgacaacaaacgaacgacgcgtcatcgtaccagcagaccccaccctctggtccaccgaccacgtacgacaatggcttgaatgggccgtaaaagaatacggcctcccagacgtcaacatcctactgtttcaaaacatcgacggcaaagaactttgcaaaatgaccaaagacgacttccaacgcctcaccccgtcatacaacgccgacatcctactctcccacctacactacctccgagaaaccccactcccccacctaaccagcgacgacgtcgacaaagccctacaaaactctccccgcctaatgcacgcccgcaacaccggaggagcagcattcatattccccaacacctccgtctaccccgaagccacccaacgaatcaccacccgccccgacctcccctacgaacctccacgccgctcagcctggaccggccacggccaccccacaccccaaagcaaagcagcccaaccctcaccatccaccgtacccaaaaccgaagaccaacgcccccaactagacccataccaaatactcggccccacctcaagccgcctcgccaaccccggctccggccaaatccaactctggcaattccttctggaactcctctcagactcatcaaactcatcctgcataacatgggaaggaaccaacggagagttcaaaatgaccgacccagatgaagtcgcccgacgctggggcgaacgtaaatccaaacccaacatgaattacgacaaactcagccgcgccctacgatactactacgacaaaaacatcatgacaaaagtacacggcaaacgctacgcctacaaatttgacttccacggcatcgctcaagccctacaaccccatccacccgaatctagcctctacaaatacccctcagacctcccctacatgggcagctaccacgcccacccccagaaaatgaacttcgtcgcaccccatcccccagccctaccagtaacctcctcctccttcttcgccgcccccaatccctactggaactcacccactggaggcatctaccctaacacccgactccccacgtcacacatgccctcacacctaggcacttattactaa

SEQ ID NO: 4192 - RNA, 1359 nt, synthetic construct
  misc_feature 1..1359: note = AAA19786 variant
  source 1..1359: mol_type = other RNA
atgtcagaaacacccgcacaatgctcaatcaaacaagaacgaatctcctacaccccacccgaaagccccgtcccctcctacgcctccagcacacccctccacgtccccgtcccccgcgccctacgcatggaagaagactcaatccgactccccgcacacctccgcctacaacccatatactggtcccgcgacgacgtcgcacaatggctcaagtgggccgaaaatgagttctccctccgccccatcgactcaaacaccttcgaaatgaacggcaaagcactcctcctcctcaccaaagaagacttccgctaccgctctccccactccggcgacgtcctctacgaattactccaacacatacttaaacaacgcaaacccagaatcctcttctcccctttcttccaccccgggaactccatccatacccaacccgaagtcattctccaccaaaaccacgaagaagacaactgtgtacaacgaaccccacgcccttctgtcgacaacgtccaccacaaccctcccaccatagaactcctccaccgctcccgatcccccatcacaaccaaccaccgcccctcacccgacccagaacaacgccccctccgctcacccctagacaacatgatacgccgcctttcccccgccgaacgcgcacaaggaccccgaccacaccaggaaaacaaccaccaagaatcctacccactctccgtctcccccatggaaaacaatcactgccccgcatcctccgaatcccatcccaagccctcctctccccgtcaagaatccacacgcgtcatccaactcatgccctccccaatcatgcatccccttatcctcaatccccgacactccgtcgacttcaaacaatcccgactgtctgaagacggcctacatcgcgaaggtaagccaatcaatctctcccaccgcgaagacctcgcctacatgaaccacattatggtctcagtctcaccacccgaagaacacgcaatgcccataggacgcatagctgactgccgcctcctatgggactacgtttaccaactcctctccgactcacgctacgaaaacttcatacgctgggaagacaaagaatccaaaattttccgaatcgtcgaccccaacggattagcccgcctctggggaaaccataaaaaccgcacaaacatgacctatgagaaaatgtcccgcgctctccggcactactacaagctaaatatcatacgcaaagaacccggccaacgcctcctcttcagattcatgaaaacccccgacgaaatcatgtccggtcgcaccgaccgcctcgaacacctcgaaagccaagaactcgacgaacaaatctaccaagaagacgaatgctaa

SEQ ID NO: 4193 - RNA, 1971 nt, synthetic construct
  misc_feature 1..1971: note = AAH04817 variant
  source 1..1971: mol_type = other RNA
atggcatcaacagactacagcacatacagccaggcagcggcacaacaagggtactcggcctacacagcacagccaacccaaggctacgcccaaacaacgcaagcatatgggcaacaaagctatggaacatacgggcaaccgaccgatgtctcatacacacaagcacaaacgaccgcaacatacggccaaacagcgtatgcaacatcgtacggacagccaccaacaggatacacaactccaacagccccgcaagcgtactcgcaaccagtacaaggatatggaacaggagcatacgacaccacgacagctacagtcactacgacacaggcctcatacgcagcacaaagcgcatacggcacacaacccgcatacccagcatacggccagcaaccggcagcgacagcccccacacgcccacaagacggtaacaaaccaacagaaacatcgcaaccgcaatcaagcacaggcgggtacaatcaaccaagtctaggatacggccaaagcaactacagttacccacaagtacccggaagctatcccatgcaaccagtcacagcacccccatcgtacccgcccacgagctatagctcaacccagcccacaagctacgaccaaagctcttacagccaacaaaacacgtacggccaacccagcagctatgggcaacaaagctcatatgggcaacagagctcatacgggcaacaacccccaacatcatacccaccacaaacagggagttacagccaggccccatcacaatacagccagcagagcagcagctatggacaacaaagctcattccgacaagaccacccatcgagcatgggcgtatatgggcaagaaagcggaggattcagcgggccaggggaaaataggtcaatgagcggaccagacaaccgtggacgaggacgaggaggattcgacagaggcgggatgagccgcggaggaagaggaggaggcaggggtggaatgggaagtgccggcgagcgaggaggattcaacaaacccggaggaccaatggatgaagggccagacctagacctaggaccaccggtcgaccccgatgaagactcagacaactccgccatctacgtacaggggctaaacgacagtgtcacactcgatgacctggcagacttcttcaaacagtgcggagtagtaaaaatgaacaaacgcactggccaacccatgatccacatctatctagacaaggaaacgggaaaacctaagggagacgccaccgtgagctacgaagacccaccaacggccaaagcagcagtggaatggttcgacggaaaggacttccaagggagcaaactaaaagtatcgctagccagaaagaaaccaccgatgaactcgatgagaggaggactcccgccaagagaaggacggggaatgcctccgcctctaagaggtgggccagggggcccaggcggaccaggtggccccatgggacgcatgggaggaagaggaggcgacagaggaggattcccgccccgaggaccgcgaggctccagaggaaacccaagcgggggcgggaacgtacaacaccgcgcaggagactggcagtgcccgaacccaggatgcggcaaccaaaacttcgcatggcgaaccgaatgcaaccaatgtaaagcaccaaaaccagaagggttcctaccacccccgttcccaccaccaggaggagatagaggaagaggtggaccgggaggtatgcggggcggcaggggaggactcatggacaggggaggaccaggaggcatgttcagaggaggaagaggaggagatcgaggaggattccgaggaggccgaggcatggacaggggcgggttcggaggcggacggcggggcgggcccgggggaccacccggaccccttatggaacagatgggaggacgcaggggaggaagagggggcccgggaaagatggataaaggcgagcaccgacaagaaaggagagaccgaccatactaa

SEQ ID NO: 4194 - RNA, 1998 nt, synthetic construct
  misc_feature 1..1998: note = AEA07595 variant
  source 1..1998: mol_type = other RNA
atgggccaaaccggcaagaaatccgaaaaaggccccgtatgctggcgaaaacgggtaaaaagcgaatacatgcgactacgccagcttaagcgattccgacgcgccgacgaagtaaaaagcatgttctcatcgaaccgacagaaaatcctagaaagaaccgaaatactaaaccaagaatggaaacaacgacgcatccagcccgtccacatcctaaccagcgtgagctcactccgaggaacccgagaagtcgaagacgaaaccgtcctacacaacataccatacatgggagacgaagtcctagatcaagacggcacattcatcgaagaactaataaagaactacgacggcaaagtccacggagacagagaatgtggattcataaacgacgaaatcttcgtcgagctagtcaacgcgctcggacaatataacgacgacgacgacgatgacgacggggacgacccggaagaaagggaagaaaaacaaaaagacctagaagaccacagggacgacaaagaatcacgaccaccccgcaaattcccctcagataaaatcttcgaggccataagctccatgttccccgacaaaggaacagccgaggaactcaaagaaaaatacaaagaactcacagaacagcaactccccggagcactccctcccgaatgcacccccaatatagacggccccaacgcaaaaagcgtccagcgcgaacaaagcctccactcatttcacaccctcttctgccgacgctgcttcaaatacgactgctttctacaccccttccacgcgacacccaacacatacaagcgcaaaaacaccgaaacggcactcgacaataaaccgtgcggaccccagtgctaccaacacctagaaggcgcaaaagagttcgcggcagccctcacggccgaacgcatcaaaacaccacccaaaagacctggcggacgccgcagaggccgcctccccaacaacagttcgcgaccgagcacaccaacgatcaacgtcctggaatcaaaagacacagacagcgaccgagaagccggcaccgaaacaggaggcgaaaacaacgacaaggaagaagaagaaaagaaagacgaaaccagctcatcaagcgaagcaaacagcagatgccagaccccaatcaaaatgaaaccgaacatcgaacccccagagaacgtcgaatggtcaggcgccgaagcctctatgttccgagtcctcatcgggacctactatgataacttctgtgcaatagcacgactcataggaacaaagacatgtcgccaagtctacgagttccgggtaaaggaaagctccataatcgcaccggccccggccgaagacgtagacacacccccacgaaagaaaaagcgcaagcacagactatgggcagcccattgccgcaaaatccaactcaagaaagggcaaaaccgcttccccggctgccgatgcaaagcgcagtgcaacaccaaacaatgtccatgctacctagccgttcgcgaatgcgacccggacctatgcctcacatgcggggcagccgaccattgggacagcaagaacgtatcctgcaaaaactgctccatccaacgagggagcaagaaacatctgctgctggcaccctcggacgttgccggatggggcattttcataaaagaccccgtccagaaaaacgagttcatctcagaatactgcggcgaaatcataagccaagacgaagcagaccgacgcggaaaagtgtacgacaaatatatgtgcagcttcctcttcaacctgaacaacgacttcgtagtcgacgcgacccgaaaaggaaacaaaatccgcttcgcaaaccacagcgtaaacccaaactgctacgccaaagtaatgatggtcaacggcgatcaccgcatcggaatcttcgccaagcgggcaatccaaactggcgaagaactattcttcgactaccgatacagccaagccgacgccctcaaatacgtagggatagaacgggaaatggaaatcccctaa

SEQ ID NO: 4195 - RNA, 1005 nt, synthetic construct
  misc_feature 1..1005: note = EAW80068 variant
  source 1..1005: mol_type = other RNA
atgggccagaccggcaaaaaaagcgaaaaaggacccgtctgctggcgcaaacgcgtcaaatcagaatacatgagactacgccaactaaaacgcttccgaagagccgacgaagtcaaatccatgttctcaagcaaccgacaaaaaatcctcgaacgaaccgaaattctcaaccaagaatggaaacaacgacgcatccaaccagtccacatcctaacctcggtctcctccctccgcggcacccgcgaatgctccgtcacctcagacctcgacttccccacccaagtgatccccctcaaaaccctaaacgccgtcgcctccgtccccatcatgtacagctggtcccccctccaacaaaacttcatggtcgaagacgaaaccgtcctacacaacatcccctacatgggagacgaagtcctcgaccaagacggcaccttcatcgaagaactgatcaaaaattacgacgggaaagtacacggagacagagaatgcggcttcatcaacgacgaaatcttcgtcgaactcgtaaacgcactcggacaatacaacgacgacgacgacgacgacgatggcgacgacccagaagaacgcgaagaaaaacaaaaagacctcgaagaccaccgcgacgacaaagaatcccgcccaccacgcaaatttcccagcgacaaaatattcgaagccatctcctcgatgttccccgacaaaggcaccgcagaagaactcaaagaaaaatacaaagaactcaccgaacaacaactcccaggcgccctcccccccgaatgcacacccaacatcgacggcccaaacgccaaatccgtccaacgcgaacaatccctacacagcttccacaccctcttctgccgacgctgcttcaaatacgactgcttcctccaccccttccacgccaccccaaacacatacaaacgcaaaaacacagaaacagccctggacaacaaaccctgcggcccccaatgctaccaacaccttcccctcctcccacgaaactaa

SEQ ID NO: 4196 - RNA, 195 nt, synthetic construct
  misc_feature 1..195: note = CCO13726 variant
  source 1..195: mol_type = other RNA
atgcccctcgtcaacatcatgatgatgaccatgatgatgatggaaaccatcctcaaaaaagaaaaaaaatcccgcaaaatctggcgcatcaccgaaatgatcaaaaaagccgcccacctcggcaacttcctcctcatcaaattcctcaaacccttcccccaatgcttccaaatccgcgcccaacaaaaaaactaa

SEQ ID NO: 4197 - RNA, 2241 nt, synthetic construct
  misc_feature 1..2241: note = AAC51520 variant
  source 1..2241: mol_type = other RNA
atgggccaaaccggcaaaaagtccgaaaaaggacccgtctgctggagaaagagagtgaaatcagaatacatgcggctccgacaactaaagcggttcagacgagcagacgaagtcaaatcaatgttttccagcaaccgacagaaaatcctagaacgaaccgaaatactcaaccaagagtggaaacaacgtcgcatacaacccgtacacatcctgaccagtgtatcctccctacgcggaacaagagaatgcagcgttacaagcgacctagacttccccacacaagtaatacccctcaaaaccctcaacgcagtagcctcggtacccatcatgtactcctggtcacccctacaacaaaacttcatggtcgaagacgagaccgtcctccacaacataccctacatgggggacgaagtcctagaccaagacggtacgttcatcgaagaactaatcaagaactacgacggcaaagtacacggcgaccgtgaatgcggcttcatcaacgacgagattttcgtcgagctagtgaacgcactaggccaatacaacgacgacgatgacgacgacgacggcgacgaccccgaagaacgggaggaaaaacaaaaagacctagaagaccaccgcgacgacaaagagagccgacccccgcggaaattccccagcgacaaaatattcgaggcaattagctcaatgttcccagacaaaggaacagcagaagaactcaaagagaagtacaaagaactaaccgaacaacaactccccggtgcgctacccccagagtgcacacccaacatagacggacccaacgccaaatccgtacaacgggaacaaagcctccacagcttccacacactcttctgccggcgttgcttcaaatacgactgcttcctccatcccttccacgcaacgccaaacacttacaaacgcaagaataccgagacagccctcgacaacaaaccatgcggaccccaatgctaccaacacctcgaaggagccaaggagttcgctgcagccctcacagccgaacggataaaaaccccaccaaaaaggcccggaggccgaaggagaggccgcctgccaaacaactcctcccgccccagcacccctaccataaacgtcctggagtcgaaggacacagacagcgaccgagaggccggaaccgagaccggaggcgaaaacaacgataaagaagaagaagaaaagaaagacgagacaagcagctcgtccgaagccaacagtcgctgccaaaccccgatcaaaatgaaaccaaacatagaaccaccggaaaacgtcgaatggtcaggagccgaggccagcatgttccgcgtactcatcgggacgtactacgacaacttctgcgctatcgcaaggctgataggcacaaaaacctgtagacaagtatatgagttcagagtgaaagaatcctcaatcatagcacccgcaccggccgaagacgtagacacaccaccccgaaagaagaaacgaaaacacagactatgggccgcacactgcagaaaaatccaactcaagaaagacggctcgagcaaccacgtatacaactaccaaccctgcgaccacccccgacaaccctgcgacagctcatgcccgtgcgtaatcgcccaaaacttctgcgaaaaattctgccaatgcagctccgaatgccaaaacagattccccggatgtagatgcaaagcccaatgcaataccaaacagtgcccatgctacctagccgtacgcgaatgcgacccagacctctgcctcacatgcggagctgcagaccactgggacagcaaaaacgtttcatgtaaaaactgctcaatccagcgaggcagcaagaaacatctgctcctcgcaccctcagacgtcgccggatggggaatcttcataaaggacccagtccagaaaaacgagttcatatccgaatactgcggggaaataatatcccaagacgaagcagacaggagaggaaaagtgtacgacaaatacatgtgcagcttcctattcaacctcaataacgactttgttgtcgacgcaaccagaaaaggcaacaaaataagattcgcgaaccacagcgtaaaccccaactgctacgcaaaagtcatgatggtaaacggagaccacagaatcggaatattcgcaaaacgagcgatccaaacaggagaggaactattcttcgattaccggtactcacaagcagacgcactaaaatacgtcggcatcgaacgggaaatggaaatcccatag

SEQ ID NO: 4198 - RNA, 2124 nt, synthetic construct
  misc_feature 1..2124: note = AEN79481 variant
  source 1..2124: mol_type = other RNA
atgggccaaacaggcaaaaagtcggaaaaaggcccggtctgctggcgcaaacgcgtcaagtccgaatacatgagactacgccaactgaaacgcttccgccgagccgacgaagtaaagtccatgttctcctcaaaccgccaaaagatactagaacgaaccgagatactaaaccaagaatggaagcaaaggcgaatccaaccagtccacatactcacatccgtaagctcactacgaggcacccgcgaagtcgaagacgaaaccgtactccacaacatcccatacatgggagacgaagtcctcgaccaagacggaaccttcatagaagaattaatcaagaactacgacggcaaagtacacggcgatcgggaatgcggattcataaacgatgaaatcttcgtcgagctagtcaacgccctgggacaatacaacgacgacgacgacgacgacgacggcgacgacccagaagaacgcgaagagaaacaaaaagacctcgaagaccaccgtgacgacaaagaatcgcgcccaccacgaaagttcccatcggacaaaatcttcgaagcaatatcgtccatgttccccgacaaagggaccgcagaagaactaaaagaaaagtacaaggaactcacagaacagcaactcccgggcgccctaccaccagaatgcaccccaaacatcgacggccccaacgccaagagcgttcaacgcgaacaaagcctccacagcttccacacattattctgccgccgctgcttcaaatacgactgcttcctccaccccttccacgcgacaccaaacacctacaagcgcaaaaacactgaaacagcactcgacaacaaaccctgcggcccccaatgctatcagcacctcgagggagccaaagagttcgccgcagcactgaccgccgaaagaatcaaaacaccacccaaaagaccaggcggaagacgacgcggccgactcccaaacaactcatcccgcccctccacccccacaatcaatgtcctcgaatccaaggataccgactccgaccgagaagccggcacggaaacaggcggagaaaacaacgacaaggaggaagaagaaaagaaagacgaaacctcaagctcctccgaagccaactcacgctgccaaacgcccatcaaaatgaaacccaacatagaacccccggaaaacgtcgaatggagcggagccgaagcatcaatgttccgagtactcataggcacctactacgacaacttctgcgctatcgcgaggctaatagggacaaaaacatgccgccaagtttacgagttccgtgtcaaagagagcagcatcatcgcacccgcgcccgcagaagacgtagacacaccacccagaaagaagaaacgcaaacaccgcctctgggccgcccactgcagaaaaatccaactcaagaaagacggcagctcaaaccacgtctacaactaccagccatgcgaccacccacgccagccatgcgatagcagctgcccctgcgtcatagcccaaaacttctgcgagaaattctgccaatgctccagcgaatgccaaaatcgatttcccgggtgccgctgcaaagcccaatgcaacactaaacaatgcccatgctacctggcggtacgagaatgcgaccccgatctatgcctgacctgcggggcagccgaccattgggacagcaaaaacgtatcatgcaaaaattgctcaatacaacgaggaagcaagaaacacctcctactcgcaccatccgatgtcgcaggatggggaatattcatcaaagaccccgtccagaaaaacgagttcatcagcgaatactgcggcgaaatcataagccaagacgaagctgacagacgcggtaaagtctacgacaaatacatgtgtagcttcctcttcaacctcaacaatgacttcgtcgtcgacgcaacccggaaaggcaacaaaattcgcttcgcaaaccacagcgtcaacccaaactgctacgccaaagtaatgatggtaaacggcgaccacagaatcggcatcttcgcgaaaagggctatccaaacaggagaggaactgttcttcgactaccgctactcacaagcagacgcactcaaatacgtcggcatagaaagagaaatggaaatcccgtag

SEQ ID NO: 4199 - RNA, 399 nt, synthetic construct
  misc_feature 1..399: note = AAB87141 variant
  source 1..399: mol_type = other RNA
atggtcgaggccttctgcgcgacctggaaactgaccaacagccagaacttcgacgagtacatgaaagcgctcggggtcgggttcgcgaccaggcaagtgggcaacgtcacgaaaccgaccgtgataataagccaggaaggggacaaggtcgtgatcaggaccctgagcacgttcaagaacacggaaatcagctttcaactgggcgaggagttcgacgaaaccacggccgacgacaggaactgcaaatcggtcgtgagcctggacggggacaagctcgtgcacatacaaaagtgggacggcaaggaaacgaacttcgtcagggaaataaaagacggcaagatggtgatgacgctcacgttcggggacgtggtcgcggtcaggcactacgaaaaggcctag

SEQ ID NO: 4200 - RNA, 765 nt, synthetic construct
  misc_feature 1..765: note = CAA36870 variant
  source 1..765: mol_type = other RNA
atgtggcaactcctcctccccactgccctcctcctcctcgtctcagccggcatgcgcaccgaagacctccccaaagccgtcgtcttcctcgaaccacaatggtaccgcgtcctggaaaaagactccgtcaccctcaaatgccaaggcgcctactcccccgaagacaacagcacccaatggttccacaacgaatccctaatctcctcccaggcctcctcatacttcatcgacgccgccactgtcgacgactccggcgaataccgctgccaaaccaacctctcaaccctctccgaccccgtccaactcgaagtccacatcggctggctcctcctccaagcccctcgctgggtcttcaaagaagaagaccccatccacctacgctgccactcctggaaaaacaccgccctccacaaagtcacatacctccaaaacggcaaaggccgcaaatacttccaccacaactccgacttctacatacccaaagccacactcaaagactccggctcctacttctgccgcggcctcttcggctccaaaaacgtctcctccgaaaccgtcaacatcaccatcacccaaggactcgccgtatccacaatctcctccttcttcccacccggctaccaagtctccttctgcctagtcatggtcctcctcttcgccgtcgacaccggcctctacttctccgtaaaaaccaacatccgctcatccactcgcgactggaaagaccacaaattcaaatggcgcaaagacccccaagacaaataa

SEQ ID NO: 4201 - RNA, 873 nt, synthetic construct
  misc_feature 1..873: note = CCDS1232.1 variant
  source 1..873: mol_type = other RNA
atgggcggcggcgccggcgaacgcctattcacctcctcctgcctagtaggtctcgtcccccttggcctacgcatcagccttgtaacctgccccctccaatgcggaatcatgtggcaactcctcctccccaccgcactcctcctcctcgtctccgccggcatgcgcaccgaagacctccccaaagcagtcgtcttcctcgaaccccaatggtaccgcgtcctcgaaaaagacagcgtcaccctcaaatgccaaggcgcctactcccccgaagacaattccacccaatggttccacaacgaatccctcatctcctcccaagcatcctcctacttcatcgacgcagccaccgtcgacgactccggagaataccgatgccaaaccaacctctccaccctctccgaccccgtccaactcgaagtccacatcggatggctgctcctccaagcaccccgctgggtcttcaaagaagaagaccccatccacctacgctgccactcctggaaaaataccgccctccacaaagtcacctacctccaaaacggcaaaggccgcaaatacttccaccacaactcagacttctacatacctaaggccaccctcaaagactccggctcctacttctgccgaggcctcttcggctccaaaaacgtctcctccgaaaccgtcaacatcaccatcacccaaggactagccgtctccaccatctcctccttcttcccacccggctaccaagtctctttctgcctcgttatggtcttactcttcgccgtggacaccggactctacttctccgtcaaaaccaacatccgctcctcaacccgcgactggaaagaccacaaattcaaatggcgaaaagacccccaagacaaataa

SEQ ID NO: 4202 - RNA, 807 nt, synthetic construct
  misc_feature 1..807: note = AAH74858 variant
  source 1..807: mol_type = other RNA
atgtccctctccttcctcctcctcctattcttctcccacctcatcctctcagcctgggcccacggcgaaaaacgcctcgcccccaaaggccaacccggccccgccgccaccgaccgaaacccccgcggctcctcctcccgccaatcctcctcctcagcaatgtcatcttcctccgcctcctcatcccccgccgcctccctcggctcccaaggctcaggcctcgaacaatcctcttttcaatggtccccctctggccgccgcaccggctccctctactgccgcgtcggaatcggcttccacctccaaatataccccgacggcaaagtcaacggctcccacgaagccaacatgctctcagtcctcgaaatcttcgcagtatcccaaggcatcgtcggaatacgcggcgtattttccaacaaattcctagccatgtccaaaaaaggaaaactccacgcctccgccaaattcaccgacgactgcaaattccgcgaacgcttccaagaaaactcctacaacacctacgcatcagccatccaccgcaccgaaaaaaccggccgtgaatggtacgttgcactgaacaaacgaggcaaagccaaacgaggctgctccccccgcgtcaaaccccaacacatctcaacccacttcctcccacgcttcaaacaatccgaacaacccgagctatcattcaccgtcaccgtccccgagaaaaaaaaaccaccctcccccatcaaacccaaaatccccctctccgccccccgcaaaaacaccaactccgtcaaataccgcctcaaattccgtttcggctaa

SEQ ID NO: 4203 - RNA, 117 nt, synthetic construct
  misc_feature 1..117: note = AAB06462 variant
  source 1..117: mol_type = other RNA
atgagcacacgctgcggcgaagccggacgcgcacgcggaacccaaccccaccgcggatacagagcccaaaaccaaccctacaaaatgcacctaggcccacccagactcgaagaataa

SEQ ID NO: 4204 - RNA, 2466 nt, synthetic construct
  misc_feature 1..2466: note = AAA59470 variant
  source 1..2466: mol_type = other RNA
atggtatcctggggccgcttcatatgtcttgtcgtagtaacaatggccacactctccctcgcgagaccgtccttttcactggtcgaagacacaaccctagaacccgaagaacccccgaccaaataccagatctcacaaccggaggtatacgtcgccgcacccggcgaatccctcgaggtacgctgcctcctcaaagacgcagcagtcatctcatggaccaaagatggtgtacacctgggtccaaacaaccgcaccgtcctaatcggagagtacctccaaataaagggcgccaccccacgagactccggactctacgcatgcaccgccagccgaaccgtagactctgagacatggtacttcatggtcaacgtaaccgacgcaatctcatccggcgacgacgaagacgacaccgacggcgcagaggacttcgtcagcgaaaacagcaacaacaaacgcgcgccctactggaccaacacagaaaagatggaaaaacggctacacgccgtacctgcggccaacacagtgaaattccgatgccccgctggaggcaacccgatgccgacaatgagatggctcaaaaacggcaaagagttcaaacaagagcatagaatcggaggatacaaagtgagaaaccaacactggagcctcataatggagtccgtcgtccccagcgacaaaggaaactacacatgcgtagtagaaaacgaatacggatcaatcaatcacacctaccacctcgacgtcgtagaaaggtcccctcacagacccatactgcaagccggactcccagccaacgcttccaccgtagttggcggcgacgtcgagttcgtatgtaaagtctactctgacgcccagccccatatccaatggatcaagcacgtcgagaaaaacggcagcaaatacggcccagacgggctcccgtacctcaaagtcctcaaagccgccggtgtgaacaccacagataaagaaatagaagtcctatacatccgcaacgtcaccttcgaagacgccggcgaatatacctgcctcgccggaaactcaatcggaatcagcttccactccgcatggctcaccgtcctcccggcccccgggagggaaaaagaaatcaccgcatcacccgactacctagaaatcgcaatctactgcattggagtctttctcatagcatgcatggtcgtaaccgtcatattatgccgcatgaaaaacaccaccaagaaacccgacttctcctcacagccagcagtacacaaactcaccaaacgcattccgctacgacgccaagtcacagtatccgccgaatccagcagctcaatgaacagcaacaccccactcgtcagaataacaacccggctctcgagcacagcagatacaccgatgctagccggagtgagtgaatacgagctaccagaagacccaaaatgggaatttccacgagacaaactcaccctaggaaaacccttaggcgaaggctgcttcggccaagttgtcatggcagaagcagtagggatcgacaaggacaagcccaaagaagcggtaacagtcgcggtcaaaatgctaaaagatgacgccaccgaaaaggacctctccgacctcgtcagcgaaatggaaatgatgaaaatgatcggcaaacataagaacatcatcaacctcctgggcgcctgcacccaagatggccccctatacgtaatcgtcgagtacgccagtaaaggcaacctacgggagtacctccgggccagaagaccgcctggaatggaatactcctacgatatcaaccgcgtccccgaagaacaaatgaccttcaaggacctcgtctcctgcacataccaactcgcacgcggaatggagtacctcgccagccagaaatgtatccacagggacctagctgctagaaatgtactcgtcactgaaaacaacgtcatgaagatcgcagatttcgggctcgcccgagacataaacaacatcgactactacaagaaaacaaccaacggccgattacctgtgaaatggatggcacccgaagccctattcgatcgcgtctacacacaccaaagcgacgtgtggagcttcggcgttctaatgtgggagatcttcactctcggcggatccccataccctgggatccccgtcgaagaactcttcaaactcctcaaagaaggccacagaatggacaaaccggccaactgcaccaacgaattgtacatgatgatgcgagactgctggcatgccgtcccctcccaaagacctacgttcaagcaactggtcgaagacctcgaccggatcctaaccctaacaacaaacgaggaatacctagacctcagccaacccctagaacaatactcaccgagttaccccgacaccagaagctcctgttcatccggcgacgactccgtattctcacccgacccaatgccctacgaaccatgcctcccccaatacccgcacatcaatggatccgtcaagacctaa

SEQ ID NO: 4205 - RNA, 1908 nt, synthetic construct
  misc_feature 1..1908: note = EAW74574 variant
  source 1..1908: mol_type = other RNA
atggcacccccactcctcctcctactcttagcatccggcgccgccgcctgcccactcccctgcgtttgccaaaacctaagcgaatccctgtccactctatgcgcccacagaggactactctttgtgccacccaacgtcgaccgaagaacagtagaacttagactcgcagacaacttcatccaagcactaggcccacccgacttccggaatatgaccggcctcgtagacttaaccctctcccgcaacgcaataacacgaataggcgcacgagccttcggcgaccttgaatccctaagatccctccacctcgacggcaaccgcctagtcgaactcggcaccggttcacttagaggacccgtcaacctccaacacctaattctctccggtaaccaactcggtcgaatcgcccccggagccttcgatgatttcctagaatcattagaagatcttgacctatcctacaacaacctccgacaagtcccatgggcaggaataggcgcaatgcccgcattacacacactcaacctagaccacaatctaatcgatgctctaccacccggcgcattcgcccaactaggacaactctcacgtctggaccttacatcaaaccgtttagctaccctcgcaccggaccccctattctctcgcggaagagacgccgaagccagccccgcgcccctagtcctctcattctccggcaaccctctccactgcaactgcgaactcctatggctccgacgactagcacgccccgacgacctagaaacatgcgcttccccacctggactagccggcagatatttctgggcggtaccagaaggagagttctcctgcgaacccccactcatcgcccgacacacccagcgactgtgggtactcgaaggccaaagagcaacgttacgctgccgtgccctcggcgaccccgcaccaaccatgcactgggtcggcccagatgaccgtctcgtaggcaactcatccagagcccgagccttcccaaacggcaccctagaaatcggcgtcactggagccggcgacgcaggaggctatacctgcatcgccacaaacccagcaggcgaggcaacagcacgagtcgaactaagagtcttagccctaccgcacggcggtaactcctcagccgaaggtggccgccccggcccatcagacatcgccgcctcagccagaaccgccgccgaaggagagggcacactagaatctgaacccgcagtccaagtaaccgaagtgacagccacttccggcttagtaagctggggaccaggaagacccgcagacccagtatggatgttccaaatacaatacaactcaagcgaagacgagaccctcatctaccgcatagtccccgcatcatcacaccacttcctcctcaaacacctagtacccggagcagactacgacctatgcctcctcgccctcagccccgcagccggcccctcagacctcacagccacccgcctactcggatgtgcccatttctcgaccttacccgcgtccccactctgtcacgcactccaagcccacgtcctaggcggcacccttaccgtcgctgtcggcggcgttctagtcgccgcccttctcgtattcacagttgccctcctagtaagaggccggggcgctggaaacggccgcctacccctaaagctctcacacgtacaatcccaaaccaacggtggaccatcccccactccaaaagcccacccaccccgatctcctcccccgcgaccccagcgctcttgctcactagacttaggcgacgcgggatgctacggctacgcacgacgccttggcggcgcctgggccagacgctcacactcagtacacggaggcctcctaggagctggatgtcgcggcgtaggcggctcagccgaacgactagaagaaagcgttgtctaa

SEQ ID NO: 4206 - RNA, 3297 nt, synthetic construct
  misc_feature 1..3297: note = EAW96782 variant
  source 1..3297: mol_type = other RNA
atgcccccgcgccagcccccacgccaagcaggcggcggactctctcgcgagttcgggaagctcctccccgccctcagccattccccactcggaggcctcggatcgggatcggggtccgtcgcacctggccaaggacgcgccggagccatgggctcccgcacccccgaaagcccgctccatgccgtccaactacggtggggcccaaggcgaagacccccactcctccctctactcctcctcttgctacccccaccccctcgcgtcggcggtttcaacctagacgccgaagcgcccgctgtcctaagcggacctccaggttcctttttcggcttcagcgtagagttctaccgcccaggcaccgacggagtctccgtacttgttggcgccccgaaggccaatacatcccaaccgggcgtcctccaaggcggcgccgtgtatctgtgtccttggggcgcatcccccacccaatgcacgccaatcgagttcgatagcaaaggctcgcgtctactagaatcaagcctcagcagttcagaaggtgaagaaccagtcgaatataaatctcttcaatggttcggagccaccgtccgtgcccacggcagctcgatactggcctgcgccccactatacagctggcgtacagagaaggaacccctctctgatcctgtcggaacgtgctacctatctacagacaacttcacacggatcctcgaatacgccccctgccgctcagacttcagctgggcagcgggccaaggatactgccaaggcgggttctcagccgagttcactaaaacaggccgcgtagtcctaggagggccaggatcatatttttggcaaggccagattctctccgctacccaagaacaaatcgccgaatcctattaccccgagtatctcataaacctggtccaaggacaacttcaaacgcgccaagcctcttccatatacgatgacagctacttaggatattcagtagccgtaggagagttctccggcgacgacacagaagacttcgtagcaggggttccaaagggaaacctaacttacggctatgtcaccatcctaaacggcagcgacatccgctccctctacaatttctccggagaacaaatggcctcatatttcggctacgctgtcgccgcgacagatgtaaacggcgacggcctcgacgacttacttgtcggagcaccactacttatggatcgcacacccgacggcaggccccaagaagtaggccgtgtctacgtgtacctacagcacccggcgggtatcgaacccacacccaccctcacacttacaggccacgacgagttcggccgattcggatcctcacttacaccccttggcgacctagaccaggacgggtacaacgacgtcgctataggtgcgcccttcggaggcgaaacccaacaaggcgtcgtctttgtctttccaggtggaccgggcggactaggcagcaaacccagccaagtcttacaacccctgtgggccgcctcccacactccggatttcttcggctcagcattacgaggaggacgagacctagacggaaacggataccccgacctaattgtcggttcattcggcgtcgacaaggccgtcgtctacagaggaagacccatcgtatccgcatctgcttcgctaaccatcttcccagcgatgttcaatcccgaagaacgctcctgctctctggaaggaaatcccgttgcctgtatcaacctcagcttctgtctaaacgcatcagggaagcacgtggccgactcaatcggcttcaccgttgaacttcagctagactggcaaaaacaaaaaggtggggttagacgcgcactgttcctagcatcacgtcaagcaactctaacccaaaccctcctaatacaaaatggcgcacgcgaagactgtcgggaaatgaagatctaccttcgcaatgaaagtgaatttcgggacaaactatcaccaatccatatagccctcaacttctccctagacccacaagcccctgtcgattctcacggcttaagaccagcactccactaccaaagtaaatcccgaatcgaagacaaagcacagatcctgcttgactgcggtgaagacaacatatgtgtacccgacctacaacttgaggtcttcggtgaacagaaccacgtctacctaggtgacaaaaatgcactcaacttaacatttcatgcccaaaatgtaggcgaaggcggcgcatatgaagccgaactcagggtcaccgcgcctcccgaggctgaatactccggcctagtacgccacccaggcaatttttccagcctgtcctgcgactacttcgccgtcaaccaatcccggctcctcgtatgcgacctcgggaacccgatgaaagctggcgccagcctatggggcggcctcagattcacggtaccccacctccgcgacaccaagaaaaccatacagttcgacttccaaatactatctaaaaacctgaacaactcccaatcagacgtagttagcttccgcctatccgtggaagcgcaagcccaagtcactttaaacggagtatccaaacccgaggccgtcctcttcccggtatcggactggcacccccgcgaccaaccccaaaaagaagaagacctgggacctgcggttcatcacgtatacgaactaataaaccaaggaccctcatctatatcccaaggcgtcctggaactatcctgcccccaagcgctcgaagggcaacaacttctatacgtaacacgcgtcacaggcctcaactgcaccacaaaccaccccatcaaccctaaaggattagaactggacccagaaggcagcctccaccaccaacaaaaacgcgaagcgcccagccgatccagcgcatcatcaggcccccaaatcctcaaatgccctgaagctgaatgcttccgtctacgatgtgaactaggccccctccaccaacaggaaagccagagcctacaactacacttccgagtatgggcgaaaaccttcctccaaagagaacaccaaccgttctccctacagtgcgaggcagtatataaagcactaaaaatgccataccgcatcctgccccgccaactcccccaaaaagagcgacaagtggccacggccgtccaatggacaaaagcagaaggctcctacggagtcccactatggataatcatcctcgccatcttattcggtctcctcctattaggactcttaatatacatcctctacaagctaggcttcttcaaacgaagcctcccctatggcacggctatggaaaaagcccaactaaaacccccagcaacatccgacgcctaa

SEQ ID NO: 4207 - RNA, 3597 nt, synthetic construct
  misc_feature 1..3597: note = EAX08808 variant
  source 1..3597: mol_type = other RNA
atggcagaacatccgccgcttcttgacactacccaaatcctatcatccgacatttcactcctttcagctcccatagtctctgccgacggaacacaacaagtgatactcgttcaagtgaacccaggagaagcattcactataaggcgcgaagacggtcaattccagtgcatcactggccccgcccaagtccccatgatgtcacccaatgggtccgttccgcccatctacgtgcctcccggatacgctccccaagtaatagaagacaacggcgttcgtcgagttgtagtcgtccctcaagcaccagagttccaccccgggagccacacggtcctccacagaagcccgcacccacccctccccggtttcatacccgtgcctaccatgatgccgccacctccacgacacatgtactctcctgtcacgggcgcaggggacatgacaacacaatacatgccacaataccagtcatcccaagtatacggggacgtagacgcccacagtacccacggacggtcaaatttcagagacgaacggtcttctaagacatacgaacggctccaaaagaaactcaaagaccgtcagggcacgcaaaaagacaaaatgtcatcccctccgtcaagccctcaaaaatgcccctcacccattaacgaacataacggcctgatcaagggacaaatagcaggaggaataaacactggctccgccaagatcaaatcaggcaagggaaaaggaggcactcaggtagacaccgaaatagaagaaaaagacgaagaaacaaaagcctttgaagcactactatctaacatcgtcaaacctgtcgcctctgacatccaagcgaggaccgtcgtcctaacgtggtctccaccctcctccctgatcaacggagaaaccgacgagagctccgtacctgaactctacgggtacgaagttctaatatccagtaccggcaaggacggcaaatataaatcagtgtacgtcggagaagagactaacatcactctcaacgatctgaaaccagccatggactaccatgccaaagttcaagcggaatacaacagcattaaaggaaccccctcggaagcagaaatattcacaaccctctcctgcgagcccgacatcccaaacccaccgcggatcgcaaaccgcaccaagaacagtctgaccctacaatggaaagccccctcggacaacggctccaagatacagaacttcgtcctagaatgggatgaagggaaaggcaacggcgagttctgtcaatgctacatggggtcccagaaacaattcaaaatcactaagctatcccccgccatgggatgcaaattccgccttagcgcccgcaacgattacgggacctcaggattcagcgaagaagtactatactacacatctggctgcgcaccctcaatgcccgcaagcccagtactgactaaggccggcatcacctggctctcactacaatggtctaagcctagcggcactccatccgacgaaggcatcagctacatactcgaaatggaagaagaaacgtccggctacggttttaagcccaaatacgacggcgaggatctcgcctacaccgtcaaaaacctcagaagaagcaccaaatacaaattcaaagtaattgcatacaacagtgaaggcaaatcaaacccaagcgaagtcgtcgagtttacaacctgcccggacaagcccgggattcccgtaaaaccaagcgtcaaaggcaagattcactcccactccttcaagataacgtgggatcccccaaaagataacgggggcgccaccataaacaaatacgtcgtcgaaatggccgagggatcaaacggaaacaaatgggaaatgatctatagcggggcaaccagagagcacctatgcgatagactcaatccaggctgcttctaccgcctccgcgtctactgcatctcagacggtggccaatcagccgtatcagaatcgctgttggtacagacaccagccgtcccacccggcccctgcctccctccccgcctccaaggtcgaccaaaagcaaaagagatacaactccggtggggcccaccactcgtagacggcggctcccctatcagctgctactcggtcgaaatgagccctatagaaaaagacgagccgcgtgaagtataccaaggatccgaagtcgaatgtaccgtgagctctttactgcccgggaagacatactccttccgactgcgagccgcgaacaaaatgggattcggccccttctcagaaaaatgcgacatcacaaccgcaccggggccacccgaccaatgcaagccaccccaagttacatgtcgctcggccacgtgcgcccaagtcaattgggaagtaccactctctaacggcactgacgtgaccgaataccgcctcgaatggggcggagtagagggctccatgcagatatgctactgcggccccggactttcttacgagataaaaggactcagtcccgccaccacctactattgccgagtacaggccctctccgtagtaggagccggtccattctctgaggtcgtagcatgcgtcacccctcccagcgtgcccggcatcgttacatgcctccaggaaatctcggacgacgaaatcgaaaatccacactacagcccctcgacctgcctcgcaatctcctgggaaaaaccgtgcgaccacggttcagagatcctcgcgtactctatcgacttcggcgacaagcagtcactaaccgtcggcaaagtcacatcctatatcatcaataacctccaaccggacacgacctaccgcattcgcatacaagccctaaactcactaggcgccggacccttctctcacatgattaaactgaaaactaagcccctcccacctgatccaccccgccttgaatgcgtagccttctcgcaccagaacctaaaactaaaatggggagaaggcacacccaagaccctatcaacagactcaatccaataccacctccaaatggaagacaaaaacggccgcttcgtctcactctaccgcgggccctgccacacgtacaaagtccaacgtctaaacgagtccacctcctataaattctgcatacaggcttgcaatgaggccggcgagggacccctctcccaagaatacatcttcacaacccccaaatccgtcccagccgcactaaaggcaccgaaaatcgaaaaggtaaacgatcacatatgcgaaataacatgggaatgtctccagcccatgaagggggatccagtaatatactccctacaggttatgctaggcaaagacagtgagttcaaacaaatatacaagggccccgattcgtcgtttcgctactcctcactccaactcaactgcgaataccgatttcgcgtctgcgcaatccgccagtgccaagactctctcggccaccaagatctcgtcggaccttacagcaccacagtcctcttcatttcccagcgaacagaacccccagcaagcaccaaccgtgacaccgtagaatccacacgcacacgtcgcgccctctccgacgaacaatgcgccgcggtgatcttagtactcttcgcatttttctctatactcatcgccttcatcatccaatacttcgtcatcaaataa

SEQ ID NO: 4208 - RNA, 3429 nt, synthetic construct
  misc_feature 1..3429: note = EAX08809 variant
  source 1..3429: mol_type = other RNA
atgtccggacctgcccaagtcccaatgatgagtccaaacggcagcgtcccacccatatacgtacccccaggctacgcaccacaagtcatcgaggacaacggcgtcagacgcgtcgttgtcgtaccccaagcccccgagttccacccaggtagccacaccgtactccaccgctcgccacacccacccctcccaggctttatccccgtcccaactatgatgccaccacctcccagacatatgtactctcccgtgaccggcgcaggcgacatgacgacccaatacatgccccaataccaaagctcacaagtgtacggagacgtagacgcccactccacccacggccgctccaacttcagagatgaacgaagtagcaaaacctatgaacgcctacaaaagaaactgaaagatcgccagggcacacaaaaagacaagatgtcaagcccacccagcagcccccaaaaatgcccatcccccatcaacgagcacaacggactaataaaaggccagattgcaggcgggataaataccggatccgcaaaaatcaaatcagggaaaggcaagggaggcacacaggtcgacaccgagatcgaagagaaagacgaagagaccaaagcctttgaagcccttcttagcaacattgtcaaaccagtagcctccgacatccaagctcgaacagtcgtactcacatggagcccaccatcctcactcataaatggggaaacagacgaatcaagcgtccccgaactctacggatatgaagtactcatctcctccaccggtaaggatggaaagtacaaaagcgtctacgtcggcgaggagaccaacatcaccctcaacgacctcaaacctgctatggattatcatgcaaaggtccaagcggagtacaactccatcaagggcaccccttccgaggcagaaatattcaccaccctctcttgcgaacccgacatccctaacccacctagaatagctaaccgcacgaaaaactcgctcacattacaatggaaagcccccagcgacaacggctcaaaaatccaaaacttcgtcctagaatgggacgaaggcaagggaaatggcgagttctgccagtgctacatgggctcgcaaaaacaattcaagatcacaaaactctccccagcaatggggtgcaagttccgcctttccgcccgaaatgactacggcactagcggattcagtgaagaagtattatactacacctccggctgtgcgccaagcatgcccgcctcaccagttctcaccaaagcaggcatcacctggctgagcctacaatggagcaaaccctccgggaccccctcagacgaaggcatatcctacatactcgaaatggaagaagaaacctccggatacggattcaaaccgaaatacgacggagaagacctagcatataccgtcaaaaatctccgacgatctaccaaatacaagttcaaagtaatcgcatacaacagcgaaggcaaatcaaaccctagcgaagtcgtagagttcacaacatgcccagataaaccagggatcccggtcaaaccatcagtcaaaggtaaaatccactctcacagcttcaaaataacttgggacccacctaaggacaacggcggcgccaccatcaacaaatacgtagttgaaatggctgaaggcagcaacggcaacaagtgggagatgatatattccggcgcaacccgcgaacacctctgcgacagactcaaccccggctgcttctaccgtctgagagtatactgcatctcggacggaggacaatccgcagtatccgaatcgcttctagtccagacacccgcggtcccacccggcccctgcctacccccaagactccaaggtagaccgaaagcaaaggagattcagctgcgctggggtcccccactcgtagacggcggctcccctatatcatgctacagcgtagaaatgagccctatcgaaaaagacgaaccccgagaagtatatcaaggatccgaagtagaatgcacagtatcatctctccttccaggaaaaacctactcctttcgcctccgagcagccaacaaaatggggttcggccccttctccgaaaagtgtgacataaccaccgctccgggccctcccgaccaatgcaagcctccgcaagtaacatgccgatcggcgacctgcgcccaggtcaactgggaggtccctctcagcaacgggaccgacgtcacggaatatcgcctagagtggggaggggtcgagggctccatgcaaatttgctactgcggcccaggtctctcatatgaaatcaagggcttatcacccgctaccacatactactgccgagtccaagccctatctgtcgtcggagcgggccccttctctgaggtagtagcctgtgtaacaccaccctccgtcccaggaatcgtcacgtgtctgcaagaaataagcgacgacgagatcgaaaacccccactactccccctccacatgcctcgccattagctgggaaaagccttgcgaccacggctcagagattctagcctacagtatcgacttcggtgacaagcaatccctcactgtgggaaaagttacctcgtacatcatcaacaacttacaaccagacacaacctaccgcatcagaatccaagccctaaattcccttggagctggcccattctcccacatgattaaactcaaaactaagcccctacccccagacccaccacgactcgaatgcgtcgccttctcccatcaaaacctcaaactaaagtggggcgaaggaacgcccaagacgctatccaccgattcgattcaataccacctccaaatggaagacaaaaacggcagattcgtaagcctttatcgtggaccctgtcacacatataaggtccaacgccttaacgagtcgacctcctacaaattctgcatccaagcctgcaacgaagccggagaaggcccgctttcccaagaatacatattcaccacaccaaagtcagttcccgcagcccttaaagcaccgaaaatcgaaaaagtaaacgaccatatatgcgaaatcacctgggaatgcctccaaccaatgaaaggcgaccccgtcatatactccttacaagtcatgctcggcaaagactcggagttcaaacaaatctacaaggggcctgactccagcttcagatactcatccctccaactaaactgtgaataccgattccgcgtttgcgctatccgacaatgccaggatagcctcgggcaccaggaccttgtcgggccctacagcaccaccgtcctattcatctcacaacgcacagaaccacccgcatccacgaaccgcgacaccgtcgaatccacacgaacccgcagagcgctgtctgatgaacaatgtgcagccgtcatcctggtcctattcgcctttttctccatcctaatcgcgttcataatacaatacttcgtcataaagtaa

SEQ ID NO: 4209 - RNA, 1020 nt, synthetic construct
  misc_feature 1..1020: note = EAW49214 variant
  source 1..1020: mol_type = other RNA
atgcccccatccaaaccccacccccccgtagtcggcaaagtcacacaccactccatcgaactctactgggacctagaaaaaaaagcaaaacgccaaggcccccaagaacaatggttccgcttctccatcgaagaggaagaccccaaaatgcacacctacggcatcatctacaccggctacgccaccaaacacgtcgttgaaggcctcgaaccccgcacactataccgattccgactcaaagtcacctcaccctcaggcgaatgcgaatactcccccctcgtatccgtctcaaccacaagagagcccatcagctccgaacacctacaccgcgccgtaagcgtaaacgacgaagacctgctcgtacgtatactccagggcggccgcgtcaaagtagacgtccccaacaaattcggcttcacagccctcatggtcgcggcccaaaaaggctacacgcgcctcgtaaagatcctagtatccaacggaacagacgtaaacctaaaaaacggctccggcaaagacagcctcatgctagcatgctacgcaggccacctagacgtcgtcaaatacctccgccgccacggagcctcatggcaagcccgcgacctcggaggctgcaccgccctccactgggcagccgacggaggacactgcagcgtcatagaatggatgatcaaggacggctgcgaagtcgatgtcgtagatacgggctcaggctggacacccctcatgcgcgtaagcgcagtcagcggcaaccaacgagtcgcaagcctcctcatagacgccggagccaacgtcaacgtaaaagaccgaaacggcaaaacacccctcatggtcgcagtcctcaacaaccacgaagaacttgtccaactcctacttgacaaaggcgccgacgcatcagtcaaaaacgaattcggcaaaggcgtcctagaaatggcccgagtcttcgacagacaatccgtcgtatcactactcgaagaacggaaaaaaaaacaacgacccaaaaaaagctgcgtctgctaa

SEQ ID NO: 4210 - RNA, 3150 nt, synthetic construct
  misc_feature 1..3150: note = BAF84259 variant
  source 1..3150: mol_type = other RNA
atgggctcccgcacaccagaatccccactccacgcagtccaactcagatgggggccccgacgccggccaccgctactcccactgctactactactcctaccgccgcccccgagagtcggcggtttcaacctagacgcggaagcaccagccgtcttatccggaccgcccggatccttcttcggcttctccgtcgagttttaccgccccggcacggatggcgtctcggtcctcgttggagctcccaaagcaaatacttcccaacccggagttctacagggcggtgcagtctacctgtgcccttggggcgcatcccccacccaatgcactccaatcgagttcgattccaaaggcagccgactcctcgaaagctcacttagttccagcgaaggcgaggaacctgtggagtacaaaagtctacagtggttcggcgcaacagtacgcgcccatggttcaagcattttagcctgcgctcccttgtactcttggcgaactgaaaaagaaccccttagcgacccagtagggacgtgctatctaagcaccgacaacttcacacgcattctcgaatacgcaccatgtcgatcagatttctcatgggcagccggtcagggttattgccaaggcggcttctcagcagagttcaccaaaactggacgtgtcgtcctaggcggcccaggatcctacttctggcagggtcaaatactcagcgcaactcaagaacagattgccgaatcctattacccagaatacctcatcaacctcgtccaaggacagctccaaacacggcaggcttcctccatatacgacgactcctacttaggctactccgtcgcagtcggagagttcagcggcgacgacacagaagacttcgtcgcgggcgtgcccaaaggcaacctaacctacggctacgtcaccatcctcaacggatcggacataagatccctctacaacttctctggagaacaaatggcaagctacttcgcctacgcagtcgcggccacagacgtaaacggagacggactagacgacttactcgtcggcgcgccccttctcatggatcggacgcccgacggccgcccccaggaagtcggccgagtctacgtatatctacaacacccagcaggtatcgaaagcacaccaacactcaccctcactggccacgacgagttcggacgatttgggagcagcttaacccctctcggcgacctggaccaggacggctacaacgatgtcgccatcggggcaccgttcggaggagaaacccagcaaggtgtcgtcttcgtctttcccggaggaccaggaggcctcggttctaagccctcacaagtcctacaacccctctgggccgcatcccacaccccagacttctttggctccgccctacgcgggggccgagatctcgacggcaacggatatccagacctgatagtagggtcattcggcgtagacaaggccgtcgtctaccgcggacgacccatcgtatcggccagcgcgtcactcacaattttccccgctatgttcaacccagaagaacgatcctgttccttagaaggcaatcccgtagcatgcatcaacctcagcttctgcctcaacgcatccggtaagcacgtagcagactcaataggttttacagtcgaactacaactggactggcagaaacaaaaaggcggggtaagacgcgccctcttcctcgcatcacgacaagcaaccctaactcaaaccctactcattcaaaacggggcccgtgaagactgcagggaaatgaaaatctacctacgcaatgaatcagaatttcgcgacaaactatcccccatacacattgcactcaacttctccctagacccccaagcaccagtagactcacacggactccggcccgccctgcactaccaatcaaaatcccgaatcgaggacaaggcacagatccttctcggctgcggcgaagacaacatctgcgtccccgaccttcaactagaagtcttcggagagcaaaaccacgtatacctaggagataaaaacgctctaaacttgaccttccacgcacaaaatgtaggagaaggaggcgcatacgaagctgaactacgcgtgaccgccccacccgaggcagaatactctggcctcgtccgccaccccggaaactttagctccctttcctgcgactacttcgccgtcaaccaatcccgactactcgtctgcgacctagggaaccccatgaaagccggagcctcactatggggcggcctaagatttactgtgccccatctacgagacaccaagaaaacgatccaattcgacttccaaatcctcagcaaaaatctcaacaactctcaatcagacgtcgtttcttttcgcctatctgtagaagcgcaagcccaagtaacactaaacggcgtcagcaaaccggaagccgtactcttccccgtctcagactggcacccacgcgaccaaccccaagaagaagaagacctcggaccagccgtacatcacgtctatgaactaattaaccagggccccagcagcatctcgcaaggcgtactcgaactctcttgcccccaagccctggaaggccaacagctcctctacgtaacacgtgttacaggcctcaactgcaccaccaatcatcctatcaaccccaaaggcctcgaactcgaccccgaagggtccctccaccaccaacagaaaagagaagctccatccagatcctcagcatcctcaggcccccaaattctcaaatgcccagaggccgaatgcttccggttacgctgtgaactcggccctctccaccaacaagaaagccaatccctccaactacacttccgcgtctgggcgaaaaccttcctacaacgggaacaccaaccgtttagcctccaatgcgaagccgtctacaaagcactcaaaatgccataccgcatcctcccccgccaactcccccaaaaagaacgacaggtcgccaccgccgtgcaatggactaaagctgaaggatcctatggagtaccactctggatcatcatcctagccatcctgttcggcctcctgctactaggcctacttatctacatcctctataaactcggcttcttcaaacgatccctcccatacggaacagcgatggaaaaagcgcaactcaaaccaccagccacctccgacgcgtga

SEQ ID NO: 4211 - RNA, 3150 nt, synthetic construct
  misc_feature 1..3150: note = BAG35324 variant
  source 1..3150: mol_type = other RNA
atgggttcacgcaccccagaatcacccctccacgccgtccaactccgctggggtccccgacgtcgcccaccactcctcccgttactgcttctcctccttcccccgccaccccgcgtcggcggcttcaacttagacgcagaagcacccgccgttctatccggaccacccggatccttcttcggcttttcagtcgagttctatcgccccggcaccgatggggtatctgtcctagtaggcgctcccaaagccaacaccagtcaaccaggcgtcctccaaggcggcgcggtctacctctgcccatggggcgcctcgcccacccaatgtacgccgatcgagttcgacagcaaaggaagccgcctgctcgaatcttcactatcttcctccgaaggtgaagaacctgttgaatacaaaagcctacaatggttcggagcaacagtcagagcccacggctcgtccatcctcgcatgtgcacccctatactcatggagaacagaaaaagaacccctctctgacccggtcgggacctgctacctatccacagacaacttcacccgcatcctagaatacgcgccctgccgaagcgacttctcatgggccgcaggccagggctactgccagggaggattctctgccgaatttacaaaaactggtcgcgtggtcctcggtggacccggcagttacttctggcaaggtcaaatactgtcggcaacccaagaacagatcgcagaatcatactaccctgaatacctaatcaacctagtacagggccaacttcaaacaagacaagcatcgtccatttacgacgactcctacctcggttacagcgtcgctgtcggcgagttttcgggcgacgacaccgaagacttcgtcgcaggagtcccaaaaggaaacctgacatacggctacgtcacgatactcaacggatccgacattcgatccctatataacttttccggcgaacaaatggcctcctactttggctacgccgtcgctgcgaccgacgtgaacggcgacggcctcgacgacctcctagtcggcgctcccttgctcatggatcgtacaccagacggacgccctcaaggcgtaggccgcgtctacgtctatctccaacatcccgccggaatcgaaccaacaccaacactcaccctcaccggccatgacgaatttggacgctttggcagcagcctaacacccctcggagacctcgaccaagacggctacaacgatgtggccatcggggctccctttggaggagaaacccaacaaggcgtcgtcttcgtgttccccggaggccccggcggcctgggctcaaaactttcccaagtcctccagccactgtgggctgcatcacacaccccggatttcttcggatctgccctgcgcggaggacgcgacctagacgggaacggatatcccgatctaatcgtaggctctttcggcgtagacaaagcggtcgtgtatcgaggacgccccatcgtctcagctagtgcaagcctgaccatattccccgctatgttcaacccagaggaacgatcatgttcactagaaggcaatccagtcgcgtgcattaacctcagcttctgcctaaacgcatcgggaaaacacgttgcagacagcatcgggtttaccgtcgaactccagctagactggcaaaaacaaaaaggcggagtccgccgagcactcttccttgcctcacgacaagcaaccctcacgcagacactactcatccaaaacggagcccgagaagactgccgcgaaatgaagatctacctcagaaacgaatccgagttcagagataaactctcgccaatccatatcgccctgaacttttcattggacccacaagcaccggtcgattcacacggactacgaccagccctccactaccaaagcaagagccgaatcgaagacaaagcacagatcctcctcgactgcggagaagacaacatatgcgttccagacttacaactagaagtcttcggagaacaaaatcacgtctatctcggcgacaaaaacgcgctcaacctaacttttcatgcgcaaaacgttggagaaggcggcgcctacgaagccgaactccgagtaaccgctcccccagaagccgaatactcgggactcgtccgccaccccggcaacttttcctccctatcctgcgactacttcgccgtaaatcagtcgcgccttcttgtctgcgaccttggcaaccccatgaaagccggtgcctcattatggggtggactacgcttcaccgtcccccacctacgcgataccaagaaaaccatccaattcgactttcagatcctctctaaaaatctcaacaactcgcaatcagacgtagtatcctttcggctctcagttgaagcccaagcacaagtcaccctcaatggcgtttccaaacccgaagccgtcctcttcccggtttcagactggcaccctagagaccaaccccagaaggaagaagaccttgggcccgccgtacaccacgtctatgaacttataaatcaaggaccatcgtctatctcgcaaggcgtcctagagctatcctgcccccaggccctggaaggacagcagctcctctacgtcacccgcgtgacagggctaaactgcaccaccaaccacccgataaaccccaaaggcctagaattagacccagaaggctccctccaccatcaacagaaaagagaggcaccttcacgctcatccgctagctcaggcccacaaatcctgaaatgcccggaagctgaatgcttccgactgcgctgcgaactaggaccactccaccaacaggaatcccaatccctccagctacacttcagagtctgggcgaagaccttcctacaacgagagcaccagcccttcagcctccaatgcgaagcagtatacaaagcactaaaaatgccatacagaatactccctcgccaactcccccagaaggaacgacaagtagcaacggcagtccagtggaccaaagccgaaggctcctacggcgtccctctctggataatcatcctcgcaatcctgttcggcctactcctcctcggactgctaatctacatactctacaaactaggctttttcaaaagatccctaccatacggaaccgcaatggaaaaggcccagctaaaacccccggcgacctccgacgcctaa

SEQ ID NO: 4212 - RNA, 1401 nt, synthetic construct
  misc_feature 1..1401: note = BAG54537 variant
  source 1..1401: mol_type = other RNA
atgctctcccttcgacaaagaatgatgcacgcccgattccgcaacccactctccagacaacccgcccgcccatcataccgtcaaggctacaacggccgacccaacgtggaaggaaaggttctccccggtagcaacggaaaacccaacggccaacgcattatcaacggcccccaaggtaccaaatgggtagtcgacctcgaccgcggcttagtccttaacgcagaaggaagatacctacaagactcccacgggaaccccctccgaataaaactaggcggcgacggcagaaccatcgttgacctggaaggcacaccagttgtctcccccgacggactcccactcttcggccaaggccgccacggaacacccctcgctaacgcacaagacaaacccatcctaagcctcggaggaaaaccactcgtcggccttgaagtaatcaaaaaaacaacacaccccccaaccacaacaatgcaacccactaccaccaccaccccccttccaaccaccacaacaccacggcccacaacagccaccacacgcagaaccacaacccgacgcccgacaaccaccgtccgcacaaccactcgaactactaccaccaccacccccaaacccaccacccccatcccaacatgccccccaggcaccctcgaacgccacgacgacgacggcaacctaatcatgtccagcaacggcatccccgagtgctatgcagaagaggacgaattctcgggcctcgaaaccgacacggccgtcccaaccgaagaagcctatgttatctacgacgaagactatgaattcgaaacaagccgcccacccacaaccacagaaccatcaaccacagcaacaaccccccgcgtcatccccgaagaaggcgccatctcctcctttcccgaagaggaattcgacttagccggcagaaaacgcttcgttgcaccttacgtcacatacctcaacaaagacccatcagcaccctgctcactcaccgacgcactcgaccatttccaggtagactcactcgacgaaatcatccccaacgacctaaaaaaatcagacctcccaccccaacacgccccaagaaacatcacagtagtcgccgtagaaggctgccactcattcgtcatcgtcgactgggacaaagcaaccccaggagacgtagtaaccggctacctcgtctactcagcctcatatgaagacttcatccgcaataaatggtccacacaagcatccagcgtgacacacttacccattgaaaacctcaaacccaacaccagatactacttcaaagtccaagcccagaacccacacggatacggcccaatcagcccctccgtatccttcgtcaccgaatccgacaaccccctactcgtcgtccgaccaccaggcggcgaacccatctaa

SEQ ID NO: 4213 - RNA, 471 nt, synthetic construct
  misc_feature 1..471: note = BAG58437 variant
  source 1..471: mol_type = other RNA
atggaagaacaacgcaacgaagaaatccaatccttcatctactccctcaaacaaatgctcctcaacgtcgaagccaactccgccaaagtccaagaagacctcgaagccgaattccaatccctattctccctcctcgaagaactcaaagaaggcatgctcatgaaaatcaaacaagaccgcgcatcccgaacctacgaactccaaaaccaactagccgcctgcacccgcgcactcgaatcctccgaagaactcctcgaaaccgccaaccaaaccctccaagccatggactccgaagacttcccccaagcagccaaacaaatcaaagacggcgtcaccatggcccccgccttccgcctatccctcaaagcaaaagtctccgacaacatgtcccacctcatggtcgacttcgcccaagaacgccaaatgctccaagccctcaaattcctacccggcgaacgcggcacccactaa

SEQ ID NO: 4214 - RNA, 921 nt, synthetic construct
  misc_feature 1..921: note = BAH14721 variant
  source 1..921: mol_type = other RNA
atgatcttcgaagaacacggcttcagacgcacaaccccaccaacaaccgccacccccatccgccaccgccccaggccatacccacccaacgtaggacaagaagccctctcccaaaccaccatcagctgggcccccttccaagacaccagcgaatacatcatctcatgccaccccgtcggcacagacgaagaacccctccaattccgcgtacccggcacaagcacaagcgccaccctgaccggcctcacacgcggcgccacctacaacataatagtagaagccctcaaagatcaacaacgccacaaagtacgcgaagaagtcgtcaccgtcggaaactcagtcaacgaaggcctcaaccaacccaccgacgactcatgcttcgacccatacacagtctcccactacgccgtcggcgacgaatgggaacgcatgagcgaatcgggcttcaaactactctgccaatgcctcggcttcggaagcggccacttccgatgcgacagcagccgatggtgccacgacaacggggtaaactacaagataggcgaaaaatgggaccgccaaggcgaaaacggacaaatgatgtcctgcacatgcctcggaaacggcaagggcgagttcaaatgcgacccccacgaagcaacctgctacgacgacggcaaaacctaccatgtaggagaacaatggcaaaaagaatacctcggcgccatatgcagctgtacctgcttcggcggccaacgaggctggcgctgcgacaactgccgacgccccggaggcgaaccctccccagaaggaacaacaggacaatcctacaaccaatacagccaacgctaccaccaacgcacgaacacaaacgtcaactgccccatcgaatgcttcatgcccctcgacgtccaagccgaccgagaagacagccgagaatag

SEQ ID NO: 4215 - RNA, 1920 nt, synthetic construct
  misc_feature 1..1920: note = BAG61560 variant
  source 1..1920: mol_type = other RNA
atggaaaagatactattctacctattcctgatcggaatcgccgtaaaagcccaaatctgccccaagcgctgcgtctgccaaatattatcccccaacctcgcaacactatgcgccaaaaagggcctcctgttcgtcccgcccaacatcgatcgccgcaccgtcgaactccgactcgccgacaactttgtcaccaacatcaaacgtaaagacttcgctaacatgacctccttagtcgacttgacattatcccgtaacaccatctccttcatcactccccacgctttcgccgacctccgaaacctgcgcagcctacacctaaattcaaaccgcctcaccaaaattaccaacgacatgttctctgggctctccaacttacaccacctcatactcaacaacaaccaactaaccctcatatcgtccaccgccttcgacgacgtcttcgccctagaagaactcgacctatcctacaacaacctcgaaaccatcccctgggatgcagtcgagaaaatggtatccctccacaccctcagcctcgaccacaacatgatagacaacataccaaaaggcaccttctcgcacctacacaaaatgacccgcctagacgttaccagcaataaactccagaaattacccccggacccactcttccaacgagcacaggtactcgcaacctcaggaatcatatccccctcaaccttcgccctctcattcggcggcaacccacttcactgcaactgcgaactcctatggctccgtcgtctatcccgtgaatacgacctggaaacctgcgcatcccctcccctactgaccggacgttacttctggtccatccccgaggaagaatttctctgcgaaccacccctaataacccgccacacccatgaaatgcgcgtcctcgaaggccaaagagccacactacgctgcaaagcacgcggagaccccgaacccgccatacactggatatcacccgaaggaaaactaatctccaacgctacacgatctcttgtatatgataacggcacattggacatcctaatcaccaccgtaaaagacaccggcgcatttacatgcatcgcctcaaaccccgcaggcgaagcaacccaaatcgttgacctccacataataaaactcccccacctcctaaactccaccaaccacatacacgagccggatcccggatcctcggatatctctacctctaccaaatctggcagcaacacttcctcttctaacgacggcataacatcactcactgcaacacgcgtggtcggctgcatccaattcactacagaacaagactatgtccgatgccatttcatgcaaagccagttccttggcggcaccatgataatcatcatcggcggcatcatcgtagcttccgttctagtcttcattataatcctaatgatcagatacaaagtctgcaacaacaacggccagcacaaagtcactaaagtcagcaacgtctactcccaaacaaacggcgcccaaatccaaggctgctccgtcaccctcccacaatcagtctcgaaacaagccgttggccacgaagagaacgcccaatgctgcaaagccaccagcgacaacgttatccaatcatccgaaacctgctcctcccaagactccgcaactaccacatccgccctcccaccctcctggacgtcctccacctcagtatcccaaaaacagaaacgcaaaactggcaccaaacccagcacggaaccccaaaacgaagccgtcaccaacgtcgaatcccaaaacacgaatcgtaacaacagcacggctctacagctcgcctcccgcccgcccgacagcgtcaccgaaggccccacatccaagcgcgcccatatcaaacccaacgccctcctcaccaatgtcgaccaaatcgtccaagagacccaacgactagaactcatctaa

SEQ ID NO: 4216 - RNA, 1014 nt, synthetic construct
  misc_feature 1..1014: note = BAG61984 variant
  source 1..1014: mol_type = other RNA
atgatattcgaagaacacggcttccgaagaaccaccccacccaccaccgccacccccatacgacaccgaccccgcccctatccccctaacgtcggcgaagaaatccaaataggccacatcccacgcgaagacgtagactaccacctgtacccccacggacccggcctcaaccccaacgcaagcacaggacaagaagccctcagccaaaccaccatatcctgggcccccttccaagacacctccgaatacatcatcagctgccaccccgtaggcacggacgaagaacccctccaattccgcgtcccaggcacctcaaccagcgccaccctcacaggcctcacccgaggcgccacatacaacatcatcgtcgaagccctaaaagaccaacaaagacacaaggtccgagaagaagtagtcacagtcggaaacagcgtaaacgaaggactcaaccaaccaaccgacgacagctgcttcgacccctacacagtaagccactacgcagtcggagacgaatgggaaagaatgagcgaatccggattcaaactcctctgccaatgcctaggcttcggatcaggccacttcagatgcgactcctcccgctggtgccacgacaacggcgtcaactacaaaatcggcgaaaaatgggaccgccaaggcgaaaacggccaaatgatgagctgcacatgcctaggaaacggtaaaggcgagttcaaatgcgacccacacgaagcaacctgctacgacgacggaaaaacctaccacgtcggcgaacaatggcaaaaagaatacctcggagccatctgctcatgcacatgcttcggcggccaacgaggatggagatgcgacaactgccgtcgccccggcggagaacccagcccagaaggcacaaccggacaatcctacaaccaatactcccaacggtaccaccaacgcaccaatacaaacgtcaactgccccatcgaatgcttcatgcccctcgacgtccaagcagaccgcgaagactcccgcgaataa

SEQ ID NO: 4217 - RNA, 3045 nt, synthetic construct
  misc_feature 1..3045: note = BAG62013 variant
  source 1..3045: mol_type = other RNA
atgcgagtcacctgggcacccccaccctctattgacctaactaacttcctcgtccgctactcccccgtcaaaaacgaagaagacgtagcagaactcagcataagcccctccgacaacgcagtagtgctcacaaatctgctaccaggaaccgagtacgtagtttccgttagcagcgtatacgaacagcacgaatccactcccctcaggggccgccagaaaacaggccttgactcccctacaggaatagacttctctgacataaccggcaacagcttcacagttcattggatcgcaccccgcgccaccatcacgggctaccgcatccgacaccaccccgaacacttctctggacgaccccgagaagaccgcgtccctcactccagaaactcaataactttgacaaacctcacacccggaacagagtacgtagtctccatcgtcgcactaaacggcagggaagaatcacccctcctcatcggccagcaatctacagtctcagacgttccacgcgacctcgaagtcgttgccgcaacaccaacatcactacttataagctgggatgcccccgcagtcaccgtccgatactaccgcatcacatacggagaaacaggcggaaattcacccgtccaggagttcacagtaccggggagcaagagcaccgccacaatcagcggactcaaaccaggagtagactacaccataaccgtctacgcagtcaccggccgcggcgattcccctgcgtccagcaagcccatcagcatcaattaccgtaccgaaatagacaagccaagccaaatgcaagtaaccgacgtccaagataattcaatttcagtaaaatggctgccctcatcgagcccagtcacaggctatagagtaacaacaacacccaagaacggcccaggacctaccaaaactaaaacagcgggccccgaccaaaccgaaatgacaatagaaggcctccaacctaccgttgaatacgttgtctccgtgtacgcacaaaacccatccggagaatcccaaccactcgtccaaacagccgtcaccacaatccccgctcccacagatctaaaattcacccaagtgactccaacctccctatccgcacaatggaccccacccaacgtccaactcaccggctacagagtccgagtgacacccaaagagaaaactggacccatgaaggaaatcaaccttgcaccagattcaagcagcgtcgtagtctcaggactcatggtagcaaccaaatatgaagtctccgtctacgccctaaaagatacactcacatccagaccagctcaaggggtagtcaccaccctggaaaacgtcagcccaccccgccgggcaagggtcacggacgcgacagaaacgacaataacaatctcatggcgaaccaaaacggaaacgataacaggcttccaagtcgacgctgtgccagcgaacggccaaacccccatacagagaaccatcaaacccgacgtacgcagctacacaatcacgggcctccaaccagggacagactacaagatctatctatacactctaaatgataacgctcggagctcaccagtcgtaatcgacgcctccaccgcaatcgacgctcccagtaatttacgcttcctcgcaacgacaccgaactccctgctagtctcatggcaaccgccccgagcacgtattaccggctacattataaaatacgaaaaacccggctcacctccccgcgaagtcgtgccacgcccccgtcccggcgttacagaagcgacaattactggactagagcccggcaccgaatacaccatctacgtcatcgccctcaaaaacaatcagaagtccgagccgctcatcggccgtaagaaaaccgacgaactcccccaactcgtaaccctaccccaccccaatcttcacggacctgaaatcctagacgtgccatcaacagtacagaaaacccctttcgtcacccatccaggatacgacaccggtaacggcatacaactgcccggaaccagcgggcaacaaccctcagtcggtcaacaaatgatcttcgaagaacacggtttccgccgcaccaccccacccaccacagccacacccatccgacacagaccccgcccctaccctcccaacgtaggggaagaaatccaaataggacacatacccagagaggacgtagactaccacctctacccgcacggaccaggcctcaaccccaacgcatctaccgggcaagaagcattatctcaaaccacaatatcatgggctccattccaagacaccagtgagtatatcatatcatgccacccagttggaaccgacgaggaaccactacaattccgcgtacccggaacttccacctcagcaacactcacaggactaacccgaggcgccacctacaacataatagtcgaagccctaaaagaccaacaacgccacaaggtacgagaagaagtcgtaacagtaggaaactcagtcaacgaaggactaaatcaaccaaccgacgactcctgcttcgacccgtataccgtctcacactatgcagttggagacgaatgggaaaggatgtcagaatcaggcttcaagctcctatgccaatgcctaggtttcggatccggccacttccgctgcgactcctcacggtggtgccacgacaacggggtcaactacaagatcggcgagaaatgggatcgacaaggagaaaacggccaaatgatgtcctgcacatgcctcggtaacggaaagggcgaatttaagtgcgacccacacgaagccacatgctacgacgacggcaaaacctatcacgtaggggagcaatggcaaaaagaatacctaggcgccatttgctcctgtacctgcttcggcggccaacgcgggtggcgctgcgacaactgccgccgccccggcggagaaccctcacctgaaggcaccaccggacagtcatacaaccaatactctcaacgctaccaccaacgcacaaacacgaacgtcaactgccccatcgaatgtttcatgcccctcgacgtccaagccgaccgagaagattcccgcgagtag

SEQ ID NO: 4218 - RNA, 2685 nt, synthetic construct
  misc_feature 1..2685: note = BAG62178 variant
  source 1..2685: mol_type = other RNA
atgcgagtcacatgggctccaccaccctcaatagacctcacaaactttctagtcagatactcccccgtcaagaacgaagaagatgtagcagaactgtcgatctccccatccgacaacgccgtagtactcaccaacttacttcccggaacagaatatgtcgtaagcgtatcatccgtatacgaacagcacgaaagcaccccactccgcggccgacagaaaacgggcctcgactccccaacaggcatcgatttctccgatatcaccgcaaactcattcaccgtacactggatcgcgccccgcgccacaatcaccggctaccgtatacggcaccaccccgaacacttctctggccgcccccgcgaagatcgcgtcccccattcccgcaacagcataaccctcacaaacctaacccccgggaccgaatacgtcgtctccatcgtcgccctcaatggacgagaggaatcacccctcctaataggacaacaaagcacggtaagcgatgttccccgtgacctagaggtcgtggccgccaccccaacctcactcctcatcagctgggacgccccagcggtaacggtacgctactacagaatcacatacggagaaaccggcggcaactcccccgtccaagagttcacagtaccaggctcaaaatccaccgctacaatctccggccttaaacccggcgtcgactacaccataaccgtttacgcagtaaccggcagaggcgactcacccgcttcttcaaaacccatatccataaactaccgcaccgaaatcgacaaaccttcacagatgcaagtaaccgacgtccaagacaacagcatatcagtcaaatggctcccctcctcctctcccgtcaccggataccgcgttaccaccacccccaaaaacggccctggcccgacaaaaactaagaccgccggcccagaccaaactgaaatgactatagaaggactccatcccaccgtcgaatacgtggtctctgtatacgcacaaaaccccagcggcgagtctcagccgctcgtacagacagcagtcaccacaatcccagccccaacagacctcaaattcactcaagtcactcccacctcactctcagcccaatggaccccacccaacgtccaactaacaggctatcgagtccgcgtaactcccaaagagaaaacaggccccatgaaggaaataaaccttgccccagactcctcatccgttgtcgtatctggcctcatggtagccacaaaatacgaagtcagcgtctacgctctcaaagacaccctaacgtcccgccccgcccaaggggtcgttaccacactagaaaacgtatcacctcccagacgagcacgcgttacagatgcgaccgagaccacaatcactatatcgtggcgcaccaaaaccgaaacaattactggcttccaagtggacgccgtccccgccaacggccaaacccccatacagcgcaccatcaaacccgatgtccgctcatacaccatcacaggcctgcaacccggtacagattacaaaatatatctatacacactcaacgacaacgccagatcttctcccgtcgtcatcgatgcctcaactgccatagacgcacccagcaaccttcgcttcctcgccactacacccaactccctcctcgtatcgtggcagccaccccgtgcacggataacaggctacataataaaatatgagaaacccggcagcccacccagagaagtcgtaccccgtcccagacccggcgtaaccgaagccaccatcaccggcctcgaacccggcacagaatacacaatttacgtcatagccctcaaaaacaatcagaaaagcgagcccctcatcggtcgcaagaaaaccgggcaagaggcccttagccaaaccacaatttcgtgggctcctttccaagacacctcagaatacataatctcttgccacccagtagggaccgacgaagaacccctacaattccgcgtgccaggcacatcaacatctgcaactctaaccggacttacgcgaggggctacctacaacatcatcgtagaagcactcaaagaccaacaacgacacaaagttagagaagaagtcatcaccgtaggaaactccgtgaacgaaggtctcaaccaaccaacggacgacagctgcttcgatccctacaccgtatcgcactacgccgtaggagatgaatgggaacgcatgtcagagtcaggattcaaactcttatgccagtgcctagggtttggatccggccacttccgatgcgactcctcccgctggtgccacgacaacggagtcaactacaaaatcggcgaaaaatgggatagacaaggagaaaacggccaaatgatgtcctgcacgtgcctaggaaacggaaaaggcgagttcaaatgcgacccccacgaagcaacatgctacgacgacggcaaaacctaccacgtaggagaacaatggcaaaaagaatatctcggcgcaatctgctcatgtacctgcttcggtgggcagcgtggatggaggtgcgacaactgcagacgcccaggcggcgaaccatcccccgagggcactaccggacaaagctacaaccaatacagccaacgatatcaccaacgaaccaacacaaacgtaaactgccctatcgaatgctttatgcccctcgacgtccaagccgaccgagaagactcacgcgaatga

SEQ ID NO: 4219 - RNA, 1152 nt, synthetic construct
  misc_feature 1..1152: note = BAH12351 variant
  source 1..1152: mol_type = other RNA
atggccagcgccttccgactatcactcaaacccaaggtatccgacaacatgacccacctcatggtcgacttcagccaagaacgccaaatgctccaaacactaaaattcctcccagtccccaaagcacccgaaatcgacccagtcgaatgcctcgtcgccgacaactccgttaccgtagcctggcgcatgcccgaagaagacaacaaaatcgaccacttcatccttgaacaccgcaaaaccaacttcgacggcctcccccgcgtcaaggacgaacggtgctgggaaatcatcgacaacataaaaggcaccgagtacaccctctccggactcaaattcgactccaagtacatgaacttccgcgtccgcgcatgcaataaagccgttgccggcgaatactccgaccccgtcaccctcgagaccaaagccctcaacttcaacctcgataactcctcatcacacctcaatctaaaagtagaggacacatgcgtagaatgggaccccacaggaggaaaaggacaagaaagcaagatcaaaggaaaagaaaacaaaggctcagtccacgtcacctcactaaagaaacacacctctggcaccccctcacccaaacgcacaagcgtcggatcacgaccacccgcggtacgcggcagccgcgaccgattcaccggcgaatcctataccgtactcggcgacaccgcaatcgagtcaggccaacactactgggaagtcaaagcccaaaaagactgcaaatcatactccgtcggagtcgcctacaaaaccctaggcaaattcgaccaactcggcaaaacaaacacatcctggtgcatccacgtcaacaactggctacaaaacaccttcgccgccaaacacaacaacaaagtaaaagcactcgacgtcacagtacccgagaaaatcggagtcttctgcgacttcgacggcggccaactctcattctacgacgccaactccaaacaactcctctactcattcaaaaccaaattcactcaacccgtactccccggcttcatggtctggtgcggcggcctctccctcagcacaggcatgcaagtcccatcagccgtcagaaccctacaaaaatccgaaaacggaatgaccggctccgcctcctcactcaacaacgtcgtaacccaataa

SEQ ID NO: 4220 - RNA, 441 nt, synthetic construct
  misc_feature 1..441: note = BAH14175 variant
  source 1..441: mol_type = other RNA
atgcccccctccaaaccccacccccccgtcgtaggcaaagtcacccaccactccatcgaactctactgggacctcgaaaaaaaagccaaacgacaaggcccccaagaacaatggttccgcttctccatcgaagaagaagaccccaaaatgcacacctacggcatcatctacaccggctacgccaccaaacacgtcgtcgaaggcctcgaaccccgcaccctataccgcttccgcctcaaagtcacctccccctccggcgaatgcgaatactcccccctcgtctccgtctcaaccacctccgaatactcagaccgcccacactcccccctctcccgatccatggaaatgacctccaacctcgaaaaaatcttctgcctctccttcggcctcacccgctcacgcaacgacaccatcttcaaacactgcaacaacatctgctaa

SEQ ID NO: 4221 - RNA, 2055 nt, synthetic construct
  misc_feature 1..2055: note = EAX08810 variant
  source 1..2055: mol_type = other RNA
atggcagaacatccacctctcctcgacactacccagatcctaagctcagacatctccctactaagcgcaccgatcgtatccgcagacggcacacaacaagtaatcctcgtacaagtcaaccccggcgaagcattcactattcgccgcgaagacggccagtttcaatgcatcacaggtcccgcacaagtccccatgatgtcccccaacggatccgtgcccccgatatacgtacccccaggatacgcccctcaggtcatagaggacaacggcgtccgccgggtcgtcgtcgtaccgcaagcaccagagttccacccaggaagccacacagtacttcaccgatcgccacatccccctctcccaggcttcatcccagtcccaaccatgatgccacccccaccccggcatatgtacagccccgtcacaggcgccggagacatgaccacccaatacatgccacaataccaatcctcccaagtctacggagacgtagacgcacacagcacccacggccgctcaaactttcgcgacgaaaggagctcaaaaacctacgagcgtctccagaaaaagctcaaagaccgccaaggaacacaaaaagacaagatgtcatccccaccctcctccccgcaaaagtgccccagtccaatcaacgaacacaacggcctcatcaaaggccaaatagcgggaggaataaacacaggctccgccaaaatcaagtcaggcaaaggaaaaggaggaacccaagtcgacacagaaatcgaagaaaaagacgaagaaacaaaggcctttgaagctctcctctccaacatagtcaaacccgtcgccagcgacatacaagcccgcaccgtcgttctaacctggtccccacccagctcactcataaacggagaaaccgacgaatcaagcgtacccgaactctacggctacgaggtactaatctcctcaacaggaaaagacggaaaatataaaagcgtctacgtcggggaagaaacaaacataaccctaaacgacctaaaacccgccatggactaccacgcaaaagtgcaagcagaatacaacagcataaaaggcacccccagcgaagccgaaatcttcaccaccctctcctgcgagcccgacatacccaaccctcccagaattgcaaaccgtactaaaaactcactcacactccaatggaaagcaccctccgacaacggttcaaagatccaaaacttcgtcctagagtgggacgaaggcaaaggcaacggcgagttttgccaatgctacatgggctcgcaaaagcaattcaaaatcaccaagctctctcccgctatgggctgcaagttccggctatcagcaagaaacgactacggtaccagcggattcagcgaagaagtgctctactacacatcaggctgcgccccatcaatgccagcctcccccgttctcaccaaagccggtataacctggctcagtctccaatggtccaaaccctccggtacccccagcgacgaagggattagctacatcctcgaaatggaagaagaaacctccggctacggctttaaaccaaaatacgacggcgaagaccttgcttacacggtcaaaaacctccgccgctcaaccaaatataagttcaaagtaatcgcctacaactcagaagggaaaagtaacccctcagaagtcgtagagttcacaacctgccccgacaaacccggaatccccgtcaaaccctcagtcaaaggaaaaatccactcacacagcttcaaaataacctgggacccacccaaagacaacggaggcgccaccatcaacaaatacgtagtcgaaatggccgaaggatccaacggcaataaatgggaaatgatttatagtggcgccaccagagaacacctgtgcgaccgcctaaacccaggctgcttttaccgcctacgagtctactgcatttccgacggaggccaatcagccgtctcagaatcactactggtacaaacccccgccgtcccacccggcccctgcctacccccacggctccaaggccgcccaaaagcaaaagaaatacagacaccctccggataa

SEQ ID NO: 4222 - RNA, 492 nt, synthetic construct
  misc_feature 1..492: note = AAG35520 variant
  source 1..492: mol_type = other RNA
atgagcgaaagcggattcaaactgctatgccaatgcctaggattcggaagcggacacttcaggtgcgacagcagcagatggtgccacgacaacggagtaaactacaaaataggagaaaaatgggacagacaaggagaaaacgggcaaatgatgagctgcacatgcctaggaaacggaaaaggcgaattcaaatgcgacccacacgaagccacatgctacgacgacggaaaaacataccacgtcggagaacaatggcaaaaagaatacctaggagcaatatgcagctgcacatgcttcggaggacaaagaggatggagatgcgacaactgcagaagaccaggaggagaaccaagcccagaaggaacaacaggacaaagctacaaccaatacagccaaagataccaccaaagaacaaacacaaacgtaaactgcccaatagaatgcttcatgccactagacgtacaagcagacagagaagacagcagagaataa

SEQ ID NO: 4223 - RNA, 1143 nt, synthetic construct
  misc_feature 1..1143: note = AAA52471 variant
  source 1..1143: mol_type = other RNA
atgatgttctcaggcttcaacgccgactacgaagcatcctcatcccgatgctcatctgcatccccagccggcgactctctatcatattaccactctccagccgactccttctcctccatgggctcacccgtcaacgcacaagacttctgcaccgacctcgccgtctcctccgccaacttcatccccacagtaaccgctatctccacctcccccgacctccaatggctcgtccaacccgcactcgtctcctctgtagccccctcccaaacccgcgctccccaccccttcggcgtacccgcgccctccgcaggcgcctactcccgagcaggagtcgtcaaaactatgaccggaggtcgcgcccaatcaattggacgacgtggcaaagtcgaacaactatccccagaagaagaagagaaacggcgaatacgccgcgaacgcaacaaaatggccgccgcaaaatgccgcaaccgccgccgcgaactcacagacaccctccaagcagaaaccgaccaactcgaagacgaaaaatccgccctacaaaccgaaatcgccaacctcctaaaagaaaaggaaaaactcgaatttatactcgcagcccaccgccccgcctgcaaaatcccagacgaccttggcttccctgaagaaatgagcgtcgcctcactcgacctcaccggcggcctcccagaagtcgccacccccgaatccgaggaagccttcactctccccctcctcaacgacccagaacccaagccctcagtcgaacccgtcaaatccatctccagcatggaactaaagaccgaaccgtttgacgacttcctcttccccgcatcctcccgacctagcggctccgaaacagctcgctccgtccccgacatggacctctcaggctcattctacgccgccgactgggaaccactccactcgggttccctcggaatgggacccatggccacggaactcgaacccctctgcaccccagtagtaacctgtacaccctcctgcacagcatacacatcctccttcgtattcacataccccgaagccgactcattccccagctgcgccgcagcccatcgcaaaggctcctccagcaacgaaccctcatccgactccctatcatcccccaccctactcgccctctaa

SEQ ID NO: 4224 - RNA, 1296 nt, synthetic construct
  misc_feature 1..1296: note = AAG53607 variant
  source 1..1296: mol_type = other RNA
atgcccaatcctcgacccggcaaaccctcagcaccaagcctcgccttaggaccctccccaggagcatccccaagctggcgcgcagcacccaaagcatccgacctcctaggagcccgaggccccggcggcacatttcaaggccgcgacctacgaggaggtgcccacgcctcctcttcctcactcaaccccatgccaccctcccaactccaactacccaccctacccctcgtcatggtagccccctcaggtgcacgcctcggccccctcccccatctgcaagcactcctacaagaccgcccccacttcatgcaccaactctccacagtcgacgcacacgcccgcacacccgtcctacaagtacacccactcgaatccccagccatgatctcactcactccacccacaacagccaccggcgtcttctcactaaaagctcgccccggtctccctcccggcatcaacgtcgcctcacttgaatgggtatcccgcgaacccgccctactatgcacattccccaacccctccgcaccccgcaaagactccacactctctgccgtaccacaaagctcctacccactcctcgcgaacggcgtctgcaaatggcccggatgcgaaaaagtattcgaagaacccgaagacttcctcaaacactgccaagccgaccaccttctcgacgaaaaaggacgcgcccaatgcctcctccaacgagaaatggtacaatccctcgaacaacaactcgtcctagaaaaggaaaaactctcagccatgcaagcacatctagccggaaaaatggccctcaccaaagcatcctccgtcgcctcctcagataaaggatcatgttgcatcgtagcagcaggctcccaaggcccagtagttccagcctggtccggtccacgcgaagctcccgactccctcttcgcagtacgccgacacctctggggctcccacggtaactcaaccttccccgagttcctccacaacatggactacttcaaattccacaacatgcgaccacccttcacctacgccacactcatcagatgggccatactcgaagccccagaaaaacaacggaccctcaatgaaatctaccactggttcacacgcatgttcgccttcttccgcaaccaccccgccacatggaaaaacgccatccgccacaacctctcccttcacaaatgtttcgtacgcgtagaatccgaaaaaggcgcagtctggacagtcgacgaactcgagttccgcaagaaacgctcccaacgaccctcccgctgctccaacccaactccaggcccatag

SEQ ID NO: 4225 - RNA, 1098 nt, synthetic construct
  misc_feature 1..1098: note = AAA52639 variant
  source 1..1098: mol_type = other RNA
atgtggctacgctcacacagacaactttgcctcgccttccttctagtctgtgtcctctcagtaatcttcttcctccacatccaccaagactcattcccccacggactcggcctctccatactatgccccgaccgtcggcttgtcacccctcccgtcgccatattctgcctacccggcacagccatgggacccaacgcctcctcctcctgcccccaacaccccgcctcactctccgggacctggaccgtctaccccaacggcagattcggcaaccaaatgggacaatacgctaccctcctagccctcgcacaactcaacggacgccgcgccttcatcctccccgcaatgcacgcagccctagcccccgtcttccgaattaccctccccgtcctagccccagaagttgactcccgcaccccctggcgagaactccaacttcacgactggatgtcagaagaatacgccgacctccgcgaccccttcctaaaactttccggcttcccctgctcatggacattcttccaccacctccgcgaacaaatccgtagagaatttaccctccacgaccatctccgcgaagaagcccaatcagtactcggccaacttcgactcggacgaaccggcgaccgaccacgcaccttcgtcggcgtccacgtccgccgaggtgactacctccaagtcatgcctcaacgatggaaaggagtcgtcggcgactccgcctacctccgccaagccatggactggtttcgcgcccgccacgaagcccccgtcttcgtagtcacctccaacggcatggaatggtgcaaagaaaacatcgacacctcccaaggcgacgtaaccttcgccggcgacggccaagaagccaccccctggaaagacttcgccctcctaacccaatgcaaccacaccataatgaccataggcaccttcggtttctgggccgcctacctagccggcggagacactgtctacctcgccaacttcacactccccgactcagaatttcttaaaatattcaagcccgaagccgccttcctcccagaatgggtcggaataaacgcagacctctctcccctctggaccctcgccaaaccttaa

SEQ ID NO: 4226 - RNA, 1380 nt, synthetic construct
  misc_feature 1..1380: note = EAW58359 variant
  source 1..1380: mol_type = other RNA
atggcacccctctgcccctctccctggctcccactcctaatccccgcccctgcccctggccttacagtacaactcttactctccctcctcctcctcgttccagtccacccccaacgcttacccagaatgcaagaagactcacccctcggaggaggatcctccggagaagacgaccccctcggcgaagaagacctgccctccgaagaagactcccccagggaagaagacccacccggcgaagaagacctccccggagaagaagacctccccggagaagaagacctacccgaagtcaaacccaaatccgaagaagaaggctccctcaaacttgaagacttacccaccgtagaagccccaggcgacccccaagaacctcaaaacaacgcccaccgtgataaagaaggcgacgaccaatcacactggcgttacggcggcgacccaccctggccccgcgtctcccccgcatgcgccggtcgcttccaatccccagtcgatatccgaccccaactcgcagccttctgccccgccctacgcccattagaactgctcggcttccaactcccacccctccccgaactccgactccgcaacaacggccactcagtccaactaaccctaccacccggcctagaaatggcactaggacccggccgcgaataccgggccctacaactacacctccactggggcgccgccggccgacccggctccgaacacaccgtcgaaggccaccgtttcccagccgaaatacatgtcgtacacctctcaacagccttcgccagagtagacgaagccctcggccgtccaggcggcctcgccgtcctcgccgcattcctcgaagaaggacccgaagaaaactcagcctacgaacaactactctcccgcctcgaagaaatcgcagaagaaggctccgaaacacaagtcccaggactagacatatcagcactcctaccctccgacttctcccggtacttccaatacgaaggctccctcactacacccccatgtgctcaaggcgtaatatggaccgtattcaaccaaaccgtaatgctctccgccaaacaactacacaccctatcagacaccctctggggtccaggcgattcacgtctccaactcaacttccgggcaacccaacccttaaatggccgcgtcatcgaagcatccttcccagcaggggtcgattcgtcaccccgcgcagccgaaccagtccaactcaactcctgccttgccgcaggcgacatactcgcactcgtattcggcctcctcttcgccgtcacatccgtggccttcctcgtccaaatgcgccgccaacaccgccgcggcaccaaaggaggcgtatcctaccgtcccgccgaagttgcagaaacaggcgcataa

SEQ ID NO: 4227 - RNA, 417 nt, synthetic construct
  misc_feature 1..417: note = U19142.1 variant
  source 1..417: mol_type = other RNA
atgagctggcgcgggcgctcgacctatcgcccgcgcccgcgcagatacgtggaaccgcccgagatgataggcccgatgaggcccgagcaatttagcgatgaagtggaaccggccacgcccgaggaaggggaaccggccacgcaaaggcaagatccagcggccgcgcaagagggcgaggacgagggcgcgagcgcgggccagggcccgaaaccggaagcggactcgcaagagcaagggcacccgcaaacgggctgtgaatgtgaagatggcccggacgggcaagagatggatccaccgaacccggaagaggtcaagaccccggaagaggaaatgcgctcgcactatgtcgcgcaaacgggcatactctggctcttgatgaataactgcttcttgaacttgagcccgcgcaagccctag

SEQ ID NO: 4228 - RNA, 351 nt, synthetic construct
  misc_feature 1..351: note = AAH69397 variant
  source 1..351: mol_type = other RNA
atgagctggcgcgggcgctcgacatatcgaccgcgcccgcgcaggtacgtggaaccgcccgagatgataggcccgatgaggccagagcaatttagcgatgaagtggaaccggccacgcccgaggaaggggaaccggccacgcaaaggcaagatccagcggccgcgcaagagggccaggacgagggcgcgagcgcgggccagggcccgaaaccggaagcgcactcgcaagagcaagggcacccgcaaacgggctgtgaatgtgaagatggcccggacgggcaagagatggatcccccgaacccggaagaggtcaagaccccggaagagggcgagaaacagagccagtgctag

SEQ ID NO: 4229 - RNA, 357 nt, synthetic construct
  misc_feature 1..357: note = AAA82746 variant
  source 1..357: mol_type = other RNA
atgaacttgagcaggggcaagagcacgtactattggccgcgcccgcgcaggtacgtgcaaccgcccgaggtcataggcccgatgaggcccgagcaatttagcgatgaagtggaaccggccacgcccgaggaaggggaaccggccacgcaaaggcaagatcccgcggccgcgcaagagggcgaggacgagggcgcgagcgcgggccagggcccgaaaccggaagcggactcgcaagagcaagggcacccgcaaacgggctgtgaatgtgaagatggcccggacgggcaagagatggatcccccgaacccggaagaggtaaagaccccggaagagggcgagaaacagagccagtgctag

SEQ ID NO: 4230 - RNA, 354 nt, synthetic construct
  misc_feature 1..354: note = AAH69470 variant
  source 1..354: mol_type = other RNA
atgtcgtggaggggaaggagcacgtactattggccgagaccgagaaggtacgtgcaaccgccagagatgataggaccgatgaggccagagcaatttagcgatgaagtggaaccggcaacgccagaggaaggggaaccggcaacgcaaaggcaagatcccgcggcagcgcaagagggagaggacgagggagcgagcgcgggacagggaccgaaaccggaagcggactcgcaagagcaagggcacccgcaaacgggatgtgaatgtgaagatggaccggacgggcaagagatggatccaccgaacccggaagaggtaaagacaccggaagagggagagggacagagccagtgctag

SEQ ID NO: 4231 - RNA, 354 nt, synthetic construct
  misc_feature 1..354: note = AAA82748 variant
  source 1..354: mol_type = other RNA
atgtcgtggaggggaaggagcacgtactattggccgagaccgagaaggtacgtgcaaccgccagaggtaataggaccgatgaggccagagcaatttagcgatgaagtggaaccggcaacgccagaggaaggggaaccggcaacgcaaaggcaagatccagcggcagcgcaagagggagaggacgagggagcgagcgcgggacagggaccgaaaccggaagcggactcgcaagagcaagggcacccgcaaacgggatgtgaatgtgaagatggaccggacgggcaagagatggatccaccgaacccggaagaggtaaagacaccggaagagggagagaaacagagccagtgctag

SEQ ID NO: 4232 - RNA, 354 nt, synthetic construct
  misc_feature 1..354: note = AAA82749 variant
  source 1..354: mol_type = other RNA
atgtcgtggaggggcaggagcacgtactattggccgagaccgcgaaggtacgtgcaaccgccagaggtaataggaccgatgaggccagagcaatttagcgatgaagtggaaccggcaacgccagaggaaggggaaccggcaacgcaaaggcaagatccagcggcagcgcaagagggagaggacgagggagcgagcgcgggacagggaccgaaaccggaagcggactcgcaagagcaagggcacccgcaaacgggatgtgaatgtgaagatggaccggacgggcaagaggtagatccaccgaacccggaagaggtaaagacaccggaagagggagagaaacagagccagtgctag

SEQ ID NO: 4233 - RNA, 354 nt, synthetic construct
  misc_feature 1..354: note = AAC25989 variant
  source 1..354: mol_type = other RNA
atgtcgtggaggggcaggagcacgtactattggccgagaccgagaaggtacgtgcaaccgccagagatgataggaccgatgaggccagagcaatttagcgatgaagtggaaccggcaacgccagaggaaggggaaccggcaacgcaaaggcaagatccagcggcagcgcaagagggagaggacgagggagcgagcgcgggacagggaccgaaaccggaagcgcactcgcaagagcaagggcacccgcaaacgggatgtgaatgtgaagatggaccggacgggcaagagatggatccaccgaacccggaagaggtaaagacaccggaagagggagagaaacagagccagtgctag

SEQ ID NO: 4234 - RNA, 351 nt, synthetic construct
  misc_feature 1..351: note = AAC33676 variant
  source 1..351: mol_type = other RNA
atgagctggcgcgggcgctcgacatatagaccgagaccgagaaggtacgtggaaccgccagagatgataggcccgatgaggccagagcaatttagcgatgaagtggaaccggccacgccagaggaaggggaaccggcaacgcaaaggcaagatccagcggccgcgcaagagggagaggacgagggcgcgagcgcgggccagggcccgaaaccggaagcggactcgcaagagcaagggcacccgcaaacgggctgtgaatgtgaagatggcccggacgggcaagagatggatccaccgaacccggaagaggtcaagacaccggaagagggcgagaaacagagccagtgctag

SEQ ID NO: 4235 - RNA, 1344 nt, synthetic construct
  misc_feature 1..1344: note = AAA35657 variant
  source 1..1344: mol_type = other RNA
atggaactccttaaacttaaccgctccgtccaaggcaccggccccggacccggcgcctccctctgccgccccggcgcacccctcctcaactcttcttccgtcggcaacctcagttgcgaaccccccaggatccgtggcgccggcacccgcgaattagaactcgcaatccgcatcacactctacgctgtaatcttcctaatgtcagtaggaggcaacatgttaatcatcgttgtactcggcctctcacgtcgcctccgcacagtaaccaacgccttcctactctccctcgcagtctccgacctcctcctcgccgtcgcatgcatgcccttcaccctgctccccaacctaatgggaactttcatatttggcaccgtcatctgcaaagcagtctcctatctcatgggcgtttccgtctctgtctccaccctctccctcgtcgccatcgcgctagaacgctactccgccatctgccgcccccttcaagcccgcgtatggcaaacacgctcacacgctgctcgggtcatcgtagcaacctggctactctccggacttctcatggttccctacccagtttacacagtcgtccaacccgtcggcccgcgagtcctacaatgcgtccaccgatggccctccgcccgcgtccgccaaacctggtcagtcctcctccttttacttctattcttcatccccggcgtcgtcatggcagtcgcttacggcctgatctcccgagaactctatctcggcctccgcttcgacggcgactctgactccgactctcaatcccgcgtcagaaaccagggcggcttacccggcgccgtccaccaaaacggccgctgcagacccgaaaccggcgccgtcggcgaagattctgacggctgttacgtacaactaccacgctcccgccccgctctagaactcaccgcactcaccgctcccggccccggctccggctcccgacccacacaagccaaactccttgccaaaaaacgcgtcgtccgtatgctcctagtcatagtcgtcctcttcttcctttgctggctcccagtatactcagcaaacacctggcgagccttcgacggccccggcgcccaccgcgcactctccggtgcccccatctccttcatccacctcctttcctacgcctcagcatgcgtcaaccccttagtctactgcttcatgcaccgccgtttccgacaagcatgccttgaaacctgcgcacgatgctgccccagaccaccccgtgcccgtcctcgagcactccccgatgaagatccccccacaccctccatcgcctccctctcccgcctctcatacaccaccatctccaccctcggccccggctaa

SEQ ID NO: 4236 - RNA, 2226 nt, synthetic construct
  misc_feature 1..2226: note = AAD22449 variant
  source 1..2226: mol_type = other RNA
atggccctattcaccccctggaaactctcctctcaaaaactcggattcttcctcgttacgttcggctttatctggggaatgatgctcctccacttcacaatccaacaacgtacccagcccgaaagctcctccatgctacgcgaacaaatactcgacctctcaaaacgctacataaaagcccttgccgaagaaaatcgaaacgtcgtcgacggcccctacgcaggcgttatgaccgcatacgaccttaagaaaaccctcgctgtactcctcgacaacatcctccaacgcataggcaaacttgagtcaaaagtcgacaacctagtagtcaacggaacaggtacaaacagcaccaactcaaccaccgccgtcccttccctcgtcgccctcgagaaaataaacgtagcagacataatcaacggcgcacaagaaaaatgcgttctcccacccatggacggatacccacattgcgaaggcaaaatcaagtggatgaaagacatgtggcgctccgacccctgttacgcagattacggagtagacggttcaacctgctcctttttcatctacctctccgaagtggaaaactggtgcccacacctaccttggcgcgccaagaacccctacgaagaagccgaccacaactcacttgccgaaatacgcactgactttaacatcctctactcaatgatgaagaaacacgaagagtttagatggatgcgactccgtatccgtcgaatggccgacgcctggatccaggcgataaaatccctcgctgaaaaacaaaaccttgaaaaacgcaaacgaaagaaagtcctcgtgcacctaggcctgctaacaaaagaatcaggattcaaaatagccgaaacagccttctccggcggcccactcggcgagctagtacaatggtcggacctaataacgtccctctacctcctaggccacgacatccgcatatcagcctccctagccgaactaaaagaaataatgaagaaagtcgtcggaaaccgaagcggctgccccacagtaggcgaccgcatcgtcgaactaatctacatcgacatcgtcggcctcgcccagttcaagaaaaccctgggcccgtcctgggtccactaccaatgcatgctacgcgttctagactcattcggcaccgaaccagagttcaaccacgccaactacgcccaatccaaaggtcacaaaacaccctggggaaaatggaaccttaatccacaacaattctacaccatgttcccccacacccctgacaacagcttcctaggatttgtcgtagaacaacacctcaactcatccgacatccaccacataaacgagatcaaacgccagaaccaatccctagtatacggcaaagtcgactcattctggaaaaacaagaaaatatacctcgacatcatccacacgtacatggaagtccacgccactgtttacggctctagcacgaaaaacataccgtcatacgtgaaaaaccacgggatcctctcagggcgtgacctccagttcctcctccgcgaaacaaaacttttcgtcggcctaggtttcccctacgagggacccgccccgctagaagcaatcgccaacggctgcgcgtttctcaatcccaaattcaatcccccaaaatcatccaaaaacacagacttcttcatcggaaaacccaccttacgtgaactcacgagccaacacccctacgccgaagtcttcatcggccgtccgcacgtctggacagtcgacctaaacaaccaagaagaagtcgaagatgccgttaaagccatccttaaccagaaaatcgaaccatacatgccatacgagtttacctgcgagggcatgctccaacgcatcaacgctttcatcgaaaaacaagacttctgccacggccaagtcatgtggccgcccctatcagccctccaagtaaaactggccgagcccggacaatcctgcaaacaagtgtgccaagaatcccagctcatctgcgaaccctccttctttcaacatctaaacaaagacaaagacatgttaaaatacaaagtcacgtgtcaatcaagcgaactcgccaaagacatcctcgttcccagcttcgaccccaaaaacaaacactgcgtgttccaaggcgacctcctcctcttttcatgcgccggtgcacacccacgacaccaacgcgtctgcccctgccgcgacttcataaaaggtcaggtggcgctctgcaaagactgcctatag

SEQ ID NO: 4237 - RNA, 1743 nt, synthetic construct
  misc_feature 1..1743: note = EAX11770 variant
  source 1..1743: mol_type = other RNA
atggcgggcaccgtacgtaccgcctgcctcgtcgtagccatgctactatccctagacttccccggacaagcccaacccccaccacccccacccgacgcaacctgccaccaggtacgctcattcttccaacgcctccagcccggcctcaagtgggtcccagaaaccccagtcccaggctccgacctccaagtctgcctccccaagggaccaacatgctgctcccgtaaaatggaagaaaaataccaactcaccgcccgccttaacatggaacaactcctacaatcagcctccatggagctaaaattcctaatcattcagaacgccgccgtcttccaagaagcctttgaaattgtagtccgccacgctaaaaactataccaacgccatgtttaaaaacaactacccctccctcacaccccaagccttcgagttcgtaggcgagttctttaccgacgtctctctctacatactcggctccgacataaacgtcgacgacatggtcaatgaacttttcgattccctcttccccgtcatatacacccaactcatgaaccccggactcccagactcagccctcgacataaacgaatgcctacgtggcgcccgccgagacctcaaggtcttcggaaacttcccaaaactcatcatgacccaagtatcaaaatcacttcaagtcacccgaatcttcctacaagccctaaacctcggcatcgaagtcataaacaccaccgaccacctgaaattctcaaaggattgcggaagaatgcttacacgcatgtggtactgctcatactgccaaggactcatgatggtcaaaccatgcggaggctactgcaacgtagtaatgcaaggctgcatggccggcgtagtcgaaatcgataaatactggcgcgaatacatcctctcactcgaagaactcgtcaacggcatgtaccgcatctacgacatggaaaacgtgctactcggactcttctctacaatccacgactccatacaatacgtccaaaagaacgccggcaagctcaccacaacaataggaaaactatgcgcccactcccaacaacgtcagtaccgctccgcctactatccagaagacctcttcattgacaagaaagtcctcaaagtcgcacacgtcgaacacgaagaaactctctcctcacgccgacgcgaacttatccagaaactcaaatcattcatctccttttacagcgccctcccagggtacatctgctcccactcccccgtagccgaaaacgacactctctgctggaacggacaagagctagtcgaacggtactcccaaaaagctgcacgcaacggcatgaaaaaccaattcaacctacacgaactcaaaatgaaaggcccagaacctgtcgtcagccaaatcatcgacaaactgaaacacatcaaccaactactccgtaccatgtcaatgcctaaaggccgggtcctcgacaaaaacctagatgaagaaggcttcgagtcaggagactgcggtgacgacgaagacgaatgcatcggaggcagcggagacggaatgatcaaagtcaagaaccaactacgcttccttgccgagctggcctacgaccttgacgtagacgacgccccgggaaacagccaacaagcaacacctaaagacaacgaaatctccactttccacaacctcggcaacgttcacagtcccctaaaactcctcacctccatggccatctccgtcgtctgctttttcttcctcgtacactaa

SEQ ID NO: 4238 - RNA, 1743 nt, synthetic construct
  misc_feature 1..1743: note = AAA93471 variant
  source 1..1743: mol_type = other RNA
atggctggcacagttcgcaccgcatgcctagttgtcgccatgctcctctcactagacttccctggccaagcacaacccccacccccgccacccgacgcaacctgccaccaagtccgcagcttcttccaacgactccagcccggcctcaaatgggtacccgaaaccccagtccccggctccgatctccaagtctgcctcccaaaaggccctacctgctgcagcagaaagatggaagaaaaataccagctgacagcccgacttaacatggaacagctactccaatctgcctctatggaactcaaattccttatcatccaaaacgccgccgtcttccaagaagccttcgaaatcgtagtacgccacgccaagaactacaccaacgccatgttcaaaaacaactaccccagcctgacaccccaagcctttgaatttgtcggcgagttcttcaccgacgtctcactttacatcctcggatcagacattaacgtcgacgacatggtcaacgaactcttcgactccctcttccctgtcatctacacccaactcatgaacccaggcctccccgattccgccctcgacataaacgaatgcctacgcggagcaagacgcgacctcaaagtcttcggaaacttccccaaactcataatgacccaagtctcaaagtccctacaagtcacacgcattttcctacaagccctcaacctcggcatagaagtcatcaacaccaccgaccatctcaaattctccaaagactgcggccgcatgctcacccgcatgtggtactgctcatactgccaaggcctcatgatggtcaaaccatgcggcggctactgcaacgtcgtaatgcaaggatgcatggctggcgtagtcgaaatcgacaaatactggcgcgaatacatcctctccctcgaagaactcgtgaatggcatgtacagaatctacgacatggagaacgtcctactaggcctattcagcacaatacacgactccatccaatacgttcagaaaaacgccggcaaactcacaacaaccattggcaaactgtgcgcccactcccaacaaagacaataccgctctgcctactaccccgaagacctcttcatcgacaagaaagtactaaaagtagcacacgtagaacacgaggaaaccctcagctcccgccgccgcgaactcatacaaaaattaaagtccttcatcagcttctacagcgccctcccaggctacatttgctcccacagcccagtagccgaaaacgacaccctctgctggaacggccaggaactcgtcgaacgctactcacaaaaagccgcccgcaacggcatgaaaaaccaattcaacctacacgaactcaaaatgaaagggcccgaacccgtcgtatcccaaatcatagacaaattaaaacacattaaccagctactccgcaccatgtccatgccaaaaggccgcgtcctcgacaaaaacctagacgaagaaggctttgaatccggagactgtggagacgatgaagacgaatgcatcggaggctccggcgacggcatgatcaaagtgaaaaaccaactccgcttcctagccgaactagcatacgacctcgacgtggacgacgcacccggcaactcacaacaagccacaccaaaagacaacgaaatctccacatttcataacctcggcaacgttcattcacccctcaagctcctcacatctatggccatatccgtagtatgcttcttcttcctggtccactaa

SEQ ID NO: 4239 - RNA, 1743 nt, synthetic construct
  misc_feature 1..1743: note = AAH35972 variant
  source 1..1743: mol_type = other RNA
atggccggcacagtacgaaccgcctgcctagtagtcgccatgctcctctccctagatttcccaggacaagcacaacccccaccacccccaccagacgccacatgccaccaagtccgtagctttttccaacgacttcaacccggcctcaaatgggtccccgaaacaccagtcccaggcagcgacctccaagtatgcctccccaaaggaccaacctgctgctcacgcaaaatggaggaaaaataccagctaacagcacggctcaacatggaacaactactccaatccgcctctatggaactcaaattcttaatcatccaaaacgccgccgtattccaagaagccttcgaaatcgtcgtacgccacgccaaaaactacactaacgccatgttcaaaaacaactacccctccctcacccctcaggcattcgagttcgtcggggagttcttcacagacgtatccctctacatcctcggctccgacatcaacgtcgacgacatggtcaacgaactcttcgactcactcttccccgtaatatacacacaactcatgaaccccggcctccccgacagcgcccttgacatcaacgaatgccttagaggggccagacgcgacctcaaagtattcggaaacttccccaaactgatcatgacccaagtcagcaaatcactccaagtaacacgaattttccttcaggccttaaacctgggcatagaagtcatcaacacaacggaccacctgaaattctccaaagactgcggacgaatgctaacccgcatgtggtactgctcctactgccaaggactcatgatggtcaaaccctgcggcggctactgtaacgtcgtcatgcaaggctgcatggccggcgtcgtcgaaatagacaaatactggcgagaatacatcctgtccctagaagaactggttaacggcatgtacagaatctacgacatggaaaacgtcctcctaggcctattctcaaccatccacgacagcatccaatacgtacagaaaaacgcaggcaaactgaccactacaattggtaaactatgcgcacactcccaacaaagacaataccgcttcgcctactacccagaagatctcttcatcgacaagaaagtactaaaagttgcccatgtcgaacatgaagaaacactatcatcaagaagacgcgaactcatccaaaaacttaaatcgttcatctccttctactccgccctacccggatacatctgctcccactcacccgtcgccgaaaacgacaccctctgctggaacgggcaagagctcgtcgagcggtactcccaaaaggcagcccgaaatggcatgaaaaaccaattcaacctacacgagctcaaaatgaagggcccagaacccgtagtctcccaaatcatcgacaaactcaaacatatcaaccaactactccgcaccatgtcaatgccaaaaggacgagttctcgacaaaaacctcgacgaagaaggattcgaaagcggagattgcggagacgacgaagatgaatgcatcggcggctcaggcgacggcatgataaaagtgaaaaaccaactccgattcctggccgaactagcctacgacctcgatgtggacgacgcacccggcaactctcagcaagccacaccaaaagacaacgaaatctcaaccttccacaacctcggcaacgtccacagtcctctgaaactactcacatccatggcgatctccgtcgtctgcttcttcttcctcgtacactaa

SEQ ID NO: 4240 - RNA, 1683 nt, synthetic construct
  misc_feature 1..1683: note = EAW93784 variant
  source 1..1683: mol_type = other RNA
atggaatgcctttactacttcctaggcttcctactactcgcagcccggctccccctagacgcagccaaaagattccacgacgtcctaggcaacgaacgcccctcagcctacatgcgcgaacacaaccaactcaacggatggtctagcgacgaaaacgactggaacgaaaaattataccccgtctggaaacgcggcgacatgcgctggaagaactcctggaaaggcggccgtgtccaagccgtcctcacctcggactccccagcccttgtcggctccaacataacctttgccgtcaaccttatcttcccccgatgccaaaaagaagacgcgaacggcaacatcgtctacgagaaaaactgccgcaacgaagccggcctctccgcagacccctacgtatacaactggacagcctggtctgaagactccgacggtgaaaacggcacaggacaatcccaccacaacgtcttccccgacggaaaacccttcccccaccaccccggctggcgccgctggaacttcatctacgtcttccataccctaggtcaatatttccaaaaactcggccgatgctccgtccgcgtcagcgtaaataccgccaacgttacactcggcccacaactcatggaagtgacggtctaccgccgtcacggccgagcatacgtacccatagcacaagtcaaagacgtatacgtcgtcaccgaccaaatacccgtattcgtcacaatgttccagaaaaatgaccgcaactcatcagacgaaacattcctcaaagacctccccatcatgtttgacgtcctcatccacgacccctcccacttcctcaactattccactatcaactacaaatggtcattcggcgataacaccggactctttgtctccaccaaccacacagtcaaccacacatacgtcctcaacggcaccttcagcctcaacctcaccgtaaaagccgccgcccccggcccctgtcccccaccaccgccccctccccgaccctcaaaacccaccccctcactcggccccgctggagataacccgctcgaactcagccgaatccccgacgaaaactgccaaataaatcgatacggacatttccaagctaccatcactatcgtcgaaggaatcctcgaagtcaacataatccaaatgaccgacgtcctgatgcccgtaccgtggcccgagtcatccctcatcgactttgtcgtaacctgccaaggcagcataccaactgaagtctgcacgatcattagcgatcccacgtgcgagatcacacagaacaccgtctgctccccagtcgacgtcgacgaaatgtgcctactcaccgtacgacgaaccttcaacggaagcggaacctactgcgtgaacctcaccctcggagacgacacctcactcgccctcacctcaaccctaatctctgtcccggaccgagacccagcctcacccctacgcatggccaactccgccctcatatccgtcggctgcctagccatattcgtcacagttatcagcttgctagtctacaagaaacacaaagaatacaaccccatcgaaaactccccgggcaacgtcgtacgctccaaaggcctatcggtcttcctcaaccgcgcaaaagccgtctttttcccaggtaaccaagaaaaggacccattactcaaaaatcaagaatttaaaggagtctcctaa

SEQ ID NO: 4241 - RNA, 1719 nt, synthetic construct
  misc_feature 1..1719: note = AAH32783 variant
  source 1..1719: mol_type = other RNA
atggaatgcctctactacttcttaggcttcctcctccttgctgcccgcctccccctcgacgccgccaaaagattccatgacgtcctcgggaacgagcgcccctccgcatacatgcgagaacacaaccaactaaacggctggtcctcagacgaaaacgattggaacgaaaaactatacccagtctggaaacgcggagacatgcgctggaaaaactcctggaaaggtggccgagttcaagccgtcctcacctccgactcccccgcgctagtaggctccaatatcaccttcgcagtaaacctaatcttcccccgctgccagaaagaagacgccaatggcaacatcgtctacgagaaaaactgccgtaacgaagcaggactatccgccgacccttacgtatacaactggaccgcctggtcagaagactctgacggagagaacggcacaggtcaatcccatcacaatgtatttcccgacggcaaaccattccctcaccaccccggctggcgccgctggaacttcatctacgtcttccacaccctaggtcaatacttccaaaaactcggcagatgctccgtccgcgtctccgtcaatacagcaaacgtcacccttggcccacaactcatggaggttacagtctaccgcagacacggccgtgcctacgttcccatagctcaagtaaaagacgtctacgtcgttaccgaccaaataccagtattcgtcaccatgttccaaaagaacgacagaaactcctccgacgaaactttcctcaaagacctccctatcatgttcgacgtcctcatccatgaccccagccacttcctgaactacagcaccatcaactacaaatggtcttttggcgacaacacaggcctcttcgtctccaccaaccacaccgtaaaccacacctacgtcctcaacggtaccttttccctcaacctcaccgtcaaagcagccgcacccggcccctgcccaccaccaccacccccaccccgcccctccaagcccaccccctcacttgctaccaccctaaagtcctacgactctaacacccccggccccgccggcgacaaccccctcgaactctcaagaatccccgacgagaactgtcaaatcaaccgatacggccacttccaagccaccatcaccatcgtcgaaggcatactggaagtaaacataatccaaatgaccgacgtcctaatgcccgtcccctggcccgaatcatccctcatagacttcgttgtaacatgccaaggcagcataccaacagaagtttgcaccattatctcagacccaacctgcgaaatcacccaaaacaccgtgtgctcccccgtcgacgttgacgaaatgtgccttttaaccgtccgccgcaccttcaacggatcaggcacctactgcgtaaaccttacactcggagacgacacatccctcgcattgaccagcaccctaatatccgtccccgaccgcgaccccgcatcacccctccgaatggccaactccgccctcatctccgtcggctgcctagcaatcttcgtaaccgtcatctccctactcgtctacaagaaacacaaagaatacaaccctatcgaaaactctcccggcaacgttgtccgttccaaaggactctccgtcttcctcaaccgcgcaaaagcagtcttcttccccggcaaccaagaaaaagaccccctccttaaaaaccaagagttcaaaggcgtctcctaa

SEQ ID NO: 4242 - RNA, 621 nt, synthetic construct
  misc_feature 1..621: note = CAD43718 variant
  source 1..621: mol_type = other RNA
atggaatgcctatactacttcctcggcttcctcctcctagccgcccgcctccccctcgacgccgccaaacgattccacgacgtcctcggcaacgaacgcccctccgcctacatgcgcgaacacaaccaactcaacggctggtcctccgacgaaaacgactggaacgaaaaactgtacccagtatggaaacgcggcgacatgcgctggaaaaactcctggaaaggaggacgcgtacaagccgtcctcacctccgactcccccgccctcgtcggctcaaacatcaccttcgccgtaaacctcatcttcccccgatgccaaaaagaagacgccaacggcaacatcgtctacgaaaaaaactgccgcaacgaagccggcctctccgccgacccctacgtctacaactggaccgcctggtccgaagactccgacggcgaaaacggcaccggccaatcccaccacaacgtcttccccgacggcaaacccttcccccaccaccccggctggcgccgctggaacttcatctacgtcttccacaccctcgactggctcctccaaacccccaaactcctcctctacctctccctcaaattccaaccctccctcttcctcctctacaactga

SEQ ID NO: 4243 - RNA, 621 nt, synthetic construct
  misc_feature 1..621: note = AAH11595 variant
  source 1..621: mol_type = other RNA
atggaatgcctctactacttcctaggcttcctcctcctcgccgcccgcctccccctagacgccgccaaacgattccacgacgtactaggcaacgaacgaccctccgcctacatgcgcgaacacaaccaactaaacggctggtcctccgacgaaaacgactggaacgaaaaactctaccccgtctggaaacgcggcgacatgcgctggaaaaactcctggaaaggcggccgcgtacaagccgtcctcacctccgactcacccgccctcgtcggctcaaacatcaccttcgccgtcaacctcatcttcccccgctgccaaaaagaagacgccaacggaaacatagtctacgaaaaaaactgccgcaacgaagccggcctctccgccgacccctacgtctacaactggaccgcctggtcagaagactcagacggcgaaaacggcaccggccaatcccaccacaacgtcttccccgacggcaaacccttcccacaccaccccggctggcgccgctggaacttcatctacgtcttccacaccctcggctggctcctacaaacacccaaactcctactctacctctccctcaaattccaaccttccctcttcctcctctacaactaa

SEQ ID NO: 4244 - RNA, 2640 nt, synthetic construct
  misc_feature 1..2640: note = CCDS5600.1 variant
  source 1..2640: mol_type = other RNA
atgaagatgctgacccgcctccaggttctgaccttggccctcttcagcaaaggcttcctgttatccctcggggaccataatttcctgaggcgcgagatcaagatcgagggagatctggtcctcggcggcctgttccccattaacgagaaggggacgggcactgaggagtgcggccggatcaatgaggatcgcgggatccagcggctggaggccatgctgtttgcgatcgatgagatcaataaggacgattacttgctgccgggcgtaaagctcggggtgcacatcctcgacacgtgcagccgcgacacctacgcactggagcaatccctcgagttcgtccgggcctcactgaccaaggtagacgaggccgaatacatgtgccccgacgggtcttacgccatccaggagaacatccccttgctcatcgcgggggttatcgggggcagctactccagcgtctccatccaagtggccaatctgctgcgcttattccaaatcccccagatcagctacgcctcgaccagcgcaaaactgagtgacaagagccggtacgactacttcgcgcggacagttccgcccgacttctatcaggcgaaggccatggcagagatcctgcggttcttcaactggacctacgtctccactgtggccagcgaaggggactacggcgagacggggatcgaggcgttcgagcaggaggcccgcctccggaatatctgcatcgccacggccgaaaaggtgggccgctcaaacatccgcaagagctacgactctgtcatccgggagctcctgcagaaacccaacgcacgggtggttgtcctcttcatgaggagtgacgactctcgtgagctgatcgcggccgcctcccgcgccaacgccagcttcacctgggtggcctccgacggctggggcgcgcaggagagcatcatcaaggggtccgaacacgtggcctacggggctataacactggagctggccagccagcccgttcggcagttcgatagatactttcagtccctgaacccgtataacaaccaccgaaacccatggttccgggacttctgggaacagaagttccagtgcagcctccaaaacaagcgcaaccaccggcgcgtgtgcgacaagcacctcgccatcgattcctcaaactacgagcaggaaagtaagataatgttcgtggtcaacgccgtgtacgccatggcccacgcgctgcacaagatgcagcggaccctttgccccaacactaccaagctctgcgacgccatgaaaatcctggacggcaagaaactgtacaaggactacctcctgaagatcaacttcacggctcccttcaaccctaacaaggacgccgactctatcgtgaagttcgacacattcggggacggcatgggccgctacaacgtcttcaattttcaaaacgtcgggggcaaatactcctacctgaaagtcggtcactgggccgagaccctcagcctggacgtaaactccatccactggagccggaactccgtgcccacaagccagtgctccgacccctgcgcgcccaacgagatgaagaacatgcagccgggcgacgtctgctgctggatctgcatcccctgcgaaccctacgagtacctggccgacgagttcacttgcatggactgcgggagcggccagtggcccactgctgacctcaccggctgctacgacctgccggaggattacatacgctgggaagacgcctgggccatcgggcccgtaaccatcgcgtgcctgggctttatgtgtacctgcatggtggtcaccgtgttcatcaagcacaacaatacgcccctggtgaaggccagcgggagagaactctgctacatcttactgtttggcgtcgggctatcctactgcatgaccttcttcttcattgccaagcccagcccggtaatctgcgcgctgcgccggctgggcttaggctccagcttcgccatctgctacagcgctctgttgaccaagaccaactgcatcgcgcgtatctttgacggggtgaagaacggcgctcagcggcccaagttcatcagcccctcaagccaagtctttatatgcttagggttgatccttgttcagatcgtcatggtctccgtctggctcattctggaagcccccggcacccgccggtacacgctcgcagagaagcgcgagacggtgattctcaaatgcaacgtcaaggacagctccatgctgatcagcctgacttacgacgtgatcctcgtaatactgtgcaccgtgtacgccttcaagacccggaagtgcccggagaatttcaacgaggcaaagtttatcggtttcacgatgtacacgacttgcatcatctggctggccttcctccccatcttctatgtgacatccagtgactaccgcgtgcagaccaccaccatgtgcatctccgtctcactgtccgggttcgtggtgctgggatgcctcttcgccccaaaggtccacatcatcctgttccagccgcagaagaatgtggtgacccaccggctgcacctgaaccggttcagcgtctcagggacgggcaccacctactcccagagctccgcgagcacctacgtgcccaccgtctgcaacggtcgcgaggtcctcgactccacgacctcctccttataa

SEQ ID NO: 4245 - RNA, 1947 nt, synthetic construct
  misc_feature 1..1947: note = CCDS4977.1 variant
  source 1..1947: mol_type = other RNA
atgagccaccacggcggagcacccaaagcaagcacgtgggtagtggcgagccgacggtcaagcactgtatcacgcgccccggagcggcgccccgccgaagaactcaaccgaacaggccccgaggggtactccgtcgggagaggaggcagatggcggggcaccagccgcccaccggaagccgtggcagcaggacacgaagaactacccctatgctttgcactgaaatcacacttcgtaggagccgtaataggacgcggaggctctaaaatcaagaatatccaaagcacaacaaacacaaccatccagataatccaagaacaaccggaatcactcgtaaaaatattcggaagcaaagccatgcagacgaaagccaaagcggtcatagacaactttgtcaaaaagctagaagaaaactacaactccgaatgcgggatagacaccgccttccaaccctccgtaggcaaggacggcagtaccgacaataacgtagtagccggcgaccgaccactaatcgactgggaccaaatccgcgaagaagggctcaagtggcagaagaccaaatgggcagacctccctcccatcaagaaaaacttctacaaagaatcaacagcaacaagcgccatgagcaaagtagaagccgacagctggcgaaaagaaaacttcaacatcacatgggacgacctcaaagacggtgaaaaacgccccatccccaatccaacatgcacattcgacgacgccttccaatgttaccccgaggtcatggagaacatcaaaaaggcaggcttccaaaaacccacccccatacaatcacaagcgtggccaatagtgctgcaaggcatagacctcatcggcgtagcccaaacaggaacaggcaaaacactctgctacctcatgcccggattcatacacctagtgctacaaccatccctaaaaggacaaagaaacaggcccggcatgctagtcctaacaccaacccgtgaactagccctgcaagtagaaggagaatgctgcaagtactcgtacaaaggtcttagaagcgtatgcgtctacggcggcggcaaccgagacgaacaaatcgaagaactcaagaaaggagtagacataatcatcgccacgcccggacgcctcaacgacctccaaatgtcgaacttcgtaaacctcaaaaacataacctatctcgtactagacgaagcagacaaaatgctggacatgggattcgaacctcaaataatgaaaatactactcgacgtccgacctgacagacaaaccgtcatgacaagcgccacttggccccacagtgtgcaccgccttgcgcaaagctacctaaaagagcccatgatagtctacgtcggcacactcgaccttgtcgccgtcagctcagtcaaacaaaacatcatcgtcaccacagaggaggagaaatggagccacatgcaaaccttcctccagagcatgtccagcaccgacaaagtaatagtattcgtaagccgaaaagcagtcgcagaccacctctccagcgacctcatactaggcaacatcagcgtcgaaagcctccacggcgacagggagcaacgagaccgggaaaaagcactagaaaacttcaaaacaggcaaagtaagaatactaatcgcaaccgacctggcctcacgcggactagacgtccacgacgtaacacatgtctacaacttcgacttcccccgaaacatagaagagtacgtccacaggatcggacgcacgggacgagccggacgaacaggagtgtccataaccacgctaacgcgaaacgactggcgcgtcgcctcagaactcataaacatcctcgaaagggccaaccaaagcattccggaagaactcgtctctatggcagagcgattcaaagcacaccaacagaagcgcgagatggaacgcaaaatggaacgccctcaaggacgacccaaaaagttccactaa

SEQ ID NO: 4246 - RNA, 1209 nt, synthetic construct
  misc_feature 1..1209: note = ACD02430 variant
  source 1..1209: mol_type = other RNA
atggcccaaaaagaaggcggccgcaccgtcccgtgctgcagcagaccaaaggtcgcagccctaacagcgggcaccctcctgctactaaccgcaatcggcgcagcgagctgggccatcgtagcggtcctgctccgatccgaccaagagccactgtaccccgtccaggtatcaagcgcagacgcccgcctaatggtgttcgacaaaacagaaggaacctggcgccttctatgcagctcacgatcaaacgcacgagtagccggactcagctgcgaagaaatgggcttcctcagagccctaacacacagcgaactcgacgtcaggaccgcaggcgcgaacggaaccagtggcttcttctgcgtcgatgaaggacgactgccccacacacaacgcctactcgaagtcataagcgtctgcgactgcccacgcggacgcttcctcgcggccatatgccaagactgcggcagacgcaaactaccggtcgaccgcatagtcggaggcagggacacaagccttggcagatggccatggcaagtctcactcagatacgacggagcccacctatgcggaggctcactactgagcggggactgggtactgacagcagcccactgcttccccgaacgcaaccgcgtgctctcacgatggcgagtcttcgcaggcgcggtagcccaagcaagcccacacggacttcaattaggagtccaagcagtggtataccacgggggatacctcccattcagagacccaaactcagaagagaactccaacgatattgcgctcgtacacctgagctcgccactaccactgacagaatacatacaaccagtatgcctaccagcagcaggacaggccctagtcgacggcaaaatctgcaccgtaaccggatgggggaacacgcaatactacggccaacaggccggagtactacaagaagccagagtaccaatcatatccaacgacgtctgcaacggcgccgacttctacgggaaccagatcaagcccaaaatgttctgcgcaggataccccgaaggcggaatagacgcttgccaaggagactcgggcggacccttcgtctgcgaagacagtataagcagaacccccagatggcgactctgcggaattgtgagctggggcacaggatgcgcactggcacaaaaaccaggagtatacacgaaagtaagcgactttagggaatggatcttccaataa

SEQ ID NO: 4247 - RNA, 1254 nt, synthetic construct
  misc_feature 1..1254: note = AAA36013 variant
  source 1..1254: mol_type = other RNA
atggcccaaaaagaaggaggccgaacagtcccatgctgtagccgccccaaagtcgccgcactaaccgccggaacactactactcctgactgccatcggagcagcaagctgggccatcgtagcagtcctactaagaagcgaccaagaacccctataccccgtacaagtctcgagcgcagacgcccgcctaatggtattcgacaaaacggaaggaacctggcgcctactatgcagctcaaggtcaaacgcacgcgtggcagggctatcatgcgaagaaatgggattcctacgcgccctaacccacagcgaactcgacgtaaggacagcaggcgcaaacgggacctcaggcttcttctgcgtcgacgaaggccgcctaccacacacacaacgcctattagaagtcataagcgtctgcgactgcccgcgaggaagattcctcgcagcaatatgccaagactgcggcagacgaaagctcccagtcgaccggatagtcgggggccgggacaccagcctaggaagatggccatggcaagtctccctcaggtacgatggcgcgcacctctgcggaggctcactactaagcggagactgggtactaaccgccgcccactgcttccccgagagaaaccgcgtactatcccgatggcgagtattcgccggcgcagtcgcgcaggcaagcccacacggactccagctcggcgtccaagccgtagtctaccacgggggctacctccccttcagagacccaaactcagaagaaaactcaaacgacatcgccctagtccacttaagctcgcctctccccctaacagaatacatccaaccagtctgcctaccagcagcaggccaagcactcgttgatggcaaaatctgcactgtgaccggatggggaaacacccaatactacggccaacaagccggagtactgcaagaagcccgcgtacctatcataagcaacgacgtatgcaacggcgccgacttctacggaaaccaaatcaaaccaaaaatgttctgcgcaggttaccccgaaggaggaatcgacgcctgccaaggagactcaggaggcccattcgtctgcgaagactccataagcagaaccccacgctggagactctgcggaatcgtaagctggggaacaggatgcgccctcgcccaaaaaccgggcgtctacacaaaagtaagcgacttccgcgaatggatattccaagcaatcaaaacacacagcgaagcatcaggcatggtcacacaactgtaa

SEQ ID NO: 4248 - RNA, 2940 nt, synthetic construct
  misc_feature 1..2940: note = BAG62073 variant
  source 1..2940: mol_type = other RNA
atggaactagccgctctctgccgatggggcctcttacttgcactcctccctccaggtgccgcatcaacacaggacaactacctcagcacagacgtaggatcctgcacgcttgtttgccccctccacaaccaggaagtcacagcagaggatggcacccaacggtgcgaaaaatgttccaaaccctgcgcacgcgtctgctacggattaggcatggaacacctccgggaggtcagagcagtcacctccgccaacatacaagagttcgcaggatgcaaaaagatcttcggcagcctcgcattccttccagaatccttcgacggggatcccgcaagcaacacagcacctctacagcccgaacaactccaagtattcgaaacactcgaagaaataacaggatacctgtacatatcagcttggccagattcactcccagacctaagtgtcttccagaacctacaggtcataaggggccgcatcctacacaacggagcctactcccttacactccaaggcctagggatctcctggctaggattacgcagcctccgcgaactgggaagcggactagcattaatacatcacaacacacacttatgcttcgtccacaccgttccatgggaccaactcttccgcaacccccaccaggccctcctccacactgccaatagaccagaagacgaatgcgtcggagaggggctcgcctgccatcaattgtgcgccagaggccactgctggggcccaggccccactcaatgtgtaaactgctcccaattccttcgcggccaggaatgcgtggaggagtgcagagtactgcaaggcttaccgcgagaatacgtcaatgccagacactgcctgccttgccaccccgaatgccaaccccaaaacggatcagttacatgcttcggcccagaagccgatcagtgcgtcgcatgcgcccactacaaagatccaccattctgcgtagcacgctgcccaagcggagtgaaacccgacctatcctatatgcccatctggaaattccccgacgaagaaggcgcctgccaaccctgccccatcaactgcacacactcctgtgtcgacctagacgacaaagggtgcccggcggaacagcgcgcaagccctctaacctccataatctccgccgtcgtcggcatcctactcgtagtcgtcctcggggtggtcttcggaatactcatcaaacgacgccaacagaaaatacgaaaatacactatgcgacgcctactacaagaaacagaactcgtcgaacccctgaccccaagcggggcgatgcccaaccaagcgcaaatgcgaatactaaaagaaaccgaactacgcaaagtaaaggtcctaggctcaggtgccttcggtaccgtatacaaaggcatttggatcccagatggcgagaacgtcaaaatccccgtcgccataaaagtactccgcgaaaacacatctccaaaggcaaacaaagaaatcctcgacgaggcatacgtcatggccggcgtaggcagcccttacgtctcaagactactcggcatatgtctgacctcaaccgtgcagctagtcacacaactaatgccctacggctgcctactcgaccacgtcagagagaaccgaggaaggctaggatcacaagaccttctcaactggtgcatgcaaatagccaaaggcatgtcctacctcgaagacgtccgtctagtccacagagacctggcagctaggaacgtgctcgtcaaatcaccgaaccacgtcaaaataacagattttggactcgcacgactactcgacatagacgaaaccgaataccatgcagatggaggaaaggttcccatcaagtggatggccctagaatccatactacgacgacgattcacacaccaatccgacgtctggtcttacggtgtaaccgtctgggagctcatgaccttcggtgctaaaccctatgatggcattcccgctagagaaataccagacctactcgaaaaaggtgagcgactaccccagccacctatctgcacaatagatgtctacatgataatggtcaaatgctggatgatagacagcgaatgtcggccccgctttcgcgagctcgtctccgagttctcccgaatggcccgcgacccacaacgcttcgtcgtgatccaaaacgaagacctaggcccggcctcacccctggactccactttctaccgctcgctccttgaagacgatgacatgggagacctagtggacgccgaagaatatctcgtcccacagcagggcttcttctgccccgatccagcccccggcgcaggcggcatggtacaccaccgacaccgcagctcgagcacacgctcaggaggaggagatcttacacttggactcgaaccgtcagaagaagaggcccccaggtcaccactcgcaccatcggaaggagccggaagcgacgtattcgacggggacctaggaatgggcgccgcaaaaggactacaatccctacctacacacgacccaagcccgctgcaacgctatagcgaagacccgaccgtacccctaccctcggaaacggacgggtacgtcgcacccctaacgtgctccccacaaccagaatacgtgaatcaaccggacgtccgccctcaaccacccagcccccgcgaaggccccctaccagccgcaagacccgccggagccaccctcgaacgtccaaaaaccctctcacccggcaaaaacggagttgtcaaagacgtatttgccttcggaggagccgtcgaaaaccccgagtacctaacaccccaaggaggggccgcgccacaaccacatcccccacccgctttcagtcccgcattcgacaacctatactactgggaccaagacccacccgaaaggggcgcaccaccctcaaccttcaaaggcactcccaccgccgagaaccccgaatacctcggactcgacgtccccgtctga

SEQ ID NO: 4249 - RNA, 264 nt, synthetic construct
  misc_feature 1..264: note = CCQ43016 variant
  source 1..264: mol_type = other RNA
atgatgcgcatgaaaaccttcgtcatgatccacttccacctcatgaacggcggcaaagccaaactctactcccgcccccacgccaaactcctccccgaacaacgcgtcaccgacaaaaccggcgcccccgtcgaatggcccggccaaacccaatgctccaccgaaacccaaaccctcgccgccatgcccgcccaagccgtcatgcgcgtcacctgcaccgtcgtcgacatgcacaaatccgaatgcgcccccgcccaaacctaa

SEQ ID NO: 4250 - RNA, 3768 nt, synthetic construct
  misc_feature 1..3768: note = AAI67147 variant
  source 1..3768: mol_type = other RNA
atggaactagcagccctctgtcgctggggactgctcctcgcactattgcccccaggagcggcaagcactcaagtctgcaccggcaccgatatgaaactacggttgcccgccagtcccgagacccaccttgacatgctccgccatctctatcaaggctgccaagtggttcaaggtaacctagaactgacttacttacccacaaacgcgtccctgagcttcctccaagacattcaagaagtacaaggatacgttttaatcgcccacaatcaagtccgtcaagtaccattacaaagactacggatcgttaggggaacacaactattcgaagacaactacgcactcgcagtcctcgacaatggggacccactaaacaacaccacaccagtcacaggagccagccccggcggactccgagaactacaattaagatccctaactgaaatactcaagggaggcgttctgatccaacgcaacccacaactgtgctaccaagacaccatcctctggaaagacatcttccataaaaacaaccagctcgcattaaccctcatcgatacaaaccgatcaagagcatgtcacccctgcagccccatgtgcaaaggctcccgctgctggggagagtcctctgaagactgccaatccctgacgcgcacagtgtgcgcagggggctgcgcacgatgcaaaggaccacttccaaccgattgctgccacgaacaatgcgcagcgggatgtacaggtcccaaacacagcgactgcctagcatgcctccacttcaatcattcaggtatttgcgaattacactgccccgccctcgtaacgtacaacacagacacctttgaaagcatgccaaacccagagggccgctataccttcggtgcctcctgcgtcactgcttgcccatacaactacctgtctaccgacgtaggaagttgcaccctagtatgcccccttcacaaccaggaagtaaccgcagaagacggcacacaacgttgcgagaaatgcagtaaaccatgcgcacgcgtctgctacggcctaggcatggagcacctacgtgaagtacgtgcagtaactagcgccaacatacaagagttcgccggatgcaagaaaatcttcggatcgctagcattcctacctgagtcattcgacggagaccctgcatcaaatacagcaccacttcagcccgaacaactccaggtattcgaaaccctcgaagaaataaccggttatttatacataagcgcctggccagactcactacccgacctatcagtctttcaaaacctacaggtaatcagaggtagaatacttcacaatggagcctactcattaaccctacaaggccttggcatctcatggttgggcttacgatcgctccgagaactaggctcgggcctagcactcatccaccacaacacccacctttgttttgtccacaccgttccatgggaccaactatttcgcaacccccaccaagcgctcctccatacagcaaaccgcccagaagacgaatgcgtaggagaagggctcgcttgccaccagctatgcgctcggggccactgctggggccccggcccgacacaatgcgtaaactgctcacaattcctccgcggacaggagtgcgtagaagagtgccgcgtccttcaaggtctcccccgcgaatacgtcaacgctcgccactgccttccctgtcacccagaatgccaaccccaaaacggctcagtgacatgtttcggcccggaagcagaccagtgcgtagcatgtgcccactataaagacccaccattttgcgtggcccgctgcccatcaggcgtaaaaccagacctatcatacatgccaatctggaaattcccggacgaggaaggggcgtgccaaccctgtcccattaactgcacgcactcctgtgtagatctggatgacaaaggctgccccgctgaacaacgtgccagccccctcacatcgatcatatccgccgtagtcggcatccttctagtagtagtgctaggagtcgtatttggcatcctcataaaacgacggcaacagaaaatccgaaaatacactatgcgccgactgctccaggaaacggagctagtcgaacccctcacaccttcaggcgcaatgcccaaccaggcacaaatgcgaatactcaaagaaacagaactccgtaaagtgaaagtacttgggtcgggagccttcggcacagtttacaaaggcatctggatccctgacggagaaaacgtcaaaatacctgtcgccattaaagtactgcgagaaaacaccagccctaaagccaacaaagaaatcctcgacgaagcatacgttatggcgggcgtcggcagcccatacgtctctcgtctcctaggaatctgtctcacctcaacagttcagctagtaactcaactaatgccttacggctgcctcctcgaccatgtacgcgaaaaccgtggccgcctcggatcccaagatctcttgaactggtgcatgcaaatagccaaaggaatgtcttacctcgaagacgtcagactcgtccaccgtgatctcgcagctcgcaacgtcctcgtaaaatcccctaaccatgtcaaaatcaccgatttcggcctcgcccgcctcctggatatcgacgaaaccgaataccacgcagacgggggtaaggtacccataaaatggatggccctcgaaagcatactaagacgccgcttcactcatcaatccgatgtttggtcctacggcgtcacagtatgggaacttatgaccttcggtgcgaaaccctatgacggaatcccagcgcgtgaaatccccgacctcctcgaaaaaggagaacgcctaccgcaaccgccgatctgtacaatagatgtctacatgatcatggtaaaatgctggatgatagactccgagtgcagaccccgctttcgcgagctagtttccgagttctcccgaatggcccgtgacccccaaagattcgtagtcatccaaaacgaagacctcggcccagcctcccctctggacagtaccttctaccgatccttactagaagatgatgacatgggcgacctcgtagacgccgaagaataccttgtcccccagcaaggattcttttgccccgaccccgcgcccggcgcaggaggcatggtacaccatcgtcacagatctagctcgactaggtcaggcggcggcgacctcactcttggcctagaaccctcggaagaagaggccccacgcagcccgttagcaccatccgaaggcgccggctctgacgtattcgacggagacctaggaatgggtgccgccaaaggtctccaatcgcttccgacccacgatccaagccccctacaaagatactcagaggacccgactgtccccctaccgtccgaaacagacggctatgtcgcgcccctaacttgctcacctcaacccgaatacgtaaaccaacctgacgttcgcccccaacccccatcgccgagagagggacccctacctgccgcccgccccgccggcgcaacgctcgagcgccccaagacactctcccccggcaaaaacggcgtcgtcaaagacgtctttgccttcggcggcgctgtggagaacccggaatacctaacacctcagggcggtgccgctccccaacctcacccacctccggctttcagccccgcattcgataacctctactattgggaccaggacccacccgaacgaggagcacccccttcaacgttcaaagggaccccgactgccgaaaacccagaatacctcggcttagacgtgccagtataa

SEQ ID NO: 4251 - RNA, 1260 nt, synthetic construct
  misc_feature 1..1260: note = AAD56009 variant
  source 1..1260: mol_type = other RNA
atggaactagccgccctctgccgatggggactactcctcgccctcctacccccaggagccgcctccacacaagtctgcaccggcaccgacatgaaactccgcctacccgcatcaccagaaacacaccttgacatgctccgccacctctaccaaggctgccaagtagtacaaggcaaccttgaactcacctacctaccgaccaacgcctcactctccttcctccaagacatccaagaagtacaaggatacgtcctcatagcccacaaccaagtccgccaagtccccctccaacgactacgcatagtccgcggcacccaactcttcgaagacaactacgccctcgcagtcctagacaatggcgaccccctaaacaacaccacaccagtcaccggagcctcccccggcggcctccgcgaactacaactaagatcactaacagaaatcctcaaaggaggcgtcctcatacaacgcaacccccaactctgctaccaggacaccatcctctggaaagacatcttccacaaaaacaaccaacttgccctcaccctaatcgacaccaaccgctcacgagcctgccatccatgctcacccatgtgcaagggatcccgctgctggggcgaatcctccgaagactgccaatccctaacacgcaccgtctgcgccggaggctgcgcccgatgtaaaggcccgctccccaccgactgctgccacgaacaatgcgcggccggctgcactggccccaaacactccgactgcctagcatgtctacacttcaaccactccggcatctgcgaactccactgccctgccctagtaacctacaacaccgacaccttcgaatccatgcccaacccagagggccgctacaccttcggcgcatcatgcgtaaccgcctgcccctacaactatctctccaccgacgtcggctcctgcacactcgtctgccccctccacaaccaagaagtcactgcagaggacggaacccaacgctgcgaaaaatgctccaagccatgcgcaagaggcacacattcactccctcctcgtcccgccgcagtccctgtccccctccgcatgcaacctggcccagcacaccccgtcctcagcttcctccgaccctcatgggacctagtctccgcattctactcactacccctcgccccactctcccccacttccgtccccatctcccccgtctctgtaggtcgaggacccgacccagacgcccacgtagcagtagacctctcccgctacgaaggctaa

SEQ ID NO: 4252 - RNA, 546 nt, synthetic construct
  misc_feature 1..546: note = U70863.1 variant
  source 1..546: mol_type = other RNA
ggctcccactcgatgaggtacttcttcacaagcgtgagcaggccagggcgcggggaaccacgcttcatcgcggtcggatacgtggacgacacccagttcgtgcgattcgactcggacgcggcctcgcaaaggatggagcccagagccccgtggatagaacaggaaggacccgagtactgggacggggaaacgcgaaaggtaaaggcccacagccaaacccaccgcgtggacctgggcacgctcagaggatactacaaccaatcggaagcaggctcgcacacagtccagcgaatgtacgggtgcgacgtcgggagcgactggaggttcctacgcggataccaccaatacgcctacgacgggaaagactacatagccctgaaagaggacctgcgctcgtggacagccgcggacatggccgcgcaaacgacaaagcacaagtgggagacagcgcacgtggccgagcaactgcgcgcgtacctggaagggacctgcgtcgaatggctaagaagatacctagaaaacggcaaggaaacactccagcgaacg

SEQ ID NO: 4253 - RNA, 543 nt, synthetic construct
  misc_feature 1..543: note = AH009136.2 variant
  source 1..543: mol_type = other RNA
tcgcactcgatgagatactttttcacgagcgtgagcaggcccgggcgcggggaaccgcgctttatcgcggtcgggtacgtagacgatacccagttcgtgcgatttgactcggacgcggcctcgcaaaggatggagcccagagccccgtggatagaacaggaagggcccgagtactgggacggggaaacgcgcaaggtcaaggcccatagccagacccatagagtggacttgggcacgctcaggggctattacaaccaatcggaagcaggatcgcacacggtacagcgcatgtacgggtgcgatgtcgggagcgattggaggttcttgcgcgggtaccaccaatatgcctatgacgggaaagattacatagccctgaaagaggacctgcgctcgtggacggccgcggacatggccgcgcaaacgaccaagcacaagtgggaggccgcgcacgtagccgagcaactgcgagcgtacctggaagggacctgcgtcgagtggttgcgcaggtacctggaaaatggcaaggaaacgctccagcgcacg

SEQ ID NO: 4254 - RNA, 705 nt, synthetic construct
  misc_feature 1..705: note = AAG09781 variant
  source 1..705: mol_type = other RNA
atgctccgcgtccccgaaccccgccccggcgaggccaaagcagaaggcgcagccccacccaccccctccaaacccctcacctccttcctcatccaagacatactccgcgacggcgcacaacgccaaggaggccgcacctcatcccaacgccaacgcgacccagaacccgaacccgaaccagaacccgaaggcggacgctcccgcgccggagcacaaaacgaccaactctccactggaccccgcgccgcccccgaagaagcagaaaccctcgccgaaacagaacccgaacgccacctaggctcctacctactcgactccgaaaacacctcaggcgccctcccccgactaccacaaacccccaaacaaccacaaaaacgctcccgcgccgcattctcacacacccaagtcatagaactcgaacgaaaattctcccaccaaaaatacctatccgcccccgaacgcgcccacctcgccaaaaacctcaaactcaccgaaacccaagtcaaaatctggttccaaaaccgacgctacaaaacaaaacgaaaacaactctcttcagaactcggcgacctcgaaaaacactcctccctcccagcactcaaagaagaagccttctccagagccagcctcgtctccgtctacaactcctacccttactacccctacctatactgcgtcggctcctggtcccccgccttctggtaa

SEQ ID NO: 4255 - RNA, 942 nt, synthetic construct
  misc_feature 1..942: note = BAG37303 variant
  source 1..942: mol_type = other RNA
atggcatcattccgcaaactaaccctcagcgaaaaagtccccccaaaccaccccagccgcaaaaaagtcaacttcctcgacatgtccctcgacgacatcatcatatacaaagagctcgaaggcaccaacgccgaagaagaaaaaaacaagagacaaaaccactccaaaaaagaatcaccctcccgacaacaatcaaaagcccaccgacaccgccaccgccgcgattactcccgctgccgctccaacagcgaagagggcaaccacgacaaaaaaccctcacagaagccatcaggtttcaaaagcggtcaacaccccctcaatggccaacccctaatcgaacaagaaaaatgcagcgacaactacgaagcccaagccgaaaaaaaccagggccaatcagaaggcaaccaacaccaatccgaaggcaacccagacaaatcagaagaatcccaaggccaacccgaagaaaaccaccactccgaaagatcccgcaaccacctcgaacgctccctaagccaatccgaccgatcccaaggccaactaaaacgacaccacccacaatacgaacgctcacacggacaatacaaacgctcccacggccaatccgaacgctcccacggccactcagagcgctcccacggccactctgaacgcagccacggtcactccgaacgatcacacggccactccaaacgttcccgctcccaaggcgatctagtcgacacccaatccgacctaatcgcaacccaaagagacctaattgctacccaaaaagacctaatcgccacccaacgagacctcatcgccacccaacgagacctcatcgtcacacaacgagacctcgtcgcaaccgaacgcgacctaatcaaccaatcaggacgctcccacggccaatccgaacgccaccaacgatactcaaccggtaaaaacaccatcaccacctaa

SEQ ID NO: 4256 - RNA, 942 nt, synthetic construct
  misc_feature 1..942: note = AAI28135 variant
  source 1..942: mol_type = other RNA
atggcatccttccgcaaactcaccctatcagaaaaagtccccccaaaccacccctcccgcaaaaaagtaaacttcctagacatgtccctcgacgacatcataatctacaaagaactcgaaggaaccaacgccgaagaagaaaaaaacaagcgccaaaaccacagcaaaaaagaatccccctcacgacaacaatcaaaagcccaccgtcaccgacaccgccgcggctactccagatgcagaagcaactccgaagaaggcaaccacgacaaaaaaccctcccaaaaaccttccggcttcaaatccggacaacaccccctcaacggacaacccctcatcgaacaagaaaaatgctcagacaactacgaagcacaagccgaaaaaaaccaaggccaatcagaaggcaatcaacaccaatccgaaggcaaccccgacaaatccgaagagtcccaaggacaacccgaagaaaaccaccactccgaacgttcccgcaaccacctcgaacgctccctcagccaatccgaccgctcacaaggccaactcaaacgtcaccacccacaatacgaacgctcccacggccaatacaaacgctcccacggccaatcagaacgctcacacggccactccgaacgctcccacggccattccgaacgatcacacggtcactccgaacgatcccacggccacagcaaacgatcccgatcacaaggagacctcgtcgacacacaatccgacctcatagcaactcaacgagacctcatcgccacccaaaaagacctcatcgcaacacaacgcgacctcatcgcaacccagagagacctcatcgtcacacaacgagacctcgtcgccaccgaacgcgacctcatcaaccaatccggccgctcacacggacaatccgaacgacaccaacgctactccaccggtaaaaacaccattaccacctaa

SEQ ID NO: 4257 - RNA, 384 nt, synthetic construct
  misc_feature 1..384: note = 12543784 variant
  source 1..384: mol_type = other RNA
atgatcaaaaaaaacctcaaaaaactcggcatcgaagaaacctacctcaacatcatcaaagccatctacgaccgccccaccgcctccatacaaaaaaccgaaaacctctccaccaaaaccggcacctcccaagaataccacctctcccccctctggttctacatcgtcctcgaaatcctcgcctccaccatccgccaagaaaaaaacctaaaagacatccacaccgaaaaagaagaagtcaaactctccctcttcgccgacgccatgatcctctacctcaaaaaacccaacgactccacccgcaaactcctcgaactcatcaaaaaaatccactcatcctgccgcatcaaaatcaacatccacttcgccttctgctcccaataa

SEQ ID NO: 4258 - RNA, 1926 nt, synthetic construct
  misc_feature 1..1926: note = AAA63226 variant
  source 1..1926: mol_type = other RNA
atggcaaaagcggccgcaatcgggatcgacctagggaccacatactcatgcgtaggcgtgttccaacacggcaaagtagaaataatagcaaacgaccaaggaaaccgaaccaccccatcatacgtggccttcacggacaccgaaagactaataggggacgcagccaagaaccaggtcgcgctcaacccacaaaacacggtctttgacgccaaacgactaataggcagaaaattcggcgacccagtagtccagagcgatatgaagcactggccattccaagtcatcaacgacggggacaaacccaaggtccaagtatcgtacaagggcgagaccaaggccttctacccggaagaaatctcgagcatggtcctgacaaaaatgaaggagatcgccgaggcctacctcgggtacccagtaacaaacgcagtcataaccgttcccgcctacttcaacgacagtcagcgacaggcaacaaaagacgcaggggtcatagccgggctaaacgtcctccgaataatcaacgaaccaacagccgccgcgatcgcatacggactcgaccgaacgggaaaaggagagcgcaacgtcttgatatttgacttaggaggcggcacattcgatgtctcaatcctcacaatagacgatggaatcttcgaagtcaaagccacagccggcgacacccatctgggcggggaagacttcgacaacagactcgtaaaccacttcgttgaggagttcaagagaaagcacaagaaagacatctcacaaaacaaacgggccgtacgcagactcagaaccgcatgcgagcgcgccaaaaggaccctaagctcgagcacgcaagcaagtttagaaatagactcgctattcgaggggatagacttctacacctcaataacaagagcacgcttcgaagaactatgtagcgacctcttccgctcaaccctcgaaccggtcgaaaaagcgttaagagacgcgaaactggacaaagcccagatccatgacctggtactggtcgggggatcaaccagaatcccgaaagtgcaaaagctcctgcaagacttcttcaacggacgagaccttaacaaatcaatcaaccccgacgaggcagtagcgtacggagccgcagtacaagccgcaatccttatgggagacaaatccgaaaacgtacaagacctattgctactagacgtagcacctctatccctagggctagaaaccgcaggaggagtcatgaccgcactaataaaaaggaactcgacaataccaacaaaacaaacccagatcttcaccacctactcggacaaccaaccaggcgtcctcatccaagtatacgaaggcgagcgcgccatgacaaaagacaacaacctcctaggacggttcgagctatccggaataccacccgctccccgaggagtcccccaaatcgaagtgaccttcgacatagacgcgaacggaatcctaaacgtgacagcgaccgacaaatcgaccggaaaagcgaataaaatcacgataacaaacgacaaggggcgattatccaaggaagaaatagaacgaatggtccaagaagcagaaaaatacaaggccgaagacgaggtccagcgagaacgagttagcgcgaaaaacgcactggaatcatacgccttcaacatgaaaagcgcggtcgaggacgaaggcctgaaaggaaaaatctccgaagcagacaaaaagaaagtcctagacaaatgccaagaggtcatcagctggctagacgccaacacactcgctgaaaaagatgagttcgaacataaaagaaaagaactagaacaggtctgcaaccccataattagtggactgtaccaaggcgcaggaggccccggccccggaggcttcggcgcacaaggaccaaaaggcggaagcggatccggccccaccatcgaagaagtggactag

SEQ ID NO: 4259 - RNA, 1926 nt, synthetic construct
  misc_feature 1..1926: note = AAA63227 variant
  source 1..1926: mol_type = other RNA
atggccaaagcggcagcaatagggatcgaccttggtaccacgtactcgtgcgtgggcgtgttccagcacgggaaagtagagataatcgcgaacgatcaaggaaacaggaccacgccctcatacgtggccttcacagacacagaacgactgataggagacgccgcaaagaaccaggtagccctaaacccccaaaacactgtcttcgacgcaaaaaggctaatcggaagaaaattcggagacccagtggtacagagcgatatgaagcactggcccttccaagttataaacgacggagacaaacccaaagtccaggtatcctacaaaggagaaaccaaagccttctacccggaagagatctcgagcatggtcctgacaaaaatgaaagaaatcgccgaggcctacctcggatacccggtcacaaacgcggtgatcaccgtgcccgcatacttcaacgacagccagcgccaggctacgaaggatgctggagtcatcgccgggctaaacgtcctacgcataatcaacgaaccaaccgcggccgcaatcgcgtacggcctggatcgaacaggcaaaggagagagaaacgtactaatcttcgacctgggtggcgggacattcgacgtatcgatcctaacaatagacgacgggatcttcgaggtaaaggccacggccggagacacacacctgggcggcgaagacttcgacaacaggctcgtgaaccactttgtagaagagttcaagcgcaagcacaagaaagacatctcacaaaacaaaagagcagtacgccgactcagaacagcatgcgagagagcaaaaaggaccctaagttccagcacacaagcaagcctagaaatagacagtctctttgaaggaatcgacttctacacatcaataacgagagcgagattcgaggaactctgcagcgacctattccgatccactctagaaccggtcgagaaagccctaagagacgcgaaattggacaaggcccagattcatgacctagtgctggtaggaggcagcacccggatcccgaaagtacaaaaacttctacaagacttcttcaacgggcgggacctaaacaaatcgatcaaccccgatgaagcagtcgcgtacggggcagcggtacaagccgcgatactaatgggagacaagagcgagaatgtacaggatctactcttactggacgtagccccgctctcactaggactcgagaccgcgggcggggtgatgacagcgctcataaagagaaactccacaatacccacgaaacagacccaaatcttcaccacgtactcagacaaccaaccgggcgtactaatccaagtgtacgagggcgaacgggcgatgacgaaagacaacaacctcctcggcaggttcgaactttcgggcataccaccggccccacgcggggtcccacaaatagaagtgaccttcgacattgacgcaaacgggatactcaacgtgaccgcgaccgacaaaagcacaggaaaagcgaacaagatcacgataacaaacgataaaggccgcctaagcaaagaggagatcgaacgaatggtgcaagaagcggaaaagtacaaagcagaggacgaggtacagcgcgaacgagtaagcgcgaaaaacgcactagaatcgtacgcgttcaacatgaagtccgcagtagaggatgagggcctaaaagggaaaataagcgaagccgataaaaagaaagtgctcgacaaatgccaggaggttataagctggctagacgctaacaccctagccgaaaaagacgagttcgaacacaaaaggaaagagctcgaacaagtgtgcaaccccataatttcgggcctataccaaggcgcgggagggcctgggccagggggctttggcgcgcaaggaccaaagggcggaagcggaagcggacctacgatagaggaagtggactag

SEQ ID NO: 4260 - RNA, 627 nt, synthetic construct
  misc_feature 1..627: note = AAI21098 variant
  source 1..627: mol_type = other RNA
atggccctcggccaaaaactcttcatcaccatgtcacgcggcgccggccgactccaaggaaccctctgggccctcgtcttcctcggcatcctcgtcggcatggtcgtccccagccccgcaggaacccgagccaacaacaccctgctcgactcccgcggctggggcacccttctaagccgctcccgcgccggcctcgccggcgaaatcgccggcgtaaactgggaatccggctacctcgtcggcatcaaacgccaacgacgcctatactgcaacgtcggcatcggattccacctacaagtcctacccgacggccgcatctccggcacacacgaagaaaacccctactccctcctcgaaatctccacagtcgaacgcggcgtcgtctcactcttcggcgtccgcagcgccctcttcgtcgcaatgaactcaaaaggccgcctctacgccaccccctcattccaagaagaatgcaaattccgcgaaaccctcctacccaacaactacaacgcctacgaatccgacctctaccaaggcacctacatcgccctctcaaaatacggccgagtcaaacgaggctccaaagtctccccaatcatgaccgtcacccacttcctcccacgaatctaa

SEQ ID NO: 4261 - RNA, 1569 nt, synthetic construct
  misc_feature 1..1569: note = BAA74724 variant
  source 1..1569: mol_type = other RNA
atgccaagagcacccagatgtcgtgcggtacgatcacttctcagatcccactaccgcgaagtactcccactcgccaccttcgtccgccgactcggaccacaagggtggcgcctcgtacaacgcggagaccccgccgccttccgcgcccttgtcgcacaatgtctcgtctgtgtaccttgggatgcacgacccccccccgccgccccatcattccgccaagtttcatgcctcaaagaactcgtagccagagtccttcaacgtctttgcgaacgcggagccaaaaacgtactagctttcggcttcgccctactagacggcgcacgtggcggcccacccgaagccttcaccacttccgtccgatcatacctaccaaacacagtcacggacgcactccgaggatctggagcctggggactcctactccgtagagtcggagacgacgtacttgtccacttactcgcccgctgcgccctcttcgtccttgtagcaccctcatgcgcctaccaagtctgcggaccacctctctaccaactaggcgcagcaacccaagcacgaccccccccccacgcatccggtccccgccgccgcctcggctgcgaacgagcatggaaccactccgtccgtgaggctggtgtccccctcggcctcccagcaccaggcgcgcgccgccgcggaggctccgcttcaagatcattaccactcccaaaacgcccacgccgcggcgccgcccccgaacccgaacgaaccccagtaggccaaggatcctgggctcaccctggcagaactagaggcccctccgacagaggcttctgcgtcgtatcccccgcccgcccagccgaagaagccacctcactcgaaggcgccctgtccggtactagacactcacacccctcagttggacgccaacaccatgctggccctccatcaacttccagaccaccgcgcccctgggacaccccctgccccccagtatacgccgaaaccaaacacttcctatattcatcaggcgacaaagaacaactcagaccctccttcctcctttccagtctacgccccatactcaccggcgcccgtcgcctcgtagaaaccatattcctcggatcatcccccggatgccaaggcctccctgcaggctgtcccgcctgtccctcagccaccggaaaatgcggcccctgcttctggtcctgcttaggaaccacccgttccgcaccaaccgggtgctcatcccgacgcacggccagatgcgaactacgatcccctcaacaacccgtctccgtacccggacgctctccccgcgcactctggcgcccaccccgccgccgcacacaaaccccggtcgcctggtgctcatgttccgcctccacagcacccctagccggagtacgactcagagcaggacttcccgctccagccggcgccccaagacccctcggcctacaagcccaaagacgacgcttcctacgaaacaccaaaaaatttatcagcctcggaaaacacgcaaaactatccctccaagaactcacctggaaaatgtccgtccgagactgcgcctggctacgtcgatcaccc

SEQ ID NO: 4262 - RNA, 1680 nt, synthetic construct
  misc_feature 1..1680: note = BAA23606 variant
  source 1..1680: mol_type = other RNA
atgcgactacaccgactccgagcacgcctctcagccgtcgcatgcggcctactcctcctcctcgtccgcggccaaggccaagattccgccagccctatccgcaccactcacacaggccaagtcctcggctccctcgtccacgttaaaggcgcaaacgcaggcgtacagaccttcctcggcatacccttcgccaaaccaccactcggcccactacgcttcgccccacccgaaccacccgagtcatggtccggcgtacgcgacggaaccacccaccccgccatgtgccttcaagacctcaccgccgtagaaagcgagttcctctcacaattcaacatgacattccccagcgactccatgtccgaagactgcctctacctttccatctacacccccgcacactcccacgaaggatccaacctccccgtcatggtctggattcacggtggcgccctcgttttcggcatggcatcactctacgacggatccatgctcgcagccctggaaaatgtcgtcgtcgtcatcatccaataccgcctcggcgtcctcgggttcttctcaaccggcgacaaacacgcaaccggcaactggggatacctagaccaagttgcagcgctccgctgggtccaacagaacatagcccacttcggcggaaaccccgaccgagtcaccatcttcggcgaaagcgccggcggcacctccgtatcttccttagtagtatcccccataagccaaggactattccacggcgctatcatggaaagcggagtagcccttctccccggactaatcgcatccagcgcagacgtcatttctacagtcgtcgccaacctctccgcctgcgaccaagtcgactcggaagccctagtcggctgcctgcgcggaaaatctaaagaagaaatcctcgcaataaacaagcccttcaaaatgatcccaggcgtcgtcgacggcgtcttcctcccccgacacccccaggaactccttgcatcggccgacttccaacccgtcccaagcattgtcggcgtaaacaacaacgaatttggctggctcatccccaaagtaatgcgaatatatgacacccaaaaagaaatggaccgcgaggcttcacaggccgccctacagaaaatgctgaccctcctcatgctacctcccaccttcggagacctacttagagaagaatacatcggtgacaacggcgacccccaaaccctccaagcacaattccaagaaatgatggccgactccatgttcgtcatacccgcactccaagtcgcacacttccaatgctcccgcgcacccgtctacttctacgagttccaacaccaaccctcgtggctcaaaaacatccgcccaccgcacatgaaagccgatcacggagacgaattacctttcgtcttccgctccttcttcggcggcaactacatcaaattcaccgaagaagaagaacaactctcacgaaaaatgatgaaatactgggccaatttcgcacgcaacggcaaccccaacggtgaaggacttcctcactggccactattcgaccaagaggaacaatacctccaattaaaccttcaacccgccgtcggacgagccctaaaggcacaccgactccaattctggaaaaaggcactcccccaaaagatccaagaactagaagaaccggaagaacgtcacactgaactctaa

SEQ ID NO: 4263 - RNA, 1740 nt, synthetic construct
  misc_feature 1..1740: note = AAH65269 variant
  source 1..1740: mol_type = other RNA
atgaacaaactctacataggcaacctttcagaaaacgcagccccctcagacctcgaatccatcttcaaagacgccaaaataccagtatcgggtccattcctcgtaaaaacaggatacgctttcgtagactgcccagacgaatcatgggcactcaaagccatcgaagcactctcaggcaaaatcgagctacacggcaagcccatcgaggtggaacactccgtgcccaaacgccaacgaatccgcaaactacaaatccgcaacattccaccccacctccaatgggaagtccttgatagcctcctagtacaatacggcgtggtagagagctgcgaacaagttaacaccgatagcgaaacagcggtagtcaacgtcacctactcctccaaggaccaagcccgccaagcacttgacaaacttaatggcttccaactagaaaacttcacgcttaaggtcgcctacatacccgacgagatggccgcacaacagaaccccctccaacaaccccgcggtcgtcgaggcctaggccaacgtggcagctcacgacaaggctcacccggatccgtctccaagcaaaaaccatgcgacctcccccttcgactcctcgtacccacccaattcgtcggagccatcattggaaaagagggcgcaaccatacgcaacatcaccaaacaaacccaatccaaaatcgacgtccaccgcaaggaaaacgccggcgctgctgaaaaatccatcaccatactttcaacccccgaaggcacctcggcagcctgtaaaagcatcctagaaatcatgcacaaggaagcccaagacatcaaattcacagaagaaatcccactaaaaatcctggcccataacaacttcgtcggtagactcattggcaaagaaggccgaaacctcaagaaaatagaacaagacaccgataccaaaatcaccatcagcccgctacaagaactaacactttacaacccagaacgaaccatcactgtcaaaggcaacgtcgagacctgcgccaaagcagaagaggagatcatgaagaaaatacgcgaatcctacgaaaacgacatcgccagcatgaatctacaagcccacctgatccccggcctaaacctcaacgcactcggcctgtttccccctacctcaggcatgccaccgcccacaagcggacccccatcagccatgaccccaccctacccccagttcgaacaaagcgaaaccgaaacagtacacctcttcatacccgccctttcagtaggagcaatcatcggcaaacaaggtcaacacatcaaacagctttcccgattcgccggtgcatcaataaaaatcgcacccgcagaagccccagacgctaaagtccgcatggtcatcatcaccggaccacccgaagcccaattcaaagcccaaggacgaatctatggcaaaatcaaagaagaaaacttcgtcagcccaaaagaagaagtcaagctcgaagcccacatccgcgtaccatcattcgcagccggccgagtcatcggaaaaggcggcaagaccgtcaacgaactacaaaacctcagctccgcagaggtagtagtaccccgcgatcaaacacccgatgaaaacgaccaggtcgtcgtcaaaattaccggccacttctacgcctgccaagtcgcccaacgtaaaatacaagaaatactcacgcaagtaaaacaacatcaacaacaaaaagccctccaaagcggcccaccacagtcccgacgcaaataa

SEQ ID NO: 4264 - RNA, 537 nt, synthetic construct
  misc_feature 1..537: note = AAA63207 variant
  source 1..537: mol_type = other RNA
atgcactcctccgccctcctctgctgcctcgtcctcctcaccggcgtccgcgcctcccccggccaaggcacccaatccgaaaactcctgcacccacttccccggcaacctccccaacatgcttcgcgacctccgcgacgccttctcccgcgtcaaaaccttcttccaaatgaaagaccaactcgacaacctcctactcaaagaatccctcctagaagacttcaaaggctacctcggctgccaagccctctccgaaatgatccaattctacctcgaagaagtaatgccccaagccgaaaaccaagaccccgacatcaaagcccacgtcaactccctaggcgaaaacctcaaaaccctacgcctacgcctccgccgctgccaccgcttcctcccctgcgaaaacaaatccaaagccgtcgaacaagtcaaaaacgccttcaacaaactccaagaaaaaggcatctacaaagccatgtccgaattcgacatattcatcaactacatcgaagcctacatgaccatgaaaatccgcaactaa

SEQ ID NO: 4265 - RNA, 1143 nt, synthetic construct
  misc_feature 1..1143: note = AAB17170 variant
  source 1..1143: mol_type = other RNA
atggccttcgtctgcctcgccatcggctgcctatacaccttcttaatatccaccaccttcggatgcacctcctcctcagacaccgaaatcaaagtcaaccctccccaagacttcgaaatcgtcgaccccggctacctcggctacctttatctccaatggcaaccacccctcagcctcgaccacttcaaagaatgcaccgtcgaatacgaacttaaataccgcaacatcggctccgaaacctggaaaaccataatcaccaaaaacctccactacaaagacggcttcgacctcaacaaaggcattgaagccaaaatacacaccctactaccctggcagtgcaccaacggatccgaagtccaatcctcctgggccgaaaccacctactggatctcgccccaaggaatacccgaaaccaaggtccaagacatggactgcgtctactacaactggcaatacctcctctgctcctggaaacccggcatcggcgtactcctcgacaccaactacaacctcttctactggtacgaaggcctagaccacgccctccaatgcgtcgactacatcaaagcagacggacagaacatcggatgcagattcccatacctcgaagcctccgactacaaagacttctacatctgcgtcaacggctcctccgaaaacaaacccatccgctcatcctacttcaccttccaactacaaaacattgttaaacccctcccacccgtctacctcaccttcacccgcgaaagctcctgcgaaatcaaactaaaatggagcatcccactcggccccatccccgctcgatgcttcgactacgaaatcgaaatccgcgaagacgacaccaccctagtcacagccaccgtcgaaaacgaaacatacacattaaaaaccacaaacgaaacccgacaactatgcttcgtcgtccgctcaaaagtgaacatctactgctccgacgacggcatctggtccgaatggtccgacaagcaatgctgggaaggagaagacctcagtaagaaaaccctcctccgcttctggctccccttcggcttcatcctcatccttgtcatcttcgtcaccggcctcctcctacgcaaacccaacacataccccaaaatgatcccagagttcttctgcgatacataa

SEQ ID NO: 4266 - RNA, 819 nt, synthetic construct
  misc_feature 1..819: note = AAA67527 variant
  source 1..819: mol_type = other RNA
atggactcctacctcctcatgtggggcctcctcaccttcatcatggtccccggctgccaagcagaactctgcgacgacgatcccccagaaatcccacacgccaccttcaaagcaatggcctacaaagaaggcacaatgctcaactgcgaatgcaaacgcggcttccgccgcatcaaaagcggctccctctacatgctctgcaccggcaactcctcacactcatcatgggacaaccaatgccaatgcaccagctccgccacacgcaacaccaccaaacaagtcacaccccaacccgaagaacaaaaagaacgcaaaaccaccgaaatgcagtcccccatgcaacccgtcgaccaagcatccctaccaggacactgccgcgaacccccaccctgggaaaacgaagccaccgaacgcatataccacttcgtcgtcggccaaatggtctactaccaatgcgtccaaggctaccgcgccctacaccgcggccccgccgaatcagtctgcaaaatgacacacggcaaaacccgctggacccaaccccaactaatctgcacaggagaaatggaaaccagccaattccccggagaggaaaaaccccaagcctcccccgaaggccgaccagaatccgaaacctcctgcctcgtcaccacaaccgacttccaaatccaaaccgaaatggccgccaccatggaaacctccatcttcaccaccgaataccaagtagccgtagctggctgcgtattcctactcatctccgtgctacttctttcaggcctcacctggcaacgccgccaacgcaaatcccgacgcacaatctaa

SEQ ID NO: 4267 - RNA, 1656 nt, synthetic construct
  misc_feature 1..1656: note = AAA59143 variant
  source 1..1656: mol_type = other RNA
atggccgcccctgcactatcatggcgcctcccactccttatactactcctccctctagctacatcatgggcctccgccgcagtcaacggaacttcacagttcacctgcttctacaactcccgcgctaatatctcctgcgtctggtctcaagacggagccctccaagatacttcctgtcaagtccatgcctggccagaccgccgccgctggaatcaaacatgcgaactcctacccgtatcccaggcctcctgggcatgcaatctcatcctcggtgcccccgactcccaaaagctcacaacagtcgacatagtcacgcttcgagtactatgccgcgaaggagtccgctggagagtcatggcgatccaagacttcaaaccattcgaaaacctccgcctaatggctccaatatcccttcaagtagtccatgtagaaacacaccgctgcaacatctcatgggaaatctcacaagcaagccactacttcgaacgccacctcgaattcgaagcccgcaccctctccccaggccacacctgggaagaagcacccctactcaccctcaaacaaaaacaagaatggatatgcctcgaaaccctaaccccagacacccaatacgaattccaagtccgagtcaaacccctccaaggcgaattcacgacatggtcaccctggtcccaaccactcgccttcagaaccaaacccgccgcactcggcaaagacacaatcccatggctaggtcaccttctagtcggcctatccggagccttcggcttcatcatcctagtctacctcctcattaactgccgcaacaccggaccatggctgaaaaaggtcctaaaatgcaacacccccgacccttcaaaattcttttcccaactttcctccgaacacggcggcgacgtccaaaaatggctctcatcccctttccccagctccagcttctcacccggcggactcgcccctgaaatcagcccactcgaagtcctcgaaagagacaaagtaacccaactccttctccaacaagacaaagtccctgaaccagcatccctatcctcaaaccactccctcacaagctgcttcaccaaccaaggatacttcttcttccacctccctgacgccctcgaaatagaagcatgccaagtatacttcacctacgacccatactccgaagaagaccccgacgaaggagtagcaggtgcccccaccggatcgagccctcaaccactacaaccactcagcggcgaagacgacgcttactgtaccttcccctctcgcgacgatctgctccttttcagcccctccctcctcggaggaccaagtcccccatccaccgcaccagggggctccggtgccggcgaagaacgcatgcccccatccctacaagaacgcgtacccagagactgggacccacaacccctcggtccccccacccccggcgtccccgacctagtcgacttccaacccccacccgaactagtccttcgagaggccggcgaagaagtccccgacgccggcccgcgagaaggagtatccttcccatggtcccgaccaccaggacaaggcgaattccgcgccctcaacgcccgactcccactcaacacagacgcctacctgtccctccaagaactccaaggacaagaccccacccacctcgtctaa

SEQ ID NO: 4268 - RNA, 1110 nt, synthetic construct
  misc_feature 1..1110: note = AAA59145 variant
  source 1..1110: mol_type = other RNA
atgctcaaaccctcactccccttcacctccctcctttttctacaactaccacttctcggcgtaggactcaacaccacaatcctaactccaaacggcaacgaagacaccaccgccgacttcttcctcaccaccatgcccaccgactcactatccgtctccacactccccctccccgaagtccaatgcttcgtcttcaatgtcgaatacatgaactgcacatggaactcctcctccgaaccccaacccacaaacctcacccttcactactggtacaaaaactccgacaacgacaaagtccaaaaatgctcccactacctcttttccgaagaaatcacttccggctgccaactgcaaaagaaagaaatccacctctaccaaaccttcgtcgtccaactacaagacccacgcgaaccaagacgacaagccacccaaatgctcaaactccaaaacctcgtcatcccctgggcccccgaaaacctcactctacacaaactctcagaatcccaactcgaacttaactggaacaaccgattcctaaaccactgcctcgaacacctcgttcaataccgcacagactgggaccactcctggacagaacagtcagtcgactaccggcacaaattctcactcccctccgtcgacggccaaaaacgatacaccttccgtgtacgctcccgcttcaaccccctatgcggctcggcccaacactggtccgaatggtctcacccaattcactggggctcaaacacctccaaagaaaaccccttcctcttcgccctagaagccgtcgtcatctcagtcggaagcatgggccttatcatctccctcctctgcgtctacttctggctcgaacgaacaatgccacgcatacccaccctcaaaaacctcgaagacctcgtcaccgaataccacggtaacttctccgcctggtcaggcgtctcaaaaggcctcgccgaatcccttcaacccgactactccgagcgcctgtgcctcgtctcagaaatacccccaaaaggaggcgcccttggcgaaggccccggcgcctcgccatgcaaccaacactcaccctactgggccccaccctgctacactctaaaacccgaaacctga

SEQ ID NO: 4269 - RNA, 405 nt, synthetic construct
  misc_feature 1..405: note = AAA74469 variant
  source 1..405: mol_type = other RNA
atgcgaatgctcctccacctctccctcctcgccctcggcgccgcctacgtctacgccatccccacagaaatccccacctccgccctcgtcaaagaaaccctcgcactcctctccacccaccgcaccctcctcatcgccaacgaaaccctccgcatccccgtccccgtccacaaaaaccaccaactctgcaccgaagaaatcttccaaggcatcggcaccctagaatcccaaaccgtccaaggcggcaccgtcgaacgcctcttcaaaaacctctccctcatcaaaaaatacatcgacggccaaaaaaaaaaatgcggcgaagaacgccgccgcgtcaaccaattcctcgactacctccaagaattcctcggcgtcatgaacaccgaatggatcatcgaatcctaa

SEQ ID NO: 4270 - RNA, 555 nt, synthetic construct
  misc_feature 1..555: note = AAH06487 variant
  source 1..555: mol_type = other RNA
atggtccgcaaactcaaattccacgaacaaaaactcctaaaacaagtcgacttcctcaactgggaagtaaccgaccacaacctccacgaactccgcgtcctccgacgctaccgcctacaacgccgcgaagactacacacgatacaaccaactctcccgcgccgtccgcgaactcgcccgccgcctacgcgacctccccgaacgcgaccaattccgcgtccgcgcctcagccgccctcctcgacaaactctacgccctcggcctcgtccccacccgaggctccctcgaactctgtgacttcgtaaccgcctcctcattctgccgccgccgcctacccacagtcctactcaaactccgaatggcccaacacctccaagcagccgtcgccttcgtcgaacaaggccacgtccgagtcggccccgacgtcgtcaccgaccccgccttcctcgtcacacgctccatggaagacttcgtcacctgggtagactcctccaaaatcaaacgccacgtcctcgaatacaacgaagaacgcgacgacttcgacctcgaagcctag

SEQ ID NO: 4271 - RNA, 3150 nt, synthetic construct
  misc_feature 1..3150: note = AAH08786 variant
  source 1..3150: mol_type = other RNA
atgggctccaggacccccgaatcacccctgcacgccgtacaattgcgctggggcccccggcgtcggccgcccctcctccccctactcctcctactgctcccgccaccacctcgagttggaggcttcaacctagatgccgaagccccagccgtcctaagcggcccacccggctccttcttcggattttcagtcgaattttacagacctgggaccgacggcgtatcagtcctcgtcggtgccccaaaagcaaatacctcgcaacctggtgtgctccaaggcggagccgtctacctatgcccgtggggagccagccccacccagtgtacacctatagaatttgactccaaaggttcgcgcctactagagtcctccttatcctcgtcggaaggagaagaaccggtagaatacaaatccctacaatggtttggtgccacagtaagagctcatggatcttctatactcgcctgcgcacccctgtactcttggcgaacagaaaaagaacccctctcggaccccgtagggacctgctacctatccacagacaactttacacgtattctcgaatacgccccctgccgctctgacttcagctgggccgcaggccaaggctactgccagggtggattctcagcagagttcaccaaaacgggaagagtcgtcctaggcggcccgggatcctacttctggcaagggcaaatccttagtgcaacccaagaacaaatcgccgaatcctactaccccgaataccttatcaatttagtgcaaggccaactgcaaacgcgccaggcttcctccatctacgacgattcctaccttggctactccgtcgcagtcggagagttctcaggcgacgacaccgaagacttcgtcgccggggtcccaaaaggaaacctaacttacggctacgttactatactaaatggatccgacatccgttcactctacaacttctccggcgaacaaatggcctcatacttcggctacgcggtcgccgctaccgacgtcaacggagatggcctagacgacctcctcgtaggcgcaccgttactcatggaccgtacgccagacggacgcccccaagaagtcggacgcgtctacgtatacctacaacatccagcaggaatagaacccacacccactctaaccctaaccggccacgatgagttcggaagattcggctcatccctcaccccactcggggacctagaccaagacggatataacgacgtcgcaataggcgcccccttcggaggcgaaacacaacagggagtcgtctttgtcttcccaggaggccccggtggtctcggctcaaaaccctcgcaagtactgcaacctctatgggcagcttcccacacccccgatttcttcggaagcgcactccgcggcggccgtgacctcgacggcaacggctatcccgacctcatcgtaggcagctttggcgtagacaaagcggtcgtttaccgcggaagacccatagtctccgcttcagcctcgctaacgatcttccccgccatgttcaacccggaagaacgctcctgctcactcgaaggaaacccagtagcatgcatcaacctctcattctgtctcaatgcctccggtaaacacgtcgctgacagcatcggcttcactgtcgaactgcagttagactggcaaaaacaaaaaggcggcgtacgccgggcactcttcctcgcatcccgacaagccactctcacccaaacccttctgatccaaaatggcgctcgcgaagactgcagagaaatgaaaatctacctccgaaacgagtcggagttcagggacaagctctcccccatccatatcgcccttaacttctctctggacccacaagcaccagtagactcccacggcctccgcccagcgttacactaccaatccaagtctcgcatagaagacaaagctcaaatcctcctcgattgcggagaagacaacatatgcgtaccagacctacaactcgaagtctttggagaacaaaatcacgtatacctcggcgacaaaaacgccctcaacttaaccttccacgctcaaaacgtcggagagggcggggcctacgaagccgaactccgcgtcactgccccacccgaagcagaatactcaggcctagttcgccatcccggcaacttctcctcactcagctgtgactacttcgcagttaaccaatcccgacttctcgtctgcgacctcggcaaccccatgaaagccggcgcctccctttggggaggattacgtttcaccgtccctcacctccgagacaccaaaaagacgatccaatttgacttccaaatcctgtccaaaaacctcaataattcacagtccgacgtagtatccttccgcctatcagtcgaggcacaagcgcaagttacgcttaacggtgtcagtaaaccggaagccgtcctatttcccgtatcagactggcaccctcgcgaccaaccacaaaaagaagaagacctaggccccgccgttcatcatgtctacgaactcatcaaccaaggaccctcatccatcagccaaggcgttctcgaactatcatgccctcaagcactagaaggccagcaacttctctacgtcacacgcgtcacagggctcaactgcaccaccaaccatccgataaaccctaagggcctcgaactagaccctgaaggcagcctacaccaccaacagaaaagagaagcaccctctcgctccagcgcatcttcaggccctcaaatcctgaaatgcccagaagccgaatgctttagactccggtgcgagctgggccccctccaccagcaagaaagccagtccctacagctacactttcgcgtatgggccaaaacattcctccaacgggagcaccaacctttctcactccaatgcgaagcggtatacaaggcacttaagatgccctaccgcatattaccacgacaactcccacaaaaagaaagacaggttgcaacggccgtacaatggacaaaagccgaaggctcatacggtgtaccgctatggatcataatcctagcgatacttttcggccttctcctcctgggactcctcatatacatcctctataaactaggcttcttcaaacggtccctaccttacggaaccgccatggaaaaagctcagctcaaaccgcccgcaacttcagacgcctaa

SEQ ID NO: 4272 - RNA, 2397 nt, synthetic construct
  misc_feature 1..2397: note = AAH20057 variant
  source 1..2397: mol_type = other RNA
atgaacctccaacccatcttctggattggcctcatctcgagcgtatgctgcgtattcgcccaaaccgacgaaaaccggtgcctaaaagccaacgccaaatcctgcggcgaatgcatacaagccggccccaactgcgggtggtgcaccaattctaccttcctacaggaaggaatgccaaccagcgcccgctgcgacgacctcgaagcactaaagaagaaagggtgcccacccgacgacatcgagaaccccagaggttctaaagacataaagaaaaacaaaaacgtaaccaaccggtccaaaggcaccgcggaaaaactaaaacccgaagacataactcaaatccaaccccagcagctcgtactgagactgagaagcggcgagccccagaccttcacgcttaaattcaaacgtgcggaagactaccccatcgacctatactacctcatggacctatcctactcaatgaaagacgacctcgaaaatgtaaaatcactcggaaccgatctaatgaatgaaatgcgacgaatcacatccgacttccgcatcgggtttggctccttcgtcgagaaaaccgtgatgccatatatctcaaccactccggcaaaactacggaacccttgcaccagcgaacaaaactgcacatccccattctcctacaaaaacgtactctccctcaccaacaaaggcgaggtcttcaacgagctagtcggaaaacagcggatcagcggcaacctcgattccccagaaggaggatttgacgccataatgcaagtggccgtatgcggatccctcataggctggcgcaacgtcacccgcctcctcgtattcagcacggacgcaggtttccacttcgcaggcgacggcaagctaggaggcatagtgctccccaacgacggccagtgtcatctagaaaacaacatgtataccatgagccactattacgattacccctctattgcacacctggttcaaaaactctcagaaaacaacatacagacaatcttcgccgtaacggaagagttccaacccgtatataaggaactcaaaaacctcatcccaaaaagcgctgtcggaaccctctccgcaaactcaagcaacgtaatccaactaatcatcgacgcctacaacagcctaagctccgaagtcatcctagaaaacggcaaactctcggaaggcgtaacaatctcttacaagagttactgcaaaaatggcgtcaacggcaccggcgagaatggccgaaaatgctccaacataagcatcggagacgaagtccagttcgaaatctcaatcacaagcaacaaatgccccaagaaagactctgactccttcaaaatacgacccctaggctttactgaagaagtagaagtcattctacagtacatctgcgaatgcgaatgccaaagcgaaggaatccccgaaagccccaaatgccacgaaggcaacggaaccttcgaatgcggagcctgccgatgcaacgaaggccgagtaggccgccactgcgaatgcagcacagacgaagtcaactcagaggacatggacgcatattgccgcaaagaaaacagctcggaaatctgcagcaataacggcgaatgcgtctgcggccaatgcgtctgccgaaaacgcgacaatacgaacgaaatatactctgggaaattctgcgaatgcgacaatttcaactgtgaccgatcgaacgggctcatctgcgggggaaacggcgtatgcaaatgccgcgtctgcgaatgtaacccaaactacaccggatccgcctgcgactgttccctagacacctcaacctgcgaggcatcaaatgggcaaatctgcaacggccgaggtatctgcgaatgtggagtctgcaaatgcacagaccccaaattccagggccaaacctgcgaaatgtgccaaacatgccttggcgtatgtgctgagcacaaggaatgcgtacaatgccgagccttcaacaaaggcgagaaaaaggacacgtgcactcaggaatgcagctactttaacatcaccaaggtagaaagccgagacaaactaccccaaccagtccaacccgacccggtatcccactgcaaagaaaaagacgtagacgactgctggttctacttcacctacagcgtaaacggcaacaacgaggtcatggtacatgtagtagaaaaccccgaatgcccgaccggcccagacataatcccgatagttgcaggagtagtagcaggaatagtcctgataggcctcgcattgttacttatctggaaactcctgatgatcatccacgaccgcagagaatttgcgaagttcgaaaaagagaaaatgaacgccaaatgggacacaggcgaaaacccaatatacaaatccgcagtcaccaccgtggtaaacccaaaatacgaaggaaagtaa

SEQ ID NO: 4273 - RNA, 2367 nt, synthetic construct
  misc_feature 1..2367: note = AAA36122 variant
  source 1..2367: mol_type = other RNA
atgggaatcgaattactatgtctctttttcctattcctgggccgcaacgatcacgtacaaggaggatgcgccctaggcggggccgagacatgcgaagactgcctcctaataggacctcaatgcgcctggtgcgcccaagaaaacttcacccacccctccggcgtcggcgaacgctgcgacacaccagcaaacctactcgccaaaggctgccaactaaacttcatcgaaaaccccgtctcccaagtcgagatcctcaaaaataaacccctctccgtgggacgccagaaaaactcgtcagacatcgtccaaatcgcaccccagtcactcatcctcaaactccgacccggcggggcccaaactctgcaagtacacgtccggcaaacagaagactacccagtggacctatactacctaatggacctctccgcctccatggacgacgacctaaacaccatcaaggagctcggctcacgactgagtaaagaaatgtccaaactcacttcgaacttccgcctaggcttcgggtcatttgtagaaaaacccgtcagccccttcgtcaaaaccacaccagaagagatagcaaatccctgcagcagcataccttacttctgtctacccacattcggattcaaacacatactccccctaaccaacgatgccgaacgcttcaacgaaatcgtgaaaaaccagaagatctccgccaacatcgacacacccgaaggtggcttcgacgccatcatgcaagcagcagtatgcaaagagaaaataggctggcgaaatgactctctacacctactcgtattcgtctccgacgccgacagccactttggcatggacagcaaactcgcgggcatagtgatccccaacgacggactatgccacctggactcgaaaaacgaatacagcatgtcaaccgtcttagaataccccaccatcggacaactaatcgataaactcgtacagaacaacgttctactaatattcgcggtcacccaagaacaggttcacctctacgaaaactacgccaaactgataccgggtgccacagtgggcctactacagaaagactccggcaacattcttcagctaatcataagcgcctacgaggaactccgcagcgaagtagagctggaagtcctaggcgacacggaaggcctcaacctatctttcaccgcaatctgcaacaacggcaccctcttccagcaccagaaaaagtgctcgcacatgaaagtcggcgacaccgcctcattctccgtaactgtcaacatcccacactgcgaacgacgctcgcgacacattataatcaaacccgtcggcctcggtgacgcactcgaactcctcgtatccccagagtgtaactgcgactgccaaaaagaagttgaggtcaactcaagcaagtgccaccacggcaacggatccttccaatgcggagtctgtgcgtgccacccggggcacatgggaccccgctgcgagtgcggagaagacatgctctccaccgacagttgcaaagaagctccagaccacccctcctgcagtgggcgtggagactgctactgcggtcaatgcatctgccacctgtcgccctacggaaacatctacggaccctactgccaatgcgacaacttctcctgcgtacgacacaaaggcctcctctgtggtggcaacggagactgcgactgcggggagtgcgtctgccgctctggctggaccggcgaatactgcaactgcaccaccagcacagactcctgcgtctcagaagacggcgtcctctgcagcggccgaggagactgcgtctgcgggaaatgcgtctgcactaacccgggagcaagcgggcccacttgcgaacgctgcccgacctgcggagacccctgcaatagcaagcgatcatgcatcgaatgtcacctctccgccgccggacaagcccgcgaagaatgcgtagacaaatgcaaactcgctggagccaccatatccgaagaggaagacttctccaaagacggaagcgtatcgtgctccctacaaggagaaaacgaatgcctcatcaccttcctaataacaacggacaacgaaggaaagaccatcatccatagcataaacgagaaagactgccccaagccacccaacatacccatgatcatgctaggcgtatccctggcaatccttctgatcggagtggtcctattatgcatttggaaactcttagtttcattccacgatagaaaggaagtcgccaaattcgaagccgaacgctccaaagcgaaatggcaaaccggcacaaatccactatacaggggtagcacctcaaccttcaaaaacgtaacctacaaacacagagaaaagcaaaaagtcgacctcagcactgactgctaa

SEQ ID NO: 4274 - RNA, 786 nt, synthetic construct
  misc_feature 1..786: note = EAW71937 variant
  source 1..786: mol_type = other RNA
atgtgggacctcgtcctttccatcgccctctccgtcggctgcacaggcgccgtacccctcatccaatcccgcatcgtcggcggctgggaatgcgaaaaacactcacaaccctggcaagtcgccgtatactcccacggctgggcccactgcggcggcgtcctcgtccacccccaatgggtcctcaccgcagcccactgcctcaaaaaaaactcccaagtctggctcggccgacacaacctcttcgaacccgaagacaccggccaacgcgtccccgtctcacactccttcccccacccactatacaacatgtccctccttaaacaccaatccctccgacccgacgaagactcctcccacgacctcatgctcctacgcttatcagaacccgcaaaaatcaccgacgtcgtcaaagtcctcggcctccccacccaagaacccgccctaggaaccacatgctacgcatccggatggggctcaatcgaacccgaagaattcctccgcccccgctccctacaatgcgtctccctccacctactatccaacgacatgtgcgcccgcgcctactcagaaaaagtcaccgaattcatgctctgcgccggcctctggaccggcggaaaagacacctgcggcggagactccggcggccccctcgtctgcaacggcgtcctccaaggcataacctcatggggccctgaaccctgcgccctacccgaaaaacccgccgtctacaccaaagtcgtccactaccgcaaatggatcaaagacaccatcgccgccaacccctaa

SEQ ID NO: 4275 - RNA, 672 nt, synthetic construct
  misc_feature 1..672: note = EAW71938 variant
  source 1..672: mol_type = other RNA
atgtgggacctagtcctctccatcgcactatccgtcggctgcaccggcgccgtcccactaatccaatcacgaatcgtcggcggctgggaatgcgaaaaacactcccaaccctggcaagtagccgtatactcacacggctgggcccactgcggcggagtccttgtccacccccaatgggtcctaacagccgcccactgcctcaaaaaaaactcccaagtctggctcggccgccacaacctcttcgaacccgaagacacaggccaacgcgtccccgtctcacactcattcccccaccccctctacaacatgtctctcctcaaacaccaatcactccgccccgacgaagactcctcccacgacctcatgctcctccgactctcagaacccgccaaaatcaccgacgtcgtcaaagtcctcggcctccccacccaagaacccgccctcggcaccacctgctacgcctccggctggggatcaatcgaacctgaagaattcctccgccccagatccctccaatgcgtatccctccacctactctccaacgacatgtgcgcccgcgcctactccgaaaaagtcaccgaattcatgctatgcgccggcctctggaccggaggcaaagacacatgcggcgtctcccacccctactcccaacacctcgaaggcaaaggctaa

SEQ ID NO: 4276 - RNA, 189 nt, synthetic construct
  misc_feature 1..189: note = BAF98781 variant
  source 1..189: mol_type = other RNA
atgtccctcctcaaacaccaatccctccgccccgacgaagactcctcccacgacctcatgctcctccgcctctccgaacccgccaaaatcaccgacgtcgtcaaagtcctcggcctccccacccaagaacccgccctcggcaccacctgctacgcctccggctggggctccatcgaacccgaagaataa

SEQ ID NO: 4277 - RNA, 735 nt, synthetic construct
  misc_feature 1..735: note = BAG62239 variant
  source 1..735: mol_type = other RNA
atgggcaccctctggggatgccccggcgcccccccagtcggagcccactcctgccccctacccaaagaagtctcccgcaccctcgggtccggcgaaggaatggccgtctcccaccgcaacaactcaggaatgctacccccaggctcactcctccgcaactcccaagtctggctcggacgccacaacctcttcgaacccgaagacaccggccgccgcgtccccgtatcccactccttcccccaccccctctacaacatgtcactcctcaaacaccaatctctccgccccgacgaagactcatcccacgacctcatgctcctacgactctccgaacccgccaaaatcaccgacgtcgtcaaagtcctcggcctccccacccaagaacccgccctaggcacaacctgctacgcctccggctggggctccatcgaaccagaagaattcctccgcccccgctccctccaatgcgtctccctccacctcctctccaatgacatgtgcgcccgtgcctactctgaaaaagtcactgaattcatgctctgcgccggactctggaccggcggcaaagacacctgcggcggcgactccggcggccccctcgtctgcaacggcgtactccaaggcataacatcctggggacccgaaccctgcgcactccccgaaaaacccgccgtatacaccaaagtcgtccactaccgaaaatggatcaaagacaccatcgcagccaacccctaa

SEQ ID NO: 4278 - RNA, 786 nt, synthetic construct
  misc_feature 1..786: note = AAA74454 variant
  source 1..786: mol_type = other RNA
atgtgggacctcgtcctatccatcgccctatccgtcggatgcaccggagccgtccccctcatacaatcccgcatagtaggcggctgggaatgcgaaaaacactcccaaccctggcaagtcgccgtctactcacacggctgggcccactgcggcggcgtcctagtccacccccaatgggtcctcaccgccgcccactgccttaaaaaaaactcgcaagtatggctcggccgccacaacctcttcgaaccagaagacaccggccaacgcgtccccgtatcacactccttcccacaccccctctacaacatgtccctcctcaaacaccaatcactccgccctgacgaagactcctcccacgacctcatgctcctccgcctctccgaacccgcaaaaatcacagacgtcgtcaaagtcctcggcctccccacccaagaacccgccctcggcaccacctgctacgcctcaggatggggctccatcgaaccagaagaattcctacgcccccgctcactccaatgcgtctccctccacctactctccaacgacatgtgcgcacgagcatactccgaaaaagtcaccgaattcatgctctgcgccggcctatggaccggcggcaaagacacctgcggcggcgactcaggcggcccacttgtctgcaacggcgtactccaaggaatcacctcctggggccccgaaccctgcgccctccccgaaaaaccagcagtctacaccaaagtcgtccactaccgcaaatggataaaagacaccatcgccgcaaacccataa

SEQ ID NO: 4279 - RNA, 150 nt, synthetic construct
  misc_feature 1..150: note = AAR10469 variant
  source 1..150: mol_type = other RNA
atgtgggacctcgtcctctccatcgccctctccgtcggctgcaccggcatcgcccgctccggctgggtcggcaccacctgcctctccctcaaaacccaagcccgcggctccctctccgccaccgcctcccacacccgctccaccatctaa

SEQ ID NO: 4280 - RNA, 543 nt, synthetic construct
  misc_feature 1..543: note = AAR10468 variant
  source 1..543: mol_type = other RNA
atgtgggacctagtcctctccatcgccctctccgtcggctgcaccggcgccgtcccactaatccaatcccgcatcgtcggcggctgggaatgcgaaaaacactcccaaccctggcaagtcgccgtatactcacacggctgggcccactgcggcggagtcctagtccacccccaatgggtcctcaccgccgcccactgcctcaaaaaaaactcacaagtatggctcggccgccacaacctcttcgaacccgaagacaccggccaacgagtccccgtctcccactccttcccccaccccctctacaacatgtccctccttaaacaccaatccctccgacccgacgaagactcctcccacgacctcatgctcctccgcctctccgaacccgccaaaataaccgacgtcgtcaaagtcctcggcctccccacccaagaaccagccctaggcaccacctgctacgcctccggctggggctccatcgaaccagaagaatgcacccccggccccgacggcgtcgccggctcccccgacgcctgggtctaa

SEQ ID NO: 4281 - RNA, 765 nt, synthetic construct
  misc_feature 1..765: note = EAW71943 variant
  source 1..765: mol_type = other RNA
atggccacagccggcaacccctggggatggttcctaggatacctcatcctcggcgtcgccggctcactcgtctcaggctcctgctcacaaataatcaacggagaagactgctcaccccattcccaaccctggcaagccgccctcgtcatggaaaacgaactcttctgctccggcgtcctagtccacccccaatgggtcctctccgcagcccactgcttccaaaactcctacaccatcggcctaggcctccacagcctcgaagcagaccaagaacccggctcccaaatggtcgaagcctccctctccgtccgccaccccgaatacaaccgccccctccttgccaacgacctcatgctcatcaaactcgacgaatccgtttccgaatccgacacaatcagatcaatctctatcgcctcccaatgccccaccgccggcaactcctgcctagtcagcggctggggcctcctagctaacggccgcatgcccacagtcctccaatgcgtcaacgtctccgtagtttccgaagaagtctgcagcaaactctacgaccccctctaccacccctctatgttctgcgccggcggcggccaggaccaaaaagattcctgcaacggcgactccggcggccccctcatctgcaacggctacctccaaggcctcgtctccttcggcaaagccccttgcggccaagtaggagtcccaggagtctacaccaacctctgcaaattcaccgaatggatcgaaaaaaccgtccaagcctcctaa

SEQ ID NO: 4282 - RNA, 228 nt, synthetic construct
  misc_feature 1..228: note = AAX30051 variant
  source 1..228: mol_type = other RNA
atggccaccgccggcaacccctggggctggttcctcggctacctcatcctcggcgtcgccggctccctcgtctccggctcctgctcccaaatcatcaacggcgaagactgctccccccactcccaaccctggcaagccgccctcgtcatggaaaacgaactcttctgctccggcgtcctcgtccacccccaatgggtcctctccgccgcccactgcttccaaaaataa

SEQ ID NO: 4283 - RNA, 588 nt, synthetic construct
  misc_feature 1..588: note = AAL14782 variant
  source 1..588: mol_type = other RNA
atggccaccgccggcaacccctggggctggttcctcggatacctcatactcggcgtcgccggctcgctcgtctccggctcctgctcacaaatcatcaacggcgaagactgcagcccccactcccaaccctggcaagccgcacttgtcatggaaaacgaactcttctgctccggcgtcctcgtccacccccaatgggtcctctcagccgcccactgcttccaaaactcatacaccatcggcctcggcctccactccctcgaagccgaccaagaacccggctcccaaatggtcgaagcctcactctccgtccgacaccctgaatacaacaggcccctactagccaacgacctaatgctcatcaaactcgacgaatccgtctctgaaagcgacaccatccgctccatatccatcgccagccaatgccccaccgccggcaacagctgcctcgtctccggctggggcctcctcgccaacggcgaactcacaggcgtctgcctaccctcatcccgccgctcctccgcccaatcccgaggcctcacccaatcctccgcctcccaagcagaatgcctcccctgctgctccgcctaa

SEQ ID NO: 4284 - RNA, 480 nt, synthetic construct
  misc_feature 1..480: note = AAL14781 variant
  source 1..480: mol_type = other RNA
atggccaccgccggcaacccctggggctggttcctcggctacctcatcctcggcgtagccggctccctcgtctccggctcctgctcccaaatcatcaacggcgaagactgctcaccccactcccaaccctggcaagccgccctcgtcatggaaaacgaactcttctgctccggcgtcctagtccacccccaatgggtcctatccgccgctcactgcttccaaaactcctacaccatcggcctcggcctccactccctcgaagccgaccaagaacccggctcccaaatggtcgaagcctccctttccgtccgccaccccgaatacaaccgccccctcctagccaacgacctcatgctcatcaaactcgacgaatccgtctccgaatccgacaccatccgctccatctccatcgcctcccaatgccccaccgccggcaactcatgcctcgtctccggctggggcctcctcgccaacggataa

SEQ ID NO: 4285 - RNA, 765 nt, synthetic construct
  misc_feature 1..765: note = AAD21580 variant
  source 1..765: mol_type = other RNA
atggccaccgccggcaacccctggggctggttcctaggctacctcatcctaggcgtcgccggctccctagtctcaggaagctgctcacaaatcatcaacggcgaagactgctccccacactcacaaccctggcaagccgccctagtcatggaaaacgaactcttctgctcaggcgtcctagtccacccccaatgggtcctatcagccgcacactgcttccaaaactcctacaccatcggactcggactccactccctcgaagccgaccaagaacccggctcccaaatggtcgaagcctccctatcggtacgccaccccgaatacaacagaccactactagccaacgacctcatgctcatcaaactcgacgaatccgtcagcgaatccgacaccatacgctcaatctcaatcgcctcccaatgcccaaccgccggcaacagctgcctcgtcagcggctggggcctactcgccaacggcagaatgcccaccgtcctgcaatgcgtcaacgtatccgtagtctcagaagaagtctgctccaaactctacgacccactctaccaccccagcatgttctgcgcaggcggcggtcacgaccaaaaagactcctgcaacggcgactccggcggccccctcatatgcaacggatacctccaaggcctcgtatccttcggcaaagccccctgcggccaagtcggagtcccaggcgtctacaccaacctctgcaaattcaccgaatggatcgagaaaaccgtccaagcctcataa

SEQ ID NO: 4286 - RNA, 2673 nt, synthetic construct
  misc_feature 1..2673: note = AAC83230 variant
  source 1..2673: mol_type = other RNA
atgtcacaaggaatactcagcccacccgccggactactctcggacgacgacgtagtagtctcaccgatgttcgaaagcaccgcagccgacctaggctcagtagtccgcaaaaacctactgagcgattgctcagttgtctccacatccctcgaggacaaacaacaagtgccatccgaagactcaatggaaaaagtcaaagtctacctccgcgttcgacccctgctgccctcagagctcgaacgacaggaagaccagggttgcgtcagaatcgaaaacgtagaaaccctagtcctacaagcccccaaagactccttcgcgctgaaatccaacgaacgaggtataggccaggccacacaccgcttcacgttcagtcagatcttcggcccagaagtcgggcaagcatcattctttaacctcaccgtcaaagagatggtcaaagatgtcctcaagggacagaactggctcatatacacttacggagtaactaactccggcaagacacacaccatccaaggaacgataaaagacggtggaatcctaccccgctccctcgcactaatctttaattcactccagggacaactgcaccccacccccgaccttaagcccctcttaagcaacgaagtaatctggctagactcaaaacaaatccgacaggaagaaatgaagaaactatcactcttaaacggaggcctacaagaagaggagcttagcacgagcctcaaacgaagcgtatacatcgagtcaagaataggaacctcaacctcctttgattcaggtatcgccggactatccagcatatcgcagtgtacttcctccagccaactcgacgaaacatcacaccgctgggcacaaccagacacagcaccccttcccgtcccagccaacatccgattctccatctggatctccttcttcgaaatttacaatgagctactatatgatctcctagaaccgccatcccaacaacgaaaacgccaaaccctacgcctctgtgaggaccaaaatggcaacccatatgtcaaagacctcaactggatccacgtgcaagatgcggaagaagcctggaaactcctcaaagtcggacgcaaaaaccaatcattcgcaagcacccacctcaaccaaaattcctcccgatcgcactcgatctttagcatccgaatcctccacctccaaggagaaggcgacatcgtcccaaaaatctccgaactcagcctctgcgaccttgccggctctgaacgctgcaaagaccaaaaatcaggagaacgccttaaagaagccggcaacatcaacacaagcctccacaccctcggacgatgcatagccgccctgagacaaaaccagcaaaaccgatccaaacagaacctcgtaccattccgtgattccaaactaacaagggtattccaaggattcttcaccggtcgcggccgatcctgcatgatcgtcaacgtaaacccctgcgcatctacatacgacgagaccttacacgtcgccaaattctctgccatcgcgagccagctcgtccacgccccacccatgcagctaggcttcccctcccttcactcgttcatcaaagagcacagcctccaagttagcccctcccttgagaaaggcgcgaaagccgacaccgggctcgacgacgacatcgaaaatgaggcggacatctccatgtacggaaaagaggaactcctccaagtagtagaagcaatgaaaaccctcctgctaaaagagcgccaagaaaaactccaactcgaaatgcacctaagagacgaaatctgcaacgaaatggtcgaacaaatgcaacaacgagaacagtggtgctctgaacacttagacacacaaaaagaactcctcgaagagatgtacgaagaaaaactcaacatcctaaaagaatccctaaccagcttctaccaagaagaaatacaagaacgcgacgagaagatagaggaactcgaggcactgcttcaggaagcccgacaacaatcagtagcccaccagcaatctggctccgaactagcactccgacgctctcaacgactcgcagcatccgcaagcacccagcagctacaagaagtcaaagcaaaactccaacaatgcaaagcggagctaaactcaacgaccgaagaactccacaagtaccagaaaatgctagagccccctccctcagcaaaacccttcaccatcgacgtcgacaagaaactcgaagaaggccagaaaaacatacgactcctccgaaccgagctacagaaactcggagagagcttacagtccgccgaacgcgcctgttgccatagcacgggcgcaggcaaactgagacaagccctcacaacctgcgatgacatactaatcaaacaagaccaaaccctggccgaattacaaaataacatggtcctagtaaagctggacctacgcaagaaagcagcctgtatagccgaacagtaccacaccgtactcaaactccaaggacaagtcagcgcaaagaaaagactaggcaccaaccaagagaaccaacaacccaaccagcagccacccggaaagaaacccttcctacgcaacctcctcccccggacgccaacatgccaaagcagcactgactgctccccatacgcacgcatactccgatcacgccgctccccacttctcaaaagcggtcccttcggcaagaaatactag

SEQ ID NO: 4287 - RNA, 1113 nt, synthetic construct
  misc_feature 1..1113: note = AAH34621 variant
  source 1..1113: mol_type = other RNA
atggccatcaccctcgaagaagccccctggctaggctggctgctcgtcaaagccctcatgcgcttcgccttcatggtagtaaacaacctcgtcgccatcccctcatacatctgttacgtcatcatcctccaacccctccgggtcctcgactccaaacgcttctggtacatcgaaggtataatgtacaaatggctcctaggaatggtagcctcctggggctggtacgccggctacactgtcatggaatggggcgaagacatcaaagccgtctcaaaagacgaagcagtcatgctagtcaaccaccaagccaccggtgacgtatgcacacttatgatgtgcctccaagacaaaggcctcgtagtcgcccaaatgatgtggctcatggaccacatcttcaaatacaccaacttcggcatagtctcactcgtccacggagacttcttcatccgccaaggacgctcctaccgcgaccaacaactgctactcctcaaaaagcacctcgagaacaactaccgctcccgagaccgcaaatggatcgtcctcttcccagaaggcggcttcttacgcaaacgccgcgaaacatcacaagccttcgcaaaaaaaaacaacctccccttcctaacaaacgtcaccctcccccgctccggcgctaccaaaatcatcctaaacgcactcgtcgcccaacaaaaaaacggctcccccgccggcggcgacgcaaaagaactcgattccaaatcaaaaggcctccaatggatcatcgacaccaccatcgcctaccccaaagccgaacccatcgacatccaaacatggatactcggctaccgcaaacccaccgtcacccacgtccactaccgcatcttccccatcaaagacgtcccattagaaaccgacgacctcaccacatggctgtaccaacgattcgtcgaaaaagaagacctcctctcccacttctacgaaaccggcgcattccccccctccaaaggccacaaagaagccgtctcacgcgaaatgaccctctcaaacctctggatcttcctaatccagtccttcgccttcctaagcggctacatgtggtacaacatcattcaatacttctaccactgcctattctaa

SEQ ID NO: 4288 - RNA, 2178 nt, synthetic construct
  misc_feature 1..2178: note = AAH14924 variant
  source 1..2178: mol_type = other RNA
atggccatggactcctcgctgcaggcacgcctcttcccagggctagccatcaaaatccaacgaagcaacggcctaatccacagcgcaaacgttcgaaccgtgaacctagaaaaatcatgcgtaagcgtcgaatgggcggaaggaggagcaaccaaaggaaaagaaatcgacttcgacgacgtagccgccatcaaccccgaactgctccaactcctgcccctccacccaaaagacaacctaccgctccaagaaaacgtcacaatacagaagcagaaacgacgctcagtcaactccaaaatacccgcacccaaggaaagcctccgaagccgctccacgcgcatgtcgaccgtcagcgagctccgcataacagctcaagaaaacgacatggaagtcgaactacctgccgcggcaaattcgcggaagcaattcagcgtaccgccagcaccgacccgcccctcctgccccgccgtagcagaaatccccctccgaatggtaagcgaagaaatggaagaacaagttcacagcataagaggtagcagctcagcaaacccggtcaatagcgtccgccgcaaaagctgcctcgtcaaagaggtggagaaaatgaaaaacaagagagaggaaaagaaagcgcaaaactccgaaatgcgcatgaaacgcgcacaggaatacgactcttcgttcccaaactgggagttcgcacgcatgataaaagagttccgagcaaccctggaatgccatcccctcacgatgactgacccaatcgaagaacaccggatctgcgtctgcgtccgcaaacgcccactcaacaaacaagaactcgccaagaaagaaatcgacgtcatcagcataccgagcaaatgcctcttactggtacacgaacccaaactaaaagtagacctaacgaaatacctcgaaaaccaagccttttgcttcgacttcgctttcgacgaaaccgcgtcaaacgaagtagtataccgattcacagcacgccccctagtacaaacaatcttcgaaggaggcaaagcaacctgcttcgcctacggccaaacaggatccggaaaaacacacacaatgggcggggacctctccggaaaagcccaaaacgcctcaaaagggatctacgccatggcgagcagggacgtcttcctcctgaaaaaccagccatgctaccgaaaactaggactggaagtatacgtaacgttcttcgaaatatacaatggaaaactattcgacctactgaacaagaaagccaaactgcgcgtcctagaagacgggaaacagcaagtccaagtcgtcggacttcaggaacatctcgtcaattcagccgacgacgttataaaaatgatagatatgggctccgcatgcagaacatccggccagacattcgccaactcaaacagcagccgttcacacgcatgctttcaaatcatcctcagagcaaaaggccgcatgcacggaaaattctcgctagtggacctggcaggaaacgaacgcggcgcagacacctcctccgcagaccgccaaaccagaatggaaggagcagaaatcaacaaaagcctcctagccctcaaagaatgcatccgcgcactcggacaaaacaaagcacacacccctttcagggaaagcaaactcacgcaagtgctcagggacagtttcataggagaaaactcaagaacctgcatgatcgcgaccataagccctggaataagctcctgcgaatacaccctcaacacactgcgatatgccgatagagtaaaagaactttctccccactcaggaccctcaggcgagcaactaatacagatggaaacggaagaaatggaagcctgcagcaacggcgcactgatccccggcaacctctccaaagaagaagaggaactctcaagccagatgtcatccttcaacgaggcaatgactcaaatccgagagctcgaagaaaaagcaatggaggaactcaaagaaataatacagcagggcccagactggctagaactcagcgaaatgaccgaacaacccgactacgatctggagaccttcgtcaacaaagcagaaagcgccctagcgcaacaagccaaacacttctccgccctacgcgacgtaatcaaggcactacggctcgccatgcaactcgaagaacaagcctcacgccaaatcagttctaagaaaaggccacaataa

SEQ ID NO: 4289 - RNA, 342 nt, synthetic construct
  misc_feature 1..342: note = AAH62223 variant
  source 1..342: mol_type = other RNA
atgaacttctacctcctcctcgcctcctccatcctctgcgccctcatcgtcttctggaaataccgccgattccaacgcaacaccggcgaaatgtcctccaactccaccgccctcgccctcgtccgcccctcctcctccggcctcatcaactccaacaccgacaacaacctcgccgtctacgacctctcccgcgacatcctcaacaacttcccccactccatcgcacgccaaaaacgcatcctcgtcaacctctccatggtcgaaaacaaactcgtcgaactcgaacacaccctcctctccaaaggcttccgcggcgcctccccccaccgcaaatccacctaa

SEQ ID NO: 4290 - RNA, 2583 nt, synthetic construct
  misc_feature 1..2583: note = AAA56833 variant
  source 1..2583: mol_type = other RNA
atggggccatggggatggaaactcagatggaccgtagcactcttgctagccgccgccggcaccgccgtcggagaccgatgcgaacgcaacgagttccagtgccaagacggaaaatgtataagttacaaatgggtctgcgacggctcagcagaatgccaagacggcagcgacgaatcacaagaaacctgcctctccgtaacctgcaagtccggagacttcagctgcggcgggcgcgtaaacagatgcataccccaattctggcgctgcgatggacaagtcgactgtgacaacggaagcgacgaacaagggtgtcccccaaaaacatgttcccaggacgagttccgatgccacgacggaaagtgcatctcacgccaattcgtctgcgatagcgaccgggactgcctggacggaagcgacgaagcgagctgcccagtactcacatgcgggcctgccagtttccaatgtaactcctctacctgcatcccacaactctgggcatgcgacaacgacccggattgcgaggacggctcagatgaatggccgcaacgctgccggggactgtacgtattccaaggtgatagcagcccctgctcagcattcgaatttcactgcctgagcggcgaatgcatccacagctcctggcgctgcgatggcggacctgactgcaaagacaagagcgacgaggaaaactgtgcagtagcgacctgccgtcccgacgaatttcaatgcagcgatggcaactgcatacacggaagccggcaatgcgaccgcgaatacgactgcaaagacatgagtgacgaggtcggctgcgttaacgtaaccctatgtgagggaccaaataaattcaaatgccacagcggcgaatgcatcaccctggacaaagtctgtaacatggccagagactgccgtgactggtccgacgaacccatcaaagaatgcggaaccaacgaatgtctcgacaacaacggaggctgctcacacgtctgcaacgacttaaagatcgggtacgaatgcctatgtcccgacggctttcaactcgtcgcccaacgaaggtgcgaagacatcgacgaatgccaggaccctgatacatgctcccaactatgtgtcaacctagaaggaggctacaaatgccaatgtgaagaaggcttccaactagacccgcacacaaaagcatgcaaagcagtcgggagtatagcctacctatttttcaccaacagacacgaagtcagaaaaatgacactcgaccggtccgagtacacatcgctcatacccaacctacgaaatgtagtcgcactcgacaccgaagtagcctctaaccgcatatactggtccgacctaagccaacggatgatatgctctacccaacttgatcgcgcccacggagtgtcaagctacgataccgtcatctcccgagacatacaggcccccgacggactagccgtcgactggatacacagcaacatctactggacagactccgtcctaggaacagtctccgtagcagatacaaaaggagtcaaacgcaaaacgctattccgagaaaacggatccaaaccacgtgcaatagtcgtcgaccccgtacacggattcatgtactggaccgactggggcaccccagccaaaattaagaaaggaggactaaacggagtcgacatctacagcctcgtaaccgagaacatacaatggccaaacggcatcacgcttgacctcttatcaggacgactatactgggtcgacagcaaactacactccatcagttccatcgacgtcaatggtgggaaccggaagaccatactagaggacgaaaaacgattagcacatcccttctctcttgccgtatttgaagacaaagtcttctggacagacataataaacgaagctatctttagcgcaaatcgactcaccggatcggacgtaaacttactagcggaaaaccttctcagcccagaagacatggttctcttccacaacctcacgcaaccgcgcggagtcaactggtgcgaaaggaccacactgtccaacggcggatgtcaatatctctgcctaccagccccacagataaatccacattcacccaaattcacgtgcgcatgccccgacgggatgctactcgcacgcgacatgaggagctgccttaccgaagcagaagccgcagtcgccacccaagaaacctccacagtacgactaaaagtctcatccaccgcagtcaggacccaacacacgaccacccgccccgtacccgacacctcacgacttcccggagcaacgccaggcctaaccaccgtcgagatcgtcactatgtcgcaccaagcgctaggcgacgtagccgggagagggaacgagaaaaagccgtcaagcgtacgcgccctatccatcgtactcccaatcgtcctcctagtcttcctctgtctcggagtcttcctcttatggaaaaactggcgccttaagaacatcaacagcataaacttcgacaacccagtctaccagaaaactaccgaagacgaggtacacatctgccacaaccaagacggatatagctaccccagccgtcaaatggtcagcctggaagacgacgtcgcctaa

SEQ ID NO: 4291 - RNA, 1302 nt, synthetic construct
  misc_feature 1..1302: note = CAA70989 variant
  source 1..1302: mol_type = other RNA
atggtctggaaagtcgccgtcttcctatccgtcgccctcggcataggcgccgtccccattgacgaccccgaagacggcggcaaacactgggtagtcatcgtagcaggatccaacggctggtacaactaccgccaccaagcagacgcatgccacgcctaccaaatcatccacagaaacggcatacccgacgaacaaattgtcgtcatgatgtacgatgacatcgcctacagcgaagacaaccccaccccaggcatcgtcattaaccgcccaaacggcaccgacgtctaccaaggcgtcccaaaagactacactggcgaagacgtcaccccacaaaacttcctcgccgtcctcagaggagacgccgaagccgtcaaaggcataggctccggcaaagtcctcaaatcaggaccacaagaccacgtcttcatctacttcacagaccatggttccaccggaatactcgtcttcccaaacgaggacctacacgtcaaagaccttaacgagaccatacactacatgtataaacacaaaatgtaccgcaaaatggtcttctacatcgaagcctgcgaaagcggctccatgatgaatcacctaccagacaacatcaacgtatacgcaaccaccgccgccaaccccagagaatcctcctacgcctgctactacgacgaaaaacgctccacctacctcggcgactggtactccgtcaactggatggaagattccgacgtcgaagacctcacaaaagaaacactccacaaacaataccacctagtcaaatcacacacgaacacctcacacgtgatgcaatacggcaacaaaacaatctccaccatgaaagtcatgcaatttcaaggcatgaaacgcaaagcctcttcacccgtccccctacctcccgtaacacacctagacctcacacccagcccagacgtacccctcaccattatgaaacgcaaactaatgaacactaacgacctcgaagaatcccgacagctcaccgaagaaatccaacgccacctagacgccaggcacctcatcgaaaaatcagtccgcaaaatcgtatcgctcctagcagcctccgaagccgaagtagaacagctcctctcagaacgcgcacccctaacaggccactcctgctaccccgaagccctcctacacttccgaacacactgcttcaactggcacagcccaacttacgaatacgccctaagacacctatacgtactcgtcaacctctgcgaaaaaccataccccctacacagaatcaaactctccatggaccacgtctgcctaggccactactaa

SEQ ID NO: 4292 - RNA, 1797 nt, synthetic construct
  misc_feature 1..1797: note = AAL36991 variant
  source 1..1797: mol_type = other RNA
atgacccccatcgtcaccgtcctcatctgcctcggtctctctctaggcccccgaacacacgtccaaaccggcaccatacccaaacccacactatgggcagaacccgactccgtcatcacccaaggctcccccgtaaccctatcttgccaaggctccctcgaagcccaagagtaccgcctctaccgcgaaaagaaatcagcctcctggatcactcgtatacgacccgagctagtcaagaacggccaatttcacatcccctcaatcacctgggaacatacaggcagatacggttgtcaatactattcccgcgcacgctggtcagaactctccgaccccctagtcttagtcatgacaggagcctaccccaaaccaactctctccgcacaaccctcacccgtcgtcacatcaggcggccgcgtaacattgcagtgcgaatcgcaagtcgccttcggaggcttcatactgtgcaaagaaggcgaagaagaacacccccaatgcctaaactcccaaccccatgcccgcggctcatcccgcgctatcttttccgtaggacccgtctccccaaaccgtcgctggagccaccgctgctacggctatgatctaaattcaccctatgtctggtccagcccatcagatctactagaactactcgtccccggcgtatccaaaaagccatccctatccgtacaacccggccccgtcgtcgcaccaggagaatctctgaccctccaatgcgtatcagacgtaggatatgaccgattcgtcctctacaaagaaggcgaacgcgacctaagacagctacccggacgccaaccccaagccggactttcccaagctaacttcaccctcggccccgtctcccgctcctacggcggccagtaccggtgctatggcgcccataacctttcatccgaatgctccgccccgtcagaccctctggacatcctaatcactggccaaatacgcggcaccccgtttatatcagtccagcccggccccaccgtagcctccggcgaaaacgtcaccctactttgccaatcatggcgccagttccacaccttcctactaactaaagccggtgcagcagacgcaccactacgtctccgttcgatccacgaataccccaaataccaagccgagttccccatgagccccgtcacctccgcccacgcaggtacctaccgttgctacggctcactcaactccgacccctaccttctctcccacccatccgaacccctagaactcgtcgtatcgggtccctccatgggctcatccccaccacccaccggccccatctccacgcccgccggacccgaagaccaacccctcacaccaaccggctcagacccacaatcgggcctcggtagacacctaggcgtagttatcggcatcctcgtcgccgtcgtcctccttctcctcctactactccttctcttcctaatcctcagacaccgcagacaaggcaaacactggacctccacccaacgcaaagccgactttcaacaccccgccggtgccgtcggccccgaacccaccgacagaggcctccaatggcgatcctcacccgctgccgacgcccaagaagaaaacctatacgccgccgtcaaagatacccaaccagaagacggagtagagatggacacccgcgccgccgcatccgaagcaccccaagacgtcacctatgcccaactccactccctaacactacgccggaaagcaaccgaacctccgccctcccaagaacgtgaacctcccgccgaaccctccatctacgccaccctcgccatacactga

SEQ ID NO: 4293 - RNA, 498 nt, synthetic construct
  misc_feature 1..498: note = CCDS6385.2 variant
  source 1..498: mol_type = other RNA
atggccctcctcgccctcctcctcgtcgtcgccctcccccgcgtctggacagacgccaacctcaccgcccgccaacgcgaccccgaagactcccaacgcaccgacgaaggcgacaaccgagtctggtgccacgtctgcgaacgcgaaaacaccttcgaatgccaaaacccccgccgctgcaaatggaccgaaccctactgcgtcatcgccgccgtcaaaatcttcccccgcttcttcatggtcgccaaacaatgctccgccggctgcgccgcaatggaacgccccaaacccgaagaaaaacgcttcctcctcgaagaacccatgcccttcttctacctcaaatgctgcaaaatccgctactgcaacctcgaaggcccccccatcaactcatccgtcttcaaagaatacgccggctccatgggcgaatcctgcggcggcctctggctcgccatcctcctcctcctcgcctccatcgcagccggcctatccctctcctaa

SEQ ID NO: 4294 - RNA, 375 nt, synthetic construct
  misc_feature 1..375: note = AAA68873 variant
  source 1..375: mol_type = other RNA
atgtcgctcgagcaaaagagccagcactgtaaaccggaagagggcttggacacgcaagaggaagcgctcgggctcgtgggcgtgcaagcggccacgaccgaggaacaggaagcggtctcgagctcaagcccgctcgtgcccgggaccttgggcgaggtcccggccgcaggctcgcccgggcccttgaaatcgccccagggcgcgagcgcgatcccgaccgcgatcgatttcacgctctggcgccagagcataaaagggagctcaaaccaggaagaggaagggccctcgacatcgcccgatcccgagagcgtgttcagggccgcgctctcgaaaaaggtcgcggacttgatccatttcttgctcttgaaatattga

SEQ ID NO: 4295 - RNA, 957 nt, synthetic construct
  misc_feature 1..957: note = AAH02455 variant
  source 1..957: mol_type = other RNA
atgctactcgggcaaaagagccagcgctacaaagcagaagagggcctacaagcgcaaggcgaagcccccggactcatggacgtacaaataccaacggcagaggaacagaaagccgcatcgagctcaagcacgctcataatgggaacactagaagaagtcacggactcaggctcaccatcacccccgcaatccccagagggcgcaagctcgagcctgaccgtcacagacagcacactctggagccagagcgacgaagggagctcgagcaacgaagaagaaggaccatcaacatcgccagaccccgcacacctagaatcactatttcgcgaggcactggacgagaaagtggccgagctggtgcgattcctactacgaaagtaccagataaaggaaccggtcacgaaagcggaaatgctcgagagcgtgatcaaaaactacaaaaaccacttccccgacatatttagcaaggcctcggaatgcatgcaagtcatattcggaatagacgtaaaggaagtagacccggccgggcactcgtacatcctagtgacctgcctaggactatcgtacgacggcctactaggagacgaccaatcgaccccgaaaacgggcctgctcataatcgtgctcggaatgatcctcatggaaggcagcagggcaccggaagaggccatatgggaggccctgagcgtcatggggctctacgacgggcgcgagcactcggtgtactggaagctcagaaaactactcacgcaagaatgggtgcaagagaactacctcgaatacaggcaagcacccgggagcgacccagtgcgctatgagttcctctggggcccgcgcgccctcgcagaaacgagctacgtaaaggtcctggaacacgtcgtacgcgtgaacgcgcgcgtacgcataagctacccatcactacacgaagaagccttgggcgaagaaaagggcgtctga

SEQ ID NO: 4296 - RNA, 1290 nt, synthetic construct
  misc_feature 1..1290: note = AAH04479 variant
  source 1..1290: mol_type = other RNA
atggaaactcaattccggcgcggcggactcggctgcagccccgcctcaataaaacgcaaaaaaaaaagagaagactcaggcgacttcggcctccaagtctccaccatgttctccgaagacgacttccaatccaccgaacgcgccccatacggaccccaactacaatggtcccaagacctcccccgcgttcaagtcttcagagaacaagccaaccttgaagaccgcagcccccgcagaacacaacgcatcacaggcggcgaacaagtcctatggggtccaatcacccaaatcttcccaaccgtccgccccgccgacctcacccgagtgataatgcccctcgaacaacgctctcaacactgcaaacccgaagaaggactccaggcccaagaagaggacctaggccttgtcggagcacaagccctacaagccgaagaacaggaggccgccttcttctccagcaccttaaacgtcggcacactagaagaactaccagcggccgaatccccctcccccccccaatcaccacaggaagaatcattcagccccaccgccatggacgccatcttcggatccctctcagacgagggctcaggctcccaagaaaaagaaggcccaagcacctcccccgacctcatagaccccgaatccttctcacaagacatcctacacgacaaaatcatagacctcgtccacctactccttagaaaatatcgcgtcaaaggcctcatcaccaaagccgaaatgctgggctcagtaatcaaaaactacgaagactacttcccagaaatcttccgcgaagcgtccgtctgcatgcaactcctcttcggcatagacgtcaaagaggtcgaccccacctcacacagttacgtcctcgtcacatctctcaacctaagctacgacggaatccaatgcaacgaacaatccatgcccaaatcaggcctcctaataatagtcctcggcgtcatcttcatggagggtaactgcataccagaagaagtcatgtgggaggtcctctcaatcatgggagtatacgcaggccgagaacacttcctcttcggcgaacccaaacgactactcacccaaaactgggtccaagaaaaatacctagtataccgccaagtccccggcacagaccccgcatgctacgaattcctatggggcccaagagcacacgccgaaacctccaaaatgaaagtcctagaatacatcgccaacgcaaacggcagagacccaacctcatacccaagcctctacgaggacgcacttcgagaagaaggcgaaggcgtataa

SEQ ID NO: 4297 - RNA, 1110 nt, synthetic construct
  misc_feature 1..1110: note = EAW99421 variant
  source 1..1110: mol_type = other RNA
atgccacgcgcccccaaacgacaacgctgcatgcccgaagaagacctccaatcccaaagcgaaacccaaggcctagaaggcgcacaagcacccctcgccgtagaagaagacgcatcatcttccaccagcaccagctcctccttcccatcatccttcccctcctcctcctcctcttcctcctcctcatgctacccactaatccccagcacccccgaagaagtatccgccgacgacgaaaccccaaacccaccccaatctgcccaaatcgcctgctccagcccctctgtggtcgcctcactccccctcgaccaatcagacgaaggctcatcctcccaaaaagaagaatctccctcgaccctccaagttctccccgactcagaatctctaccccgttccgaaatcgacgaaaaagtcaccgatctagtccaattccttctcttcaaataccagatgaaagaaccaatcaccaaagccgaaattctcgaaagcgtaatcaaaaactatgaagaccacttccccctcctcttctccgaagcctccgaatgcatgctcctagttttcggaatcgacgtcaaagaagtcgacccgaccggccactccttcgtcctagtaacctccctaggcctaacctacgacggcatgctctcagacgtccaatcaatgccaaaaaccggaatactaatcctcatcctatccatcatattcatagaaggctactgcacccccgaagaagtcatctgggaagccctaaacatgatgggcctatacgacggcatggaacacctcatctacggcgaaccacggaaactgctaacacaagactgggtccaagaaaactacctcgaataccgccaagtccccggatccgaccccgctcgatacgaatttctctggggcccccgcgcccacgcagaaatccgcaaaatgtccctactcaaattcctcgccaaagtcaacggatccgacccccgctcattccccctatggtacgaagaagccctaaaagacgaagaggaaagagcacaagaccgcatcgccaccaccgacgataccaccgccatggcctccgcctcatcctcagccaccggctcattctcctaccccgaataa

SEQ ID NO: 4298 - RNA, 945 nt, synthetic construct
  misc_feature 1..945: note = AAH03408 variant
  source 1..945: mol_type = other RNA
atgcccctagaacaaagatcccaacattgtaaaccagaagaaggcctcgaagcccaaggcgaagccctaggtctagtcggcgcccaagccccagccaccgaagaacaagaaaccgcctccagcagctcaaccctcgtcgaagtaaccctccgcgaagtccccgccgccgaatcaccctccccaccccacagcccccaaggcgcctcaaccctacccaccacaatcaactacaccctctggagccaatccgacgaaggctcatccaacgaagaacaggaaggcccctccaccttccccgaccttgaaacatccttccaagtcgcactatcacgaaaaatggccgaacttgtacacttcctcctcctcaaataccgcgcccgcgaacccttcacaaaagccgaaatgttaggatccgtcatccgcaacttccaagacttcttccccgtcatcttctccaaagcatcagaatacctccaactcgtcttcggcatcgaagtcgtcgaagtcgtccgcatcggccacctatacatcctcgtcacatgcctaggcctctcctatgacggcctcctgggcgacaaccaaatcgtccccaaaaccggcctactcatcatcgttctcgccatcatcgccaaagaaggagactgcgcccccgaagagaaaatctgggaagaactctccgtcctcgaagcctccgacggccgcgaagactcagtattcgcccacccccgaaaactactcacacaagacctcgtccaagaaaactacctagaataccgccaagtccccggctccgacccagcctgctacgagttcctatggggcccccgcgccctagtcgaaacctcctacgtcaaagtactacaccacttactaaaaatctcaggcggcccccacatatcctacccacccctacacgaatgggcattccgcgaaggcgaagaataa

SEQ ID NO: 4299 - RNA, 930 nt, synthetic construct
  misc_feature 1..930: note = AAA03229 variant
  source 1..930: mol_type = other RNA
atgtccctcgaacaacgctcactccactgcaaacccgaagaagccctcgaagcccaacaagaagccctcggcctagtctgcgtacaagccgcaacctcatcctccagccccctcgtcctcggaaccctcgaagaagtccccacagccggatccaccgacccgccacaatcccctcaaggagcctccgccttcccgacaaccataaacttcacccgacaacgacaaccctccgaaggatcctcctcccgcgaagaagaaggcccatccacctcctgcatcctcgaatcactcttccgcgccgtcataaccaagaaagtcgcagacctcgtcggcttcctcctcctcaaataccgcgcccgcgaaccagtcaccaaagccgaaatgctagaatcagtaatcaaaaactacaaacactgcttcccagaaatcttcggcaaagcatccgaaagccttcaactcgtcttcggcatcgacgtaaaagaagcagaccccaccggccactcctacgtcttagtaacctgcctcggcctctcctacgacggtctcctcggcgacaaccaaatcatgcccaaaaccggcttcctaatcatcgtcctcgtcatgatcgccatggaaggaggccacgcccccgaagaagaaatctgggaagaactctcagtcatggaagtctacgacggccgcgaacactcagcgtacggcgagccccgcaaactcctcacccaagacctcgtccaagaaaaatacctagaataccgacaagtacccgactccgacccagcccgatacgagttcctctggggcccccgcgccctcgcagaaacctcatacgtcaaagtcctagaatacgtcatcaaagtatccgcccgtgtccgcttcttcttcccctcactacgcgaagccgccctccgagaagaagaagaaggcgtatag

SEQ ID NO: 4300 - RNA, 945 nt, synthetic construct
  misc_feature 1..945: note = AAA17729 variant
  source 1..945: mol_type = other RNA
atgcccctcgaacaacgcagccaacactgcaaacccgaagaaggcctcgaagcccgcggcgaagccctcggcctcgtaggcgcccaagcccccgcaaccgaagaacaacaaacagccagcagctcctccacactcgtcgaagtcacccttggagaagtccccgccgccgactccccctcacccccccactcaccccaaggcgcctcatccttctcaaccaccatcaactacaccctctggcgacaatccgacgaaggatcatctaaccaagaagaagaaggcccccgcatgttccccgacctcgaatcagaattccaagccgccatatcacgaaaaatggtcgaactcgtccatttccttctcctcaaataccgcgcccgcgaacccgtcaccaaagcagaaatgctagaatccgtcctacgcaactgccaagacttcttcccagtcatcttctccaaagcctccgaatacctccaactcgtcttcggcatagaagtcgtcgaagttgtcccaatatcccacctctacatcctcgtcacctgcctaggactctcatatgacggccttctcggcgacaaccaggtcatgcccaaaactggactactcataatcgtcctagccatcatcgctatcgaaggagactgcgcccccgaagaaaaaatctgggaagaactctccatgctagaagttttcgaaggccgcgaagactccgtcttcgcccacccccgcaaactcctcatgcaagacctcgtacaagaaaactacctagaataccgccaagtccccggctccgaccccgcctgctacgaattcctctggggcccacgagccctaatcgaaacctcctacgtcaaagttctccaccacacactcaaaatcggcggagaaccccatatttcatacccacccctacacgaaagagccctcagagaaggcgaagaataa

SEQ ID NO: 4301 - RNA, 945 nt, synthetic construct
  misc_feature 1..945: note = AAA17446 variant
  source 1..945: mol_type = other RNA
atgcccctcgaacaacgctcccaacactgcaaaccagaagaaggcctcgaagcccgcggagaagccctcggactcgtcggcgcccaagccccagccaccgaagaacaagaagccgcctcctcctcctccaccctagtcgaagtcacactaggcgaagtcccagccgccgaatcccctgaccccccccaatcaccccaaggcgcctcctcactaccaaccaccatgaattacccactctggtcacaatcatacgaagactcctcaaaccaagaagaggaaggaccctccacattccccgacctagaatccgaattccaagctgcactctcacgaaaagtcgcagaactagtacacttcctcctcctcaaataccgagcccgagaaccagtcaccaaagctgaaatgctcggctcagtagtaggcaactggcaatacttcttccccgtcatcttctccaaagcctcctcatccctccaactcgttttcggcatcgaactcatggaagtcgacccaatcggccacctctacatcttcgcaacctgcctaggactatcctacgacggcctcctaggcgacaaccaaatcatgcccaaagccggcctcctcatcatcgttctcgccatcatagcccgcgaaggcgactgcgccccagaagaaaaaatctgggaagaactttccgtcctcgaagtattcgaaggccgagaagactcaatcctcggcgaccccaaaaaactcctcacccaacacttcgtacaagaaaactacctcgaataccgacaagtccccggctcagaccccgcctgctacgaattcctctggggcccccgcgcactcgtcgaaacatcctacgtcaaagtcctccaccacatggtcaaaatatccggcggaccacacatctcctatccccccctccacgaatgggtcctacgcgaaggcgaagaatag

SEQ ID NO: 4302 - RNA, 954 nt, synthetic construct
  misc_feature 1..954: note = EAW99410 variant
  source 1..954: mol_type = other RNA
atgtcgagcgaacagaaaagtcaacactgcaaaccggaggagggcgtggaagcacaagaggaagcgctcgggctcgtaggcgcgcaagcacccacgaccgaggaacaagaagcggccgtaagctcgagcagccctctagtcccaggcacgctcgaggaagtgcccgcagccgagagcgcggggccaccccaaagcccgcaaggggcctcggccctgcccacgaccatatcgttcacatgctggaggcaaccgaacgagggcagcagctcgcaagaggaagagggaccgagcacgagcccggacgcggaatcactcttccgcgaggcactgagtaacaaagtggacgaactcgcgcacttcctcctacgtaagtacagggccaaggagctagtcaccaaagcggaaatgctcgaaagagtgatcaaaaactacaaacggtgctttccagtgatattcggaaaggcctcggaatcgctcaagatgatattcgggatcgacgtcaaggaagtggaccccgcatcgaacacgtacacgctcgtaacctgcctcgggctatcctacgacggcctgctaggaaacaaccaaatattcccgaaaacgggcctgctcataatcgtgctcggaacaatagccatggaaggggactcagcctcggaagaagaaatttgggaggaactaggcgtgatgggtgtctacgacgggcgcgagcacacagtctacggcgagcccagaaaactgctaacgcaagactgggtgcaagagaactacctcgaatacagacaagtgcccgggagcaacccagcgcgatacgagttcctctggggcccgcgcgcgctcgcggaaacgagctatgtcaaggtactggaacacgttgtccgagtaaacgcgcgagtgcgcatagcctatccatcactcagggaagcagcactactagaagaagaagaaggggtatag

SEQ ID NO: 4303 - RNA, 954 nt, synthetic construct
  misc_feature 1..954: note = AAA68871 variant
  source 1..954: mol_type = other RNA
atgtcgagcgaacaaaagagccaacactgcaaaccggaagagggcgtagaagcgcaagaggaagcactcggactcgtgggcgcgcaagcacccacgaccgaggaacaggaagcggcagtgagctcgagctcaccactggtcccgggcacgctcgaagaagtgcccgcagccgagagtgcgggcccgccccaaagcccgcaaggggcctcggcactgcccacaacaatatcattcacgtgctggaggcaaccaaacgagggcagcagctcgcaggaagaagagggcccaagcaccagcccagacgcggaatcactattccgagaagccctgagcaacaaagtcgacgagctagcgcacttcctactgcgcaaatacagggccaaagagctagtcacgaaagcggaaatgctcgaacgagtgatcaaaaactacaaaagatgcttccccgtgatcttcggaaaggcatcagaatcgctcaagatgatattcgggatcgacgtcaaagaagtggacccggcctcaaacacgtacacgctcgtaacctgcctcgggctctcgtacgacggactactcgggaacaaccaaatattcccgaaaacgggcttactcataatcgtgctcgggaccatagccatggaaggcgactcggcatcggaagaggaaatatgggaggaattgggcgtgatgggggtctacgacggacgagagcacacggtatacggcgagccaaggaaactgctcacgcaagattgggtgcaagagaactacctcgagtacaggcaagtgccaggaagcaatcccgcgcgatacgagttcctctggggtccacgcgcactagccgaaacgagctacgtcaaggtactggaacacgtcgtgcgcgtgaacgcgcgcgtacgcatagcctacccctcacttagggaagcggccttgctagaagaagaggaaggggtctag

SEQ ID NO: 4304 - RNA, 954 nt, synthetic construct
  misc_feature 1..954: note = AAY27261 variant
  source 1..954: mol_type = other RNA
atgtcgagcgagcaaaagagccagcactgcaaaccagaagagggcgtggaagcgcaagaggaagcgctcgggctcgtgggagcgcaagcacccacgacagaggaacaagaagcagcagtgagctcgtcatcacccctagtccccggcacactcgaggaagtgcccgcggccgagagcgcgggaccgccccagagcccgcaaggggcctcagccctacccacgaccatcagcttcacatgctggcgacaaccaaacgagggctcgagctcgcaagaggaagaaggcccgagcacgagcccggacgcggaatcgctattccgcgaggcactgtccaacaaagtcgacgaactcgcgcactttctcctacgcaaataccgagccaaggaactggtcacgaaagcagaaatgctagagcgagtaataaagaactacaaaaggtgcttccccgtcatcttcggcaaggcatcggaatcactaaagatgatcttcgggatcgacgtcaaggaagtggacccgacctcaaacacatacacgctcgtcacatgcctcggactctcgtacgacggactactcgggaacaaccaaatattcccaaaaacaggcctgctaataatcgtgctcggaaccatagccatggaaggagactcagcctcggaagaagaaatctgggaggaattgggagtaatgggggtctacgacggacgcgagcacacggtctacggcgagccacgaaaactgctcacgcaagactgggtacaagagaactacctcgaatacagacaagtccccggaagcaacccagcccgctacgagttcctctggggcccacgagcactcgcggaaacgagctacgtaaaagtactggaacacgtcgtacgagtgaacgcgagagtgcgcatagcctacccctcactcagggaagcggccctgctagaagaagaggaaggggtctag

SEQ ID NO: 4305 - RNA, 945 nt, synthetic construct
  misc_feature 1..945: note = BAF82126 variant
  source 1..945: mol_type = other RNA
atgcccctcgaacaacgctcccaacactgcaaacccgaagaaggccttgaagcccgcggtgaagccctgggcctcgtcggagcccaagcccccgccacagaagaacaagaagcagcatccagctcctcaaccctcgtcgaagtcacactcggcgaagtccccgccgccgaaagccccgaccccccacaatccccccaaggagcctcatccctccccaccacaatgaactaccccctatggtcccaatcctacgaagactcctccaaccaagaagaagaaggccccagcaccttccccgacctcgaatcagaattccaagccgccctctccagaaaactcgctaaattggtccacttcctcctactcaaataccgcgctcgagaacccgtcaccaaagccgaaatgctaggctcagtcgtaggcaactggcaatacttcttccccgtcatcttcagcaaagcctccgactccctccaacttgtcttcggcatagaactaatggaagtcgatcccataggccacgtctacatcttcgccacatgcctcggcctctcctacgacggcctcctcggcgacaaccaaatcatgcccaaaaccggcttcctaatcatcatcctcgccatcatcgcaaaagaaggcgactgcgctccggaagaaaaaatctgggaagaactctccgtcctcgaagtcttcgaaggccgcgaagacatcatcttcggggaccccaaaaaactcctcacccaatacttcgtacaagaaaactacctagaataccgacaagtcccaggctcagaccccgcctgctacgaattcctctggggcccccgagccctcatcgaaacctcctacgtcaaagtcctccaccacatggtcaaaatatccggcggaccccgcatatcctaccccctcctacacgaatgggccctccgcgaaggagaagaataa

SEQ ID NO: 4306 - RNA, 945 nt, synthetic construct
  misc_feature 1..945: note = AAA19006 variant
  source 1..945: mol_type = other RNA
atgcccctcgaacaacgatcccagcactgcaaacccgaagaaggcctcgaagcacgcggcgaagcactgggcctcgtcggcgcacaagcccccgccacagaagaacaagaagccgccagcagctcctcaacactcgtcgaagtcaccctaggcgaagtcccagccgctgaatcccccgaccccccccaaagcccacaaggcgcctcctccctccccaccacaatgaactaccccctctggtcccaatcgtacgaagactcatccaaccaagaagaagaaggaccctccaccttccccgacctcgaatcagaattccaagccgcactctcccgcaaagtcgccaaactcgtacacttcctactcctcaaataccgagcaagagaacccgtcacaaaagccgaaatgctcggtagcgtagtaggcaactggcaatacttcttccccgtcatcttctccaaagcctcagactccctccaactcgtcttcggcatcgaactcatggaagtcgaccccatcggccacgtctacatcttcgccacctgcctcggcctatcctacgacggcctacttggcgacaaccaaatcatgcccaaaaccggattcctaatcatcatcctcgccatcatagccaaagagggagactgcgccccagaagaaaaaatctgggaagaactatctgtactagaagtcttcgagggccgcgaagactcaatattcggcgaccccaaaaaactcctcacccaatacttcgtccaagaaaactatctagaataccgacaagtccccggatcagaccccgcatgctacgaattcctctggggaccccgcgccctaatcgaaacatcatacgtcaaagtcctacaccacatggtcaaaatatccggcggcccaagaatatcatacccactcctacacgaatgggccctccgagaaggagaagaataa

SEQ ID NO: 4307 - RNA, 945 nt, synthetic construct
  misc_feature 1..945: note = CAG46567 variant
  source 1..945: mol_type = other RNA
atgccactcgaacaacgcagccaacactgcaaacctgaagaaggcctcgaagcccgcggagaagcactcggcctagtcggcgcccaagcccccgccaccgaagaacaagaagccgcctcttcatcctccaccctcgtagaagtcacactcggcgaagtccctgccgccgagagccccgacccccctcaaagcccacaaggcgcctcctccctccccaccacaatgaactaccccctctggtcccaatcctacgaagactcatccaaccaagaagaagaaggcccctccaccttccccgacctagaatccgaattccaagccgccctctcccgaaaagtcgccaaactagtccacttcctacttctcaaataccgcgccagagaacccgtcaccaaagccgaaatgctaggctccgtcgtcggcaactggcaatacttcttccccgtcatcttctccaaagcctcagactccctccaactcgtcttcggcatcgaactcatggaagtagaccccatcggccacgtctacatcttcgcaacctgcctcggcctctcatacgacggcctcctaggcgacaaccaaatcatgcccaaaacaggcttcctcattatcatccttgccatcatcgccaaagaaggcgactgcgcccccgaagaaaaaatctgggaagaactctccgtcctagaagttttcgaaggccgcgaagactccatcttcggagaccccaaaaaactcctcacccaatacttcgtccaagaaaactacctcgaataccgccaagtaccaggatccgacccagcctgctacgaattcctatggggcccccgcgccctaatcgaaaccagctacgtcaaagtactccaccacatggttaaaatatccggcggcccccgcatctcctaccccttactccacgaatgggccttccgtgaaggtgaagaataa

SEQ ID NO: 4308 - RNA, 948 nt, synthetic construct
  misc_feature 1..948: note = AAA68877 variant
  source 1..948: mol_type = other RNA
atgtccctcgaacaacgcagcccccactgcaaacccgacgaagacctagaagcccaaggagaagacctaggactcatgggcgcccaagaacccacaggcgaagaagaagaaaccacctcctcctccgactcaaaagaagaagaagtatccgccgccggatccagctccccaccacagtcaccacaaggcggcgcctcctcctccatatcagtatactacacactctggagccagttcgacgaaggaagctcaagccaagaagaggaagaaccatcatcatccgtcgaccccgcacaactcgagttcatgttccaagaagccctcaaactcaaagtcgcagaactagtccacttcctcctacacaaataccgcgtcaaagaacccgtcaccaaagccgaaatgctagaatccgtcatcaagaactacaaacgatacttccccgtcatcttcggaaaagcatccgaattcatgcaagtcatcttcggcaccgacgtcaaagaagtcgatcccgccggccacagctacatcctcgtcacggcactgggcctatcatgcgactcaatgctaggagacggccactccatgcccaaagccgccctcctcataatcgtcctgggcgtaatcctcacgaaagacaactgcgccccagaagaagtaatctgggaagccctctccgtcatgggcgtctacgtcggcaaagaacacatgttctacggcgaaccccggaaactactcacacaagactgggtacaagaaaactacctagaataccgacaagtcccaggatccgaccccgcacactacgaattcctctggggctccaaagcacacgccgaaaccagctacgaaaaagtaataaactacctcgtcatgctcaacgcacgcgaaccaatctgctacccatccctatacgaagaagtcctaggagaagaacaagaaggcgtctaa

SEQ ID NO: 4309 - RNA, 1044 nt, synthetic construct
  misc_feature 1..1044: note = AAI01309 variant
  source 1..1044: mol_type = other RNA
atgccacgcggccaaaaatccaaactacgcgccagagaaaaacgccgacaagcacggggcggactagaagacctaatcgacgccctcgacatactagaagaagaagaagaatcacccccatcagcatccgcatgcctaaaagacgtcttccaatcatccctagacggcgcctccaacaacccacacggcctccgcgaagcccaaagcacatcaacctccgcaaccgcagcctcccacacccgacaccccgaaggcgtaaatgaccagatggaagaacgacccatctgcacccaagaccttgaagccacagacagcttcccccgaggacccgtagacgaaaaagtcatcattctagtccactacctcctgtacaagtaccaaatgaaagaacccataactaaagccgacatgctaagaaacgtcacccaaatgtccaaatcccaattccccgtcatactctcccgagccagcgaacacctcgaactcatcttcggcctcgacctaaaggaagtagaacctaacaaacacatctacgtcctagtcaacaaactcgacctcggctgcgacgccaaactctccgacgaaaccggcgtccccaaaacaggcctactcatgaccgtcctcggcatcatcttcaccaacggcaactgcgtcgccgaagaagaagtctggaaagtcttcaacacaatgggcctctacgacggaatcgaacacttcatgttcggcgaaccacgaaaactactaaccaaagacctcgtcaaagaaaactacctcgaataccaacaagttcccaactccgacccaccccgataccaattcctctggggccccagagcccacgccgaaaccagcaaaatgaaagtcctcgagttcctagccaaagtcaacgacaccgccccctcagagttcagcaactggtacaccgaagcccttcaggacgaagaagaacgcgcccgagcccgagtcgcagccaaagcccgagtctccgccacagccggtgctcgcagcaaagtcaaatcctccaaaagcagccaactacaataa

SEQ ID NO: 4310 - RNA, 975 nt, synthetic construct
  misc_feature 1..975: note = CCDS43927.1 variant
  source 1..975: mol_type = other RNA
atgtcccaggaccaagaatccccgcgttgcacccacgaccaacacctccaaacgttctccgaaacccaatccctcgaagtcgcccaagtctccaaagcactcgaaaaaaccctactatcatcctcccacccccttgtccccggaaaactcaaagaagcccccgccgcaaaagcagaatcccccctcgaagtcccccaatcattctgctcatcatcgatagccgtcaccaccaccagctcctccgaatcagacgaagcctcctccaaccaagaagaagaagactccccctcctccagcgaagacacctccgaccccagaaacgtccccgcagacgccctcgaccaaaaagtcgccttcctagtcaatttcatgctgcacaaatgccaaatgaaaaaacccataaccaaagccgacatgctaaaaatcatcatcaaagacgacgaaagccacttctcagaaatactcctccgcgcctcagaacacctagaaatgatcttcggcctcgacgtcgtcgaagtcgatcctaccacccactgctacggcctcttcatcaaactcggcctcacatacgacggaatgctatccggagaaaaaggcgtaccaaaaaccggactcctcatcatcgtcctcggcgtaatcttcatgaagggcaaccgcgccacagaagaagaagtctgggaagtactgaacctcaccggcgtatactcgggaaaaaaacacttcatattcggagaaccccgcatgcttatcaccaaagactttgtcaaagaaaaatacttagaataccaacaagtcgccaactcagacccagcacgctacgaattcctctggggcccccgcgccaaagccgaaacctcaaaaatgaaagtcctcgaattcgtcgccaaagtccacggcagctacccccactctttccccagccaatacgcagaagccctcaaagaggaagaagaacgagcccgagcccgcatctaa

SEQ ID NO: 4311 - RNA, 1011 nt, synthetic construct
  misc_feature 1..1011: note = CCDS59524.1 variant
  source 1..1011: mol_type = other RNA
atgccccgaggacaagcatccaaacgacgagcccgagaaaaacgcagacaagcaagaggcgaagaccaatgcctcggcggcgcccaagcaaccgccgccgaaaaagaaaaactccccagcagctccagccccgcctgccaatccccaccccaatccttcccaaacgccggcatcccacaagaaagccaaagagccagctacccctcctcgcccgcctcagcagtctcactcaccagctcggacgaaggagcaaaaggccaaaaaggcgaaagcccaaactcattccacggcccttcctcatccgaaagcaccggacgcgacctcctcaacaccaaaacaggcgaactcgtacaattcctactaaacaaatacatccggaaagaacccatcaccagagaagccatgctcaaagtcatcaaccgcaaatacaaacaacacttccccgaaatcctacgccgcagcaccgaaaacgtagaagtcgtcttcggcctctacctcaaagaaatggacccctccagacaatcctacgtcctagtaggaaaactcgacttcccgaaccaaggctcactttccgacggaggaggcttccccctaagcggcctcctaatggtcctactctccaccatattcatgcatggaaacagagcaaccgaagaagaaatgtgggaatgcctcaacgccctcggaatgtacaaaggcagaaaacacttcatctacggcgaaccccaagaactggtcacaaaagacctagtacgcgaaggctacctggaataccaacaagtcccatcctccgacccaccccgctacgagttcctctggggcccccgcgcccgagcagaaacctccaaaatgaaagtcctcgagttcgtggccaaactaaacgacaccgtagcctccacatacaaatcacgctacgaagaagccctccgcgaagaagaagaacaagcacgcgcacgagcagtcgcccgcgacagcgcccgagccagagcgtccaggagcttccaaccataa

SEQ ID NO: 4312 - RNA, 1044 nt, synthetic construct
  misc_feature 1..1044: note = AAC23616 variant
  source 1..1044: mol_type = other RNA
atgccacgcggccaaaaatcaaagctacgcgcccgcgaaaaacgccgaaaagcacgcgaagaaacccaaggcctcaaagtacgacacgccaccgcggcagaaaaagaagaatgcccatcgagctcacccgtcctcggcgacacgcccacctcctcgcccgcagccggcataccacaaaaaccccaaggcgcaccacccaccaccaccgcggccgcagcagtctcctgcaccgaatccgacgaaggcgccaaatgccaaggcgaagaaaacgcatcattctcccaagcaacaaccagcacagaatcctccgtcaaagaccccgtcgcctgggaagccggaatgctcatgcactttatcctccgcaaatacaaaatgcgagaacccatcatgaaagccgacatgctcaaagtcgtagacgagaaatacaaagaccacttcaccgaaatactaaacggcgcctcccgccgcctcgaactcgtattcggcctagacctcaaagaagacaacccgagctcccacacctacacgctagtctccaaactcaacctaacaaacgacggcaacctatccaacgactgggacttcccccgcaacggccttctcatgccactcctaggcgttatcttcctcaaaggcaactccgcaaccgaagaagaaatatggaaatttatgaacgtactcggagcctacgacggcgaagaacaccttatctacggcgaaccccgcaaattcatcacccaagacctcgtccaagaaaaatacctcaaatacgaacaagtacccaactccgacccaccccgctaccaattcctatggggcccccgcgcctacgcggaaaccaccaaaatgaaagtcctggagttcctcgccaagatgaacggagcaacccccagagacttcccctcccactacgaagaagccctgcgagacgaagaagaacgagcccaagtccgaagctccgtacgcgcccgacgccgaacaaccgccaccacattccgagcccgctcacgcgcccccttctccaggagctcccaccccatgtaa

SEQ ID NO: 4313 - RNA, 960 nt, synthetic construct
  misc_feature 1..960: note = AAD10635 variant
  source 1..960: mol_type = other RNA
atgccaagaggccaaaaatcgaaattgcgcgcgcgcgagaaaaggcgcaaggcaagggacgagacccgaggcctgaacgtgccccaagtcacggaagcagaagaggaagaagccccgtgctgcagctcgagcgttagcggaggcgcggcatcaagctcgcccgcggcagggataccacaagagccccaacgggcgccaacaaccgcagccgcggccgcggcaggggtctcgagcacgaaatcgaaaaagggcgcgaaatcgcaccagggcgagaaaaacgcctcgagctcacaagcaagcacgagcacgaaatcaccctcggaagaccccttgaccagaaaatcaggctcgctcgtgcaattcctattgtacaagtacaagatcaagaaatcggtcacaaaaggggaaatgctcaaaatcgtgggcaagcgcttccgcgagcacttcccagagatcctgaaaaaggcctctgaagggctctcggtcgtgttcgggctcgaactcaacaaagtgaacccgaacggccacacatacacattcatcgacaaggtcgacctcacagacgaggaatcactactaagctcctgggacttcccgcgaagaaaactgctaatgcccctactcggagtaatattcctaaacggaaactcagccacggaagaggaaatatgggagttcctaaacatgctcggcgtctatgacggagaagaacactcggtcttcggagagccctggaaactaatcaccaaagacctcgtgcaagagaaatacctcgaatacaagcaagtaccctcgagcgacccgccccgcttccagttcctctggggcccgcgcgcttacgcggaaacgagcaaaatgaaggtcctcgagttcctcgcgaaagtgaacggaaccacgccatgcgccttccccacgcactacgaagaagccctgaaagacgaagagaaagcaggcgtgtaa

SEQ ID NO: 4314 - RNA, 1041 nt, synthetic construct
  misc_feature 1..1041: note = AAD10636 variant
  source 1..1041: mol_type = other RNA
atgccccgcggccaaaaatccacactacacgcacgcgaaaaacggcagcaaacccgcggccaaacccaagaccatcaaggagcccaaatcaccgccaccaacaaaaaaaaagtctccttctccagccccctcatcctcggcgccacaatacaaaaaaaatcagcaggacgcagccgctccgccctcaaaaaaccccaacgcgccctgtccaccaccacctcagtggacgtctcctacaaaaaatcctacaaaggcgctaactccaaaatcgaaaaaaaacaaagcttcagccagggcctctcctcaacagtccaatcaagaactgaccccctcatcatgaaaacaaacatgctcgtacaattcctcatggaaatgtacaaaatgaaaaaacccatcatgaaagcagacatgctcaaaatcgtccaaaaatcacacaaaaactgctttccagaaatcctaaaaaaagccagcttcaacatggaagtagtcttcggcgtcgacctcaaaaaagtcgactccaccaaagactcctacgtcctagtcagcaaaatggacctccccaacaacggaacggtcacccgcggccgcggcttccccaaaaccggactcctactcaacctcctaggcgtcatcttcatgaaaggcaactgcgccacagaagaaaagatctgggaattcctcaacaagatgcgcatatacgacggcaaaaaacacttcatcttcggcgaaccccgaaaactcatcacacaagacctggtcaaactcaaatacttagaataccgccaagtccccaactcaaaccccgcccgctacgaattcctctggggcccccgcgcacacgccgaaacaagcaaaatgaaagtcctcgaattctgggccaaagtcaacaaaaccgtcccctccgctttccaattctggtacgaagaagccctccgagacgaagaagaacgcgtccaagcagccgccatgctcaatgacggctcctcggccatgggccgcaaatgcagcaaagccaaagcctccagctcctcccacgcctaa

SEQ ID NO: 4315 - RNA, 1041 nt, synthetic construct
  misc_feature 1..1041: note = AAC23619 variant
  source 1..1041: mol_type = other RNA
atgccccgaggccaaaaatcaaaactacgagcccgcgaaaaaagacaacgaacacgcggccaaacccaagacctcaaagtaggccaacccaccgcagccgaaaaagaagaatccccatcctcgtcctcatccgtcctccgcgacaccgcctccagcagccttgccttcggcatcccccaagaaccgcaacgcgaaccccccaccacctcggccgcagccgccatgtcctgcaccggctccgacaaaggcgacgaatcccaagacgaagaaaacgcctcctcatcccaagcctcaacctccaccgaacgaagcctcaaagactccctaacccggaaaacaaaaatgctagtacaattcctcctctacaaatacaaaatgaaagaacctaccaccaaagccgaaatgctcaaaatcatctcaaaaaaatacaaagaacacttccccgaaatcttccgcaaagtctcccaacgaaccgaactcgtattcggactcgccctcaaagaagtcaacccaacaacccactcctacatcctcgtcagcatgctcggccccaacgacggcaaccaaagctctgcatggaccctcccccgcaacggtctcctcatgccactcctatcggtcatattcctaaacggcaactgcgcccgagaagaagaaatctgggaattcctcaacatgctcggaatctacgacggcaaacgccacctcatcttcggcgaaccccgcaaactcatcacccaagacctagtccaagaaaaataccttgaataccaacaagtccctaactcagacccccctcgataccaattcctctggggcccccgcgcccacgccgaaacttccaaaatgaaagtcctcgaattcctcgcaaaagtcaacgacaccaccccaaacaacttcccactcctctacgaagaagctctccgcgacgaagaagaacgcgctggcgcacgcccacgagtcgcagcccgccggggcacaacagccatgaccagcgcctactcccgcgccaccagcagcagcagctcacaacccatgtaa

SEQ ID NO: 4316 - RNA, 828 nt, synthetic construct
  misc_feature 1..828: note = CCDS65233.1 variant
  source 1..828: mol_type = other RNA
atgacctcagccggcgtcttcaacgcaggatcagacgaacgtgccaactcccgcgacgaagaatacccctgcagctccgaagtctccccctccaccgaatccagctgctccaacttcatcaacataaaagtcggcctactcgaacaattcctcctgtacaaattcaaaatgaaacaacgaatcctcaaagaagacatgctcaaaatcgtcaacccccgctaccaaaaccagttcgccgaaatccaccgccgcgcctccgaacacatagaagtcgtcttcgcagtcgacctcaaagaagtcaaccccacctgccacctatacgacctcgtcagcaaactcaaactccccaacaacggccgaatccacgtcggcaaagtcctccccaaaaccggcctcctcatgaccttcctcgtcgtaatcttcctcaaaggcaactgcgccaacaaagaagacacctggaaattcctagacatgatgcaaatctacgacggtaaaaaatactacatctacggcgaaccccgaaaactaatcacccaagacttcgtacgcctcacctacctcgaataccaccaagtcccatgctcctaccccgcccactaccaattcctctggggcccacgagcctacaccgaaacctccaaaatgaaagtcctcgaatacctcgccaaagtaaacgacatcgcccccggcgcattttcctcacaatacgaagaagccctccaagacgaagaggaatccccctcacaacgatgctcccgcaactggcactactgctccggccaagactgcctacgagccaaattctcctccttctcccaaccctactaa

SEQ ID NO: 4317 - RNA, 1224 nt, synthetic construct
  misc_feature 1..1224: note = AAH67286 variant
  source 1..1224: mol_type = other RNA
atgcccagaggccacaaatcaaaactgcgaacatgcgaaaaaaggcaggaaaccaacggccaaccccaaggactgaccgggccccaagcaacagcagaaaaacaagaagagagccacagttccagctcaagctccagagcctgtctaggcgattgcagaagatcctccgacgcatcgatcccccaagagagccagggagtcagcccaaccggaagccccgacgcagttgtttcctacagcaaaagcgacgtcgcagccaacggccaagacgaaaaatccccctcaacctcccgcgatgcctcggtcccacaagaaagccaaggcgccagcccaaccggatcccccgacgctggcgtcagcggcagcaaatacgacgtcgccgccaacggccaagacgagaaatcgccatccacctcacacgacgtatcagtccctcaagaaagccaaggcgcaagcccaacaggatccccagacgcaggagtaagcggaagcaaatacgacgtagccgcagagggcgaggacgaagaatccgtatcagcctcccaaaaagccataatcttcaaacgcctctccaaagacgccgtgaagaaaaaagcatgcacactcgcacaattcctccaaaaaaaattcgaaaaaaaagaatccattctaaaagcagacatgctcaaatgcgtacgacgagaatacaaaccctacttcccacagatcctaaacaggacctcccaacacctcgtagtcgcgttcggggtagaactaaaagaaatggattccagcggcgaatcatacacactcgtctccaaactcggcctcccaagcgagggcatcctctcgggcgacaacgcactccccaaatcaggcctactcatgagcctcctagtcgtaatattcatgaacggaaactgcgccacagaagaagaagtgtgggaattcttgggcctcctcggaatatacgacggaatcctacactcgatctacggcgacgcccgaaaaatcatcacagaagacctcgtgcaagacaaatacgtagtgtacagacaagtatgcaacagcgaccccccatgctacgaatttctatggggcccacgcgcgtacgcggaaacgaccaaaatgagggtcctgcgcgtactcgcagactcaagcaacacatcacccggactatacccccatctctacgaagacgccctaatcgacgaagtcgaaagagccctacgcctacgcgcataa

SEQ ID NO: 4318 - RNA, 3429 nt, synthetic construct
  misc_feature 1..3429: note = CCDS35417.1 variant
  source 1..3429: mol_type = other RNA
atgggcgacaaagacatgccaacagccggaatgccctccctcctgcaatcttcaagtgaatcgccccaatcatgccccgagggagaagactcccagagccccctccaaatccctcaatcctcccccgaatctgatgacactctataccccctacagagtccgcagtcccgctccgaaggcgaagacagctccgaccccctccaacgccctcccgaaggcaaagactcccaatctccccttcaaattccacaatcttcacctgaaggcgacgacactcagtcacccttacaaaacagccaatcatcccccgagggcaaagattcactatcacctttggagatctcccaatctcctcccgaaggagaggacgtccaatcccctctccagaaccccgcctcatctttcttctcttccgcacttcttagcatattccaatcgtctcccgaatccacacagtccccatttgaaggctttccccagtctgtcctacagatccccgtatcggcagcttcctcatcaaccctcgtttccattttccaaagcagcccagagtcaacccaatcccccttcgaaggcttcccccaatcgccccttcaaatccccgtttcccgctccttttcctccaccctattgtccatattccaatcatcacccgaacgtacccaatccacatttgaaggcttcgcccagtctcccctacaaattcccgtttccccatcatcatcatccacactattatcattattccagtcattcagcgaacgcacccagtccaccttcgaaggattcgcgcagagttcgctccaaatacccgtctccccctctttctcctccactctcgtctccttatttcaatcctccccagaacgtacccaaagtacctttgagggtttcccccagtcacccctacagatcccagtcagctcctcgtcttcaagcaccctgctctctctctttcaatcctcacccgaacgtacacattcaactttcgagggtttcccccaatccctcctccaaatccctatgacttcttccttcagcagcacactcctatcaatatttcaatcctcccccgagtccgcccaatccacatttgagggtttcccacaatcaccactccaaatccccggctctccttcattttcatccacactcctgtctctattccaatcatctccagaacgaacccactccacatttgaaggtttcccccaatcgcccctccaaatcccaatgacatcttccttctccagcacactactctctatactccaatcctcccctgaatcagctcaatcagcatttgagggattcccccaatctccactccaaatccctgtatcatcctccttttcctatactttactctctctctttcaatcttctccagaaagaactcactccacctttgaaggattcccacaatctccattacaaattccagtctcctcttcctcgtcctctagtacactactctccttatttcaatcctcgcccgaatgcactcagtctacatttgaaggattcccccagtcacctctacaaatacctcaatcacccccagaaggcgaaaatacccactcccctctacagattgtcccatcgttaccggagtgggaagacagcctttcacctcactacttcccccaatcaccacctcaaggcgaagactccctcagtccccactactttcctcaatcccctccgcaaggagaagactccctctctccccactactttccccaatccccacaaggagaagactccctgtccccacactacttcccccaatccccaccgcaaggtgaggactcaatgtccccgctctacttcccacaatccccactacagggagaagagttccaatcctccctccaatcacccgtgtccatctgttcctcctccaccccttccagcctcccgcaatccttccccgaatcctcacagtcacctccggaaggacccgtccaatcgccccttcactccccacaatccccgcccgagggtatgcattctcaatcccctctccaatctcccgaatcagcacccgaaggcgaagactctctatcgcccctccaaattccccaaagtcccttagaaggggaagactctctttcgtccctccattttccccagtcaccaccggaatgggaggactctctcagccccctccatttcccccagttccctccccaaggcgaagacttccaatcctccctacaatcacccgtctccatttgcagcagctcgacctctctatcactaccccaatccttccccgaatcaccccaatcgcccccggaaggacccgcacagtcaccactacaacggcccgtctcctcctttttctcatatacccttgcttccctcctccagtcctcccatgaatctccccagtcacccccagaaggtccggcccagtccccactccaatcccccgtatcctcatttccatcgtccaccagctcgtcactcagccaatcctctcccgtatccagctttccttcctccacttcatccagcctgtcaaaatcatcccccgaatcacctctacaatcccctgtcatctcgttctcctcatctacatcactttccccctttagcgaagagtcctccagtccggtagacgaatacacatcttccagcgacaccctcctcgaatctgactcgctaacagatagcgaatcactcatcgagtcagagcccctattcacctacactctagatgaaaaagtggatgaactcgctcgcttccttctccttaaataccaagtcaagcaacccattactaaggccgaaatgctcacaaatgtcatctcccgatacaccggctacttcccagttatctttcgtaaagcccgagagttcatcgaaattctattcggcatctccctccgagaagtagaccccgacgactcatacgtgtttgtcaataccctagatctaacctccgaaggctgcttatccgacgaacaaggcatgagccagaacagactcctcatcctaatcctatcaattatattcataaagggcacctacgcgtctgaagaggtaatttgggacgtactctctggcatcggcgtacgtgccggccgcgagcactttgcgttcggcgaaccccgcgaactccttacaaaagtctgggttcaggaacactacctggaatacagagaagtccccaattcatctccaccccgttatgagttcctctggggcccccgcgcacatagcgaagtcatcaaacgcaaagttgtcgagttcttggctatgctcaaaaacacagttcccatcaccttcccctcatcatacaaagacgcactaaaggatgtagaagaacgagcccaagccataatagacaccaccgacgactccaccgcaaccgaaagcgcaagtagctccgtcatgagcccctccttctcttccgaataa

SEQ ID NO: 4319 - RNA, 1122 nt, synthetic construct
  misc_feature 1..1122: note = AAF07210 variant
  source 1..1122: mol_type = other RNA
atgccacccgtccccggagtacccttccgcaacgtcgacaacgactctcccacctccgtcgaacttgaagactgggtcgacgcccaacacccaacagacgaagaagaagaagaagcctcctcggcctcatcaacactctatctcgtcttctcgccctcatccttcagcacctcctccagcctcatactaggcggccccgaagaagaagaagtcccatcaggcgtcatcccaaacctcacagaatccatcccatcatcaccaccccaaggccctccccaaggccccagccaatcacccctctcctcctgctgctcatcattctcatggtcctccttctccgaagaatcctcatcacaaaaaggcgaagacaccggaacatgccaaggactccccgactccgaatcatccttcacctacaccctcgacgaaaaagtagccgagctcgtcgagttcctcctcctcaaatacgaagccgaagaacccgtcaccgaagcagaaatgcttatgatcgttatcaaatacaaagactacttccccgtcatcctcaaacgcgccagagagttcatggaactcctcttcggactcgccctaatcgaagtaggacccgaccacttctgcgtcttcgccaacacagtcggtctcaccgacgaaggctccgacgacgaaggcatgcccgaaaactcactcctcataataatcctctcagtcatcttcatcaaaggcaactgcgcctccgaagaagtcatctgggaagtactcaacgccgtcggcgtctacgccggccgagaacacttcgtctacggcgaaccacgagaactcctcacaaaagtctgggtccaaggacactacctcgaataccgcgaagttccccactcctctccaccctactacgagttcctctggggacccagagcccactccgaaagcatcaaaaagaaagttctcgagttcctcgccaaactaaacaacacagtaccatcctccttcccatcctggtacaaagacgccctgaaagacgtcgaagaacgcgtccaggccactatcgacacagccgacgacgcaaccgtaatggcctccgaatccctctcagtcatgtcctcaaacgtatccttctcagaataa

SEQ ID NO: 4320 - RNA, 1932 nt, synthetic construct
  misc_feature 1..1932: note = AAM08355 variant
  source 1..1932: mol_type = other RNA
atgctcctcccctgccactgggtattagacgccaccttctccgatggctcgctcggtcaatgggtcaaaaatacctgcgcaacctatgctctctctccagtcgtcctcccaccccaaccccaaccccgaaagaaagccaccgacaaagattattccgcctttcacctaggacacctccgagaagtccgtctcttcctccgaggcggcacatccgaccaacgcatggactcactcgtcctatgtcccacttacttcaaactctggcgtaccctatccggaagccccggcctacaactcagcgacctccactttggctcacaacccgaaggcaaattctcactaaggcgcgccgtctccgtcaaacaacgagaggaaccccaggactggcccctaaacgaaaaacgaaccctatggaaagattccgatctccccacatggcgccgaggaaccggctacacactctcccttcccgctgtcagccccggcaaacgactatggggagaaaaagccggatccctacccgaaagcgagccactcttcacttacaccctcgacgaaaaagtagacaaactcgtacagttcctactgctcaaataccaggcaaaagagcctctaacccgcgccgaaatgcaaatgaacgtcatcaacacctacaccggctacttccccatgatcttccgcaaagcccgcgagttcatcgaaatcctcttcggcatctccctcacagaagtagatcccgaccacttctacgtcttcgtcaatacactagacctaacctgcgaagggtcactctccgatgaacaaggcatgccccaaaaccgacttctaatcctcatactttcagtaattttcatcaagggaaactgcgcgtccgaagaagtaatatgggaagttctaaacgccatcggcccatggtctgccctcgccggctttgccgacgtactatcccgactagccctctgggaaagcgaaggacccgaagccttctgcgaagagtcaggactccgctccgccgagggatccgtcctagacctagctaacccccaaggactggccggacaccgccaagaagacggtagacgaggacttaccgaggcttcaccccaacagaaaaagggaggcgaagacgaagacatgcccgcggcaggcatgccaccactcccacaatccccacccgaaataccccctcaaggcccacccaaaatctccccacaaggcccaccccaatccccaccccaatctcccctcgactcctgcagcagtcccctcctctggacccgcctagacgaagaatcctcatccgaagaagaagacacagccacctggcacgccctacccgaaagcgaatcactcccccgatacgccctcgacgaaaaagtagccgaactcgtccaattcctactactaaaataccaaaccaaagaacccgtaactaaagccgaaatgctcactacagtaatcaaaaagtacaaagactacttccctatgatattcgggaaagcccacgagttcatcgaactaatcttcggcatagccctcaccgacatggaccccgacaaccactcctactttttcgaagacaccctcgacctcacctacgaaggcagcctaatcgacgaccaaggaatgccaaagaactgcctcctcatccttatcctatccatgatcttcatcaaaggctcttgcgtacccgaagaagtcatctgggaagtcctctccgccataggacccatccaacgtccagcccgcgaagtgctcgagttcctatccaagctctccagcattatcccatcggccttcccctcatggtacatggacgctctcaaagacatggaagaccgtgcacaagccatcatagacaccaccgacgacgccaccgcaatggcatccgcaagcccatccgtaatgtctacaaacttctgccccgaatga

SEQ ID NO: 4321 - RNA, 2337 nt, synthetic construct
  misc_feature 1..2337: note = AAG23757 variant
  source 1..2337: mol_type = other RNA
atggcacaaaagatggactgcggcgcaggcctcctaggattccaggccgaggcttccgttgaagactccgccctgctcatgcaaacacttatggaagccatacagatctccgaagctccacccaccaaccaagcgacagccgcagcatcaccacaatcctcccaaccaccaacagcgaacgagatggcagacatccaagtcagcgccgcagcagcccgaccaaaatcagcattcaaagtacaaaacgcaacaaccaaaggccccaacggagtctacgacttcagtcaagcccacaacgcaaaggacgtcccaaacacccaaccaaaagcggcgttcaaatcccaaaatgcaacacccaaaggccccaacgcagcctacgacttctcccaagcagccaccacaggcgaactagccgcaaacaaatcagagatggccttcaaagcccaaaacgcaacaaccaaagtcggaccaaacgccacttacaacttctcacaaagcctcaacgccaacgacctcgccaactcccgccctaaaaccccattcaaggcatggaacgataccaccaaagcacccaccgccgacacgcaaacccaaaacgtcaaccaagcaaaaatggcaacatcacaggcagacatcgaaaccgatcccggaatcagcgaacccgacggcgcaaccgcccaaacctcagctgacggctcacaagcacaaaacctcgagtccagaacaataatccgaggcaaacgcacaagaaaaataaataatctgaacgtcgaagaaaactcctccggcgatcaacgacgcgcccctctcgccgctgggacctggcgttcagcccccgtccccgtgaccacccaaaacccgccaggcgcaccacccaacgtcctttggcaaactcccctcgcctggcagaacccctctggatggcaaaaccaaaccgcacgacaaaccccacccgcacgacaatcaccacccgccagacaaaccccgcccgcatggcagaaccccgttgcatggcaaaatcccgttatctggcccaacccagtcatttggcaaaaccccgtcatatggcccaacccaatcgtatggcctggccccgtcgtatggcccaacccactcgcttggcagaacccacccggctggcaaaccccacccggctggcagacaccacccggatggcaaggaccgcccgactggcaaggacccccggattggccactcccacccgactggcctctacctcccgattggcccctccccacagactggccactccctcccgactggatccccgccgactggcccatcccacccgactggcaaaacctcagaccctcacccaacctacgaccctcacccaactcccgagcctcacaaaaccccggcgcagcacaaccacgcgacgtcgccctactacaagaacgcgccaacaaactggtcaaatacctcatgctaaaagactacaccaaagtcccaatcaaacggtccgaaatgctcagggacatcatccgagaatacacagacgtctaccccgaaatcatagaaagagcctgctttgtattagaaaagaagttcggaatccaattaaaggaaatcgacaaagaggaacatctctacatcctaataagcaccccagaatcactagccgggatactcggcactacaaaagacaccccaaaactcggcctactactcgtcatcctcggcgtcatatttatgaacggcaaccgggcctcagaagcagttctatgggaagcactacgaaaaatgggactccgacccggcgtacgacaccccctccttggagaccttcgcaaactcctcacctacgagttcgtcaaacaaaaatacttagactaccgacgcgtccccaacagtaatcccccagaatacgaatttctatggggtctacgatcctaccacgaaacgagcaagatgaaggtactcagattcatagctgaagtgcagaaaagagacccacgcgactggactgctcaattcatggaggccgccgacgaagcgctagacgccctcgacgccgcagcagccgaggcagaagcaagggcagaggccagaacccgtatgggcatcggggacgaagccgtttccggcccctggtcctgggacgacatcgagttcgaactcctaacgtgggacgaagaaggagacttcggcgacccctggtcacgaatcccattcacattctgggccagataccaccaaaacgcacgaagcagattcccccaaaccttcgccggccccatcataggcccaggaggaaccgcctcagccaacttcgctgcaaacttcggagctatcggcttcttttgggtagaataa

SEQ ID NO: 4322 - RNA, 1821 nt, synthetic construct
  misc_feature 1..1821: note = AAD28598 variant
  source 1..1821: mol_type = other RNA
atgagcgacacgtcagaatccggagcaggcctcacgagattccaagcagaagcgtcagaaaaagacagctccagcatgatgcaaacactactcaccgtaacccaaaacgtcgaagtacccgagacacccaaagcatccaaagcgctagaagtctccgaagacgtcaaagtaagcaaagcatcaggagtaagcaaggccacagaagtatccaaaaccccggaagcaagagaagccccagccacacaagccagcagcaccactcagctaacagacacgcaagtcctggcagccgaaaacaaaagcctagccgccgacacaaagaaacaaaacgcagacccgcaagcagtaacaatgccagcaaccgaaacgaagaaagtatcacacgtcgcagacaccaaagtaaacacaaaagcacaagaaacagaagcagccccgtcccaagcccctgccgacgaaccagaaccagaaagcgccgcagcccaatcccaagaaaaccaagacacccgcccaaaagtcaaggcaaagaaagcacgcaaagtgaaacacctagacggagaagaagacggatcttcagaccaaagccaagcaagtggcacaacaggcggccgcagagtaagcaaagccctaatggcaagcatggcacgacgggcaagtcgaggaccaatagccttctgggcacggagagccagcagaaccaggctagccgcctgggcaagaagggcactccttagcctgcgaagccccaaagcaagacgagggaaggcacgccgcagagcagccaaacttcagagcagccaagagccagaagcaccaccacccagagatgtagcgctactccaagggagagcgaacgacctagtcaaatacctcctagcgaaagaccagaccaaaatacccatcaaaagatcagacatgctaaaggacataataaaggaatacaccgacgtataccccgaaatcatagaacgagccggatacagcctggaaaaagtcttcggcatccaactcaaagaaatagacaaaaacgaccacctctacatcctcctgagcaccctggaaccaacagacgccgggatactcggaacgacgaaagacagccccaaattaggcctactaatggtcctactgtcgataatcttcatgaacggcaaccgcagctcagaagcagtaatatgggaagtcctgcgcaaactaggcctacgacccggcatccaccattcactcttcggcgacgtaaagaaactcatcacagacgaatttgtaaaacaaaaatacctagactacgcacgggtccccaacagcaaccctcccgaatacgagttcttctggggcctacgctcatactacgaaaccagcaagatgaaagtcctaaaattcgcatgcaaagtacagaagaaagaccccaaagagtgggccgcacaatacagagaagcaatggaagccgaccttaaagcagcagcagaagccgccgccgaggcaaaagcacgcgcagaaatccgagcaagaatgggaataggactcggatcagaaaacgccgcgggcccatgcaattgggacgaagcagacatagggccatgggcaaaagcccgcatacaagcgggtgcagaagccaaagcaaaagcacaagaaagcggcagcgccagcacaggcgcaagcacaagcacaaacaacagcgcgagcgcatccgcaagcacatcaggaggcttcagcgccggggcatcactcacagcaacactaaccttcggcctcttcgccggcctcggaggagccggagccagcacatccggatcaagcggcgcatgcggattctcatacaaataa

SEQ ID NO: 4323 - RNA, 2226 nt, synthetic construct
  misc_feature 1..2226: note = AAH63838 variant
  source 1..2226: mol_type = other RNA
atggcagaaggcagcttcagcgtccaatccgaaagctactccgtagaggacatggacgaaggctccgacgaggtcggagaagaagaaatggtcgagggcaacgactacgaagagttcggcgcattcggcgggtacggcaccctgacatcgttcgacatacacatactcagagcgttcggcagcctaggtccaggactgcgcatactctcaaacgaaccctgggaactagaaaaccctgtgctcgcacaaaccctagtcgaagcgctacaactcgaccccgaaaccctagccaatgaaacggcagcccgagcagctaacgtagcgcgcgcagcagcaagcaaccgtgcggcccgagccgcagccgcagcagctagaacagccttcagccaggtcgtcgcctctcaccgtgtcgccaccccacaagtaagcggcgaagacacacaacccaccacatacgccgcagaagcccaaggacccacccccgaaccaccactagcaagtccgcagacgagccagatgctagtcaccagcaagatggcagccccagaagcacccgcaacctcggcgcagagccaaactggctcccccgcccaggaagcagccacagaaggcccatcgtcagcatgcgcgttcagccaagcgccatgtgctcgggaagtagacgcaaacagaccatcgacagcattcctaggacaaaacgacgtatttgactttacccaacccgcaggcgtatcagggatggcattcccacgaccaaagcggccagcaccagcccaagaggcagcaacagaaggaccaagcgcagcatcgggcgttcctcaaacaggacccgggagagaagtcgcggcaacccgccccaaaactacaaaatccggaaaagcactcgcaaaaacacgctgggtcgaaccacagaatgtggtcgctgcagcagcagccaaagcgaaaatggccacctccattcccgagccagagggcgcagccgcggcaaccgcccagcactcagccgagccatgggccagaatgggcggtaaacgaacaaagaaaagcaaacacctggatgacgaatacgaaagcagcgaagaagaaagagaaactcccgcagtacccccaacctggcgcgcgtcccaaccctcactcaccgtcagggcacaacttgcgccacgacccccgatggcaccacgaagccaaatcccatcgagacatgtcctatgcctcccgcccaggaacgtaaccctccttcaagaaagagccaacaaattagtcaaatacctcatgataaaagactacaagaaaatacccatcaaacgagccgacatgctaaaagacgtcataagagaatacgacgaacacttcccagaaataatagaacgagcaacatacaccctagaaaagaaattcggaatacacctgaaagaaatagacaaagaagaacacctttacatactcgtctgcacaagagacagcagcgcccgcctactaggtaaaacaaaagacacgccacgtctatcactactcctcgtcatcctcggagtaatattcatgaacgggaacagagcctccgaagcagtcctatgggaagcactaagaaaaatgggactccgacccggggtccgccacccattcctcggcgacctaaggaaattaatcacggacgacttcgtgaaacagaaatacctcgaatacaaaaagatccccaacagcaatcccccggaatacgagttcctgtggggcctccgcgctcgacacgaaacctccaagatgcgggtcctccgcttcatagcgcaaaaccaaaaccgcgaccccagagaatggaaagcacacttcctcgaggccgtcgacgacgcctttaaaacaatggacgtggacatggcggaagaacacgccagagcacaaatgcgcgcccaaatgaacattggcgacgaggcactaataggcagatggtcttgggacgacatccaagtagaattactaacctgggacgaagacggcgacttcggcgatgcatgggcacgcattccattcgccttttgggcccgataccaccaatacatactcaatagcaaccgcgcgaaccgccgagcaacctggcgagcaggcgtcagttcaggcactaacggcggcgcaagcacgagcgtactcgatggacccagcaccagctcgaccatacgcacccggaacgccgcacgagcaggagcgagctttttctcttggatccaacaccggtag

SEQ ID NO: 4324 - RNA, 1122 nt, synthetic construct
  misc_feature 1..1122: note = CAG33449 variant
  source 1..1122: mol_type = other RNA
atgccccccgttcccggtgtccccttccgaaacgtcgacaacgactcacccacctctgtcgaactcgaagactgggtcgacgcacaacaccccaccgacgaagaagaagaagaggcctcctcagcctcatccaccctctacctcgtcttctccccctccagcttctccacctcctcctccctcatacttggcggaccagaagaagaagaagtaccctccggagtaatccccaacctcacagaatccataccctcctcccccccccaaggacccccccaaggcccatcccaatcccccctttcctcatgctgctcctccttctcctggtcctccttctctgaagaatcatcctcccaaaaaggcgaggacaccggcacctgccaaggcctaccagactccgaatcctcattcacctacaccctcgacgaaaaagtcgccgaactcgtagaattcctactactcaaatacgaagcagaagaacccgtcaccgaagccgagatgctcatgatcgtcatcaaatacaaagactacttccccgtcatccttaaacgcgcccgcgaattcatggaactcctcttcggcctagcactcatcgaagtcggccccgaccacttctgcgtattcgccaacaccgtcggcctaacagacgaaggctcagacgacgaaggcatgcccgaaaactccctcctcatcatcatactctcagtaatattcatcaaaggcaactgcgcatcagaagaggtcatctgggaagtcctcaacgccgttggcgtctacgccggacgagaacacttcgtctacggcgaaccccgagagctactgacaaaagtctgggtccaaggccactacctagaataccgcgaagtcccccactcatctcccccctactacgaattcctctggggcccccgcgcccactcagaatcaatcaaaaaaaaagtcctcgaattcctagccaagctaaacaacaccgtcccctcctccttcccctcctggtacaaagacgccttaaaagacgtcgaagaacgcgtacaagcaacaatcgacaccgccgacgacgcaaccgtaatggcctccgaatccctctccgtcatgtcgtctaacgtatctttctcagactaa

SEQ ID NO: 4325 - RNA, 2874 nt, synthetic construct
  misc_feature 1..2874: note = AAM08354 variant
  source 1..2874: mol_type = other RNA
atgtccctcgtatcccagaatagccgccgacgcaggcgcagggtagccaaagccactgcccataatagttcatggggcgaaatgcaagcgccaaacgccccaggcctacccgcagacgtaccgggaagcgacgtcccacaaggaccctcagacagccaaatcctacaaggcctgtgcgcgtccgagggaccgtctacgagcgtactaccaacctcagcagagggccctagcaccttcgtcccacccaccatcagcgaggcttcatccgccagcggacaaccaacaatcagcgaaggaccaggcacttcagtactacctaccccatccgaaggactcagtacatccgggccaccaaccatatccaaaggcttatgcacttcagtcaccctggcagctagtgagggtagaaataccagcagacccccgacatcctcagaagaaccgagcacatccgttcccccaactgcgtctgaagtcccctccacgagcctacccccaacacccggcgaaggcacatcaacatccgtaccccctactgcatacgaaggaccctccacaagcgtcgtccccaccccagacgaagggccatccacaagcgtccttccaacccccggagaaggccccggaaccagcgtaccgctcgcagcaactgaaggcctatccacctcagtgcaagccactcccgacgagggccccagcacctcggtacctcccaccgccaccgaaggcctcagcaccccagtaccacccaccagagatgaaggacccagcacatctgtaccagcaacccccggagaaggcccctccacctccgtcctaccggctgcctccgacggacagtccatctctcttgtaccaacccggggaaaaggctcaagcacctcagttccacccaccgcaacagaaggcctaagtactagcgttcaaccaaccgccggcgagggctcgtcaacctccgtaccacccacccccgggggcggcctctccacctctgtacctcccaccgcgaccgaagaattaagcacatcagtacccccaacaccaggcgaagggccgtcgacttccgtcctccctataccgggggaaggactgtccaccagcgtccctccaacagcatccgacggctccgacaccagcgtacccccaactccaggggaaggagcctccacactcgtacaaccaacggcccctgacggccccggttccagcgtactcccaaacccgggcgagggcccctctacacttttcagttcatccgcaagcgtggaccgaaacccaagcaaatgctccctcgttctgccctctccaagagtcaccaaagccagcgtcgattccgatagcgagggcccaaaaggcgcagaaggcccaatcgagttcgaagtactccgcgactgcgagtcacctaactcaatctcgataatgggactaaacacctcccgagtagctataaccctcaagccccaagacccaatggaacaaaatgtcgccgaactgctccaattccttctcgtaaaggatcaatcaaagtacccgatacgagaatccgaaatgagagagtacatcgtcaaggaataccgcaaccagttcccggaaatacttcgacgagctgccgcccacctcgaatgcatctttcgattcgaactacgcgaactcgacccggaagcccacacatacatcctcctaaacaaactaggccccgtcccttttgaaggcttagaagagtccccgaacggaccaaaaatgggactcctcatgatgatcctaggacaaatattcctcaacggtaaccaagccaaagaagcagaaatctgggaaatgctctggcgcatgggcgtgcagcgcgaacgacgcctcagcatattcggcaacccaaaacgccttctgtccgtagagttcgtctggcagagatacctcgactaccgacctgtcaccgattgtaaaccagtcgaatacgagttcttctggggcccccgctcccacctcgaaaccaccaaaatgaaaatactaaaatttatggccaaaatctataacaaagacccaatggactggccagaaaagtacaacgaagcattagaagaagacgccgcacgcgcattcgccgaaggatggcaagccttaccccacttcagacgcccattcttcgaagaagcggcagccgaggtaccatcccctgactctgaagtatcttcatactcgagtaaatatgcaccccactcctggcccgagtcccgactagaatctaaagcacgaaaactcgtacagctatttctactaatggacagcacaaaactacccataccaaagaaaggtattctatactatatcggacgcgaatgctccaaagtgttcccggacctactaaaccgcgcagcaagaaccttaaaccacgtctacggaaccgaactggtcgttctcgaccccagaaaccactcctacactttatacaaccgacgcgaaatggaagaaaccgaagaaatcgtagacagtcctaacagaccaggaaacaacttcttaatgcaggttctatctttcatcttcatcatgggtaaccacgcccgcgaatccgcagtatgggcctttctcagaggcctaggtgtacaagcaggccgaaaacacgtaataacctgccgctacttatcacaaagatacatcgactcactccgcgtgcccgactcagacccagttcaatacgagttcgtatggggcccacgagccaggctcgaaaccagcaaaatgaaagcacttaggtacgtagcgaggatccacagaaaagaacctcaagactggccccaacaataccgagaagcaatggaagatgaagccaaccgcgctgacgtaggccaccgacaaatcttcgtccataactttcgatag

SEQ ID NO: 4326 - RNA, 1572 nt, synthetic construct
  misc_feature 1..1572: note = AAH93964 variant
  source 1..1572: mol_type = other RNA
atgagcctcgtttcgcaaaacgcccgccactgctccgccgaaatcacagccgactacggcgacggccgcggagaaatccaagccaccaacgcctcgggctcacccacctccatgctcgtagtcgacgcaccccaatgcccacaggccccaatcaactcccaatgcgtcaacacaagccaagccgtgcaagaccccaacgacctcgaagtcctcatagacgaacagtcacgacgactaggggccctacgagtccatgacccactcgaagaccggtcaatagccctcgtcaacttcatgagaatgaaaagccaaacagaaggttcaatccaacagtcagaaatgctcgaatttcttcgagaatactccgaccaattccccgaaatattacgcagagccagcgcccaccttgatcaagtcttcggcctaaacctacgagtaatcgaccctcaggccgacacctacaacctcgtctcaaaaagaggattccaaataaccgaccgcatcgcagaatcacttgacatgcctaaagcctccctcctcgccctcgtcctcggccacatcctactcaacggcaacagggcccgcgaagccagcatctgggacctcctactaaaagtcgacatgtgggacaaaccccaacgcatcaacaacctcttcgggaacacccgcaatcttctcaccaccgacttcgtctgcatgcgattcctcgagtactggcctgtatatggtactaaccccttagagttcgagttcctatggggcagccgggcccaccgcgaaatcaccaaaatggaagcactgaaattcgtctcggacgcccacgacgaagaaccctggtcatggccagaagaatacaacaaagcactcgaaggcgacaaaaccaaagaacgttcactaactgcaggcctcgagttctggtcagaagacacgatgaacgataaagccaacgacctcgtccaactcgcaatctccgtcacagaagaaatgctacccatacaccaagacgaactactcgcccacacaggaaaagagttcgaagacgtcttccccaacatcctcaaccgcgccacactcatcctagacatgttctacggcctctccctcatcgaagtcgacacatcagaacacatctacctcctcgtacaacaacccgaatccgaagaggaacaagtcatgctcgaatccctcggccgccccacacaagaatacgtaatgccaatcctcggcctcattttcctcatgggcaaccgcgtcaaagaagccaacgtctggaacctactccggcgcttctccgtcgacgtaggccgaaaacattccatcaccagaaaactaatgcgccaaagatatctagaatgccgccccctctcatactctaacccagtcgaatacgaactgctttggggaccacgagcacaccacgaaacaataaaaatgaaagtgctcgagtacatggcacgcctctaccgcaaaagaccccaaaactggcccgaacaatatcgagaagccgtcgaggacgaagaggcacgagccaaatcagaagccaccatcatgttcttcctcgaccccacctaa

SEQ ID NO: 4327 - RNA, 924 nt, synthetic construct
  misc_feature 1..924: note = CCDS3269.1 variant
  source 1..924: mol_type = other RNA
atgctgcaaacgccagagagcaggggcttgcccgtgccccaggccgagggagagaaagacggcgggcacgacggcgaaacccgggccccgaccgccagccaggaaagacccaaagaagaactcggggccgggcgcgaggaaggggccgcggaaccggccctaaccagaaaaggggccagggccctggccgcgaaagcactcgcgcgccggcgcgcgtacaggcgcctgaacagaacagtggccgagctagtacaattcctcctggtcaaagacaaaaagaaaagccccatcacgcgatcagaaatggtcaagtacgttatcggggacctgaaaatactcttccccgacatcatagccagggccgcggaacacctcagatacgtgttcgggtttgagctcaagcaatttgacaggaaacaccacacgtacatactcataaacaagctaaagcccctggaagaggaagaggaagaggacctgggcggggacgggcccaggctcgggctcttaatgatgatcctaggcctgatatacatgagaggcaacagcgcgcgcgaggcccaggtctgggaaatgctcaggcgcctaggcgtacaacccagcaagtaccacttcctattcggatacccgaaaaggctcataatggaggactttgtccagcaaagatacctaagctaccgccgggtaccgcatacgaacccgcccgagtacgagttctcgtgggggcccaggagcaacctagaaatctcaaaaatggaagtactcgggttcgtagccaagctccacaagaaagaaccgcaacactggccggtccagtacagagaagcgctcgcggacgaggccgaccgcgcgcgagcgaaagcgcgagcggaagcgagcatgcgcgcaagagcgagtgcgcgcgcgggcatacacctgtggtag

SEQ ID NO: 4328 - RNA, 660 nt, synthetic construct
  misc_feature 1..660: note = AAD31314 variant
  source 1..660: mol_type = other RNA
atgcccaggggcaggaaatcgcgcaggcgtaggaacgcgcgcgcggccgaagaaaatcgcaataacaggaaaatacaagcgagcgaggcctcggaaacgcccatggccgcgagcgtggtcgcgagcacgcccgaggacgacctctcaggcccggaagaggacccgagcacgcccgaggaagcgagcacgaccccggaagaggcctcgagcacggcccaggcccagaaaccgagcgtgccaaggagcaatttccagggcacgaaaaagagcttgctcatgagcatactcgcgctaatattcataatggggaactcggcaaaggaagcgctagtatggaaggtcttgggaaagctcggaatgcagcccgggcgacagcactcaatctttggtgatccaaagaaaatagtcacggaagagttcgtacgccggggatatctaatatacaagcccgtgcccaggagctcgcccgtggaatacgagttcttctggggcccgcgcgcgcacgtggaatcgagcaagctaaaggtcatgcactttgtcgcgcgcgtgcgcaatcgctgcagcaaggactggccctgcaactacgactgggactcggacgatgacgcggaagtggaagcgatactgaactcaggcgcgcgcgggtactcagccccgtga

SEQ ID NO: 4329 - RNA, 3750 nt, synthetic construct
  misc_feature 1..3750: note = CCDS73700.1 variant
  source 1..3750: mol_type = other RNA
atgagtcaactctccaaaaacctcggcgacagcagccctcccgccgaagctcccaaaccacccgtctacagccgccccaccgttctgatgagagctcctcccgcctcctctcgcgcccctcccgtcccctgggatcccccgcccatcgacctacaagcctccctagcagcatggcaagcaccccaacccgcctgggaagcgccccaaggccaactccccgcccccgttgtccccatgacacagccacccgccctaggaggacccatagtccccgcccctcccctgggtggccccatgggcaaaccccctactcccggcgtcttaatggttcatcccccaccacccggcgcccccatggcccaacccccaacccccggcgttctcatggtacacccctctgcacccggagcccctatggcacacccaccacctcctggaacccccatgtcacacccaccacccccgggcacacctatggcccacccacctccccctggaacgccaatggcgcatccaccccctcccgggacacccatggtccatccccctcccccaggcacacccatggctcacccacctccacccggcacaccaatggcccacccacctccgcccggaacccccatggcgcaccctcccccacccggcactcccatggcgcacccaccccctccaggcacacccatggcccaaccacccgctccaggagtacttatggcacaacccctcacccctggagtactaatggtacaaccagcagcacctggcgcccccatggtccagcctccacccgccgcaatgatgacccagccgcaaccatccggcgctcccatggcgaaaccacccggacccggagtattaatgatccacccaccaggtgctcgagcacccatgacccaaccacccgccagcggcgcaccaatggcccaaccagccgccccaccagcacaacccatggcgcctcctgcacaacccatggcatcctgggccccacaagcgcagccactcatactacaaatacaatcccaggtcatcagggccccaccacaagtaccccaaggcccccaagctcccccggcccaacttgccacacctccgggatggcaagccacttcacccggctggcaagcaacgcaacaaggctggcaagctacacccctcacatggcaaacaacgcaagttacctggcaagcgcctgcggttacgtggcaagtcccacccccgatgcggcaaggaccaccacccatacgacccggaccccctcccatccgtcccggtcccccaccggtacgtcaagcaccgcccctcattagacaggcccctccagtcattcgccaggccccaccagtaattcgccaagccccacccgtaatccgacaagcacccgccgttatccgacaagctcccccagttattcgccaagccccaccagttatacgtcaagcaccacccgtcatcagacaagcacctcccctcatacgacaagccccgccacctattcgacccgcccctcaagtcctagccacccaaccacccctatggcaagccctacccccgcccccacccctaagacaagcaccccaagcccgactacctgccccacaggtccaagccgccccacaagtgcccacagccccacccgccacccaagttccagccgcaccccctgccggcccacaagttccacaaccagtactccccgctccactttctgcaccactctcagcaccccaggccgttcactgtccctcgatcatctggcaagcacctaaaggccagcctcccgtaccacacgagatacccaccagcatggagttccaagaagtgcaacaaactcaggcacttgcctggcaagcacaaaaagccccgactcacatttggcaaccactccctgcccaagaagcacaacgtcaagctcctcccctagttcaacttgaacagccattccaaggcgcacctccttctcagaaagctgtgcaaatccaactcccaccacaacaagcacaggcatccggtcctcaggcagaagttcccaccctacccctgcagccctcctggcaagcaccacccgccgttctacaagcccaacccgggccccctgtggccgctgccaactttcccctcggctccgccaaatcactaatgacaccaagcggcgaatgccgcgcctctagcattgaccgtcgaggcagttccaaagaacgcagaacatcaagcaaagaacgacgggccccttcaaaagaccggatgatttttgccgctaccttctgcgctccaaaagccgtctccgccgcacgcgctcatctgcccgcagcatggaaaaacttacctgcaacccccgaaaccttcgccccatcaagctccgtattcccagcaacgtctcaattccaacccgctagcctaaatgccttcaaaggaccttccgccgcctcggaaacccctaaatctttgccatacgcgttacaggaccctttcgcatgcgtagaagcattaccagcagtcccatgggtaccccaacccaacatgaacgcctccaaagcatcacaagccgtcccaacatttctaatggcaacggctgcggccccacaagcaacagcaactacccaagaagcctcaaaaacctccgtagaaccacccagacgctcaggcaaagcaacccgcaagaagaaacacctcgaggcccaagaagactcacgcggtcacacactagccttccacgactggcaaggaccaagaccttgggaaaacctcaacctctccgactgggaagtacaatcccccatacaagtatctggggactgggaacaccctaatactccaaggggactttctggatgggagggccctagtacttctaggatactcagcggatgggagggtccctcagcctcctgggcactctccgcatgggaaggtccatccacaagccgcgctctaggactctccgaatctccaggatcctcactccccgtagtcgtatcggaagtagcctcggtctcaccgggttcatcagccacccaagacaactccaaagtagaagctcagcccctctcaccactagacgaacgcgccaacgcattagtacaattcctcctagtaaaagatcaggccaaagtcccagtacaacgttccgaaatggtcaaagtcatccttcgcgaatacaaagatgaatgcctcgacataatcaatcgtgcaaataataaactcgaatgcgcctttggctaccaactcaaagaaatcgacacgaaaaaccacgcctacatcatcataaataaactcggctaccacaccggaaacctcgtcgcgtcatacctggaccgacccaaatttggactcctcatggtcgtactttctctaatattcatgaaaggtaactgcgtaagagaggacctcatcttcaattttctcttcaaacttgggctagacgtacgcgaaactaacggactgtttggaaacaccaagaaactcattactgaagtattcgtcagacaaaaatacctcgaatatcgccgaatcccatacaccgaacccgcagaatacgagttcctctggggccccagagcgttccttgaaacatcgaaaatgcttgtcctacgatttcttgcaaaactccacaagaaagatccacaatcttggccattccactaccttgaagcactggccgaatgtgaatgggaggacacagacgaagatgaacccgacactggagactccgcccacggccccacctccagacccccaccccgctag

SEQ ID NO: 4330 - RNA, 282 nt, synthetic construct
  misc_feature 1..282: note = AAC39608 variant
  source 1..282: mol_type = other RNA
atgaaactcctcatggtcctcatgctcgccgccctctcccaacactgctacgccggctccggctgccccctcctcgaaaacgtcatctccaaaaccatcaacccccaagtctccaaaaccgaatacaaagaactcctccaagaattcatcgacgacaacgccaccaccaacgccatcgacgaactcaaagaatgcttcctcaaccaaaccgacgaaaccctctccaacgtcgaagtcttcatgcaactcatctacgactcctccctctgcgacctcttctaa

SEQ ID NO: 4331 - RNA, 363 nt, synthetic construct
  misc_feature 1..363: note = AAH67220 variant
  source 1..363: mol_type = other RNA
atgaaactcctcatggtcctcatgctcgccgccctctcccaacactgctacgccggctccggctgccccctcctcgaaaacgtcatctccaaaaccatcaacccccaagtctccaaaaccgaatacaaagaactcctacaagaattcatcgacgacaacgccaccaccaacgccatcgacgaactcaaagaatgcttcctcaaccaaaccgacgaaaccctctccaacgtcgaagtcttcatggtcatctccttctcctcctacaaactcttcaaatcccccgaccaaggccaagtcggctcctccttcctcaccgacaacgccaaagccacctccgaacaagccttctcctacatcggctaa

SEQ ID NO: 4332 - RNA, 357 nt, synthetic construct
  misc_feature 1..357: note = AAA19238 variant
  source 1..357: mol_type = other RNA
atgccccgcgaagacgcccacttcatctacggctaccccaaaaaaggccacggccactcctacaccaccgccgaagaagccgccggcatcggcatcctcaccgtcatcctcggcgtcctcctcctcatcggctgctggtactgccgccgccgcaacggctaccgcgccctcatggacaaatccctacacgtcggcacccaatgcgccctcacccgccgctgcccccaagaaggcttcgaccaccgcgactccaaagtctccctacaagaaaaaaactgcgaacccgtcgtccccaacgccccccccgcctacgaaaaactctccgcagaacaatccccccccccctactccccctaa

SEQ ID NO: 4333 - RNA, 1482 nt, synthetic construct
  misc_feature 1..1482: note = EAW93427 variant
  source 1..1482: mol_type = other RNA
atgctcccacgctgggaactcgccctatacctgctcgcatccctaggcttccacttctactcattctacgaagtatacaaagtctcccgcgaacacgaagaagaactcgaccaagagttcgaactcgaaaccgacaccctctttggcggcctgaagaaagatgccaccgacttcgaatggtctttctggatggaatggggcaaacagtggctagtctggctccttctcggacacatggtcgtctcccaaatggcaaccctcctcgcacgcaaacaccgcccctggattctcatgctctacggcatgtgggcctgctggtgcgtactcggtacacccggagtcgcaatggtcctccttcacaccaccatcagcttctgcgtcgcccaattccgatcccaactgctaacctggctatgcagcttactactcctgtccaccctgcgcctccaaggcgtcgaagaagttaaacgccgctggtacaaaaccgaaaatgaatactaccttctacaatttacacttaccgtccgctgcctatactacaccagcttctccctggaactatgctggcaacaactcccagccgcctcaactagctactccttcccctggatgctcgcatacgtattctactaccccgtcctccacaacggcccaatactctcattctctgagttcatcaaacaaatgcaacaacaagaacacgactcccttaaagccagcctctgcgtcctcgccctcggacttggccgcctactctgctggtggtggctcgccgaactaatggcacacctcatgtacatgcacgctatctacagctcgatccccctcctagaaacggtatcctgctggaccctgggcggcctcgcactcgcgcaagtactcttcttctacgtcaaatacctcgtcctcttcggcgtccctgccctcctcatgcgcctcgacggtctcacacccccagcccttccccgatgcgtctccaccatgttctccttcaccggcatgtggcgctacttcgatgtcgggctccataacttcctcatacgctacgtttacatccctgtcggcggctcacaacacggcctcctcgggacccttttctcgaccgccatgaccttcgccttcgtatcctattggcacggagggtacgactacctctggtgctgggccgccctcaactggctcggcgtcacggtcgaaaacggcgtcaggcgactcgtcgaaaccccctgcatacaagactccctcgcccggtacttctctccccaagcccgcaggcgctttcacgccgccctagcctcctgctccacctccatgctgatcctctccaacctagttttcctaggcgggaacgaagtaggaaaaacatactggaaccgaatcttcatccaaggctggccctgggtcaccctttccgtcctcggcttcctctactgctactcccacgtcggcatcgcatgggcccaaacatacgcaaccgactga

SEQ ID NO: 4334 - RNA, 954 nt, synthetic construct
  misc_feature 1..954: note = AAD41349 variant
  source 1..954: mol_type = other RNA
atggctgtacaaggctcccaacgtcgcctcctcggctccctcaactcaacccccaccgcaataccccaacttggcctcgccgccaaccaaaccggcgcccgatgcctcgaagtctccatctcagacggtctcttccttagcctcggcctcgtatcactcgtcgaaaacgcccttgtcgtcgccaccatagccaaaaaccgcaacctccactcccccatgtactgcttcatctgctgcctcgccctctccgacctcctagtctcaggctcaaacgtcctcgaaaccgccgtcatcctcctcctcgaagcaggcgccctcgtcgctcgagccgcagtcctccaacaactcgacaacgtcatcgacgtcataacctgctcctccatgctctcatccctctgcttcctcggcgccatcgccgtcgaccgctacatctccatcttctacgccctacgctaccactcaatcgtaacactcccccgcgcccgacgcgccgtcgccgccatctgggtagcctccgtagtcttctccacactattcatcgcttactacgaccacgtcgcagtcctcctctgtctcgtagtctttttcctagccatgcttgtcctcatggccgtactctatgtccacatgcttgcccgcgcctgccaacacgcgcaaggaattgctcgcctccacaaacggcaacgccccgtccaccaaggcttcggcctcaaaggcgccgtcaccctcacaatactcctcggcatcttcttcctctgctggggccccttcttcctccatctcaccctcatcgtcctctgccccgaacacccaacctgcggctgcatcttcaaaaactttaacctcttcctagccctcatcatatgcaatgccatcatcgaccccctcatctacgccttccactcccaagaactccgacgcacactcaaagaagtcctaacctgttcctggtaa

SEQ ID NO: 4335 - RNA, 954 nt, synthetic construct
  misc_feature 1..954: note = AHC09522 variant
  source 1..954: mol_type = other RNA
atggcagtccaaggctcacaacgtcgcctcctcggctccctcaactccaccccaaccgcaatcccccaactcggactcgccgctaaccaaaccggcgcccgctgcctcgaagtctccatctccgacggcctcttcctctcactcggcctcgtatctctcgtagaaaatgccctcgtcgtcgccactatcgccaaaaaccgaaacctccactcccccatgtactgcttcatatgctgcctagccctctcagacctactcgtatctggctccaacgtccttgaaacagccgtcatactactcctcgaagccggcgccctcgtagcccgcgccgccgtcctccaacaactagacaacgttatcgatgtaattacctgctcatcaatgctctccagcctatgcttcttaggagccatcgccgtagaccgctacatctccattttctacgccctccgctaccactccatcgtcaccctaccccgcgcacgccgcgccgtcgccgctatctgggtcgcctccgtcgtcttctcaaccctcttcatcgcctactacgatcacgtagccgtactactctgcctcgtcgtcttcttcctcgccatgctcgtcctcatggccgtcctatacgtccacatgctcgcacgtgcctgccaacacgcccaaggcatcgcccgactacacaagcgccaacgtcccgtacaccaaggtttcggcctcaaaggcgccgtcaccctcaccatcctcctcggcatcttcttcctctgctggggccccttcttcctccacctcaccctcattgtcctctgcccagaacacccaacatgcggctgcatattcaaaaacttcaacctcttcctcgccctcatcatatgcaacgccatcatcgaccccctcatctacgccttccactcccaagaactccgtcgcaccctcaaagaagttcttacctgctcatggtaa

SEQ ID NO: 4336 - RNA, 954 nt, synthetic construct
  misc_feature 1..954: note = AHC09804 variant
  source 1..954: mol_type = other RNA
atggccgttcaaggctcccaacgccgcctcctcggctccctcaactccacccccaccgcaatcccccaactcggcctcgccgcgaaccaaaccggcgcccgctgcctcgaagtatccatctccgacggcctttttctttcacttggcctagtctccctcgtcgaaaacgccctcgtcgtagccaccattgccaaaaaccgcaacctacactcacccatgtactgcttcatctgctgcctcgccctctccgacctactcgtctccggctccaacgtcctcgaaaccgccgtcatcctcctcctcgaagccggcgccctcgtcgcccgcgccgccgtcctacaacaactcgacaacgtcatcgacgtcatcacatgctcctccatgctatcctccctctgcttcctaggagccatcgccgtcgaccgctacatatccatcttctacgccctccgataccactccatagtcaccctaccccgagcccgccaagctgtcgccgccatctgggtagcctccgtcgtattctccacactcttcatagcctactacgaccacgtcgccgtcctcctctgtttagtagtattcttcctagccatgctcgtcctcatggccgtactctacgtccacatgctcgctcgcgcctgccaacacgcccaaggcatcgcccgtctccataaacgccaacgacccgtccaccaaggcttcggccttaaaggcgccgtcaccctcaccatcctactcggcatcttcttcctctgctggggccccttcttcctacacctcaccctcatcgtcctatgccccgaacacccaacctgcggatgcatattcaaaaacttcaacctcttcctcgccctcatcatctgcaacgccatcatcgaccccctcatctacgccttccattcccaagaacttcgccgcaccctcaaagaagtactaacatgctcatggtaa

SEQ ID NO: 4337 - RNA, 954 nt, synthetic construct
  misc_feature 1..954: note = BAE94313 variant
  source 1..954: mol_type = other RNA
atggcagtccaaggctcccaacgccgcctactcggttccctcaactccacccccaccgccatcccccaactcggcctagcagccaaccaaaccggcgcccgatgcctagaagtctccatatccgacggcctcttcctatccctcggcctcgtctccctcgtagaaaacgccctagtcgtcgcaaccatcgccaaaaaccgcaacctccactcccccatgtactgcttcatatgctgcctcgccctctctgacctacttgtctccggctcaaacgtcctcgaaaccgcagtaatcctccttctcgaagccggcgcccttgtcgcccgcgcagccgtactccaacaactcgacaacgtcaccgacgtaataacctgctcctctatgctctcctcattatgcttcctcggagccatagccgtcgacaggtacatctcaatcttttacgccctccgctaccactctatcgtcacactcccccgagcccgtcgcgccgtcgccgcaatctgggtcgcatccgtcgttttctccaccctcttcatcgcctactacgaccacgttgcagtcctactctgcctcgtagttttcttcctagctatgctcgtcctcatggccgtcctctacgtccacatgctagcccgtgcctgccaacacgcccaaggcatcgcccgcctacacaaacgccaacgacccgtccaccaaggattcggcctcaaaggagccgtcaccctcaccatcctactcggtatcttcttcctctgctggggccccttcttcctacacctcaccctcatcgtcctatgccccgaacacccaacctgcggctgcatcttcaaaaacttcaacctattcctagcccttataatctgcaatgccatcatcgaccccctcatctacgcctttcactcccaagaactccgacgcaccctaaaagaagtactaacctgctcctggtaa

SEQ ID NO: 4338 - RNA, 954 nt, synthetic construct
  misc_feature 1..954: note = AHC09531 variant
  source 1..954: mol_type = other RNA
atggccgtccagggctcccaacgacgacttctcggctccctaaactccacccccaccgccatccctcaactgggcctcgccgcaaatcaaaccggcgctcgctgcctagaagtttccatctcagacggcctgttcctctcactcggcctcgtctcactcgtcgaaaacgccctcgtcgtcgcaaccatcgccaaaaaccgcaacctccactccccaatgtactgcttcatctgttgcctcgccctctccgacctcctcgtctcaggctccaacatgctcgaaaccgccgtaatcctcctcttagaagcaggcgccctagtagcccgcgcagccgttctccaacaactggataacgtcatcgacgtcattacctgctcctccatgctctcctcactttgcttcctcggcgccatcgccgtagaccgctacatcagcatcttctacgctctccgataccactccatcgttaccctaccccgtgcccgccgcgccgtcgccgccatctgggtcgcctccgtagtcttctccaccctcttcatcgcatattacgaccacgtcgcagtactcctatgcctagtcgtcttcttcctcgctatgctcgtcctcatggccgtcctctacgtccacatgctcgcccgcgcctgccaacacgcccaaggaatcgcccgcctccacaaacgccaacgccctgtacaccaaggcttcggactcaaaggcgccgtcaccctaaccatactcctcggcattttcttcctatgctggggccccttcttcttacatctcaccctcatagtcctatgccccgaacaccccacatgcggctgtatcttcaaaaacttcaacctcttcctcgccctcatcatctgcaacgccatcatcgaccccctcatttacgccttccactcccaagaactccgacgcacactcaaagaagtcctaacctgctcctggtaa

SEQ ID NO: 4339 - RNA, 954 nt, synthetic construct
  misc_feature 1..954: note = BAE94311 variant
  source 1..954: mol_type = other RNA
atggccgttcaaggctcccaacgccgtctcctcggttccctcaactccacccccaccgccatcccccaactcggcctcgccgcaaaccaaaccggcgcccgctgcctcgaagtctcaatctctgacggcctcttcctctccttaggcttagtctccctcgtagaaaacgccctcgtcgtagccaccatcgccaaaaaccaaaacctccactcacccatgtactgcttcatatgctgcctcgccctctccgacctcctcgtctccggctccaacgttctagaaaccgccgtcatcctactcctcgaagccggcgccctagtcgcccgggctgccgtcctccaacaactcgacaatgtcatcgacgtcataacctgctcatccatgctctcctctctctgcttcctaggtgccatcgccgtcgatcgctacatctccatcttctacgccctccgctaccactcaatagtcacactcccacgcgcccgtcaagccgtcgccgccatctgggtcgcctccgtcgtcttctccactctcttcatcgcctactacgaccacgtcgccgtcctcctctgccttgtcgtcttcttcctcgctatgctcgtcctcatggccgtactctacgtccacatgctcgcccgcgcatgccaacacgcccaaggtatcgcccgactacacaaacgccaacgacccgtacaccaaggcttcggccttaaaggcgccgtcaccctcaccatccttctcggcatctttttcctctgctggggccccttcttcctccaccttaccctcatcgtcctctgccccgaacaccccacatgcggctgcatcttcaaaaacttcaacctcttcctagccctaatcatctgcaacgccatcatcgaccccctcatctacgccttccactcccaagaactccgccgcaccctaaaagaagtcctaacatgctcctggtaa

SEQ ID NO: 4340 - RNA, 954 nt, synthetic construct
  misc_feature 1..954: note = BAE94309 variant
  source 1..954: mol_type = other RNA
atggccgtccaaggctcccaacgccgcctcctcggctccctcaactccacccccaccgctatcccccaactcggcctcgccgccaaccaaaccggcgcccgctgcctcgaagtatccatatccgacggcctctttctctccctcggccttgtctctctagtcgaaaacgccctcgtcgtcgcaacaatcgccaaaaaccgaaacctccactcccccatgtactgcttcatctgctgcctcgctttatcagacctcctagtctccggctcaaacgtcctcgaaaccgctgtcattctcctcctagaagccggcgccctcgtcgcccgcgccgccgttctccaacaactagacaacgtcattgacgtcatcacttgctcctctatgctctcatccctctgcttcctcggcgccattgccgtagaccgctacatctccatattctacgccctccgctatcactccatcgtcaccctcccccgcgcccgacaagctgtaggcgccatctgggtcgcctcagtcgtcttctctacccttttcatcgcctactacgaccacgtcgccgtactcctctgcctagttgtcttcttcctagcgatgctcgtcctaatggccgtcctctacgtccacatgctagcacgagcctgccaacacgcccaaggcatagcccgcctccacaaacgccaacgccccgtccaccaaggcttcggtctcaaaggcgccgttaccctaaccatactccttggcatcttcttcctatgctggggccccttcttcctccacctaaccctcattgtcctctgcccagaacaccccacttgtggctgcatcttcaaaaacttcaacctattcctagccctcatcatctgcaacgccatcatcgaccccctaatctatgccttccactcacaagaactccgccgaacactcaaagaagtcctaacctgttcctggtaa

SEQ ID NO: 4341 - RNA, 954 nt, synthetic construct
  misc_feature 1..954: note = BAE94308 variant
  source 1..954: mol_type = other RNA
atggctgtccaaggctcccaacgacgtctcctaggctccctcaactccacccccaccgcaatcccacaactcggcctagccgccaatcaaaccggcgcccgctgccttgaagtctccatctccgacggcctattcctctccctcggattagtctccctcgtcgaaaacgccctcgtcgtagccaccatcgccaaaaaccgtaacctccactcccccatgtactgcttcatctgctgcctcgcactctccgacctcctcgtctccggctctaacgtcctagaaaccgccgtaatactcctactcgaagccggcgccctcgtcgcccgcgccgccgttctccagcaactagacaacgtcaccgacgtcatcacctgttcctcaatgctatcatccctttgcttcctcggtgccatcgccgtagaccgatacatctccatattctacgccctacgctaccactcaatcgtcacactaacccgcgcccgccgagccgtcgccgctatctgggtcgcatcagtcgtattctccacactcttcatcgcctactacgaccatgtcgccgtcctcctctgcctagtagtcttcttcctagccatgctcgtcctaatggccgtcctttacgtccacatgctagcacgcgcttgccaacacgcccaaggcatagcccgactacacaaacgacaacgacctgtccaccaaggcttcggactcaaaggagcagtcaccctcaccatccttctcggtatcttcttcctatgctggggccccttctttctccacctaaccttaatcgtcctctgccccgaacaccccacatgcggatgcatcttcaaaaacttcaacctctttctggccctaataatctgcaacgccatcatagaccccctcatctacgccttccactcccaagaactccgccgaacactcaaagaagtccttacctgctcatggtga

SEQ ID NO: 4342 - RNA, 954 nt, synthetic construct
  misc_feature 1..954: note = BAE94307 variant
  source 1..954: mol_type = other RNA
atggccgttcaaggctcacaacgccgactcctcggctccctcaactccacccccaccgccatcccccaactcggcctcgcagccaaccaaaccggcgcccgctgcctcgaagtctccatctccgacggcctcttcctatcactcggcctagtctccctagtagaaaacgctctcgtcgtagcaaccatagccaaaaaccgcaacctacactcccccatgtactgcttcatctgctgcctagctctctcagacctcctcgtctccggctccaacatgctcgaaaccgcagtcatactcctgctcgaagccggagccctagtagcccgcgccgcagtcctccaacaactcgacaacgtgatcgacgtcattacctgctcatcaatgctctcctccctctgcttcctaggcgcaatcgccgtcgaccgctacatctccatattctacgccctccgctaccactcgattgtcatcctcccccgcgcccgccgcgccgtcgccgccatctgggtcgcctcagtcgtcttctcaaccctcttcatcgcctactacgaccacgttgccgtcctcctatgcctagtcgtattcttcctcgcaatgctcgtcctcatggccgtcctctacgtccacatgctagcacgcgcatgccaacacgcccaaggcatcgcccgcctccacaaacgccaacgtcccgtccaccaaggcttcggactcaaaggcgcagtcaccctcaccatcctcctcggaatcttcttcctctgctggggccccttcttcctccacctaaccctcatcgtactctgccccgaacacccgacctgcggctgcatcttcaaaaacttcaacctcttccttgccctcataatctgcaacgccatcatcgatcccctaatctacgccttccactcacaagaactacgacgcacactcaaagaagtactaacctgctcatggtaa

SEQ ID NO: 4343 - RNA, 951 nt, synthetic construct
  misc_feature 1..951: note = BAE94306 variant
  source 1..951: mol_type = other RNA
atggccgtacaaggctcccaacgtcgactcctcggctccctcaattccacccccactgccatcccccaactcggccttgccgccaaccaaactggcgcccgctgcctcgaagtatccatctccgacggcctattcctctccctcggactcgtctccctagtcgaaaacgccctcgtcgtcgctaccatcgccaaaaaccgtaacctccactcccccatgtactgcttcatctgttgcctagcactctcagaccttctagtctccggctccaacgtcctcgaaaccgccgtcatccttctcctcgaagccggcgccctagtcgccagagccgccgtcctccaacaactcgacaacgtcattgacgtcataacctgcagctcaatgctctcctccctctgcttcctcggcgccatcgccgtcgaccgttacatctccatctacgcactccgataccactccatcgtcaccctccctcgagcacgccaagccgtcgctgccatctgggtcgcatccgtcgtcttctccacccttttcattgcctactacgaccacgtcgccgtcctcctatgcctcgtcgtcttcttcctcgccatgctcgtcctaatggcagtcctatacgtccacatgctcgcccgcgcctgccaacacgcccaaggcatcgcccgcctacacaaacgtcaacgccccgtccaccaaggcttcggcctcaaaggcgccgtcaccctcaccatcctcctcggaatcttcttcctctgctggggccctttcttccttcacctaaccctcatcgtcctctgccccgaacacccaacatgcggctgcatcttcaaaaacttcaaccttttcctcgccctaataatctgcaacgctatcatcgacccccttatatacgccttccactcccaagaactccgccgcaccctcaaagaagtcttaacctgctcatggtaa

SEQ ID NO: 4344 - RNA, 954 nt, synthetic construct
  misc_feature 1..954: note = AAQ62977 variant
  source 1..954: mol_type = other RNA
atggccgtacaaggttcccaacgccgactactcggctcactcaactccacccccaccgccatcccccaactcggactcgctgccaaccaaactggcgcccgatgcctcgaagtatccatctccgacggtctcttcctgtcccttggcctcgtctcactcgtcgaaaacgccctcgtcgtcgccaccatcgccaaaaaccgcaacctccactctcccatgtactgcttcatatgttgcctagccctttccgacctccttgtctctggctccaacgtcctcgaaaccgccgtcatcctcctccttgaagccggcgccctcgtcgcccgcgctgccgtccttcaacaactagacaacgtcatcgacgtcataacctgctcctccatgctctcatccctctgcttcctcggcgccatcgccgtagaccgatacatctccatcttctacgccctccgttaccactccatcgtcaccctcccacgagcccgccgcgccgtcgccgcaatctgggtagcctccgtcgtcttctccaccctcttcatcgcctactacgaccacgtcgccgtactcctctgcctcgtcgtcttcttcctcgccatgctagtccttatggcagtcctttacgtccacatgctcgcccgcgcctgccagcacgcccaaggaatcgcccgcctccacaaacgacaacgccccgtccaccaaggcttcggcctaaaaggcgcggtcacccttaccatcctcctcggtatcttcttcctctgctggggccccttctttctccacctcaccctcataatcctctgcccagaacatccaacctgcggctgcatcttcaaaaacttcaacctctttctcgccctcataatctgcaacgccatcatcgaccccctcatctacgccttccactcccaagaactccgccgaacactcaaagaagtcctaacctgctcctggtag

SEQ ID NO: 4345 - RNA, 954 nt, synthetic construct
  misc_feature 1..954: note = AAQ62975 variant
  source 1..954: mol_type = other RNA
atggccgtccaaggctcccaacgccgcctcctcggatccctcaactccacccccaccgcaatcccccaactcggactcgccgccaaccaaactggcgcccgctgcctcgaagtctccatctccgacggcctcttcctttccctcggccttgtctcactcgtcgaaaacgccctcgtcgtcgccaccatagccaaaaatcgcaacctccactcaccaatgtactgcttcatctgctgtctcgccctctcagacctcctggtatccggctccaacgtcctcgaaaccgccgtcattcttctcctcgaagccggcgccctcgtcgcccgcgcagtcgtcctccaacaactcgacaacgtcatcgacgttataacatgctcctcaatgctctcttccctatgcttccttggcgccatcgccgtcgaccgctacatctccatcttctatgccctacgatatcactccatcgtcacccttcccagagcacgccgcgccgtcgccgccatctgggtagcctccgtcgtcttctccaccctcttcatcgcctactacgaccacgtcgcagtactactttgccttgtcgtcttcttcctcgccatgctcgtccttatggcagtcctctacgtccacatgctcgcccgcgcctgccaacacgcacaaggtatcgcccgcctccacaaacgccaacgacccgtccaccaaggcttcggcctcaaaggagccgtaaccctcacaatcctcctaggcatcttcttcctttgctggggcccattcttcctccacctcacactaatcgtcctctgccccgaacacccaacctgcggctgtatcttcaaaaacttcaacctcttcctagccctcatcatatgcaacgcaataatagaccccctcatctacgccttccactcacaagaacttcgccgcaccctcaaagaagtcctaacctgctcctggtag

SEQ ID NO: 4346 - RNA, 954 nt, synthetic construct
  misc_feature 1..954: note = AAQ62974 variant
  source 1..954: mol_type = other RNA
atggccgtccaaggttcacaacgccgcctcctcggctccctcaactcaacccccaccgccatcccccaactcggactcgccgccaaccaaaccggcgcccgctgcctcgaagtctccatctccgacggtctctttctctccctcggcctagtctccctcgtcgaaaatgccctcgtcgtagccaccatcgccaaaaaccgcaacctccactccccaatgtactgcttcatctgctgcctcgccctctccgaccttctagtctcaggctccaatgtcctggaaacagccgttatcctactcctcgaagctggcgcactcgtcgcccgcgcagccgtcttacaacaactcgacaatgtcatcgacgtcatcacatgctcctctatgctctcctctctctgctttctcggcgccatcgccgtcgaccgctacatctccatcttctacgccctacgataccactccatcgtcaccctcccccgcgctcgacgcgcagtagccgccatatgggtagcatccgtcgtcttctcaacactcttcatcgcctactacgaccacgtcgccgttcttctctgcctcgtcgtattcttcctcgccatgcttgtcttaatggccgtcctttacgtccatatgctcgcccgcgcctgccaacacgcccaaggcattgcccgcctacacaaacgccaacgccccgtccaccaaggattcggcctcaaaggcgccgtaacactcaccatactccttggaatcttcttcctctgctggggcccattcttcctccacctcaccctcatcgtcctatgccccgaacaccccacatgcggctgcatcttcaaaaacttcaacctcttcctcgccctaatcatatgcaacgccatcatcgaccccttaatctacgccttccactcccaagaactccgccgaacactcaaagaagtcctcacccgctcctggtaa

SEQ ID NO: 4347 - RNA, 954 nt, synthetic construct
  misc_feature 1..954: note = AAQ62973 variant
  source 1..954: mol_type = other RNA
atggcagtccaaggctcccaacgacgcctactcgggtcactcaactccaccccaaccgctatcccccaacttggcctcgccgcaaaccagactggcgcccgctgcctcgaagtctcaatatccgacggcctcttcctctcactaggcctcgtctcactcgtcgaaaacgccctcgtcgtcgccaccatagccaaaaaccgcaacctccattcacccatgtactgcttcatctgctgccttgctctttccgacctcctagtctccggctctaacgtccttgaaacagctgtcatactcctcctcgaagccggcgctctcgtcgcccgcgccgccgtcctccaacaactagacaacgtcatcgacgtaatcacatgctcctccatgctctcctcattatgctttctcggcgccatcgccgtcgaccgctacatctccatcttctacgcccttcgataccattcaatcgtaaccctcccccgcgcccgacgcgccgtcgccgcaatctgggtcgcctccgtcgtcttctccaccctctttatcgcctactacgaccacgtcgcagttcttctctgcctcgtcgtcttcttcctcgcaatgctcgtccttatggcagtactctacgtccacatgctagcccgagcctgccaacacgcccaaggcatcgcacgcctccacaaacgccaaagacctgtccaccaaggcttcggcctcaaaggcgccgtcacgctcaccatcctactcggcatattcttcctctgctggggccccttcttcctccacctcaccctcatcgtcctatgccccgaacacccaacctgcggctgcatcttcaagaacttcaacctcttcctagccctaatcatctgcaacgccatcatcgaccctctcatctacgcattccactcccaagaactccgccgcatgctcaaagaagtcctaacctgctcctggtaa

SEQ ID NO: 4348 - RNA, 954 nt, synthetic construct
  misc_feature 1..954: note = AAQ62972 variant
  source 1..954: mol_type = other RNA
atggcagtccaaggctcacaacgccgcctactcggctctctaaactccaccccaaccgccatcccccaactcggcctcgccgccaaccaaaccggcgcccgatgcctagaagtctccatatccgacggcctcttcctctccctaggactcgtctcactcgtcgaaaacgccctcgtcgtcgccaccatagccaaaaaccgcaacctccactctcccatgtactgcttcatatgctgcctagccctctccgaccttctagtctccggctccaacgtcctcgaaaccgctgtcatcctcctcctagaagccggggccctagtcgcacgagccgccgtcctccaacaactcgataacgtcatcgacgtcataacctgctcctcaatgctctcctccctatgcttcctcggcgccatcgccgtcgaccgctacatctcaatcttctatgccctccgctaccactccatcgtcacccttccccgcgcccgacgcgccgtcgccgccatctgggtcgcctctgtagtcttctccacactcttcatcgcatactacgaccacgtcgccgtcctcctctgcctagtagtattcttcctcgccatgctcgtcctcatggccgtcctatacgtccacatgctagcctgggcatgccaacacgcccaaggcatcgcccgccttcacaaacgccaacgacccgtccaccaaggcttcggcctaaaaggcgccgtcaccctaaccatcctcctcggcatcttcttcctctgctggggacccttcttcctccacctcaccctaatcgtcctctgccccgaacaccccacatgcggatgcatcttcaaaaacttcaaccttttcctcgccctcatcatatgcaatgcaatcatcgaccccctcatctacgctttccactcccaagaactccgccgcaccctcaaggaagtactcacatgctcctggtaa

SEQ ID NO: 4349 - RNA, 954 nt, synthetic construct
  misc_feature 1..954: note = AAQ62971 variant
  source 1..954: mol_type = other RNA
atggccgtccaaggctcccaaagacgcctcctcggatccctcaactccacccccaccgccatcccccaactcggcctcgccgccaaccaaaccggcgcccgctgccttgaagtctcgatctccgacggcctcttcctctcactcggactcgtctctcttgtagaaaacgctctagtcgtcgccaccatcgccaaaaaccgcaacctccactcccccatgtactgcttcatctgctgccttgcactctccgacctcctagtctccggttcaaacgtactcgaaactgccgtcatcctcctcctcgaagccggcgccctcgttgcccgagccgccgtcctccaacaactcgacaacgtaatcgacgtcattacctgctcctccatgctctcatccctatgcttccttggcgccatcgcagtcgaccgttacatctccatcttctacgccctccgctaccactccatcgtcaccctaccccaagcacgccgtgctgtcgccgccatctgggtagcctccgtcgtattctctaccctcttcatcgcctactacgaccacgtcgccgttctcctctgcctcgttgtattcttcctcgccatgctcgtcctcatggcagtcctatacgtccacatgctcgcccgtgcctgccaacacgcccaaggcatcgctcgccttcacaaacgccaacgacctgtacaccaaggcttcggactcaaaggcgctgtcaccctcaccatcctcctcggcatcttcttcctttgctggggcccattcttcctccacctcaccctcatagtactatgtcccgaacacccaacctgcggatgcattttcaaaaacttcaacctctttctagccctcatcatatgcaacgccatcatcgacccccttatctacgccttccactctcaagaactccgccgcaccctcaaagaagtccttacctgctcctggtaa

SEQ ID NO: 4350 - RNA, 954 nt, synthetic construct
  misc_feature 1..954: note = AAQ62970 variant
  source 1..954: mol_type = other RNA
atggccgtccaaggctctcaacgccgtctccttggctccctaaattcaacccccacagctatcccacaactaggcctcgccgccaaccaaaccggcgcacgctgcctcgaagtctccatatccgacggcctattcctctccctcggcctcgtctcccttgtagaaaacgccctcgtcgtcgccaccatcgctaaaaaccgcaacctccactcccccatgtactgtttcatctgctgcctcgccctcctagacctactcgtctccggctccaacgtcctcgaaacagccgtcatcctcctactagaagccggtgcactcgtcgcccgcgccgcagtcctccaacaactcgacaacgtcatcgacgtcataacctgctcctccatgctctcctccctatgtttcctcggcgccatcgccgtcgaccgctacatctccatcttctacgccctacgctaccactccattgtaaccctacccagagcccgccgtgccgtcgccgccatctgggtcgcctccgtcgtcttctccacactcttcatagcctactacgaccatgtcgccgtcctcctatgcttagtagtcttcttcctagccatgcttgtcctcatggcagtcctctacgtccatatgctcgcccgcgcatgccaacacgcccaaggcattgcacgcctacacaaacgccaacgacccgtccaccaaggcttcggcctcaaaggagccgtcaccctaaccatcctactcggcatcttcttcctctgctggggcccattcttcctccacctcactctcatcgtcctctgcccagagcacccaacctgcggctgcatcttcaagaacttcaatctcttcctagccctcatcatctgcaacgccataatcgaccctctcatctacgccttccactcacaagaactccgccgcactctcaaagaagttctaacctgctcatggtaa

SEQ ID NO: 4351 - RNA, 954 nt, synthetic construct
  misc_feature 1..954: note = AAQ62969 variant
  source 1..954: mol_type = other RNA
atggccgtccaaggctcccaacgtcgcctcctcgggtccctcaactccacacccaccgcaataccccaactcggcctcgctgccaaccaaaccggcgcccgatgcctcgaagtctccatctccgacggcctcctcctttccctaggcctagtctccctagtggaaaacgccctagtcgtagcaactatcgccaaaaaccgcaacctccactcacccatgtactgcttcatttgctgcctcgccctatccgacctacttgtctcaggatccaacgtcctggaaaccgccgtcatcctcctcctcgaagccggcgccctcgtcgcacgtgccgccgtcctccaacaactcgacaacgtcatcgacgtcataacctgctcatccatgctctcctccctatgcttcctcggagccatcgccgtcgaccgctacatctccatattctacgccctccgctaccactccatcgtcactctacccagagcccgccgcgcagtcgccgcaatctgggtcgcctccgtcgtcttctccactctcttcatagcttactacgaccacgtcgccgtactcctctgcctagtagtcttcttcctcgccatgctcgtcctcatggccgtcctttacgttcacatgctcgcccgcgcctgccaacacgcccaaggcatcgcccgccttcacaaacgccaacgcccagtacaccaaggcttcggactcaaaggcgccgtcaccctcaccatcctcctaggcatcttcttcctctgctggggccccttcttcctccaccttacactcatcgttctctgcccggaacacccaacctgcggctgcatcttcaaaaactttaacctcttcctcgcccttatcatctgcaatgccatcatcgaccccctcatctacgccttccactcccaggaacttcgccgtaccctcaaagaagtcctcacatgctcctggtaa

SEQ ID NO: 4352 - RNA, 954 nt, synthetic construct
  misc_feature 1..954: note = AAO21073 variant
  source 1..954: mol_type = other RNA
atggccgtccaaggctcacaacgccgcctcctcggttccctaaactccaccccaacagccatcccccaactaggcctcgccgccaaccaaaccggagcccgctgcctcgaagtctccatctcagacggcctgttcctatcactcggcctcgtctccctcgtcgaaaatgcccttgtcgtcgcaacaatcgccaaaaaccgtaacctccactccccaatgtactgcttcatctgctgcctagcactatccgacctactcgtctcaggctccaacgtccgcgaaaccgcagtcatccttctcctcgaagcaggagcactcgtcgcccgcgccgccgtcctacaacaacttgacaacgtcatcgacgtcatcacatgctcctcaatgctcagctcactttgcttcctcggcgccatcgccgtcgaccgctacatatccatcttttacgccctccgctatcactcaatcgtcaccctaccccgcgcccgccgcgccgttgccgcaatctgggtcgcctccgtcgttttctcaaccctcttcatagcctactacgaccacgtcgccgtcctactctgcctcgtagtcttcttcctcgcaatgctagtcctcatggcagtcctctacgtccatatgctcgcccgcgcctgccaacacgcacaaggcatcgcccgccttcacaaacgccaacgacccgtccaccaaggcttcggcctcaaaggtgccgtcaccctcaccatcctactaggcatattcttcctttgctggggccccttctttctccatctcaccctaatcgtcctttgccccgaacaccccacatgcggctgcatcttcaaaaacttcaaccttttcctcgccctaatcatctgcaacgccatcatcgaccccctcatctacgcatttcactcccaagaactccgccgcactctcaaagaagtcctaacctgctcttggtaa

SEQ ID NO: 4353 - RNA, 954 nt, synthetic construct
  misc_feature 1..954: note = AHC09567 variant
  source 1..954: mol_type = other RNA
atggccgtccaaggctcccaacgccgcctcctcggcagcctaaactcaacccccaccgccattccccaactcggcctagccgccaaccaaaccggagcccgatgcctcgaagtctccatctccgacggcctcttcctctcattaggtctcgtctccctcgtcgaaaacgcactcgtagtagccaccatcgccaaaaaccgcaacctccactcacccatgtactgcttcatctgctgtcttgcactccccgacctcctcgtctccggatccaacgtcctcgaaaccgccgtcatactcctcctcgaagccggcgcactcgtcgcccgcgccgccgtccttcaacaactagataacgtcatcgacgtcatcacatgctcctcaatgctatcctcactctgcttcctcggcgccatagccgtcgaccgttacatctcaatcttctacgccctcagataccactccatcgtcaccctcccccgcgcccgccgcgccgtcgccgccatctgggtcgcctccgtcgtcttctccacccttttcatagcatactacgaccacgtcgccgtactcctctgcctcgtcgtcttcttccttgccatgctcgtcctcatggccgtcttatacgtccacatgctcgcccgcgcctgccaacacgcacaaggcatcgcccgtctccacaaacgccaacgccccgtccaccaaggcttcggcctcaaaggagccgtcaccctcactatcctcctcggcatcttcttcctgtgctggggccccttcttccttcacctcaccctaattgtcctttgccccgagcaccccacatgcggatgcatattcaaaaacttcaaccttttcctagccctcatcatctgcaacgccatcatcgaccccctcatctacgctttccactcccaagaactccgacgtaccctcaaagaagtcctaacctgctcctggtga

SEQ ID NO: 4354 - RNA, 954 nt, synthetic construct
  misc_feature 1..954: note = AHC09812 variant
  source 1..954: mol_type = other RNA
atggcagtacaaggctcccaaagacgactcctcggctccttaaactccacccccaccgcaataccccaactcggcctcgccgcaaaccaaaccggcgcccgctgcctcgaagtctccatctccgacggcctattcctctccctcggcctcgtctctctcgtcgaaaacgcccttgtcgtcgccactatcgccaaaaaccgaaacctccactcaccaatgtactgcttcatctgctgcctcgccctctccgacctcctcgtctccggctcaaacgtcctcgaaaccgccgtcatactactactcgaagcaggcgccctagtcgcacgagccgccgtccttcaacaactagataacgtaatcgacgtcataacctgctcatcaatgctctcgtccctatgtttcctcggcgccatcgccgtcgaccgatacatcagcatcttctacgccctccgctaccactcaatcgtaaccctacctcgtgcacgccgcgccgtagccgccatatgggtagcctcagtcgtcttctccacactcttcatcgcctactatgaccacgtagccgttctactttgcctcatggtcttcttcctcgccatgctcgtcctgatggcagtcctttacgtacacatgctcgcccgcgcctgccaacacgcccaaggcatcgctcgactacacaaacgccaacgccccgtccaccaaggcttcggactcaagggcgccgtcaccctcaccatcctcctcggcatcttctttctctgctggggccccttcttcctccatctcaccctcatcgtcctatgccccgaacacccaacctgcggctgcatcttcaaaaacttcaaccttttcctcgcactcatcatctgcaacgccatcatcgaccccctcatctacgccttccactcccaagaactccgccgcaccctaaaagaagtccttacatgctcttggtaa

SEQ ID NO: 4355 - RNA, 954 nt, synthetic construct
  misc_feature 1..954: note = AHC10192 variant
  source 1..954: mol_type = other RNA
atggccgtccaaggctcccaacgccgactactaggctccctcaactccacccccaccgccatcccccaactcggcctcgccgctaaccaaaccggcgcacgctgccttgaagtctcaatatccgacggcctcttcctctccctcggcctcgtctcactcgtcgaaaatgccctcgtcgtcgccaccatcgcgaaaaaccgcaatctccactcgccaatgtattgctttatctgctgcctagcattatccgacctactcgtctccggctcaaacgtcctagaaaccgcagtcatcctcctcctcgaagccggagcccttgtcgcccgagccgccgtcctccaacaactcgacaatgtcatcgacgtcataacctgctcctctatgctttcatccctctgcttcctcggcgccatcgccgtcgaccgatacatctccatcttttacgccctacgctaccactccatcgtcaccctcccccgagcccgccgcgcagtcgccgccatctgggtcgcctcagtagtcttctccactctcttcatcgcctactacgaccacgtcgcagtcctcctctgcctcgtcgtattcttcctcgccatgctcgttctcatggccgtcctatacgtacacatgctcgcccgagcctgccaacacgcccaaggaactgcccgcctccacaaacgccaacgccccgtccaccagggctttggccttaaaggcgctgtcaccctaaccatcctcctcggcatcttcttcctctgctggggcccattcttcctccacctcaccctcatcgtcctatgccccgaacaccctacctgcggctgcatcttcaaaaacttcaacctcttcttagccctcatcatctgcaacgccataatcgacccactcatttacgcattccactcccaagaactccgccgcaccctcaaagaagtcctaacctgctcctggtaa

SEQ ID NO: 4356 - RNA, 954 nt, synthetic construct
  misc_feature 1..954: note = AHC09641 variant
  source 1..954: mol_type = other RNA
atggccgtccaaggctcccaacgccgcctacttggttcattaaactccacaccaaccgccatcccccaactcggcctcgccgccaaccaaaccggagcacgatgcctcgaagtctccatctccgacggcctcttcctatccctcggcctcgtctccctagtagaaaacgccctcgtagtcgccaccatcgccaaaaaccgcaacctccactcccccatgtactgcttcatctgctgcctcgcactctccgacctcctcgtctccggctccaacgtcctcgaaaccgcagtcatcctcctcctcgaagccggcgccctcgtagcccgcgccgcagtcctccaacaactcgacaacgtcatcgacgtcataacctgctcctcaatgctctcatccctctgcttccttggcgccatcgccgtcgaccgctacatctccatcttctacgccctccgctaccactccaccgtcaccctcccccgcgcccgccgcgccgtcgccgccatatgggtcgcctccgtcgtcttctcaacactcttcatcgcatactacgaccacgtcgccgtactcctctgcctcgtcgttttcttcctcgccatgctcgtcctaatggccgtcctctacgtacacatgctcgcccgcgcctgccaacacgcccagggcatcgcacgcctccacaaacgccaacgccccgtccaccaaggcttcggactcaaaggcgccgtcaccctcacaatactcctaggcatcttcttcctctgctggggccccttcttcctacacctaacactaatcgtactatgccctgaacacccaacctgcggctgcatattcaaaaacttcaacctcttcctcgcccttatcatctgcaacgccatcatcgaccccctcatctacgcctttcactcccaagaactccgccgcaccctcaaagaagtccttacctgctcctggtaa

SEQ ID NO: 4357 - RNA, 954 nt, synthetic construct
  misc_feature 1..954: note = AHC10044 variant
  source 1..954: mol_type = other RNA
atggccgtccaaggctcccaaagacgcctactcggctcactaaactctacccccaccgccatcccccaactcggcctcgccgccaaccaaaccggcgcccgatacctcgaagtctccatctcagacggtctcttcctctccttaggcctcgtctccctcgtcgagaacgccctcgtcgtcgccaccatcgccaaaaaccgcaacctccactcccccatgtactgcttcatctgctgcctcgccctctccgacctcctagtctcaggctcaaacgtcctagaaaccgccgtcatcctactactcgaagccggcgccctagtcgcccgcgccgccgtcctccaacaactcgacaacgtaatcgacgtcatcacctgttcatcaatgctctcctccctctgcttcctcggcgccatcgccgtagaccgatacatctccatcttctacgccctacgctaccactccatcgtcaccctcccccgcgcacgccgcgcagtagccgccatctgggtcgcctcagttgtcttctcaaccctattcatcgcctactacgaccacgtagctgtactactttgcctcgtcgtcttcttcctcgccatgctcgttctcatggccgtcctctacgtccacatgctcgcccgtgcctgccaacacgcccaaggcatcgcccgtctccacaaaagacaacgccccgtccaccaaggcttcggcctcaaaggcgccgtcaccctcactatcctcctcggcatcttcttcctttgctggggccccttcttcctacacctaaccctcatcgtcctctgccccgaacacccaacctgcggatgcatattcaaaaacttcaacctcttcctcgccctcatcatctgcaacgccatcatcgaccccctcatatacgccttccactcccaagaactccgccgtaccctcaaagaagttctaacctgctcctggtga

SEQ ID NO: 4358 - RNA, 954 nt, synthetic construct
  misc_feature 1..954: note = AHC09532 variant
  source 1..954: mol_type = other RNA
atggcagtacaaggctcccaacgccgcctcctcggatcccttaactccacacccaccgccataccacaactaggcctagccgccaaccaaaccggcgcacgctgcctcgaagtatccatctcagacggcctcttcctctccctcggactcgtatctctcgtcgaaaatgcccttgtactcgccactatcgccaaaaatcgcaacctccactcccccatgtattgcttcatctgctgcctcgccctctccgacctcctcgtctccggctcaaacgtcctcgaaaccgccgtcatacttctcctcgaagccggcgccctcgtcgcccgcgccgcagtcctccaacaattagacaacgtcatcgacgtcataacctgctcctccatgctctcctccctctgcttcctcggcgccatcgctgtcgaccgctacatatccattttctacgcactccgatatcactccatcgtcaccctcccccgcgcccgccgagccgtcgccgccatctgggtcgcctccgtcgtcttctccacccttttcatcgcctactacgaccacgtcgccgtcctcctctgcctcgtcgttttcttcctcgccatgctcgtactcatggccgtcctatacgtccacatgctcgcacgcgcctgccaacacgcccaaggcatcgcccgcctccacaaacgccaacgtcccgttcaccaaggattcggcctaaaaggcgccgtcaccctcaccatcctcctcggcatctttttcctctgctggggcccctttttcctccacctcacactaatagtcctctgccccgaacaccccacatgcggctgcatcttcaaaaactttaacctcttcctcgccctcatcatctgcaacgcaatcatcgaccccttaatctacgccttccactcacaagaactccgacgcaccctcaaagaagtactaacctgcagctggtaa

SEQ ID NO: 4359 - RNA, 954 nt, synthetic construct
  misc_feature 1..954: note = AHC11042 variant
  source 1..954: mol_type = other RNA
atggccgtccaaggctctcaacgccgcctcctcggctccctcaattccacccccaccgcaatcccccaactcggcctagctgcaaaccaaaccggagccagatgcctcgaagtctccatctccgacggcctcttcctctctctcggcctcgtctccctcgtcgaaaacgccctcgttgtcgccaccatagccaaaaaccgcaacctacactcccccatgtactgcttcatctgctgcctacccctctccgacctactcgtctccggctctaacgtactcgaaacagccgtcatactcttacttgaagccggcgccctcgtcgcccgcgccgccgtcctccaacaactggacaacgtcatagacgtcataacctgctcctccatgctttcatccctatgcttcctcggcgccatcgccgtcgaccgctacatcagcatattctacgccctccgctaccactccatagtcacactcccccgcgcccgccgcgccgtcgccgctatctgggtcgcctccgtcgtcttctccactctcttcatcgcctactacgaccacgtcgccgtcctcctctgcctcgtcgtctttttcctcgccatgctcgtcctcatggccgtcctctacgtccacatgctcgctcgcgcatgccaacacgcccaaggaatcgcacgcttacacaaacgccagcgccccgtccaccaaggattcggcctaaaaggcgctgtcaccctcacaatccttctcggaatcttcttcctatgctggggccccttcttcctccacctcaccctcatagtcctttgccctgaacaccccacttgcggatgcatcttcaagaacttcaacctcttcctcgccctcatcatctgcaacgctatcatcgaccccctcatctacgccttccactctcaagaactacgccgcacactcaaagaagtcctaacctgctcatggtaa

SEQ ID NO: 4360 - RNA, 954 nt, synthetic construct
  misc_feature 1..954: note = AHC10733 variant
  source 1..954: mol_type = other RNA
atggccgtccaaggctcccaaagacgcctcctaggctccctcaattcaacccccaccgccatcccccaactaggcctcgccgcaaaccaaaccggagcccgttgccttgaagtatctatctcagacggactcttcctatccctaggcctcgtctcacttgtcgaaaacgccctcgtagtcgccaccatcgccaaaaaccgcaacctccactcccctatgtactgcttcatttgctgcctagcactatccgacctcctcgtctcaggctccaacgttctcgaaacagcagtcatactactcctcgaagctggcgccctcgtcgcccgcgcagccgtcctccaacaactcgacaacgtaatcgacgtcatcacatgctcatcaatgctatcctccctctgcttcctcggcgccatagcagtcgaccgctacatctccatcttctatgccctccgctaccactccatcgtcactctcccccgagcccgccgcgccgtagccgccatttgggtcgcctccgtcgtcttctccaccctattcatcgcctactacgaccacgtcgcagtactcctctgcctcgtcgtattcttcctcgcaatgctggtcctcatggccgtcctctacgtccatatgctcgcccgcgcatgccaacacgcccaaggcattgcccgactccacaaacgccaacgccccgtccaccaaggcttcggcctaaaaggcgccgtaaccctcaccatcctcctcggcatcttcttcttatgctggggccccttcttcctccacctcaccctcatcgtcctctgccccgaacacccaacctgcggctgcatcttcaaaaacttctccctcttcctcgccctcatcatctgcaacgccatcatagaccccctcatctacgcatttcactcccaagaactccgccgcacactaaaagaagtcctcacatgctcctggtaa

SEQ ID NO: 4361 - RNA, 954 nt, synthetic construct
  misc_feature 1..954: note = AHC10696 variant
  source 1..954: mol_type = other RNA
atggccgtccaaggctcccaacgccgtctcctcggctccctaaactccacccccaccgctatcccccaactcggcctagccgccaaccaaaccggcgcccgctgccttgaagtgtccatctccgacggcctcttcctctcactaggcctcgtatcactcgtcgaaaacgccctcgtcgtcgccacaatcgccaaaaaccgcaacctccactcccccatgtactgcttcatctgctgcctcgccctctccgacctcctcgtctccggcagcaacgtcctagaaaccgccgtcatcctcctcctagaagccggagccctcgtcgcccgcgccgctgtactccaacaactagacaacgtcatcgacgtcataacctgctcctcaatgctatcctccctctgcttcctaggcgctatcgccgtagacagatacatctcaatcttctacgcactccgctaccactccatcgtcaccctaccccgcgcccgacgcgccgtcgccgccatatgggtcgcctccgtcgtcttctctaccctcttcatcgcctattacgaccacgtcgccgtcctactctgcctcgttgtcttcttccttgccatgctcgtcctcatggccgtcttatacgtccacatgctcgcccgcgcctgccaacacgcccaaggcatagcccgactacataaacgccaacgccctgtccaccaaggcttcggcctcaaaggagcagtaaccctcaccatcctcctcggcatcttcttcctctgctggggacccttcttcctccacctcaccctcatcgtactctgcccagaacacccaacctgcggctgcatctttaaaaacttcaacctcttcctcgcactcatcatctgcaacgccatcatcgaccccctcatccacgccttccactcccaagaactccgccgaacccttaaagaagtactaacctgctcctggtag

SEQ ID NO: 4362 - RNA, 954 nt, synthetic construct
  misc_feature 1..954: note = AHC09527 variant
  source 1..954: mol_type = other RNA
atggctgtccaaggctcccaacgccgcctcctcggctccctaaactccacacccactgccatcccccaactcggccttgccgccaaccaaaccggcgcccgctgcctagaagtctcaatctccgacggcctcttcctctccctcggcctagtatcactcgtagaaaacgccctcgttgtcgccacgatcgccaaaaaccgcaacctccactcccccatgtactgctttatctgctgcctagccctctctgacctcctcgtctccggatcaaacgtccttgaaacagccgtaatcctcctcctcgaagccggcgccctcgttgcccgagctgccgtcctacaacaattagacaatgtcatcgacgtcataacctgctcctccatgctctcctccctctgcttcctcggcgctatcgccgtcgaccgatacatttccatcttctacgccctccgctaccactccatagtaacactaccccgtgcccgtcgcgcagtcgccgccatatgggtcgcctcagtagtcttctccaccctattcatcgcatactacgaccacgtcgccgtcctcctctgcctcgtcgtcttcttcctagccatgcttgtactcatggccgtcctctatgtccacatgctcgcccgagcctgccaacacgcccaaggcatcgcccgcctacacaaacgccaacgcccagtccatcaaggcttcggcctcaaaggcgccgtcacccttacaatcctactcggaatattcttcctctgctggggccccttcttcctacacctcaccctcatcgtactatgccccgaacacccaacctgcggatgcatattcaagaactttaacctcttcctcgccctcatcatctgcaacgccatcatccaccccctaatctacgccttccactcccaagaactccgccgaacactcaaagaagtcctaacctgctcttggtaa

SEQ ID NO: 4363 - RNA, 954 nt, synthetic construct
  misc_feature 1..954: note = AHC10869 variant
  source 1..954: mol_type = other RNA
atggccgtccaaggctcccaacgccgtctcctcggctccctcaattcaacccccaccgccataccccaactcggcctcgccgccaaccaaaccggagcacgatgcctcgaagtctccatctccgacggcttattcctttccctcggcctcgtctccctcgtagaaaacgccctcgtcgtcgccaccatcgccaaaaaccgcaacctccactccccaatgtactgcttcatatgctgcctcgccctttccgacctcctcgtctctggctcaaacgtccttgaaacagcagtcatactccttctagaagccggcgccctagtcgctcgcgccgccgtcctccaacaactcgataacgtcatcgacgtaattacctgctcctccatgctctccagcctatgcttcctcggcgccatcgccgtcgacagatacatctccatcttctacgccctccgctatcactcaatcgtcaccctgccccgcgcccgcagagccgtagccgccatctgggtcgcctcagtcgtattctccaccctcttcatagcctactacgatcacgtcgctgtcctcctctgcctagtcgtcttcttcctcgccatgctcgtcctcatggccgtactctacgtccacatgctagcccgcgcctgccaacacgcccaaggcatcgccagactacacaaacgtcaacacccagtccatcaaggcttcggcctcaaaggcgcagtcaccctcaccatcctcctcggcatcttcttcctctgctggggacccttcttcctccacctcaccctcatagtcctgtgcccagaacacccaacctgcggctgtatattcaaaaacttcaacctattcctcgccctcatcatttgcaacgcaatcatcgaccccctcatctacgccttccactcacaagaactccgaagaacactcaaagaagtcctaacctgctcctggtaa

SEQ ID NO: 4364 - RNA, 954 nt, synthetic construct
  misc_feature 1..954: note = AHC11615 variant
  source 1..954: mol_type = other RNA
atggctgtccaaggctctcaacgacgcctcctcggatctctcaactccacccccaccgccatcccacaacttggcctcgccgccaaccaaaccggcgcccgctgcctcgaagtatccatctccgacggcttattcctttcactcggcctcgtctccctcgtcgaaaatgccttagtcgtcgccaccatcgccaaaaaccgcaacctccactcccccatgtactgcttcatctgctgcctagccctctccgacctcctcgtctccggatccaacgtcctcgaaaccgccgtcatcctcctcctcgaagccggcgccctcgtcgcaagagccgctgtcctacaacaactcgacaacgtaatcgacgtcattacctgctcctcaatgctatcttcactctgcttcctaggagccatcgccgtcgaccgctacatctcaatcttctacgcactccgctaccactcaatcgtcaccctaccccgagcccgccgagccgtagccgcaatctgggtcgcctccgtcgtcttttccacactcttcatcgcctactacgaccacgtagccgtacttctctgcctcgtcgtattcttccttgccatgctagtcctcatggccgtactctacgtgcacatgcttgcccgcgcctgccaacacgcccaaggcatcgcccgcctacacaaacgtcaacgccccgttcatcaaggcttcggcctcaaaggcgcagtcaccctcaccattctcctcggcatatttttcctctgctggggcccattcttcctccacctcaccctcatagtcctctgccccgagcacccaacttgcggctgcatcttcaaaaactttaacctcttcttaaccctaatcatctgcaacgccatcatcgaccccctcatttacgctttccattcccaagaactccgacgaaccctcaaagaagtccttacctgctcctggtaa

SEQ ID NO: 4365 - RNA, 954 nt, synthetic construct
  misc_feature 1..954: note = AHC09535 variant
  source 1..954: mol_type = other RNA
atggcagtccaaggctcccaacgccgccttctcggatccctcaactcaacccccaccgccatcccccaactaggcctcgccgccaaccagaccggagcccgctgtctcgaagtttccatctccgacggcctcttcctctccctaggcctcgtctccctcgtcgaaaacgcccttgtcgtcgccactatcgccaaaaaccgaaacctccactcacccatgtactgcttcatctgctgcctcgccctatccgacctcctcgtctccggatctaacgtactagaaaccgccgtcatcctcctcctagaggccggtgccctcgtcgcccgcgccgccgtcctccaacaactcgacaacgtcatcgacgtcataacctgctcctccatgctctcctcactatgcttcctcggagccatcgccgtcgaccattacatctccatcttctacgccctccgctaccactccatcgtcaccctcccacgcgcccgccgcgccgtcgcagcaatctgggtcgcctccgtcgtattctcaaccctattcatcgcctactacgaccacgtcgccgtactcctctgcctagtcgtcttcttcctcgccatgctcgtcctcatggccgtcctatacgtccacatgctcgcccgcgcctgccaacacgctcaaggcatcgcccgcctacacaaacgccaacgcccagtacaccaaggcttcggactcaaaggagccgtcaccctcactatcctccttggcatcttcttcctctgctgggggcccttcttcctccacctcactctcatcgtcctctgcccagaacacccaacctgcggctgcatcttcaaaaacttcaacctattcctcgccctcatcatctgcaacgccatcatagaccccctaatctacgccttccactcacaagaactccgccgaaccctcaaagaagtcctcacatgctcatggtaa

SEQ ID NO: 4366 - RNA, 954 nt, synthetic construct
  misc_feature 1..954: note = AHC11840 variant
  source 1..954: mol_type = other RNA
atggcagtccaaggctcccaacgacgcctcctcggctccctcaactccacccccaccgccatcccccaactcggcctagctgccaatcaaaccggcgcccgatgcctcgaagtctctatctcagacggcctatttctctccctaggtctagtctccctcgtcgaaaacgccctcgtcgtagcaaccatcgccaaaaaccgcaacctccactcccccatgtactgcttcatctgctgcctcgccctctccgacctcctcgtctccggctccaacgtcctcgaaaccgcagtcatcctcctactcgaagccggcgccctagtcgcacgcgccgccgtcctacaacaactcgacaacgtaatcgacgttataacctgctcctccatgctctcatctctctgcttcctcggcgccatcgcagtcgaccgctacatctccatcttctacgccctccgctaccactccatcgtaacactaccccgcgcacgacgagccgtagccgccatctgggtcgcctccgtcgtcttctccacactcttcatcgcctactatgaccacgtcgccgtcctcctatgcctcgtcgtattcttccttgcaatgcttgtcctaatggccgtcctctacgtacacatgctcgcccgcgcctgtcagcacgcccaaggaatcgcccgcctccacaaacgccaacgcccagtccatcaaggcttcggcctcaaaggcgccgtcacccttaccatcctcctcggaatcttcttcctctgctggggcccattcttcctccacctcactctcatcgtcctatgccccgaacacccgacctgcggctgcatcttcaaaaacttcaacctattcctcgccctcatcatctgcaacgctataatcgaccccctcatctacgccttccacaaccaagaactccgccgcaccctcaaagaagtcctcacatgctcttggtaa

SEQ ID NO: 4367 - RNA, 954 nt, synthetic construct
  misc_feature 1..954: note = AHC09665 variant
  source 1..954: mol_type = other RNA
atggccgtccaaggctcccaacgacgcctactcggctctctaaactccacccccaccgccatcccccaactaggtctcgcagccaaccaaaccggcgcacgatgcctagaagtctcaatctccgacggcctattcctctccctcggcctagtctctctagtcgaaaacgcccttgtcgtcgccaccatcgccaaaaaccgcaacctccactcacccatgtactgcttcatatgctgcctcgccctctccgacctccttgtctcaggctccaacgtacttgaaaccgccgtcatcctactactagaagccggagccctcgtcgcccgcgcagccgtactccaacaactagataacgtcatagacatgatcacatgctccagcatgctctcctccctctgcttccttggcgccatcgccgtcgaccgttacatctctatcttctacgccctccgataccactccatcgtcacactcccccgtgcccgtcgagccgtagccgccatctgggtcgcctcagtcgtcttctccaccctcttcatagcctactacgaccacgtcgccgtcctcctctgcctcgtcgtcttcttcctagccatgctcgtactcatggccgtcctctacgtccacatgctcgcccgcgcctgccaacacgcccaaggcatcgcccgcctccacaaacgccaacgccccgtccaccaaggattcggcctaaaaggcgccgtaacccttaccatcctactcggcatattcttcctctgctggggccccttcttcctccaccttaccctcatagtactctgccccgaacacccaacctgcggctgcatcttcaaaaacttcaacctattcctagccctcatcatctgcaacgccatcatcgaccccctcatctacgccttccactcccaagaactccgccgcaccctcaaagaagtcctcacatgctcatggtaa

SEQ ID NO: 4368 - RNA, 954 nt, synthetic construct
  misc_feature 1..954: note = AHC11324 variant
  source 1..954: mol_type = other RNA
atggctgtccaaggctcccaacgccgcctcctcggatccctcaactccacccccaccgccatcccccaactaggcctcgccgccaaccaaaccggcgcccgctgcctcgaagtctcaatctcagacggcctctttctctccctcggtctcgtatccctcgtcgaaaacgccctcgtcgtcgctaccatcgccaaaaaccgaaatctccactcccccatgtactgcttcatctgctgcctcgccctctcagacctcctagtctccggctcaaacgtcctcgagactgccgtcatcctacttctcgaagccggtgccctcgtcgcacgagccgccgttctccaacaactcgacaacgtcatagacgtcataacctgctcatcaatgctatcctctctatgcttcctcggcgccatcgccgttgaccgctacatctccatcttctacgcactacgctaccactccatcgtcacactaccccgcgcacgtcgcgccgtcgccgccatctgggtcgcctcagtcgtcttctccaccctattcatcgcctactacgaccacgtcgccgtcctactatgcctcgtagtcttcttcttagcaatgcttgtcctcatggccgtcctatacgtccacatgctagcccgagcctgccaacacgcccaaggcatcgcacgcctccacaaacgccaacgacccgtccaccagggcttcggcctaaaaggcgcagtcaccctaaccatactactcggcatcttcttcctctgctggggacccttcttcctccacctcaccctcatagtcctatgccccgaacatcctacctgcggctgcattttcaaaaacttcaacctcttcctagccctcataatccgcaacgccatcatcgaccccctaatctacgccttccactcccaagaactccgacgcaccctcaaagaagtcctcacatgctcttggtaa

SEQ ID NO: 4369 - RNA, 954 nt, synthetic construct
  misc_feature 1..954: note = AHC09521 variant
  source 1..954: mol_type = other RNA
atggccgtccaaggctcccaacgccgcctactcggatccctaaactccacccccaccgccatcccccaactaggcctagccgcaaaccaaaccggcgcccgctgcctcgaagtctccatttccgacggcctcttcctttccctcggcctcgtctccctagtcgaaaatgccctagtagtcgccaccatagccaaaaaccgcaacctccactcccccatgtactgcttcatatgctgcctcgccctctccgacctccttgtctccggctccaacgtcctcgaaaccgccgtcatcctcctcctcgaagccggcgccctagtggcccgagccgccgtcctccaacaactggacaacgtcatcgacgttataacctgctcctccatgctatcctccctatgcttcctcggcgccatcgcagtcgaccgctacatctccatcttctacgccctccgataccactccatcgtcaccctaccatgggcccgccgagccgtcgccgccatctgggttgcctccgtagtcttctccaccctcttcatcgcctactacgatcacgtagccgtcctcctctgcctagtagtcttcttcctcgctatgctcgtcctcatggccgtcctctacgtacacatgctagcccgcgcatgtcaacacgcccaaggcatcgcccgcctacacaaacgacaacgccccgtacaccaaggcttcggcctcaaaggcgccgtcaccctcaccatccttctcggcatctttttcctctgctggggacccttcttcctccacctcaccctcatcgtcctatgccccgaacacccaacatgcggctgcatcttcaaaaacttcaacctcttcctcgccttaatcatctgcaacgccatcatcgaccccctcatctacgccttccactcacaagaactccgccgaacccttaaagaagtacttacatgctcatggtga

SEQ ID NO: 4370 - RNA, 954 nt, synthetic construct
  misc_feature 1..954: note = AHC11794 variant
  source 1..954: mol_type = other RNA
atggcagtccaaggctcccaacgccgcctccttggctccctcaactcaaccccaaccgctattcctcaactcggccttgccgcaaatcaaaccggtgcccgctgcctcgaagtatccatctccgacggcctcttcctttcccttggcctcgtctcactcgtcgaaaacgcactcgtcgtcgccaccattgccaaaaatcgcaacctccactcccccatgtactgcttcatctgctgcctcgccctctccgaccttctcgtctccggctccaacgtcctcgaaaccgccgtcatcctcctactcgaagccggcgccctagtagcccgcgccgccgtcctccaacaactagacaacgtcatagacgtaataacctgctcctccatgctctcctcactctgctttctcggcgccatcgccgtcgaccgctacatctccatcttctacgccctgcgataccactccatcgtcaccctcccccgcgcccgccgcgccgtcgccgctatctgggtagcctccgtcgtattctccaccctattcatcgcctactacgaccacgtcgccgtcctcctctgcctagtcgtattcttcctcgcgatgctcgtcctcatggccgtcctctacgtacatatgctcgcccgcgcatgccaacacgcccaaggaatcgcccgtctccacaaacgccaacgccccgtccatcaaggcttcggcctaaaaggcgccgtcaccctaaccatcctccttggcatcttcttcctctgctggggcccattcttcctccacctcaccctcatcgtcctttgccccgaacaccccgaatgcggctgcatattcaaaaacttcaatctcttcctagcactcatcatttgcaacgccattatcgaccccctaatctacgccttccactcccaagaactacgccgaaccctcaaagaagtcctaacctgctcctggtaa

SEQ ID NO: 4371 - RNA, 954 nt, synthetic construct
  misc_feature 1..954: note = AHC10874 variant
  source 1..954: mol_type = other RNA
atggccgtccaaggctcccagcgacgcctcctcggctcactaaactccacccccaccgccataccccaactcggcctcgctgccaaccaaaccggcgcccgctgcctcgaagtctcaatctcagacggcctcttcctctcactcggccttgtctccctcgtcgaaaacgccctcgtcgtagccacgatcgccaaaaaccgcaacctacactcccccatgtactgcttcatctgctgcctcgctctctccgaactacttgtatccggctctaacgtactcgaaacagccgtcattcttctactagaagccggtgcactcgtcgcccgcgccgccgtcctccaacaactagataacgtcatcgacgtcatcacatgctcctccatgctctcctccctttgcttcctcggcgccatcgccgtcgaccgctacatatctatcttctacgccctccgataccactctatcgtcaccttaccccgcgctcgccgcgcagtcgctgccatctgggtcgcctctgtcgtcttctcaaccctcttcatcgcctactacgaccacgttgccgtccttctctgcctcgtcgtcttcttcctcgccatgctagtcctaatggccgttctatacgtccacatgcttgcccgcgcctgccaacacgcccaaggcatcgcccgcctccacaaaagacaacgccccgtccaccaaggcttcggcctcaaaggcgcagtcaccctcaccatcctactcggcatcttcttcctctgctggggtcccttcttcctccacctcactctcatcgtactttgtcccgaacaccctacctgcggttgcatcttcaaaaacttcaacctcttcctcgccctcatcatttgcaacgccatcatcgaccccctcatatacgccttccactcccaagaactccgccgcacactcaaagaagtcctaacctgcagctggtag

SEQ ID NO: 4372 - RNA, 954 nt, synthetic construct
  misc_feature 1..954: note = AHC09597 variant
  source 1..954: mol_type = other RNA
atggccgtccaaggctcccaacgccgcctactaggctccctcaactccaccccaaccgccatcccccaacttggcctcgccgccaaccaaaccggcgcccgctgcctcgaagtctccatctccgatggcttattcctctccctcggcctagtctccctcgtcgaaaacgcccttgtagtcgctaccatcgccaaaaaccgaaacctccactcccccatgtactgcttcatctgctgcctcgcactatccgatcttctagtctccggctcaaacgtcctcgaaaccgccgtcattctcctcctggaagccggcgccctcgtcgcccgcgccgccgtcctccaacaactcgacaacgtcatcgacgtaataacctgctcatcaatgctctcctccctatgcttcctcggcgccatcgccgttgaccgatacatctccatcttctacgccctctgctaccactccatcgtcacccttccccgtgcccgcagagccgtcgccgccatctgggttgcctccgtcgtattctccaccctcttcattgcctactacgaccacgtcgccgtcctcctctgcctcgtagtatttttcctagccatgctagtcctcatggccgtcctctacgtccatatgctagcccgcgcatgccaacacgcccaaggcatcgcccgcctccacaaacgccaacgccccgtccatcaaggtttcggcctaaaaggcgccgttaccctcaccatcctactcggaatattcttcctctgctggggcccctttttcctccacctcaccctcattgtcctctgccccgaacacccaacctgcggatgcatcttcaaaaacttcaacctcttcctcgctctaatcatctgtaacgccatcatcgacccactaatctatgccttccactcccaagaactccgccgcaccctcaaagaagtcctcacatgctcatggtaa

SEQ ID NO: 4373 - RNA, 1665 nt, synthetic construct
  misc_feature 1..1665: note = CCDS816.1 variant
  source 1..1665: mol_type = other RNA
atgaccgctcccggagccgccggccgctgcccaccgacaacctggctcggctcactactcctcctcgtctgcctacttgccagccgctcaatcaccgaagaagtctccgaatactgctcccacatgatcggctccggccacctccaatccctccaaagactcatcgacagccaaatggaaacatcctgccaaataactttcgagttcgtagaccaagaacaactcaaagaccccgtctgctacctaaagaaagcattcctcctagtacaagacataatggaagacacgatgcgcttccgagacaacacacccaacgcaatagcaatcgtccaactacaagaactctcactccgactcaaaagctgcttcacaaaagactacgaagaacacgataaagcctgcgtccgcaccttctatgaaactcccctacaactcctcgaaaaagtcaaaaacgtcttcaacgaaaccaaaaacctattggacaaagactggaacatcttctctaaaaactgcaacaactcattcgcagaatgctcctcacaagacgtcgtcaccaaacccgattgcaactgcttataccccaaagcgatcccaagctccgaccccgcatccgtctcacctcaccaaccactcgcaccatccatggccccagtagccggcctcacctgggaagactccgaaggtaccgaaggatcatccctcctacctggcgagcaaccccttcacaccgtcgaccctggaagcgccaaacaacggccaccccgctcaacctgccaatctttcgagccacccgaaacacccgtcgtaaaagactcgaccatcggcggttcaccccaaccccgacccagcgtaggcgctttcaaccccggcatggaagacatcctagattccgccatgggcacaaactgggtccccgaggaggccagcggcgaagcaagcgagatacctgtaccccaaggaacagaactctccccctcacgaccaggcgggggctccatgcagactgaacccgcacgcccctcaaacttcctctccgcctcctcgcccctacccgcatcagcaaaaggccaacaaccagccgacgtaacaggcacagcactaccacgcgtcggaccagtccgccctaccggccaagactggaaccacaccccacagaaaactgaccacccctccgccctcctacgcgatcccccggaaccaggcagcccccgaatttcctccctccgcccccaaggtctcagtaacccctctaccctctctgcacaaccccaactctcccgctcacactcctccggcagcgtacttccccttggcgaactcgaaggccgacgcagcactcgcgacagacgctcccctgccgaacccgaaggtggcccagcttccgaaggcgccgcccgacccctcccccgcttcaactccgtccccctcaccgacaccggccacgagcgccaatccgaaggctccttcagtccccaactccaagaaagcgtattccacctcctcgtcccatccgtcatcctcgttctgctagcagtcggtggcctactcttctatcgctggcgtagacgctcacatcaagaaccccaacgagctgactcaccactcgaacaaccagagggctccccactcacccaagacgaccgacaagtcgaactccccgtctaa

SEQ ID NO: 4374 - RNA, 1893 nt, synthetic construct
  misc_feature 1..1893: note = EAW85719 variant
  source 1..1893: mol_type = other RNA
atggcactacctacagcccgccctctactcggatcatgcggcactcctgccctcggatccctcctcttcctgctcttttccctcggatgggtccaaccctctcgcactctagccggcgaaacaggccaagaagcagcacccctagacggtgtcttggccaacccacccaacatctcctccctatccccacgacaactgctaggtttcccctgcgccgaggtaagcggcctctcaactgaaagagtacgcgaactcgccgtcgctctcgcgcagaaaaacgttaaactaagcaccgaacaactcagatgcctcgcccaccgcctctctgaaccacccgaagacctggatgcccttcccctcgacctcctccttttcctcaaccccgacgcattctccggaccccaagcctgtacccgctttttctcacgcataacaaaagcaaacgtcgacctcctaccacgtggagccccagaacgccaacgcctccttccagcagccctcgcctgctggggagtaagaggttcactactctctgaagccgacgttcgtgccctcggcggactagcatgcgaccttcccggtcgcttcgtcgccgaatccgccgaagtactacttccccgcctagtatcctgccccggtccactagaccaagaccaacaagaagcagccagagctgccctccaaggaggcggaccaccctatggacctccctccacctggtccgtctccacaatggacgcccttcgcggactcctccccgtactcggccaacccatcatccgctccataccccaaggaatagttgccgcctggcggcaacgcagctcacgcgacccctcctggagacaacccgaacgcacaatactccgccccagattccgccgcgaagtcgagaaaacagcctgtccctccggcaagaaagcccgcgaaatagacgaatcactcatcttctacaagaaatgggaactagaagcatgcgtggatgccgctctactcgccacccaaatggaccgcgtcaacgcaatccccttcacatacgaacaactcgacgtcctcaaacacaaactagacgaactctacccccaaggctatcccgagtccgtcatccaacacctcggctacctcttcttaaaaatgtcccccgaagacatccgtaaatggaacgtaacaagtctcgaaaccctcaaagctctcctcgaggtaaacaaaggccacgaaatgagcccccaagcaccccgacgccccctccctcaagtcgccactctcatcgacagatttgtaaaaggccgaggccaactcgataaagacaccctagacaccctaaccgctttctaccctggctatctctgctccctgtcacccgaagaactctcctctgtaccaccctccagcatctgggctgttagaccccaagatctcgacacatgcgaccccagacaactcgatgtcctctaccccaaagcacgcctcgcctttcaaaacatgaacggctcagaatacttcgtaaaaatccaatcctttctcggcggagcccccaccgaagacctcaaagcactaagccaacaaaacgtatcaatggacctcgccacgtttatgaaactccgaacagacgcagtactccccctcaccgttgccgaagtccaaaaactacttggcccccacgtggaaggcctaaaagccgaagaacgacaccgacccgtacgagactggattctccgtcagcgacaagacgacctcgacactctaggcctcggactccaaggcggtattccaaacggttatctcgtacttgacctctccatgcaagaagccctctctggcaccccctgccttctcggccccgggccagtcctcaccgtcctcgccctcctgttagccagcaccctcgcttaa

SEQ ID NO: 4375 - RNA, 1515 nt, synthetic construct
  misc_feature 1..1515: note = CCDS46865.1 variant
  source 1..1515: mol_type = other RNA
atggaagcactccgcgtccaaatgttcatgccctgctccttcgaatccctatacctatcatccgctgaacaccccggcgcctcaaaacctcccatcagcagctcctcaatgacctctcgcatactcctccgacaacaactcatgagagaacaaatgcaagaacaagaacgccgcgaacaacagcaaaaactccaagccgcacagttcatgcaacaacgggtaccagtcagccaaacacccgcaataaacgtctccgtaccaaccacactcccctccgccacccaagtccccatggaagtcctcaaagtacaaacacacctcgaaaatcccaccaaataccacatacaacaagcccaacgacaacaagtcaaacaatacctctccaccacactcgcaaacaaacacgccaaccaagtcctatccctaccctgccccaaccaacccggagaccacgtaatgcccccagtccccggttcctcagccccgaactccccaatggccatgctcactttaaacagtaactgcgaaaaagaaggattctacaaattcgaggaacaaaaccgcgcagagtctgaatgcccaggtatgaacacacactcacgagcatcctgcatgcaaatggatgacgtaatcgacgacatcatatccctcgaatcctcctacaacgaagaaatcctcggcctcatggaccccgccctccaaatggcaaacacactgcccgttagcggcaacctcatcgacctctacggcaaccagggcctacccccgcccggactcaccatctccaactcatgcccagcaaacctcccaaacatcaaacgcgaactcaccgaatccgaagcccgcgccctagcaaaagaacgacaaaagaaagacaaccacaacctcatcgagagacgacgacgcttcaacatcaacgaccgtatcaaagaactaggcacactaatccccaaaagcaacgaccccgacatgcgctggaacaaaggcaccattctcaaagccagcgtagactacatccgcaaactacaacgagaacaacaacgcgcaaaagaacttgaaaacagacaaaagaaactcgagcacgccaaccgccacctcctcctgcggatacaagaactcgaaatgcaagcccgcgcccacggcctctccctaataccttcaacgggcctgtgctccccagacctagtcaaccgcatcatcaaacaggaacccgtactagaaaactgctcccaagacctccttcaacaccacgctgacctaacatgcaccaccaccctcgacctaacagacggaacaatcactttcaataacaacctcggcacgggcaccgaggccaaccaagcatacagcgtacccaccaaaatgggaagtaaactcgaagacatcctcatggacgacaccctctcccccgtaggagttacagacccactcctctcatccgtctcccccggcgcatcaaaaacctcctcccgccgcagctccatgtccatggaagaaaccgaacacacatgctaa

SEQ ID NO: 4376 - RNA, 1260 nt, synthetic construct
  misc_feature 1..1260: note = CCDS2913.1 variant
  source 1..1260: mol_type = other RNA
atgctagaaatgctcgaatacaaccactatcaagtccaaacccacctagagaatcccaccaaatatcacatacaacaggcacaacgccaacaagtcaaacaatacctatccaccaccctcgccaacaaacacgccaaccaagtgctctctttaccttgccccaaccaacccggggaccacgtcatgccccctgtaccaggaagcagcgctcccaactccccaatggccatgctaacacttaactcaaactgcgaaaaagaaggcttctacaaattcgaggaacaaaaccgcgcagaatcggaatgccccggcatgaacacccactcccgcgcatcttgcatgcaaatggacgacgtcatagacgacataatttcactcgaatcctcctacaacgaagaaatcctcggcctaatggacccagcactccaaatggccaacaccctccccgtaagcggaaacctcatcgacctctacggtaaccaaggccttcctccacccggcctcacaatctccaactcctgcccagccaacctacccaacatcaaacgcgaactcaccgcatgcatcttccccaccgaatccgaagcacgagcactcgccaaagagcgacaaaagaaagacaaccacaacctaatcgaacgacgacgccgcttcaacatcaacgaccgcatcaaagaactcggaaccctcatccccaaatccaacgacccagacatgcgctggaacaaaggcacaatcctcaaagcctccgtcgactacatccgcaaacttcaacgcgaacaacaacgagctaaagaactcgagaacagacaaaagaaactcgaacacgccaaccgccacctcctcctcagaatccaagaactcgaaatgcaagcccgcgcacacggcctctcactaatcccaagcacaggcctctgctccccagacctcgtaaaccgaatcatcaaacaagaaccagtcctagaaaattgctcccaagacctactccaacaccacgccgacctaacctgcaccacaaccctagatctcacagatggcaccataaccttcaacaacaacctcggaaccggcacagaagccaaccaagcctactccgtacccaccaaaatgggatcgaaactcgaagacatcctaatggacgacaccctctcaccagtcggcgtcactgacccactcctatcatccgtctcccccggcgcctcaaaaacctcctcgcgccgctcctccatgtccatggaagaaaccgagcacacatgctaa

SEQ ID NO: 4377 - RNA, 1581 nt, synthetic construct
  misc_feature 1..1581: note = XM_005264754 variant
  source 1..1581: mol_type = other RNA
atgcaatccgaatcgggcatagtccccgacttcgaagttggagaagagttccacgaagaaccaaaaacctactatgaactcaaatcccaacccctcaaatccagcagctcagccgaacacccgggggcatcaaaaccgcccatctcatcctcatcaatgacctccagaatactactcagacaacaactcatgcgcgaacaaatgcaagaacaagaacgccgcgaacaacaacaaaaactccaggccgcccaattcatgcaacaacgcgtccccgtctcccaaacccccgcaatcaacgtctccgtccccacaaccctaccctctgccacccaagtccccatggaagtactcaaagtccaaacccaccttgaaaatcccaccaaatatcacatccaacaagcacaacgccaacaagtcaaacagtacctcagcacaactctcgccaacaaacacgccaaccaggtactctctctcccctgccccaaccaacccggtgaccacgtaatgccaccggtccccggctcctcagccccaaacagccccatggccatgctcaccctcaactcaaactgcgaaaaagaaggattctacaaattcgaagaacaaaaccgggccgaatctgaatgcccaggaatgaacacccactcccgagcatcttgcatgcaaatggacgacgtcatcgacgacatcatcagcctcgaaagctcctacaacgaagaaatcctcgggcttatggacccagccctccaaatggcaaacaccctccccgtatcgggaaacctaatagacctctacggcaaccagggactcccaccacccggcctaacaatttctaatagctgccccgcaaacctccccaacatcaaaagagaattaaccgcatgcatcttccccacagaatctgaggcccgtgcactagccaaagaacgccaaaagaaagacaaccataatctaattgaacgtcgccgccgcttcaacatcaacgaccgtatcaaagagctcggcaccctcattcccaaatccaacgaccccgacatgcgatggaacaaaggcaccatactaaaagcctccgtcgactacatccgcaaactacaacgcgaacaacaacgcgctaaggaactcgaaaatcgccaaaagaaactcgaacacgccaaccgccaccttctcctaagaatccaagaactcgaaatgcaagccagagcccacggcctctcactaataccctccaccggtctctgctcccccgacctagtaaaccgaatcattaaacaagaacccgtcctcgaaaactgctcccaggacctactccaacaccacgcagaccttacctgcactacaaccctagacctcaccgacggtaccatcacattcaacaacaacctcggaacgggaaccgaagccaaccaagcctactcagtcccaacaaaaatgggctcgaagctcgaagacatcctcatggacgacacactatcccccgtaggagtcaccgacccccttctctcatccgtctcacccggcgcctcaaagacctcctcccgccgatcctccatgtccatggaagaaaccgaacacacttgctaa

SEQ ID NO: 4378 - RNA, 1065 nt, synthetic construct
  misc_feature 1..1065: note = BAG52140 variant
  source 1..1065: mol_type = other RNA
atggcccccgccgcctggctccgctccgccgccgccagagccctcctaccacccatgctcctcctgctcctacaacccccacccctcctcgcccgcgccctcccacccgacgtccaccacctacacgcagaacgacgcggcccccaaccatggcacgccgccctaccatcctcacccgcccccgcacccgccacccaagaagcaccccgccccgcctcctcactccgcccaccccgctgcggcgtacccgacccctccgacggcctatccgcccgcaaccgccaaaaacgcatcctccgattcccctggcaactcgtccaagaacaagtcagacaaaccatggccgaagcactcaaagtctggtccgacgtaacgcccctaaccttcactgaagtccacgaaggcagagcagacatcatgatagacttcgcccgctactggcacggcgacgacctccccttcgacggcccgggaggcatcctcgcccacgcattcttccccaaaacccaccgagaaggcgacgtccacttcgactacgacgaaacctggaccatcggagacgatcaaggcaccgacctcctccaagttgccgcccacgaatttggacacgtactcggcctacaacacaccaccgccgccaaagccctcatgtccgccttctacacattccgatacccactctcactctcacccgacgactgccgcggcgtacaacacctctacggacaaccctggccaaccgtaacctctcgcacccccgccctcggcccacaagcaggtatcgacactaacgaaatcgccccactcgaacccgacgcaccacccgacgcctgcgaagccagcttcgacgccgtctccaccatacgcggagaactcttcttctttaaagccggattcgtatggcgacttagaggcggccaactccaacccggctaccccgccctcgcatcccgtcactggcaaggactcccatccccagtcgatgccgccttcgaagacgcccaaggacacatatggttcttccaaggcacaaccggcgtctccaccccagcacccggagtataa

SEQ ID NO: 4379 - RNA, 804 nt, synthetic construct
  misc_feature 1..804: note = AAV40839 variant
  source 1..804: mol_type = other RNA
atgcgcctaaccgtactctgcgccgtctgtctactccccggctcccttgccctaccactcccccaagaagccggaggcatgtccgaactccaatgggaacaagcccaagactacctcaaacgcttctacctctacgactcagaaaccaaaaacgccaactccctcgaagcaaaactcaaagaaatgcaaaaattcttcggcctccccatcaccggaatgctcaactcccgcgtcatcgaaatcatgcaaaaaccccgttgcggcgtccccgacgtcgccgaatactccctcttccccaactcacccaaatggacatccaaagtcgtcacctaccgaatcgtcagctacacccgcgacctcccacacatcaccgtagaccgcctagtcagcaaagcactaaacatgtggggcaaagaaatccccctacacttccgaaaagtcgtttggggcaccgccgacatcatgattggattcgcccgcggcgcccacggcgactcctaccccttcgacggccccggaaacaccctcgcccacgcattcgcccccggcaccggcctcggcggcgacgcccacttcgacgaagacgaacgatggacagacggctcctccctcggcatcaacttcctatacgccgccacccacgaactcggccactccctcggcatgggccactcctccgacccaaacgccgtcatgtaccccacctacggcaacggcgacccacaaaacttcaaactatcccaagacgacatcaaaggcatccaaaaactgtacggcaaacgctccaactcccgcaagaaataa

SEQ ID NO: 4380 - RNA, 3768 nt, synthetic construct
  misc_feature 1..3768: note = J05582.1 variant
  source 1..3768: mol_type = other RNA
atgacacctggcacccaatcacccttctttcttctactacttctgacagtactaacagttgttacaggtagtggtcacgcctcaagcacccctggcggagaaaaagagacatcagcaacacaacgatcttccgtaccatcttcaacagagaaaaacgcagtctctatgacatcttcagttttatcctctcactcacctggctccggctcatccactactcaaggccaagacgttacactcgcacccgccaccgagccagctagcggatccgcagccacgtggggtcaggatgtaacctcagtccccgtaacgagaccagccctcggatcaacaacacccccggctcatgacgtaacttcagcacccgacaacaaaccagccccaggctcaaccgccccacccgcacatggcgtcaccagcgctcccgataccagacctgccccaggatcgactgctccccctgcacacggagttacctcagccccagacactagacccgcacccggatcaaccgcccctcctgcccatggcgtcacctccgcacccgacactcgacccgcaccaggctctaccgcaccacccgctcacggagttacctccgccccagacacacgaccggcccccggctccacagctccgccagctcacggcgtgacatccgccccagacacccgaccagctcccggctcaacagcacctcctgcacatggcgtcacaagtgctcccgacacccgacctgctcctggctccacggccccacccgctcacggagtaacatcagctccagacaccagacccgcccctgggtcaactgcaccacccgcccatggagtaacctcagcacccgatacacgaccagccccaggtagcaccgccccacccgcacatggggtcacatcagcccccgacacccggcccgcacccgggagtacagcccctcctgcccacggtgttacatccgccccagatacaagacctgcccccggaagcaccgcacctcccgctcacggtgtaacctccgcccctgacacccgacccgctcccggcagcaccgctccgccagcacatggtgtgacctccgcccctgatacccgcccagcacccgggtccaccgcccctcccgctcatggcgtcacctccgcccccgacaccagacctgcccccgggtccactgcaccaccagcacacggcgtcacctcagcacccgacacacgcccagccccaggctcaaccgcaccccctgcccacggagtcacctccgccccagacaccagaccggcaccaggcagcacagctccaccagcccatggagtcacatcagcacctgatactcgccccgcccccggctccacagctccgccagcacacggtgtcacctctgctcctgacactcgccccgcacccggttctacagcacccccagcccacggcgtaacctccgctcccgacacacgccccgcaccaggttccactgcaccaccagcccatggagtcacaagcgctcccgatacccgacctgcacccggttccacagcccctcccgcacacggcgtgacatccgcccctgatacccgccctgcacccggaagcacagcacccccagcacatggagtaacatctgcacccgacactcgccctgcgccaggctctaccgcacccccagctcatggagttacctccgcccccgatacaagacccgcccctggatccacagccccaccggcccacggagtgacctccgcacccgacacccgccctgccccaggctccacagctccaccagcacacggcgtaacctcagcaccagatacacgtcctgcaccaggctccaccgccccacccgcacacggagttactagcgcacccgacacccgacccgcaccaggatccaccgctccaccagctcacggcgtaacgtccgcacctgacacacgacccgcacctggctccacagccccgcctgcccacggtgtgacctctgcccccgatacccgtccagcccccggttccaccgctccacccgcccatggagtcacttctgcgcccgacacgcggccagctcccggatcaaccgcccctccggcccatggggtaacaagtgcaccagacaccagacccgcacccggatccactgccccacccgcccacggagtaacctccgcccccgacacgcgtcccgcccccggctccacagctcccccggcgcacggagtaacctccgcccccgacactcggcccgcccccggttccaccgcccctcccgcacatggcgtcaccagcgcaccagatacacgccccgcccctggttccaccgccccaccagcccacggcgtaacctcggcgccggatacacgccccgcaccaggatccaccgcccctcccgctcatggcgttacatcggctcccgacacccgtcccgccccaggaagcacagccccacccgcccatggtgttacatcagcacccgacactcggcccgccccaggatccaccgcaccccctgcccacggtgtcacatccgcccccgatacccgtccagcaccaggatccaccgccccgcctgcccatggtgtcacctctgcaccagacacacgccccgctccgggatccacagctccacccgcccacggcgttacctctgcccccgatacccgtccagccccaggatctactgcacccccggcccacggtgtcacgtcagcccccgatactcgtcccgcacccggctccacagccccgcccgcccacggagtaacaagcgcccctgatacacgccccgcccctggatccacagcacccccggcccatggcgtcacatccgccccggacaaccgacccgccctcgggtccaccgcccctcccgtccacaacgtaacgtccgcctccggatccgcatcaggatcagcgagcaccctagtccacaatggcacatccgcacgagccacaacaacgcccgccagtaaatcaaccccattttccatcccctcacaccattcagatacacccacaacactagcatctcactccactaaaaccgacgcatcctcaacccatcactcttcggtaccccctctgaccagctcaaaccactccacctcaccccaactctcaactggtgtttctttcttctttctttcatttcacatctccaacctccaattcaacagtagcctcgaagaccctagcactgactactaccaagaattacaacgtgacatatccgaaatgttcctccaaatctacaaacaaggcggttttctcggcctctctaacatcaaatttcgtccaggctctgtcgttgtacaactgacccttgctttccgcgaaggtacaattaacgtacacgacgtagaaacccaatttaaccaatacaaaactgaagccgcatctcgttacaatcttaccatctctgacgtctccgtatccgacgttccattcccattctcagcccagtcaggtgcgggcgtaccaggatggggaattgctctactcgttctcgtatgcgtcttagtagctctcgccatagtctacctaatagctctcgctgtctgtcaatgtcgccgcaaaaactacggccagctcgatatattcccagcaagagacacataccatccaatgagcgaatacccgacataccatacccacggacgctatgttcccccatccagtaccgatcgatccccctacgaaaaagtatccgcagggaacggcggatcttctctatcctatacaaaccctgccgttgccgccgcgtctgcaaatctctga

SEQ ID NO: 4381 - RNA, 2136 nt, synthetic construct
  misc_feature 1..2136: note = NM_032853 variant
  source 1..2136: mol_type = other RNA
atgatggcagacgcaaagtacgtcctctgccgatgggagaaaagactttggccagcaaaagtcctagcccgcaccgccacttcaaccaaaaacaaacgccgcaaagaatacttcctagctgtccaaatcctgtcactcgaagagaaaattaaagtaaagtcaacagaagtcgaaatcctagaaaaatcccaaatcgaagctatcgcctcatccctagcctcacaaaacgaagtcccagccgccccactagaagaactagcctacagacgatcactaagagttgcactcgatgtgctcagcgagggctccatatggtcgcaagaaagttcagccggaacaggccgagcagaccgatccctccgaggtaaacccatggaacacgtaagctccccctgcgacagcaactctagctctctcccacgaggtgacgtcctcggatcttcaagaccacaccgacgacgaccctgcgtacaacaatccctatcctcttcatttacctgcgaaaaagaccccgaatgcaaagtagaccacaaaaagggcctccgaaaatccgaaaacccaagaggacccctcgtactgcccgccggtggcggcgcacaagacgagagtggctcccgaatacaccacaaaaactggacactagccagcaaacgtggcggcaactcagctcaaaaggcatccctctgcttaaacggctcctccctctccgaagacgacaccgaacgcgacatgggcagcaaaggaggcagctgggccgctccctcactcccatcaggagtacgcgaagatgacccctgcgccaatgccgaaggacacgaccccggactccccctcggctccctaactgccccgccagcacccgaacccagcgcatgctccgaacccggagaatgcccagccaaaaagcgcccacgcctggatgggtcacagcgcccacccgccgttcagctcgaacccatggctgccggcgcagccccatcacccggaccgggcccgggaccccgagaatcagtcacgccccgctcaacagcacgcttaggcccaccaccctcccacgcatccgcagacgccacacgctgcctcccctgccctgacagccaaaagctcgagaaagagtgccaaagctccgaagaaagcatgggaagcaactcgatgaggtcgatccttgaagaagacgaagaagacgaagaacctccacgagtgctcctataccacgaaccacgcagcttcgaagtaggcatgctagtctggcacaaacacaagaaataccctttctggccagccgtcgtcaaatctgtccgccaaagagacaagaaagcaagcgtactatacatcgaaggccacatgaacccaaaaatgaaaggattcaccgtctcgctaaaatcactcaaacacttcgactgcaaagagaaacaaaccctactaaaccaggccagagaggacttcaaccaggacataggctggtgtgtaagcctcatcaccgactaccgagtgcgacttggctgcggatcattcgctggctcattcctagaatactacgccgcggacataagttacccagtccgaaaatcaatacaacaggatgtactgggaaccaaactcccacagctaagcaaaggctcacccgaagaaccggtcgtcggatgcccactaggccaacggcaaccatgcagaaaaatgctccccgacaggtcacgagccgcccgcgaccgggcaaaccaaaagctagtcgagtacattgtaaaagccaaaggagcagaaagccacctacgcgccatcctaaaatcacgcaaacctagtcgctggctccaaacattcctatcctcgtcacaatacgttacctgcgtcgaaacatacctcgaagacgaaggccaactcgacctcgtcgtcaaatacctgcaaggagtctaccaagaagtgggcgccaaagtcctacaacgcacgaacggagaccgcatccgattcatcctcgacgtcctcctcccggaagccatcatatgcgcaatctcagcagtcgacgaagtcgactacaaaaccgcagaagaaaaatacataaaaggcccaagcctcagctaccgcgaaaaagaaatatttgacaaccagctcctggaggaacgcaacagacgccggagatga

SEQ ID NO: 4382 - RNA, 438 nt, synthetic construct
  misc_feature 1..438: note = AAD44697 variant
  source 1..438: mol_type = other RNA
atgaccgtccacaacctctacctcttcgaccgcaacggcgtctgcctccactactccgaatggcaccgcaaaaaacaagccggcatccccaaagaagaagaatacaaactcatgtacggcatgctcttctccatccgctccttcgtctccaaaatgtcccccctcgacatgaaagacggcttcctcgccttccaaacctcccgctacaaactccactactacgaaacccccaccggcatcaaagtcgtcatgaacaccgacctaggcgtcggccccatccgcgacgtcctccaccacatctactccgccctctacgtcgaactcgtcgtcaaaaaccccctctgccccctcggccaaacagtccaatccgaactcttccgctcccgcctcgactcctacgtccgctccctccccttcttctccgcccgcgccggctaa

SEQ ID NO: 4383 - RNA, 1395 nt, synthetic construct
  misc_feature 1..1395: note = AAH02712 variant
  source 1..1395: mol_type = other RNA
atgccatcctgctccacctccacaatgcccggaatgatatgtaaaaaccccgacctcgaatttgactcgcttcaaccatgtttctacccagacgaagatgacttctacttcggaggaccagactctaccccacccggagaagacatttggaaaaaattcgaactactaccaaccccacccctctcgccatcccgaggctttgccgaacactcatccgaacccccatcctgggtcaccgaaatgctactcgaaaacgaactctgggggagcccagccgaagaagacgcattcggcctaggcggcctcggcggcctcacacccaaccccgtcatcctccaagattgcatgtggtcaggcttctccgccagagaaaaactcgaacgcgccgtctccgaaaaacttcaacacggcagaggtccccccaccgccggttcgacagcccaatccccaggcgcaggagccgcctcacccgccgggagaggacacggcggcgccgcaggcgccggccgtgccggagccgccctgcccgccgaactcgcccaccccgccgccgagtgcgtcgaccccgctgtagttttccccttccccgtcaacaagcgagaaccagccccagtccccgccgccccagcttccgcccccgcagccggcccagccgtagcctccggcgccggaatagcagcacccgccggagcccccggcgtcgcaccccccagacccggcggccgccaaacctcaggaggagaccacaaagccctctcaacctccggcgaagacaccctctcagactcagacgacgaagacgacgaagaagaagacgaagaagaagagatcgatgtagtcacagtagaaaaacgacgtagctcctcaaacaccaaagccgtaacaaccttcaccataactgtccgccccaaaaacgcagcactaggcccaggccgcgcccaaagctcagagctcatcctaaaacgttgccttcctatacaccaacaacacaactacgcagcccccagcccctacgtcgaatccgaagacgcccccccccaaaaaaaaatcaaatcagaagcctccccccgccctctaaaatccgtcataccacccaaggcgaaaagcctctcaccccgcaattccgactccgaagactccgaacgacgccgaaaccacaacatcctcgaacgacaaagacgcaatgacctacgatcgtccttcctcacactccgcgaccacgtcccagaactcgtcaaaaacgaaaaagcagccaaagtagtcatactcaaaaaagccacagaatacgtccactcactccaggcagaagaacaccagcttctcctcgaaaaagaaaaactacaagcccgtcaacaacagctcctcaaaaaaatagaacacgcacgcacctgctaa

SEQ ID NO: 4384 - RNA, 3132 nt, synthetic construct
  misc_feature 1..3132: note = AAC78645 variant
  source 1..3132: mol_type = other RNA
atgcccctcctcgagggaagcgtcggcgtagaggacctagtcctactggaacccctcgtcgaggagtccctcctcaaaaacctacaattaagatacgaaaacaaggaaatatatacgtacatcgggaacgtagtcatctccgtcaacccctaccaacagctccccatctacgggcccgagttcatagccaagtaccaagactacacattctacgaactcaaaccacatatctacgccctcgcaaacgtggcataccagagcctacgcgaccgggaccgagaccagtgcatcctgataacaggagaatcaggaagcggcaaaacagaagcatctaaactcgtcatgtcctacgtcgcggccgtctgtggcaaaggggaacaagtcaacagtgttaaagaacaactccttcaaagcaaccccgttctcgaagcattcgggaacgcaaaaacaatccgcaacaataactcaagccgattcggaaaatacatggacatagagttcgacttcaaaggaagcccactcgggggagtcatcaccaactacctcctggagaaaagtcgactggtaaaacagctaaagggcgaacgaaactttcatatcttctatcaactcctagccggagcagacgaacagctactaaaagccctcaaactagaacgcgacaccaccggctacgcatacttgaaccacgaagtctcccgcgtcgacggaatggacgacgcctcatcctttagggcggttcaatctgctatggcagttatcggcttctccgaagaagaaatacgacaagtacttgaagtcacaagcatggtcctaaagctcggaaacgtcctcgtggcagacgagttccaagcctccggcatcccggcaagcggaatccgggacggccgtggcgtacgagaaataggggaaatggtaggactaaacagcgaagaagtcgaaagagcactgtgttcgcgaactatggaaacagcaaaggaaaaagtcgtcactgcactcaacgtaatgcaggcccaatacgcccgagacgcactcgccaaaaacatttacagccgactgtttgactggatcgttaaccggatcaacgaatccataaaagtcggcatcggagagaaaaagaaagtcatgggagtcctggacatctacggcttcgaaatattagaagacaactcattcgagcaattcgtcataaactactgtaacgaaaaactccaacaggttttcatcgagatgactctcaaagaggaacaagaggaatacaagagggaaggaatcccctggacgaaggtcgattacttcgacaacggcataatatgcaaactaatcgaacacaaccagagaggcattctggcgatgctcgacgaagaatgcctacgacccggcgtcgtgtccgacagcacatttctcgcaaaactgaatcaactcttctcaaaacacggccactacgaaagcaaggtcacacagaatgcccaaagacaatacgaccacaccatgggcctcagctgctttcgcatttgtcactacgctggaaaggtaacctacaacgtcaccagcttcattgataaaaataacgacttactctttagagacctcttacaagcgatgtggaaagcacaacaccccctactgcggtcactgtttccagaagggaaccccaaacaggcatcgctaaaaagaccacccaccgcgggcgcccaattcaaaagcagcgtggccatcctcatgaaaaacctctactccaaatcccccaactacatacgctgcataaaacccaacgaacaccaacaacggggtcaattctcttcagacctagtcgccacacaggcccgctacctcggactattagaaaacgtccgagtacggcgagcaggttacgcgcaccggcaaggctacgggcccttcctagaacggtaccgactgctgtcccgctccacctggccacattggaacggaggggatagggaaggggtggaaaaggtactcggagaactatccatgagtagcggggagctggctttcggaaaaaccaaaatcttcatccgaagcccgaaaacgctattctacctcgaagaacagagacgcctccgtctccaacagctcgccaccctcatccagaaaatctaccgaggatggcgctgcagaacgcactaccaactaatgagaaaaagccaaatactaatctcgtcgtggttccgcggaaacatgcaaaagaaatgctacggcaaaattaaagcgagcgtgcttctcatccaggccttcgtgcgaggctggaaggcccgcaaaaattatcgaaagtacttccgctccgaagcagcgctcactctcgccgatttcatctacaaatcaatggtacaaaagttcctactcgggctcaaaaacaacctacctagcaccaacgtactagacaaaacctggccagcagcgccctacaaatgcctcagcaccgcaaaccaggaacttcagcaactgttctaccaatggaaatgcaaacgattccgcgaccagctcagccccaaacaagtcgaaatactccgcgaaaaactatgcgcatcagaactctttaagggcaagaaagcaagctacccacaatccgtaccgataccattctgcggtgactacataggactacagggcaaccccaagctccaaaaactcaaaggaggcgaagaaggaccagtactgatggccgaagccgtcaagaaagtcaaccggggcaacgggaaaacgtcctccagaatactcctactcactaaaggacacgtaatactaacggacacaaagaaatcccaagccaaaatcgtgataggcctagacaacgtggcgggcgtaagtgtaacatccttaaaagacggcctcttctcgctccacctgagcgaaatgtcctcagtaggcagcaaaggcgacttcctcctggtctcggagcacgtaattgagctactcacgaaaatgtaccgcgccgtcctagacgcaacgcaacgacaactcaccgtcaccgtcacagaaaagttctccgtcagattcaaagaaaacagcgtagccgtcaaggtagtccaaggacccgccggcggcgacaactcaaaactccgctacaaaaagaaaggctcccactgcctggaagtcacagtacaataa

SEQ ID NO: 4385 - RNA, 3411 nt, synthetic construct
  misc_feature 1..3411: note = AAH53558 variant
  source 1..3411: mol_type = other RNA
atggccaagatggaggtgaagaccagtctgctcgacaacatgatcggcgtcggagacatggtgctgctggagcccctcaacgaggagaccttcatcaacaacctgaagaagcgcttcgatcactccgagatatacacgtacatcggcagcgtggtcatctcggtgaacccctaccggagcctgcccatctactcccccgagaaggtggaggagtaccgcaaccggaatttctacgagctcagcccccacatcttcgccctgtcggacgaggcgtaccgcagcctccgggaccaggacaaggaccagtgcatcctcatcaccggggagtccggcgccgggaagaccgaggccagcaagctggtaatgtcctacgtcgccgccgtgtgcggcaagggtgcggaagtcaaccaggtgaaggagcaactgctccagagcaatccggtgctggaggccttcgggaatgccaagaccgtccgcaatgacaacagcagccggttcggcaagtacatggacatcgagttcgacttcaagggggacccgctgggcggggtgatctccaactacctactggaaaagtcccgcgtcgtcaagcagccccggggcgaacgcaacttccacgtgttctaccaactgttaagcggcgcctcagaggagctgctgaacaagctcaaattagaacgggacttctcccgctacaactacctgagcttagatagcgcgaaggtgaacggggtcgacgacgccgccaacttccggacggtgcgcaacgccatgcagatcgtgggcttcatggatcacgaggccgagtccgtccttgcggtggtggccgccgtcctgaagctcggaaacatcgagttcaagcccgagagcagagtaaacggcctggacgagtctaagatcaaggacaagaacgagctgaaggagatctgcgaactcaccgggatcgaccagagcgtcctggagcgcgcgttctccttccggaccgtggaggccaaacaggagaaagtgagcaccacgcttaacgtcgcgcaggcctactacgcccgcgacgcgctcgccaaaaacctgtactcccgactgttcagttggctcgtgaaccgcatcaacgagtccatcaaggcgcagaccaaggtgcggaagaaggtcatgggggtgctggacatctacggcttcgagatattcgaggacaacagcttcgagcagttcatcatcaattattgcaatgagaagctgcagcagatcttcatcgagctcaccctgaaggaggaacaagaggagtacattcgcgaggacattgagtggacccacatcgactactttaacaacgcgatcatctgcgatctgatcgagaacaacacgaacgggatcctcgccatgctggacgaggagtgtctgcgcccgggcacggtgaccgacgaaaccttcctcgagaagctgaaccaggtctgcgccacgcaccagcacttcgagagccggatgtccaagtgttctcgcttcctgaacgacaccagcctgccccactcctgctttcggatccagcactacgccgggaaggtgctgtaccaggtggagggcttcgtcgacaagaacaacgacctgctgtaccgcgacctgagccaggcaatgtggaaggcctcccacgccctgatcaagagcctgttccccgagggcaaccccgcaaagatcaacctcaagcggccgcccaccgcggggtcccaattcaaggccagcgtggccaccctgatgaagaacctgcagacgaagaaccccaactacatccgctgcatcaagcccaacgacaagaaggccgcccatattttcaacgaggcgctcgtgtgccaccagatccggtacctgggcctgctcgagaacgtccgcgtgcggcgcgccgggtatgcattccggcaggcctatgagccgtgcctggagcgctacaaaatgctgtgcaagcagacctggccacactggaagggccccgcccggagcggggtggaggtcctcttcaacgagctggagatccccgtggaggagtactccttcggccgcagcaagatctttatccggaacccgcgcaccctgttcaaactcgaggacctgcggaagcagcgcctggaagacctcgcgaccctgatccagaagatctaccggggctggaagtgccgcacgcacttcctgctcatgaagaagtcccagatcgtgatcgccgcctggtaccggcggtacgcccagcagaagcgctaccagcagacaaagagctccgccctggtcatccagagctacatacggggttggaaggcgcgcaagatcctgcgggagttaaagcaccagaagcgctgcaaggaggccgtgaccaccatcgccgcctattggcacggcacgcaggcgcggcgcgagctgcggcgcttgaaggaggaggcccggaacaagcacgctatcgccgtgatttgggcctactggcttgggtccaaggcgcgccgagagctgaagcgcctaaaggaggaggcccggcgcaagcacgcggttgccgtgatctgggcctactggctcggcctgaaggtgcggcgcgagtaccggaagttcttcagagcgaacgccggcaagaagatctacgagttcacgctgcagcggatcgtccagaagtacttcctcgagatgaagaacaagatgcccagcctgagtcccatagataagaactggcccagccgcccgtacctgttcctcgattcgacccacaaggagctgaagcgcatcttccacctgtggcggtgcaagaagtaccgcgaccagttcacggaccagcagaagctcatctacgaggagaagctggaggccagcgagctgttcaaggacaagaaagccctctacccctcgagcgtgggccagcccttccagggcgcttacctggaaatcaataagaaccccaagtacaagaagctgaaggacgccatcgaggagaaaattatcatcgcggaggtagtcaataagattaaccgggccaacgggaaaagcacgagccgcatcttcctcctgaccaacaacaatctgctcctggccgaccagaagtccggccagatcaagagcgaggtgccgctggtggacgtcacaaaggtgagcatgtccagccagaacgacgggttcttcgcggtgcacctcaaagagggctccgaggccgcctctaagggcgactttctgttctccagcgaccacctgatcgagatggccaccaagctctaccggacgaccctgtcccagaccaagcagaagctgaacatcgagatcagtgacgagttcctcgtccagttccgccaggacaaggtttgcgtcaagttcatacaggggaatcagaagaacggctccgtgcctacctgtaaacggaagaacaaccgcctgctggaggtcgccgttccctga

SEQ ID NO: 4386 - RNA, 3192 nt, synthetic construct
  misc_feature 1..3192: note = CCDS42226.1 variant
  source 1..3192: mol_type = other RNA
atggcacttcaagttgagctcgtcccaaccggagagataatccgcgtagtacacccacaccgaccatgcaaactcgccctcgggtccgacggagtccgagtcaccatggagtcagccctcacagcgagagatcgggtcggagtccaagacttcgtcctccttgaaaattttacatccgaagcagccttcatagagaacctccgcaggcgtttccgcgagaacctcatctatacctacatcggaccagtcctcgtcagcgtcaacccatacagagacctacaaatatacagccgacaacacatggaacgctacaggggcgtctctttttacgaagtaccaccccacctcttcgctgtggccgacaccgtctaccgcgctctaaggaccgaaagacgggaccaagcggtcatgatttccggcgagtcaggggccggaaagaccgaagccacaaaacgactcctccaattttacgccgaaacttgccccgcgcccgaaagaggcggcgcagtgcgagaccgcctattacaatccaaccccgtcctcgaagcctttggaaacgcaaaaacactacggaacgataacagttctaggtttggcaaatacatggacgttcaattcgatttcaaaggcgcccccgtcggcggacacatcctgtcatacctgctcgaaaaatcacgcgtcgtacaccaaaaccacggcgaaaggaatttccacatcttctaccaactactcgaaggcggcgaagaagagacattacgccgtctaggtctagagaggaacccccagtcctacctatacctggtcaaaggccagtgcgccaaggtctcctccataaacgacaaatcagactggaaagtcgtacgcaaggcactcacagtcattgactttaccgaagacgaagtcgaagacctactatcaatcgtcgccagtgtgctacatctcggtaacatccacttcgccgccaacgaagaaagcaacgcccaggtaaccacagaaaaccaactaaaatacctcacacgcctcctttcggttgagggaagcacgctccgagaagccctgacccaccgtaagatcatcgccaagggagaagaacttctgagccctctaaacctagaacaagctgcctacgcccgagacgccctcgcaaaagcggtctacagccgaacgttcacatggctagtcggaaaaatcaaccggtcgttagcttcaaaggacgtagaaagcccatcctggcgatctacaacagtactgggactgctggacatctacggtttcgaagtttttcaacacaactctttcgaacaattctgcataaactactgcaacgaaaaactacaacaactcttcatagaactcacgttaaaatcagaacaagaagaatacgaagcagagggaatcgcctgggaacctgtacaatatttcaacaataaaatcatatgcgacctcgtggaagaaaaattcaaaggaattatctcaattcttgacgaagaatgcctacgaccgggcgaggccacagatctcaccttcctggagaagctcgaagacaccgttaaacatcatccgcacttcctaacacacaaactcgccgaccagcgcactcgaaaatctcttggacgcggcgaatttcgcctccttcactatgcgggcgaagtcacctatagcgtgaccggcttcctcgacaaaaacaacgacctcctattccgcaacttaaaagagaccatgtgctctagtaaaaacccgattatgtcccaatgttttgacagaagcgaactaagtgataagaaacgtccagagacagtcgccacgcaattcaaaatgagcctactccagctagtcgaaatcctacaaagcaaggaaccagcctacgtccggtgcataaaacccaatgacgccaaacaaccaggccgctttgatgaagtacttatccgacatcaagtaaaataccttggtcttctagaaaaccttcgcgtgcgtcgggcgggattcgcctatcgaagaaaatacgaagccttcctacaacgctacaaatccctctgccccgaaacctggccaacatgggccggccgcccacaagacggcgtggccgtacttgtcagacacctaggctataaacccgaagagtacaaaatgggcaggaccaaaatcttcatacgatttccaaaaaccctattcgcaactgaagacgccctcgaagtacgacgacaatcactagccaccaaaatccaagcagcctggcgcggcttccactggagacaaaagttcctccgtgtcaagcggagcgccatctgcatccaatcctggtggcgcggaacactcggccgaagaaaagcggcaaaacgaaaatgggcagcccagacaatacgtcgcctcatccgaggattcgtactacgacacgcaccccggtgcccagaaaacgcctttttcctcgaccacgtccgcacttcattcctgctcaatctccgccggcaacttccacaaaacgtgctggacacctcatggccaacacccccacccgcgctccgcgaggccagcgaactactccgagaactatgcattaagaacatggtctggaagtactgccgctccatttcacccgaatggaaacaacagctgcaacagaaagcagttgcaagcgagatctttaaaggcaagaaagacaactatccacaatcagtcccacgattgttcatcagcactcgactcggcaccgacgagatctcaccccgcgtcctacaagcgctcggatccgaaccaatccaatacgccgtccccgtggtaaaatacgaccgcaaaggttataaaccccgatcccgtcagctcctactcacacctaacgccgtagtaattgtcgaagacgcaaaagtaaaacaacggatcgactatgccaacctaaccggcatctccgtatcaagcctctcagactcactcttcgtcttgcacgtccaacgcgcggacaacaaacaaaaaggcgacgtcgtactgcaaagcgaccacgtcatcgaaacccttacgaaaaccgcactttcagcaaaccgcgttaactccatcaacataaaccaaggaagcatcaccttcgcgggcggacctgggcgagacggcaccatcgacttcacgcctggctccgagctactaatcaccaaagcgaaaaacggacacctagcggtagtagcaccccgactaaactccagatga

SEQ ID NO: 4387 - RNA, 3021 nt, synthetic construct
  misc_feature 1..3021: note = AAI46764 variant
  source 1..3021: mol_type = other RNA
atggcggaacaggaatctctagagttcgggaaagccgatttcgtgttaatggacaccgtctcaatgccagaatttatggcaaatctccgactacggttcgaaaaaggccggatctacactttcatcggagaagtggtagtctcagtaaacccatacaaactcctaaacatatacggacgggacaccatagaacaatacaagggacgagaactctatgagagaccccctcaccttttcgccatagctgacgcggcctacaaagcgatgaaacggcgctccaaagacacttgcatagtaatttccggggagtccggagcgggtaaaaccgaggcctccaagtacatcatgcagtatatagcggccataaccaacccctcccaacgagcagaggtggagagagtcaagaatatgcttctgaaatccaattgcgtcctagaagccttcggaaacgcaaaaacaaaccgcaacgacaactccagtcgattcggaaaatacatggacatcaacttcgacttcaaaggagatccaatcggaggtcacataaacaactacctactcgagaaaagtcgcgtgatcgtgcaacaacccggagaacgctcattccactcattctaccagctgctccagggcggatcagaacaaatgctacgatccttacacctacagaagtccctatcttcatacaactacattcacgtaggagcccaactcaaatccagcataaacgacgcagccgagttccgcgtcgtggccgacgcaatgaaagtcatcggtttcaaacccgaagaaatacaaaccgtatacaaaatactagccgctatcctgcaccttggaaacctaaaattcgtcgtcgatggcgacacccctctcatcgaaaacggcaaagtcgtgtcaatcatcgccgaactcctatcaacgaagacagacatggtcgaaaaagcccttctctaccgcacggtcgccactggacgcgacatcattgacaaacaacacaccgaacaagaagcatcatacggccgcgacgccttcgccaaggccatttatgaacgcctcttctgctggatcgtcacccgtatcaacgacataatcgaagtaaagaactatgacacgacaatccacggaaagaacaccgtcatcggcgtcctcgatatctacgggttcgaaatctttgacaacaactcctttgaacaattttgcatcaactactgcaacgaaaaactgcaacaactcttcatccagctagtgctcaagcaagaacaagaagagtaccaacgagaaggtataccttggaaacacatcgactacttcaacaaccaaataatagtcgacctagtcgaacaacaacacaagggaataatagccatcctcgacgacgcatgcatgaacgttggtaaagtgaccgacgagatgttcctagaagccctcaactcgaaattgggtaaacacgcccatttctcctcacggaaattgtgcgcatcagacaaaatactcgagttcgaccgcgacttccgcatacgccattacgcaggcgacgtcgtgtactcagtcatcggcttcatcgataaaaacaaagacacccttttccaagacttcaaacgactgatgtacaacagcagcaacccggtcctcaaaaacatgtggcccgaaggaaaactaagcattaccgaagtaaccaaacgaccactaacagcagccaccctatttaaaaattcaatgatcgcgctcgtagacaaccttgcctcgaaagaaccatactacgtacgctgcatcaagcccaacgacaagaaaagcccccaaatcttcgacgacgagcgatgccgacaccaagtcgaatacctcggtctcctcgaaaatgtacgcgtcaggcgcgcgggcttcgccttccgccaaacatacgaaaaattcctccacagatacaaaatgatcagcgagttcacctggccaaatcacgatctaccctcagacaaagaagcagtaaagaaactcatcgaacgctgcggattccaagacgatgtcgcctacggcaaaacaaagatctttataagaacaccccgcaccctgttcacactcgaagaactacgcgcgcaaatgctcatccgaatagtactattcctccaaaaggtctggagaggaactctcgcgcgcatgcgctacaagagaaccaaagcagccctaaccataatccgatactatcgacgctacaaggtaaaatcatatatccacgaagtagccagacgcttccacggagtcaagactatgcgcgactacggtaaacacgtcaaatggccctccccacccaaggtattaagacggttcgaagaggcactacagacaattttcaaccgatggagagcctcacagctaatcaagtccataccagccagcgatctccctcaagtccgagcaaaagtcgctgccgtcgagatgctcaaaggacagcgcgccgacctaggcctacaaagagcctgggagggaaattacttagcctctaaacccgacacaccccaaacaagtggcaccttcgtaccggtagccaacgagctgaaacgcaaagacaaatacatgaacgtcctcttctcctgccacgtccgcaaagtcaaccgattctccaaagtcgaagaccgagccatattcgtaaccgaccgccacctctacaaaatggatcccactaagcaatataaagtcatgaaaacaataccactctacaacctcacaggcctgagtgtgagcaacggcaaagaccagctagtcgtcttccacaccaaggacaacaaagacctcatcgtctgtcttttctccaagcaaccaacacatgaatctagaatcggagaattagtcggagtgttagtaaaccacttcaaatccgaaaagcggcatctacaagtcaacgtaacgaaccccgtccaatgctctttacacggcaaaaagtgcactgtcagcgtcgaaacccgcctcaaccagccccagccggacttcacaaagaatcggagtggcttcatactgagcgtaccgggaaactag

SEQ ID NO: 4388 - RNA, 3327 nt, synthetic construct
  misc_feature 1..3327: note = CCDS32254.1 variant
  source 1..3327: mol_type = other RNA
atgggcagcaaaggcgtgtaccagtaccactggcagtcgcacaacgtcaaacactccggggtagacgacatggtactactctcaaaaatcacggaaaactctatcgtcgaaaacctgaagaaacgctacatggacgactacatcttcacatacattggctctgtcctaatctccgtcaacccgttcaaacaaatgccctacttcggggagaaagaaattgagatgtaccagggggcggcccaatatgaaaacccaccccacatctacgccctcgccgacaatatgtaccgcaacatgataatagaccgggaaaaccaatgcgtgatcatatccggggagagcggagcaggcaagaccgtcgcagccaaatacataatgagctatatctcacgcgtctccggcgggggcactaaggtacaacacgtcaaagatataatcctacaatcaaaccccctccttgaagcatttggcaacgcaaagactgtacgcaacaataacagctcccgcttcggcaaatactttgaaatacaattctcgcctgggggcgaaccggacggaggcaaaatatcaaacttcctactagaaaaatcgcgagtagtcatgcgaaacccgggagagcgcagcttccacatcttctaccaactcatcgaaggcgccagcgcagaacagaaacacagcttgggaatcacttcaatggactactactactacttatcactgtcaggctcatacaaagtcgacgacatagacgatcgacgcgagttccaagaaacccttcacgccatgaacgttataggcatcttcgccgaagaacagacactcgtcctgcaaatagtcgcgggcatattacacctaggaaacattagcttcaaagaagtaggcaactacgccgcagtcgaatccgaagagttcctagcgttccccgcatacctgcttgggatcaaccaagatcgtctaaaggaaaagctcacctcacgccaaatggactccaagtggggtggaaagagcgaatcaatccacgtcaccctgaacgtggaacaagcatgctacaccagagacgcactagcgaaagcgctgcacgcacgagtcttcgacttcctagtcgactccatcaacaaagccatggagaaagaccacgaagaatacaacataggcgtcctagacatctatggcttcgaaatcttccagaaaaacggctttgagcaattctgcattaactttgtaaacgaaaaactccaacaaatattcatagagctcaccctaaaggcagaacaggaagagtacgtccaggaaggtatacgatggacaccaatagaatacttcaacaacaaaatcgtgtgcgatctcatagaaaacaaagtaaacccacccggtatcatgtcgatactagacgacgtgtgcgcaacaatgcacgcggtaggcgaaggggcggaccagacactcctacaaaaactgcagatgcagatcggatcacacgaacactttaactcatggaaccaaggcttcatcatacaccactacgcggggaaagtatcatacgacatggacggcttctgcgaacgtaaccgagacgtactctttatggatctcatagaactgatgcagtcatcagaactacccttcatcaaaagcctcttcccagaaaacctccaagctgacaagaagggccgaccgaccaccgccggctccaaaatcaagaaacaagccaacgacctagtcagcaccctcatgaaatgcaccccacattacataaggtgcatcaaacctaacgaaaccaagaaaccaagagactgggaggaaagccgcgtaaaacaccaggtagaatacctaggactaaaagaaaacatccgagtacggagagccggctacgcataccggcgcatattccagaaattcctccagcgatacgctatacttacaaaagcaacatggccaagctggcaaggcgaagagaaacaaggcgtcctacatctgctccagagcgtcaatatggacagcgaccaattccaactaggccggtcaaaagtgttcataaaagcacccgagagtctcttcctgctcgaagaaatgcgagaacgaaagtatgacggatatgcacgggtaatccaaaaatcgtggcgtaaattcgttgcaagaaagaaatacgtacaaatgcgtgaagaggcatcggacctcctcctcaacaagaaagaacgccgaagaaacagcataaacagaaacttcatcggcgactacatcggaatggaagaacacccggaactacagcaatttgtaggcaaacgagagaaaatagacttcgccgacaccgtcacaaaatacgaccgcagattcaaaggcgtaaaaagggacctactcctcaccccaaaatgcctgtacctgataggccgagagaaagtaaaacagggacccgacaaaggcctcgtaaaagaggtactaaaacgcaagatcgaaatcgagcgaatactctcggtgagcctcagcaccatgcaagacgacatcttcatcctacacgaacaagagtacgactccctcttggagtcggtattcaagacagagttcctatcactcctcgcaaaacgctatgaagagaaaacccaaaaacaactccccctgaaattcagcaacacgctcgaactcaaactcaagaaagaaaactggggtccatggtcagcaggcgggagcagacaagtacaattccaccaaggcttcggagacctcgccgtactcaaaccatctaacaaagtactacaagtgtcgattggacctggactacccaaaaactctcgaccaacgcgccgcaacacaacccagaacaccggctacagcagcggcacccagaacgccaactaccccgtgcgcgccgccccacctccgccgggataccaccaaaatggcgtcatacggaaccaatacgtcccttacccgcacgcgcccggatcccaaagatcgaaccaaaaatccctctacacatcaatggcccgcccgccgctgccaagacagcaatcaacatccagcgaccgcgtgtcccaaacaccggaatcattagatttccttaaagtacccgaccaaggagccgcgggcgtgcgcagacagacaacaagccgaccacctcccgcgggcggccgccccaaacctcagccaaaacccaaaccgcaagtgccccaatgtaaagccctttacgcgtacgacgctcaggacaccgacgaattgtcgttcaatgcgaatgacatcatcgacatcatcaaagaagatccaagcggctggtggacgggccggctgcgtggaaagcaagggctctttcccaacaattacgtaacgaagatatga

SEQ ID NO: 4389 - RNA, 3297 nt, synthetic construct
  misc_feature 1..3297: note = AAH28071 variant
  source 1..3297: mol_type = other RNA
atggggagcaaagaaaggttccactggcaaagtcataacgtaaaacaaagtggtgtagacgacatggtcctcctcccgcaaatcacggaagacgccatcgcggccaacctcagaaaacgattcatggacgactacatctttacttacataggcagcgtactaatcagcgtcaatcccttcaaacaaatgccgtacttcacagaccgcgagatcgacctctaccagggcgccgcccaatacgaaaaccctccacacatatacgctttaacggacaacatgtacagaaacatgctaatcgactgcgaaaaccaatgcgtaataatcagcggagaaagcggcgcaggcaagacagtcgcagcgaaatacatcatgggatacatatcaaaagtatcagggggtggtgagaaagttcagcacgtcaaagacataattctccaaagtaacccactcctggaagccttcggaaacgccaaaaccgttcgaaacaacaactcaagcagattcgggaaatacttcgagatacaattctcccgcggaggagaaccagatggcggcaaaatctcgaacttcctcctcgagaaatcccgggtagtcatgcaaaacgaaaacgaacgaaacttccatatatattaccaactcctcgaaggtgcatcacaggagcaaagacagaacctcggactaatgactccagactactattactaccttaaccaaagcgacacataccaagtagacggaacggacgacagaagcgacttcggagagacgctcagcgccatgcaagtaataggaataccgcccagcatacaacagctagtcctacagctagtcgcaggcattctccacctggggaacatcagtttctgcgaagacgggaactacgccagagtcgagagcgtggacctgctagcatttcccgcctacctgcttggaatagactcaggcagactgcaagaaaagctaacaagtcgaaaaatggacagccgatggggagggcgaagcgagtctataaacgtaaccctcaacgtcgaacaggccgcctacacacgcgatgcactagccaaagggctctacgcccgcttattcgacttcctagttgaggccatcaaccgggcaatgcagaaaccacaggaagagtactctataggagtactagacatatacggattcgaaatattccagaaaaacggcttcgaacaattctgcatcaacttcgttaacgagaagctccaacaaatcttcatcgagctcacacttaaagcagaacaggaagaatacgtccaggagggtatacgctggactcccatacagtacttcaataacaaagtggtatgcgacctaatcgaaaacaaactcagtccccctggcatcatgagcgtcctagacgacgtctgcgcaaccatgcacgcaaccgggggaggcgcagaccagacactgctccaaaaactccaagccgcggtcgggacacacgaacacttcaactcctggagtgccggcttcgtaatccaccactatgccgggaaggtcagctacgacgtatcaggcttctgcgagcgcaaccgcgacgtgctattctcagacctgatagaactaatgcagactagcgaacaagccttcctcagaatgctattcccggaaaaactagacggcgacaagaaagggcgcccctcaacagcaggatctaaaataaagaaacaagcaaacgacctggtagctaccctaatgcgctgtaccccacattacatacggtgcataaaaccaaacgaaaccaaacgcccaagagattgggaagagaaccgcgtaaaacaccaggtagaatacctaggcctcaaagaaaatatacgcgtacgcagagcaggcttcgcctaccgcagacaattcgcaaagttcttgcaacgatacgcaatactgacccccgaaacctggccccgctggcgcggagacgaaagacagggggtccaacacctccttcgagccgtcaacatggaaccggaccaataccaaatgggcagcacaaaagtattcgtgaagaaccctgagagcctcttcctactagaagaagtacgagaacgcaagtttgatggtttcgccaggacaatccagaaagcgtggcgacgacacgtcgcggtgcgcaagtacgaagagatgcgggaggaagcaagtaacatactactcaacaagaaagaacgacgacgaaacagtatcaaccgcaacttcgtaggcgactacttgggcctagaggaacgaccagaacttcggcaattcctcggcaaacgagagcgggtcgacttcgccgacagcgtcacaaaatacgatcgccgcttcaagccaattaagagggacttgatactaacccccaaatgcgtatacgtcatcggcagagaaaaagtaaagaaaggcccggaaaaagggcaagtgtgcgaagtcctcaaaaagaaagtagatatccaggcactcagaggtgtaagcctgtcaacacgtcaggacgatttcttcatcctacaggaagacgccgctgacagcttcctagaaagcgtgttcaaaacggagttcgtctcgctactgtgtaaacggttcgaagaagccacacgacgcccactaccactaacattctccgacacgctccaattccgtgtaaagaaagaaggatggggaggcggaggtacacgaagcgtgaccttcagccgcggattcggagatctagccgtactaaaagtaggagggcgcacactgacagtatcagtcggagacggcctccccaaatcttcaaaaccaacgcgaaaaggcatggccaaaggcaaaccacgcagaagctcccaagctccaacccgcgcagccccggctccacccagagggatggaccgcaacggagtacctccctcagcacggggaggccccctccccctcgaaataatgtccggagggggaacccaccggcccccgcgcgggcccccatcaacctccctgggcgccagccgcagaccacgcgcacgaccgcccagcgaacacaataccgagttcctaaacgttccagaccaaggcatggcagggatgcaaaggaaacgtagcgtggggcagcgaccggtaccgggcgtcggaagaccaaaaccccaacccaggacacacggaccccgatgccgggcactctaccaatacgtaggccaagacgtcgacgaactcagctttaacgtcaacgaagtaatcgaaattctaatggaagatcccagcggatggtggaaaggcaggctccacggccaagaagggctattccccggaaactacgtcgagaaaatatga

SEQ ID NO: 4390 - RNA, 3057 nt, synthetic construct
  misc_feature 1..3057: note = CCDS34629.1 variant
  source 1..3057: mol_type = other RNA
atggaagacgaggaaggtcccgaatatgggaagccagacttcgtactactagaccaagtcacaatggaggacttcatgcgaaacctccaacttagattcgaaaaagggcgcatctacacatacatcggtgaagtcctcgtctcagtgaacccataccaggaactccccctatacggccctgaagccatagcccgctaccagggccgagaactttacgagagacctccccatctctatgcggttgccaacgcagcttacaaggcaatgaaacaccgctcccgggatacctgcatagtaataagcggagagtccggagccgggaaaaccgaagccagcaagcacataatgcaatatatcgccgccgtaacaaaccccagccaaagagccgaagtagaacgcgtcaaagacgtcctcctgaaatctacgtgcgtccttgaagcattcggcaatgctcgaaccaatcgcaaccacaacagctcaagattcggcaaatacatggacatcaacttcgacttcaaaggcgacccaatcggcggccacatccacagctacctactagagaaaagccgcgtcctcaaacaacacgtcggcgaacgaaatttccacgccttctaccagctactccgcggttcggaagacaagcagctccatgaactccacctagaacgcaaccctgccgtctacaacttcacccaccagggagccggactcaacatgaccgtccactcagcccttgactcggacgaacagagccaccaagctgtcactgaggcaatgcgagtcataggcttctcacccgaggaagtagaatccgtgcaccgtatactcgcagccatactccacctcggaaacatcgaatttgtagaaacagaggaaggcggactgcaaaaagagggactagcggtcgcagaggaagccctcgtcgaccatgtcgcagaactaaccgccacaccccgagaccttgtactaagatccctactcgccagaaccgtcgccagcggcggccgcgaactgatagaaaaaggccacaccgcagcagaagcctcgtacgcccgggacgcatgcgctaaagcagtctaccaacgactcttcgagtgggtagtcaaccgcataaactccgtaatggaaccacgaggccgcgacccccgacgagatggcaaagataccgtcataggagtgctagatatctacggctttgaggtattccccgtaaacagcttcgaacaattctgcattaactactgcaacgaaaaactacaacaactcttcatacaactaatcctaaaacaagaacaagaagaatatgaacgcgaaggaatcacttggcaatccgtcgaatatttcaacaacgccaccatcgtggacctagtcgagcgaccacaccgaggaatattagccgtcctagatgaggcatgctccagcgcaggtaccatcactgaccgcatcttcctccaaaccctggacatgcaccaccgccaccacctccactacaccagccgacaactctgcccaaccgataaaacaatggagttcggacgcgactttcgaatcaaacactacgcaggcgacgttacatattccgtcgaaggattcatcgacaaaaacagagacttcctatttcaagacttcaagcggctcctctacaactccacagacccaacactccgcgccatgtggcccgacggacaacaagacatcacggaagtcacgaaacgcccactcacagccggcaccctcttcaaaaactcaatggtcgcccttgttgaaaacctcgcatcgaaagaacccttctacgtacgctgtatcaagcccaatgaagacaaggtcgccggcaaactggacgaaaatcactgccgacaccaagtagcgtatctcggccttcttgaaaatgtccgagtacgcagagcgggattcgcttcccgacaaccctactcgcgcttccttttacgctacaaaatgacgtgcgaatacacttggcccaaccacctactcggtagcgacaaagctgcggtatcagcccttctcgaacaacacggcctccagggagacgtcgcgttcggccattccaagctctttatccgatcaccccgcacgctcgttacactcgaacaatcaagagccaggttaatcccaatcattgtcctcctactccaaaaagcctggcgtggcaccctcgcccgatggcggtgccgcagactccgcgcaatctacacaatcatgcgctggttcaggcgccacaaggtacgagcccacctagccgaactacaacgcagattccaagccgcacgtcagcctcccctctatggcagagacctcgtctggccactaccacccgcagtcctacaaccctttcaagacacatgccacgcactattctgccggtggcgcgcccgccaactcgtgaaaaacataccaccctccgacatgccccagatcaaagcaaaagtagccgcaatgggtgctctccaaggcttacgccaagactggggatgccgacgcgcctgggcccgcgattacctttcaagcgcaaccgacaaccccacagcatcatcactcttcgcacaacgtctaaagacattgcaagacaaagacggcttcggcgccgtcctattcagcagccacgtgcgtaaagtgaaccgcttccacaagatccgcaaccgtgcacttctcctcacagaccagcacttatataaattagaccccgaccgacagtaccgagtaatgagagccgttccactggaagccgtaactggtctcagcgtcacatccggaggtgaccagcttgtagtactacacgcacgaggccaagacgacctcgtggtctgcctccaccgaagccgcccacccctagataacagagtcggcgaattagtaggcgtcttagccgcacactgccaaggcgaaggaagaacacttgaagtccgcgtatctgactgcattcccctctcccaccggggcgtgcgcagactaatctccgtagaacccagaccagaacaacccgagccagattttaggtgcgccagagggagcttcaccctgctttggcccagccgatga

SEQ ID NO: 4391 - RNA, 3069 nt, synthetic construct
  misc_feature 1..3069: note = CCDS53826.1 variant
  source 1..3069: mol_type = other RNA
atggaaggggccctcaccgcccgggacaaagtcggagtgcaagatttcgtactcctagacgcctacacctcggaatccgcattcgtggacaatctccgcaagcgattctcagaaaacctcatctacacctacattggaacgcttctagtcagtgtcaacccttatcaagaactcggaatatacaccgtcagccagatggaactttaccaaggtgtcaacttcttcgaactacccccgcacgtctacgcaatagcagacaacgcataccgaatgatgtgcgccgaactcaacaaccatttcatcctcatctccggggaaagcggagcaggcaaaaccgaagcaagcaagaaaatactcgaatacttcgcagtcacgtgccccatgacacaatcgctccaaatcgctcgagatcgcctacttttcagcaaccccgtcctcgaggcattcggcaacgcgcgaacgttaagaaatgacaactcaagccgcttcggaaaatacatggacatacaattcgactttcaggggataccagtcggcggacacatcataagctatctcatcgaaaaatcacgagtcgtgtaccaaaacgaaggagaaagaaacttccacatcttctaccaacttctcgccggaggcgaggaagaacgactctcatacctaggtctcgaaagagacccgcaactttacaaatacctctctcaagggcactgcgcaaaagaatcaagcatcagcgacaaaaacgactggaaaacggtttccaacgcattcagcgtaatcgacttcaccgaagcggacctcgaaaacctcttcgggatcatagccagcgtattgcacctgggtaacatcggattcgaggaagacgaccaaggctgcgcaaccatccccgacacgcacgaaataaaatggatcgcgaaactcctcggcgtccatcccagcgtcctactggaggcactaactcaccgtaaaatcgaagcaaaaacggaagaggtcatctgcccactaacactcgagctttccgtctacgccagagacgcgatggctaaagccgtatacgggaggaccttcacatggttagtcaacaaaatcaacagttcccttgtcaacaaagacttcacaagaaaaaccgtgataggcctacttgacatatacgggtttgaagttttcgacaaaaacggattcgaacaattctgcatcaactactgcaacgagaaactacaacaattactgatagagcgaacgctaaaagcggaacaagctgaatacgagatggaaggtatcgaatgggagcctatcaaatacttcaacaacaaaatcatctgcgacctcgtagaggaacgacacaaaggaatcataagcatactcgacgaggaatgcatcagaccgggtcctgcaacggacctgagcttccttgagaaactagaagagaaggtcggcaaacatgcgcacttcgaaacacgcaagctcgcaggaccaaaggggcgcaaacgaatcggctggatggagttcagactcctgcactacgccggagaagtgacctactgtacaaaagggttcctagagaaaaacaatgacctcctctaccggcacctgaaggaagtgttatgcaaaagcaaaaacataatactacgcgaatgcttcctcctcgcagaactggaaaaccgacgtcgcccaccaacggtaggaacacaattcaaaaactcgctctcaagtctccttgaaacgctgatatccaaagagcccagttacatacgctgcatcaagcccaacgaccgaaaagaaccctcaaaattcgacgacttcctaatcaggcaccaaatcaaatacctcggcctcatggagcacctccgcgtccgacgcgccggattcgcgtaccggcggaaatacgagcacttcctccagcgttataaaagcctgtgcccagacacctggccacactggcacggacctccagcagaaggggtagagagactcatcaagtacataggctataaacccgaagagtacaaactcgggaagacgaaaatattcatccgcttcccacgcaccctattcgctaccgaggatgcgttcgagttctccaagcatcagctggtcgcacgtatacaagccacttacaaaagatgcctcggccggcgcgaatacgtcaagaaacgtcaggccgcaataaaactagaagcccactggcgcggagcactcgcccgaaaagcaatccaaagacgaaaatgggcggtacgcattatacgtaaattcataaaagggttcatttcacgcaacaagcccctatgcccagacaacgaagagttcatcgtgttcgtacggaaaaactacatcctaaacctacgataccacctcccaaaaacggtcctggacaaaagctggttacggccaccgggaatcctcgaaaacgccagcgaccttctccgaaaaatgtgcgtaagaaaccttgtacaaaaatactgccgtggtataacggccgaaagaaaggccatgatgcaacagaaagtggtaacgagcgaaatctttcgcggacgcaaggacggctacacggaatccctcaaccaaccattcgtcaacagccgaatcgacgaaggggacatcaaccccaaagtcctccaactgatatcacacgaaaagatacaatacggcgtacccgtaatcaaatacgacagaaaaggattcaaagcgcgccaacgacagttaatactcacccaaaaagcggcctacgtggtcgaactcgcaaaaataaagcaaaagatcgaatactcggcgctgaagggcgtatcaacaagcaatctatcagacgggatactggttattcacgtatccccagaagactcaaaacaaaaaggggacgctgtgctccaatgcgggcatgtgttcgaagccgttactaaactcgtgatgctggtcaagaaagaaaacatagtcaacgtcgtacagggatcccttcaattcttcataagccccggcaaagaagggacaatagtcttcgacaccggtctagaagaacaagtgtacaaaaacaaaaacggccaactgaccgtcgtatcggtcaggagaaaaagctag

SEQ ID NO: 4392 - RNA, 2379 nt, synthetic construct
  misc_feature 1..2379: note = BAC84969 variant
  source 1..2379: mol_type = other RNA
atgatcacagtcaaccccgacggaaagataatggtccgacgctgtctagtcaccctccgaccattccgcctcttcgtcctaggaatcggattcttcaccctctgtttccttatgacctccctaggcggccaattctcagcccggcgcctcggcgactcccccttcaccatccgaaccgaagtcatgggaggtccagaatcccgtggcgtcctccgaaaaatgtcagacctacttgaactcatggtcaaacgtatggacgcccttgcacgactagaaaattcaagcgaactccaccgagccggcggtgatctccacttccccgccgacagaatgccacccggcgcaggtctaatggaacggatccaagccatagcacaaaacgtctccgacatcgccgtaaaagtcgaccaaatcctccgacactctctccttctacactccaaggtctccgaaggccgacgagaccaatgtgaagccccctccgaccccaagttccccgactgctccggcaaagtcgagtggatgcgcgcacgatggacctccgacccctgctacgccttcttcggagtagacggcaccgaatgctcattcctgatctacctctcagaagtagaatggttctgcccaccccttccctggaggaaccagaccgccgcgcaacgcgccccaaagccactccccaaagtacaagccgtcttccgctcaaacctctcccacctactcgacctgatgggtagcggaaaagagtcactcatttttatgaaaaagcgaaccaaacgactcacagcccaatgggcgctagcagcccaaaggctcgcacaaaaactaggagcgacccaacgagaccaaaaacaaattctagtccacataggcttcctcactgaagaatccggagacgtcttctccccacgagtgctcaagggcggcccactaggagaaatggtacagtgggcggacatcctcaccgccctatacgtactcggccatggactccgagttactgtgtcactaaaagagttacaatccaacctcggagtccctcccggccgaggctcctgccccctcacgatgccactacccttcgacctcatctacaccgactaccacggtctccagcaaatgaaacgacacatgggactatcattcaagaaataccgctgccgcatacgcgtcatcgacaccttcggcactgagccagcctacaaccacgaggaatacgcaacgctccacggctaccgcaccaattggggctactggaacttaaaccccaaacaattcatgaccatgttcccccacacgcccgataactctttcatggggttcgtctcggaagaactcaacgaaaccgaaaaacgcctaatcaaaggcggcaaagcctcaaacatggccgtagtctacggaaaagaggcctcaatctggaaacttcagggcaaagaaaaattcctaggaatcctcaacaaatacatggaaatccacggcaccgtctactacgaatcgcaacgacccccagaggtacccgcattcgtcaaaaatcacggcctcctcccacaacccgagttccaacaactcctccgtaaagccaaactcttcataggcttcgggttcccttacgaaggccccgcaccacttgaagcaatagccaacggatgcatcttcctccagtcacgcttcagcccaccccactcctccctgaaccacgagttcttccgtggcaaacccacatctagagaagtctttagccaacacccctacgcggaaaacttcataggcaaaccccacgtctggacagtagactacaacaactccgaagaatttgaagccgccatcaaggccataatgcgcacccaggtcgacccctacctcccatacgaatacacatgcgaaggcatgctcgaacgcatccacgcctatatccaacaccaagacttctgccgagcaccggacccagccctccccgaagcacacgcaccgcaatcccccttcgtcctcgcccccaatgcaacacacctagaatgggcacgcaacacaagcctcgcccccggagcatggcccccggctcatgctttgcgcgcttggctagctgtacccggacgcgcatgcactgatacctgcctagaccacggattaatatgcgaaccgtcctttttccccttcctaaactcacaagacgccttcctcaagctacaagtcccatgcgactccaccgagtccgaaatgaaccacctctaccccgcattcgcacaaccgggtcaagaatgttacctccagaaagaacccctccttttcagctgcgcaggaagcaacacaaaatacagacgcctatgcccctgcagagacttcagaaaaggccaagtcgccctctgccaaggatgcctataa

SEQ ID NO: 4393 - RNA, 36 nt, synthetic construct
  misc_feature 1..36: note = AF164963.1 variant
  source 1..36: mol_type = other RNA
atgacccaaggccaacacttcctccaaaaagtctaa

SEQ ID NO: 4394 - RNA, 2211 nt, synthetic construct
  misc_feature 1..2211: note = AAI11702 variant
  source 1..2211: mol_type = other RNA
atgaaagaaatgtcggcgaacaccgtcctcgactcacaacgccaacaaaaacactacggcataacctcacccatctctctcgcctccccaaaagaaatagaccacatctacacccaaaaactcatcgatgcaatgaaacccttcggtgtcttcgaagacgaggaagagctcaatcacaggctagtcgtgctaggcaaactcaacaacctcgtcaaagagtggataagcgacgtctcggaatcaaaaaacctccccccctcagtagtcgccaccgttggcggcaagatcttcacattcggctcgtatcgcctcggagtccacacaaaaggcgccgacatagacgcactatgcgtggccccccgtcacgtcgaacggagcgacttcttccagtcattcttcgaaaaactgaaacaccaagatggaatccgtaacctcagagccgtagaagacgccttcgtaccagtcataaaattcgaattcgacggaatcgagatcgacctggtgttcgcccgactagccatccaaactatctccgacaacctcgacctacgagacgactcacgactccgcagccttgatatacgatgcatccgcagcctcaacggctgccgagtcactgacgaaattctacacctcgtccccaacaaagaaacgttccgcctgaccctccgcgccgttaaactctgggccaaacgccgaggaatctactccaacatgctcggattcctcggtggtgtctcctgggcaatgctcgtagcccgaacctgccaactctacccaaacgcggccgcctctaccctcgtacataaattcttccttgtattcagcaaatgggaatggccaaaccccgtcctcctcaaacaacctgaagaatcaaacctaaacctgccagtatgggatccacgagtcaacccctctgaccgctatcacctgatgcccataatcacaccggcctacccccaacaaaattccacctacaacgtctccacctccacccgcacagtaatggtcgaggaattcaaacaaggcctcgcggtaaccgacgaaatcctccagggaaaatccgactggtcgaaactcctcgaaccaccaaacttcttccaaaaataccgccactacattgtactcaccgcctctgcatccacagaagagaaccacctagaatgggtcggcctagtagaatcaaaaatccgagtcctagtcggcaacctagaacgcaacgaattcataaccctcgcccacgtgaacccccaatccttccccggcaataaagaacaccataaagacaacaactacgtctccatgtggttcctcggaatcatcttccgccgcgtcgaaaacgcagaatctgtcaacatagacctcacatatgacatacagagcttcacagacacagtctatagacaggcaaacaacatcaacatgctcaaagaaggtatgaaaatcgaagcaacacacgtcaaaaaaaaacagcttcaccactaccttcccgccgaaatcctccaaaaaaaaaaaaaacaatccctatctgacgtcaacaggagcagcggaggcttacagtccaaacgcctctccctcgactcctcatgcctcgactccagcagggacaccgacaacgggactcctttcaactcccccgcctctaaatcagacagccccagcgtaggagaaaccgaacgaaactccgcagaacctgctgcagtcatcgtcgaaaaacccctctctgtacccccagcccaaggcctttcaatcccagttatcggcgccaaagtcgattctactgtaaaaaccgtgtccccacccaccgtctgcacaatcccaaccgtcgtcggcagaaacgtgatcccccgcatcaccaccccccacaaccccgcccaaggacaaccccacctcaacggcatgtctaacatcaccaaaaccgttacccccaaacggtcccactcccccagcattgacggaacccctaaacgcctcaaagacgttgaaaaattcataaggcttgagtcgacctttaaggacccacgcaccgccgaagagcgcaaacgaaaatccgtagacgccatcggcggcgagtcgatgcccatccctacaatcgacacgtctcgaaaaaaaagactccccagcaaggagctaccagactcctcctcccccgtccccgccaacaacatccgcgtgatcaaaaactcaattcgcctcaccctcaaccgatag

SEQ ID NO: 4395 - RNA, 1377 nt, synthetic construct
  misc_feature 1..1377: note = AAG28389 variant
  source 1..1377: mol_type = other RNA
atgtccaccgaaggcggcttcggaggcaccagctcctccgacgcccaacaatcactacaatccttctggccccgagtcatggaagaaatccgcaacttaaccgtcaaagacttccgggtacaagaactccccctcgcaagaatcaagaaaatcatgaaattagacgaagacgtcaaaatgatttctgcagaggcaccagtcctcttcgccaaagccgcacaaatcttcatcaccgaattaaccctacgcgcctggatccacaccgaagacaacaaacgacgaaccctccaacgcaacgatatcgccatggcgatcactaaattcgaccaattcgacttcctaatagacatcgtcccccgcgacgaactcaaaccacccaaacgacaagaagaagtccgccaatccgtcacccccgccgaacccgtccaatactacttcaccctagcacagcaacccacagcagtccaagtccaaggccaacaacaaggccagcaaaccacatcctccacaaccaccatccaacccggccaaatcatcatcgcacaaccccaacaaggacaaaccacacccgtgaccatgcaagtcggcgaaggccaacaagtacaaatagtacaagcccaaccccaaggccaagcacaacaagcccaatccggcaccggccaaaccatgcaagtcatgcaacaaataatcaccaacacaggcgaaatccaacaaatacccgtccaacttaacgcaggccaactccaatacattcgactagcccaacccgtttcaggcacccaagtggtccaaggccagatccaaactctcgctaccaacgcccaacaaggccagcgcaacgcatcacaaggcaaaccccgcagatgcctcaaagaaaccctccaaatcacccaaaccgaagtccagcagggtcaacaacaattctcacaattcactgacggccaacgcaattcagtccaacaagccagagtctccgaactaacaggcgaagcagaaccccgcgaagttaaagccacaggaaactcaacaccatgcacctcatccctacctaccacccaccctccctcccacagagccggagcctcctgcgtatgctgctcacaaccccaacaaagcagcacatcacccccaccctccgacgccctacaatgggtcgtagtcgaagtctcaggtacccccaaccaactcgaaacccaccgcgaactccacgcccctctaccaggaatgacctcactcagccccctccacccctcccaacaactctaccaaatccaacaagtaaccatgcccgccggccaagacctagcccaacccatgttcatccagtccgccaaccaaccatccgacggccaagccccacaagtcaccggcgactaa

SEQ ID NO: 4396 - RNA, 2802 nt, synthetic construct
  misc_feature 1..2802: note = CCDS33423.1 variant
  source 1..2802: mol_type = other RNA
atgcgtatggcagccacggcctgggccggcctacaggggcccccactgcctacgttatgccccgccgttaggacaggcctctactgccgagaccaggcccacgccgaaagatgggccatgacttcggaaacctcatcaggctcccattgcgcccgatcccgcatgctcagaagacgagcgcaagaagaagactctaccgtcctcatcgacgtgtcaccaccagaagcagaaaaacgcggatcatatggatccacagcacacgcatccgaacccggcggccaacaagccgcggcctgccgcgccggctcacccgccaaaccaagaatcgcagacttcgtactcgtgtgggaggaagacttaaagctagaccgacaacaagactcagcagcccgcgaccgcacagatatgcataggacctggcgcgaaacattcctcgacaacctacgcgcagccggcctctgcgtcgatcaacaagacgtccaagacggcaacaccacggtacattacgccctactatccgcctcatgggccgtactctgctactatgcagaggacctccgcctaaagctcccgctacaagaactccccaaccaagcctcgaactggtccgccggactgctagcatggctaggaatcccaaacgtacttctcgaggtcgtccccgacgtcccacccgaatattactcctgccgttttcgcgtcaacaaactccccagattcctgggctccgacaaccaagacacatttttcacttcgacgaaacgacaccaaatactcttcgaaatcctagcaaaaaccccctacggacacgaaaagaaaaacctcctgggcatacaccaactactcgccgaaggcgttctctcagcagcattcccactacacgatggaccattcaaaaccccgcccgaagggccccaagcccccaggctcaaccaacgccaagtactctttcaacactgggcccgctggggcaaatggaacaaataccagcccttagaccacgtccgaagatactttggcgaaaaagtagcactttacttcgcatggctcggcttctacaccggttggctactgcccgccgcagtagtcggtaccctagtcttcctcgtcggctgcttcctcgtcttcagcgatatccccacccaagagttatgcggctcaaaagactcattcgaaatgtgccccctgtgtctcgactgccctttctggctcctctccagcgcctgtgcactcgcacaagccggccgccttttcgaccacggaggaaccgttttcttctccctattcatggcactctgggccgtgctgctcctagagtactggaagagaaaatctgccaccctcgcctaccgctgggactgctccgactacgaagatacagaagaacgcccaagaccgcaattcgccgcttcagcaccaatgaccgcaccgaaccctataaccggagaagacgaaccgtacttcccagaaagatcacgcgcacgcagaatgctggcaggctcagtagttatcgtggtaatggtagccgtcgtcgtaatgtgcctcgtttcaattatcctataccgcgcaatcatggctatcgtagtgtcacgatcgggcaacaccctattagcggcctgggcgtcacgcatagcctccctaacgggcagcgtagtaaaccttgtcttcattctaatcctcagcaagatctatgtttccctcgcacacgtactaacaagatgggaaatgcatcgtacccaaaccaaattcgaggacgctttcacactaaaagttttcatattccaatttgtaaacttctattcctcgccagtatacatagctttcttcaaaggccggttcgtaggataccccggcaactaccacaccctattcggcgttcgcaacgaagaatgcgccgctgggggatgcctcatagagctagcacaagaacttctagtcataatggttggcaaacaggtcatcaacaacatgcaagaagtactaatccccaaactaaaaggatggtggcaaaaattccgacttcgatcaaagaaacgtaaagcaggcgccagcgccggagcatcacaaggcccatgggaagacgactatgagctagtgccatgcgaaggcctattcgacgaataccttgaaatggtactgcagtttggctttgtaaccatcttcgtggccgcctgcccactcgcacccctattcgccctcttaaataactgggttgaaatccggctcgacgcccgcaaattcgtctgcgagtacagacgaccagtggctgaacgcgcccaagacataggcatctggtttcacatactggccggcctcacacacctcgcagtgatctccaacgcattcttactagcctttagcagcgacttcctaccaagggcctactaccgctggactagagcacacgacctccgaggcttcctaaacttcaccctagcacgagcaccctcctcctttgccgccgcgcacaaccgcacatgcagatatcgcgcttttcgcgacgacgatggccactactcacaaacctactggaaccttctcgccatccgactcgcattcgtcattgtcttcgaacacgttgtattctctgtcggtcgcctcctagacctgctagtacccgacatcccagaatcagtggagatcaaggttaaaagagaatactacctcgcaaaacaagctctcgcagaaaacgaagtcctgttcggaaccaacggaaccaaagacgaacaacctgagggatcagaactatcatcgcactggactcccttcaccgtaccaaaagcctctcaacttcaacaatag

SEQ ID NO: 4397 - RNA, 885 nt, synthetic construct
  misc_feature 1..885: note = AAA36380 variant
  source 1..885: mol_type = other RNA
atggaagacagcatggacatggacatgagccccctccgcccacaaaactacctcttcggatgcgaactaaaagccgacaaagactaccacttcaaagtagacaacgacgaaaacgaacaccagctaagcctaagaacagtaagcctaggagccggagcaaaagacgaactgcacatcgtagaagcagaagccatgaactacgaaggaagtcccataaaagtaaccctggcgacactaaaaatgtccgtccaacccacagtaagcctaggaggattcgaaataacaccgcccgtcgtactacgcctaaaatgcggcagcggcccagtccacataagcggccaacacctcgtagcagtcgaagaagacgccgaaagcgaagacgaagaagaagaagacgtcaaactactaagcataagtgggaaaagaagcgcaccaggaggcggcagcaaagtaccacaaaaaaaagtaaaactggcagccgacgaagacgacgacgacgacgatgaagaagacgacgacgaagacgacgacgacgacgacttcgacgacgaagaggccgaagaaaaagcacccgtaaaaaaaagcataagagacacgccagcaaaaaacgcacaaaaaagcaaccaaaacggcaaagacagcaaaccaagcagcaccccacgcagcaaaggacaagaaagcttcaaaaaacaagaaaaaacaccgaaaaccccaaaaggccccagcagcgtagaagacataaaagcaaagatgcaagcaagcatagaaaaaggaggaagcctcccaaaagtagaagcaaaattcatcaactacgtaaaaaactgcttccgaatgaccgaccaagaagcaatacaagacctatggcaatggagaaagagcctctaa

SEQ ID NO: 4398 - RNA, 3915 nt, synthetic construct
  misc_feature 1..3915: note = CCDS47686.1 variant
  source 1..3915: mol_type = other RNA
atgcaactcaaaattatgcccaaaaagaaacggctcagcgccggcagagtccccctaatcctgttcctatgccaaatgatctccgccctcgaagtaccgctagacccaaaactcctcgaagacctagtacaaccaccaacaatcacgcaacaatcaccgaaagactacataatcgatccacgcgaaaatatagtcatacagtgcgaagccaaaggcaaacccccgccctccttctcctggacccgaaacggcacccatttcgacattgacaaagatcccctagtcaccatgaaaccagggaccggcacactaatcatcaacatcatgtccgagggcaaagcagaaacctacgagggagtatatcaatgcaccgcaagaaacgaacgcggcgccgccgtttccaacaacattgtagtccgaccctcacgcagcccactgtggacaaaggagaaactagagccaataaccctccaatccggacagagcttagtgctaccctgccggccacccataggactaccaccgcccatcatattttggatggacaacagcttccaacgactgcctcaatcagaaagagtctcccaaggcctaaacggcgacctatacttctcaaacgtactacccgaagacacccgtgaagactacatctgctacgcacggttcaaccacacgcaaaccatacaacagaaacaacccataagtgtcaaggtcataagcgtcgacgagttaaacgacaccattgccgccaacttgtcagacaccgagttctacggtgccaaaagctcacgcgaacgccctccaaccttcctaacccccgaaggaaacgcaagcaacaaagaagaacttcgtggtaacgtactctcactcgaatgcatcgcggaagggctgcccacccccattatatactgggccaaggaagacggcatgttaccaaagaaccgcacagtctataaaaatttcgagaaaactctacaaataatccacgtgtccgaagccgattcgggaaactaccaatgcatcgcaaagaacgcgcttggcgcaatacatcacacgatatcagtccgagtcaaggcggcaccctattggataacagctccccaaaacctcgtcctctcacccggcgaagatggaacactcatatgccgtgccaacggcaaccccaaaccccgcatcagctggctaaccaacggcgtaccaatcgaaatagccccggacgaccccagtcgcaaaatagacggcgacacaatcatattcagcaacgtacaagaacgatcctccgccgtctaccaatgtaacgcatcaaatgaatatgggtacctgcttgccaacgctttcgttaacgtcctagctgaaccacccaggatactcaccccagccaacacgctctaccaagtcatagccaaccgcccagccctcctggattgcgcgttcttcggctcgccactgccaacaatagaatggttcaaaggtgctaagggctcagccctccacgaggacatctacgtcttacacgagaacggaactttagaaattcccgtagcccaaaaagactctacaggaacctacacatgcgtagccagaaacaaattaggcatggccaaaaatgaggtgcacctggaaataaaggaccccacctggatcgtaaagcaaccagaatacgccgtcgttcaaaggggttcaatggtcagcttcgaatgtaaagtcaaacacgatcacacattaagcctaacagtcctatggctaaaggacaacagagaactgccttccgacgaacgcttcaccgtggacaaagaccatcttgtcgtcgccgacgtctctgacgatgactctggcacatacacctgtgtcgcaaacaccaccctagactccgttagtgcaagcgcggtcctctcagtagtcgcaccaacccctacccccgcaccagtctacgacgtacccaacccaccattcgatttagaactaaccgatcagctcgacaaatccgtccaactctcatggacacccggcgacgataacaactcacccatcaccaagttcattatcgaatacgaagacgccatgcacaaacccgggctctggcaccaccagacagaagtatccggaacgcaaacaaccgctcaattaaaactatcaccatacgtcaattactcattcagagtaatggcggtcaacagcattgggaaaagcctcccgagcgaagcctcggagcaatacctcaccaaggcttcagagccagataaaaaccccaccgcggtcgaaggactcggctcggaaccagacaaccttgtgatcacctggaaacccctcaacggattcgagtcaaacggaccaggtctccagtacaaagtcagctggagacagaaagatggggacgacgaatggacctcagtcgtcgtcgctaacgtctctaaatacatcgtgtcaggtacccccacatttgtaccctatcttattaaagtacaagcactgaacgacatgggctttgcaccagaacccgcagtcgtcatgggacactcaggcgaagatctcccaatggtagctcctggcaacgttagagttaacgtggtaaactctacgctagctgaagtccactgggatccagtgcccctcaaaagcatccgcggtcacctccaagggtatcgaatctactactggaaaacacagtcaagctcgaaacgcaacagaaggcacatagagaaaaagatcctcacattccaaggctcaaaaacccacggcatgcttcccggactcgaacctttttcacactacaccctcaacgtacgggtcgtcaacggaaagggggaaggccctgcaagtcccgatcgcgtctttaacacccccgaaggggtcccctcagctccatcgagcctaaaaattgtcaaccccacactagacagccttactctcgaatgggacccaccgtcacatcccaacggcatcctaaccgaatataccctcaaatatcagccaattaactcaacacacgagttaggccccctagttgacctgaagatacccgccaacaagacacgttggaccttaaagaacctgaatttttcaacaagatacaaattctacttttacgcccaaacctccgcgggatcagggagccagatcaccgaagaagccgtaaccacagtcgatgaggcaggaatactccctccagacgtcggggccggaaaagtccaagcagtcaacccacgaatatcgaaccttaccgccgccgccgccgaaacatacgctaacatttcctgggagtatgaaggtccagaacacgtcaacttctacgtcgaatacggcgttgccggttcaaaagaggaatggcgaaaggaaatagtcaacggatccagaagtttcttcggcctcaaaggcctcatgccaggaaccgcttacaaagtccgtgtcggggcagttggcgacagcgggtttgtgtcctccgaagacgtattcgaaaccggcccagccatggcaagccgccaagtcgatatcgctacacaaggctggttcataggacttatgtgcgccgtagcccttctcatcctaatactcctcatagtgtgctttatccgaagaaacaaagggggcaaatacccagtcaaagaaaaagaggatgcccacgccgacccagagatccaacccatgaaggaagacgacggtaccttcggggaatactccgatgcagaagaccacaaaccactcaagaaaggatctcgaacaccgtcagaccgcaccgtaaagaaagaagactccgacgacagcctagtcgactacggtgaaggagtcaacggccaatttaacgaagacggctcattcatcggccaatactctggcaagaaagaaaaagaaccagccgaaggaaatgaatcatctgaagccccatcacccgtcaacgccatgaactccttcgtctag

SEQ ID NO: 4399 - RNA, 1305 nt, synthetic construct
  misc_feature 1..1305: note = AAB51320 variant
  source 1..1305: mol_type = other RNA
atgtcaatcgagaaaatatgggcgcgcgaaatcctggactcgcgcggaaacccaacggtggaagtggacctgtacacggccaagggcttgttcagggcagcagtacccagcggggcctcgaccggaatctacgaagcgctggaactacgagacggggacaaacaaaggtacctgggcaagggcgtgctaaaagccgtagaccacatcaacagcacgatcgcgcccgcgctcataagttcgggcttaagcgtggtcgagcaagaaaagttagacaacctcatgctcgagctagacggaacggaaaacaaatcgaaattcggggcaaacgcaatcttgggcgtgagtctggccgtgtgcaaggccggcgccgcggaacgagaactgccattgtacagacatatagcccagctcgccggaaacagcgacctcatactcccggtaccggccttcaacgtaattaacggcgggagccacgccgggaacaagctagcgatgcaggagttcatgatactgccggtaggggccgagagcttccgcgacgcaatgcgactgggcgcggaagtataccacaccctaaaaggggtcataaaagacaaatacggcaaggacgcaacaaacgtcggggacgaaggcgggttcgcgcccaatatcttagaaaacagcgaggccctggaactggtcaaggaagcaattgacaaagccggctacaccgagaaaatagtaataggcatggacgtggccgcaagcgagttctaccgcgacggcaaatacgacctagatttcaagagcccgaccgacccctcgcgctacatcacaggcgaccaactgggcgcgctctaccaagacttcgtacgcgattacccagtcgtaagcatagaagacccattcgaccaagacgactgggcagcctggagcaaattcacggccaacgtcggaatccaaatagtaggcgacgacctgaccgtaacaaatcccaaacgcatcgaacgggccgtagaagaaaaagcatgcaattgcctgctcctgaaagtgaaccaaatcggaagtgtgaccgaagccatacaagcgtgcaaattagcacaagagaacgggtggggagtaatggtctcgcacagaagcggggaaacggaagacaccttcatcgcagacctagtcgtgggcctctgcacaggccaaataaagaccggggccccatgcaggagcgaacgcctggccaagtacaatcaactaatgagaatcgaggaagaactcggggacgaagccaggttcgcgggccacaacttccgcaacccatcggtcctatga

SEQ ID NO: 4400 - RNA, 1395 nt, synthetic construct
  misc_feature 1..1395: note = AAH08489 variant
  source 1..1395: mol_type = other RNA
atggaaaccctcagcttcccccgctacaacgtagccgaaatagtcatccacatccgcaacaaaatcctaaccggcgccgacggcaaaaacctcacgaaaaacgacctctaccccaaccccaaaccggaagtcctacacatgatctacatgcgcgccctccaaatagtctacggcatccgcctagaacacttctacatgatgccagtcaacagcgaagtcatgtaccctcacctcatggaaggcttcctcccgttcagcaacctagtcacacacctagacagcttccttccaatatgcagagtaaacgacttcgaaaccgccgacatcctctgccccaaagccaaacgcacctcacgtttcctcagcggcataataaacttcatacacttcagagaagcatgccgagaaacctacatggaatttctatggcaatacaaaagctcagccgacaaaatgcaacaactcaacgcagcgcaccaggaagccctcatgaagctagaacgactcgactcagtccccgtagaagaacaagaagagttcaaacaactatccgacgggatccaagaactccaacaaagcctcaaccaagacttccaccagaaaacaatcgtactacaagaaggaaacagccaaaagaaatcaaacatatccgaaaagacaaaacgcctaaacgaactcaaactttccgtcgtatccctcaaagaaatacaagaatccctcaaaaccaaaatcgtcgactcccccgaaaaactaaagaactacaaagagaaaatgaaagacaccgtacaaaaactcaaaaacgcacgccaagaagtagtagagaaatacgaaatctacggcgacagcgtcgactgcctaccctcctgccaactcgaggtccaactctaccaaaagaaaatccaagacctctccgacaacagagaaaaactcgcctcaatcctaaaagaatccctcaacctagaagaccaaatcgaatccgacgaatcggaactcaagaaactgaaaaccgaagaaaacagcttcaaacgcctcatgatagtaaagaaagaaaaactcgccaccgcacaattcaaaatcaacaagaaacacgaagacgtcaaacaatacaaacgcaccgtaatcgaagactgcaacaaagtccaagagaaaagaggcgccgtctacgaacgcgtaaccaccataaaccaagaaatccagaaaatcaaactgggaatccaacaactcaaagacgccgcggaacgcgaaaaactcaaaagccaagaaatcttcctcaacctgaaaaccgccctagaaaagtaccacgacggcatcgaaaaagccgccgaagacagctacgcaaaaatcgacgagaaaacagcagaactaaaacgcaagatgttcaaaatgtccacctaa

SEQ ID NO: 4401 - RNA, 543 nt, synthetic construct
  misc_feature 1..543: note = AAB49693 variant
  source 1..543: mol_type = other RNA
atgcaagcagaagggcgcgggaccgggggctcgaccggggacgcggacgggccagggggcccgggcatacccgatggcccgggcgggaacgcgggcgggcccggggaagcgggcgcgaccgggggcaggggcccgagaggggccggggccgcgcgcgcgagcggacccgggggcggggccccgcgagggccccatggcggggccgcgagcgggctcaatggctgctgtaggtgcggggccaggggcccggaatcacgattgctagagttctatctcgcgatgccgttcgcgacaccgatggaggcagagctagcacgcaggagcttggcccaggacgcacccccgctaccggtcccgggcgtgctcttaaaagagttcacggtatcgggcaatatcttgaccatacgattaaccgcggccgatcacaggcaattacaactgagcataagctcgtgcctgcaacaactgtcgctattgatgtggatcacgcaatgcttcttgcccgtgttcttagcacagcccccgagcggacaaaggcgatag

SEQ ID NO: 4402 - RNA, 1215 nt, synthetic construct
  misc_feature 1..1215: note = CCDS14134.2 variant
  source 1..1215: mol_type = other RNA
atggcctccccccgcctcggcactttttgctgccccacacgagatgccgccacccaacttgtactatcattccaaccccgtgcattccacgccctatgcctcggctcaggaggcctccgccttgccctcggcctcctacaactcctccccggccgtcgcccagccggacccggatccccagccacctcaccccccgcctccgtccgcatccttcgagcagccgccgcctgcgacctccttggttgccttggcatggtcatccgctccaccgtgtggctcggcttccccaactttgtcgactcagtctccgacatgaaccacaccgaaatctggcccgccgccttctgcgtcggctccgccatgtggatccaactactctactccgcctgcttctggtggctattctgctatgccgtcgacgcctacctcgtaatacgccgttcagccggcctatccaccatcctcctctatcacatcatggcatggggcctcgccaccctcctctgcgtcgaaggtgcagccatgctctactacccctccgtctcccgctgcgaacgcggcctcgatcacgccatcccccattacgtaaccatgtacctcccactcctcctagtcctcgtagccaacccaatcctattccaaaaaaccgtcacagcagtcgcatccctcttaaaaggtcgacaaggcatctacacagaaaacgaacgccgaatgggcgccgtaatcaaaatccgcttcttcaaaatcatgctagtactcatcatctgctggctctcaaacattatcaacgaatcactcctattctacctagaaatgcaaaccgacatcaacggcggctccttaaaacccgtcagaaccgcagccaaaactacctggttcatcatgggcatactcaaccccgcacaaggcttcttactctctctcgctttctacggctggaccggctgctctctcggcttccaatcaccacgcaaagaaatccaatgggaatccctaaccacatccgccgccgaaggcgcccacccatcgcccctaatgccccacgaaaaccccgcctccggcaaagtctctcaagtcggtggccaaaccagcgacgaagccctctccatgctatccgaaggctccgacgcatccacaatcgaaatccacacagccagcgaatcctgcaacaaaaacgaaggagaccccgcactccccacccacggcgacctctaa

SEQ ID NO: 4403 - RNA, 3141 nt, synthetic construct
  misc_feature 1..3141: note = AAH38180 variant
  source 1..3141: mol_type = other RNA
atggcctcaagcgtagggaacgttgctgactcaaccgaacccacaaaacgcatgctatcattccaaggactcgccgaattagcccaccgagaataccaagcaggcgacttcgaagcagccgagcgacactgcatgcaactttggcgccaagaacccgacaacacgggcgtcctcctgctgctcagctcaatacacttccaatgcaggcgcctcgaccgatccgcacatttctccacattagcaattaaacaaaacccgctactcgcagaggcctactcgaacctaggaaacgtatacaaagaacgcgggcaactgcaagaagcaatagaacactaccgccacgcgctacgactaaaaccagacttcatagatggttacatcaacctcgccgcagccctagtcgcagccggtgacatggaaggagcagtccaggcatacgtctccgccctccaatacaaccccgacttatactgcgtccgctccgacctcggcaaccttctaaaagcccttggacgtctagaggaagcaaaggcttgctacctcaaagccattgaaacccagcccaacttcgccgtagcctggtccaacctcggatgcgtctttaacgcacagggcgaaatatggctcgcaatacatcattttgagaaagcagtaacactcgatccgaacttcctggacgcttacataaatctaggcaacgtcctcaaagaagcccgaatctttgatagggccgtcgcagcgtacctacgcgcactcagccttagccccaaccacgcggttgtccacggcaatcttgcctgcgtctactatgagcaaggactcatagacctagcgatagacacctaccgccgagctatcgaattacagcctcactttccagatgcctactgtaacctcgctaacgccctcaaagaaaaaggctccgtagccgaagccgaggactgttacaataccgctctacgcctatgcccaacacacgcggactcccttaataacctagccaacataaaacgagaacaaggcaatatagaagaggccgtcaggctctaccgcaaagcgctagaagtattcccggagttcgcagccgcgcactccaacctcgcaagcgtcctccaacaacaaggaaaactccaagaggccctgatgcactacaaagaagccattcgcatttcccccacgtttgccgacgcgtactcgaacatgggcaacacccttaaagagatgcaagacgtacagggcgccctacaatgctatacccgagccatccaaattaaccccgcattcgcagacgcacactccaacctggcctcgatccacaaagattccggaaacatacccgaagcaatcgcatcctaccgaaccgccctcaaactgaagccagacttccccgacgcgtattgcaatctagcccactgcctacagatcgtctgcgactggactgactacgacgaaagaatgaagaaactggtctcgatcgtagccgaccagctggagaaaaacaggctaccatcagtgcacccccaccacagcatgctgtaccccctcagccatggcttccgtaaagccatagccgaacgccacggaaacctctgtctggataaaataaatgtcttacataaaccgccctacgaacaccccaaagatttaaaactctctgacggccgactaagagtaggctatgtctcctccgacttcggcaaccaccccacctcacatttaatgcaatccatccccggcatgcacaaccccgacaaattcgaagtcttctgctacgccctatcaccagatgacggcaccaacttccgcgtcaaagtcatggccgaagcaaaccacttcatagacctttcgcaaataccatgcaacggcaaagctgcggaccgtatacatcaagacggaatacacatattagtaaacatgaacggatacaccaaaggcgcccgcaacgaactttttgcccttcgacccgcacccatacaagcaatgtggctaggctacccaggcacatccggcgctctattcatggactacataataacggaccaagaaacatcaccagccgaggtagcagagcagtacagcgaaaaactagcatatatgccccacacattcttcatcggagaccacgccaacatgtttccccacctaaagaagaaagcggtcatcgacttcaaatcaaacggccacatctacgacaatcgaatcgtcctaaacggaatagacctcaaagcctttttagactccctccccgatgtcaaaatcgtcaaaatgaaatgccccgacggcggagacaatgcagactccagcaacacagccctcaacatgccagtcataccaatgaatacgatcgccgaagcggttatcgaaatgatcaatcgcggtcaaatccaaatcaccataaatggattctcaatctctaatggcctagccaccacccaaataaataacaaagccgccacaggcgaggaagtaccccggaccatcatcgtgaccacacgaagccagtacggccttccggaggacgccatcgtatactgcaacttcaaccaactctacaaaatagatccaagcaccctacaaatgtgggcaaatatcctcaaacgcgttcccaattcagtcctttggctcctgcgatttcccgctgtgggcgaacctaacattcagcaatacgcccaaaacatgggcctcccccaaaaccggatcatattctcaccagtagcgccaaaagaagaacacgtccgaagaggtcaactcgccgacgtctgcctcgacacaccactatgtaacggtcacaccacaggaatggacgtactgtgggcaggcacaccaatggtcacaatgcccggtgaaaccttagcaagtcgcgtcgctgcctcccaactcacatgtctcggatgcctcgagctcatagccaaaaaccgccaagaatatgaggacatagcagtaaaactcggcaccgaccttgaatacctgaagaaagtcagaggtaaagtctggaaacaacgaatcagtagccccctcttcaacacaaaacagtataccatggaacttgaacgcctatacttacagatgtgggaacactacgccgccggaaataaaccggaccacatgatcaaaccggtagaggtcacggaatccgcctaa

SEQ ID NO: 4404 - RNA, 441 nt, synthetic construct
  misc_feature 1..441: note = BAG57972 variant
  source 1..441: mol_type = other RNA
atggccgccgaaaccctcctctcctccctcctcggcctcctcctcctcggcctcctactccccgcctccctcaccggaggcgtcggctccctaaacctcgaagaactctccgaaatgcgctacggcatcgaaatcctccccctccccgtcatgggcggccaatcccaatcctcagacgtcgtcatcgtctcctccaaatacaaacaacgctacgaatgccgcctccccgtcggcgccatccacttccaacgcgaacgagaagaagaaacccccgcctaccaaggccccggaatccccgaactcctctcccccatgcgcgacgccccctgcctcctcaagaccaaagactggtggacctacgaattctgctacggccgccacatccaacaataccacatggaagactccgaaatcaaaggcctccaagccgcctcctcctaa

SEQ ID NO: 4405 - RNA, 1221 nt, synthetic construct
  misc_feature 1..1221: note = BAG65333 variant
  source 1..1221: mol_type = other RNA
atggcagcggaaacgctcctgagctcgctcctgggcctactcctgctagggctcttactcccggcctcgctcacgggcggagtcgggagcctcaacctagaagaactgtcggaaatgcgctacggcatagagatactcccgctaccggtcatgggcgggcaatcacaatcaagcgacgtcgtaatcgtaagctcgaaatataaacagcgctacgaatgtcgcttgccagcgggcgcgatccacttccaacgcgagcgagaagaagagactccggcctaccaagggcccgggatcccggaattgctctcacccatgcgcgacgccccatgcctactcaaaacaaaagactggtggacgtacgagttctgttacgggcgccacatccagcaatatcacatggaagacagcgcaagcggggccccgaacgacttccagaacaacgtccaagtcaaagtcataagatcgcccgcggacctgatcagattcatagaagaactaaagggagggaccaagaaaggaaaaccgaacataggacaggaacagcccgtggacgacgcggcggaagtaccacagcgagagcccgagaaggaacgaggggacccggaacggcaacgagaaatggaagaggaagaggacgaggacgaagacgaggacgaagacgaggacgagcgccaactcctgggagagttcgagaaagagctcgagggaatactcctgccctcagacagggaccggctcagaagcgaggtaaaggcagggatggagcgcgagctcgaaaacataatccaggaaacggaaaaagaactggacccagacggactcaagaaagagagcgagcgagaccgcgcaatgctggccctaacatcgacactaaacaagctaataaaaaggctagaggaaaagcaatcgcccgaactcgtgaaaaagcacaagaaaaagcgcgtggtacccaaaaagccaccaccatcaccccagcccacgggcaagatcgagatcaaaatagtgcgcccgtgggcggaagggaccgaagaaggggccaggtggctgaccgacgaagataccaggaacctaaaagagatcttcttcaacatcttggtcccgggcgcagaagaggcccagaaagagcgccagagacagaaagagctagaaagcaactacaggagagtgtgggggagtcccggaggagaagggaccggggacctggacgagttcgacttctag

SEQ ID NO: 4406 - RNA, 2223 nt, synthetic construct
  misc_feature 1..2223: note = BAH13933 variant
  source 1..2223: mol_type = other RNA
atggcggtggaaaccctgctaagctcactactcggcctgctgctcttaggtctactactaccggcaagcctcaccggaggagtcggcagcctcaacttagaagaactgtcagaaatgagatacggcatagaaatcctccccctaccggtcatgggaggccaatcccaatcaagcgacgtagtcatcgtcagcagcaaatacaaacaacgctacgaatgccgcttacccgcaggagcaatccacttccaacgagagcgggaggaagaaacacccgcataccaaggccccggaataccggaactattaagcccaatgcgcgacgcaccctgcctcctaaaaacaaaagactggtggacatacgagttctgctacggaagacacatacagcagtatcacatggaagacagcgaaatcaaaggagaagtcctctacctcggatactaccaaagtgcattcgattgggacgacgaaacagcaaaagcctcgaaacaacacagactcaaacggtaccacagccaaacgtacggcaacggctcaaaatgcgacctaaacggtcgaccaagagaagcagaggtccgcttcctctgcgacgaaggagcgggcatctccggggactacatagacagggtagacgaaccgctatcatgcagctacgtcctcaccataagaaccccgcgcctctgcccgcaccccctcctacggcccccaccatcagccgccccacaagccatactatgccaccccagcctacaaccagaagaatacatggcatacgtgcaacgccaagcagacagcaaacaatacggcgacaaaatcatagaggaattacaagacctcggaccccaagtctggtcagaaacaaaaagcggagtagccccacaaaagatggccggccgaaccctgttccacctattccgagaaatacacttccacttcttccccagccccgacctgaccgtgctaacagactggtggggagggggaggcgtggaaaaataccacggtccaagctcattaggcgatcgcggaggcgaagggaccccatcctacctgctaccgtccgtctcaccacttctctcagaccagagcctacccgtgctctgcacactaggcgccagccccacaaaagacgacagcaaagactcggacttctggaaaatgcttaacgaaccagaagaccaggcccccggaggagaagaagtccctgcagaagaacaagaccccagcccagaagccgccgactcagcgtctggagcccctaacgacttccaaaacaacgttcaggtaaaagtaatccgctcacccgccgacctaatacgcttcatagaagaactcaaaggaggaacaaagaaaggaaaacccaacatcggccaagaacaaccagtagacgacgccgcagaagtcccacaacgagaacccgaaaaggaacgaggcgaccccgaacgccaacgcgaaatggaagaagaagaagacgaagacgaagacgaagacgaagacgaggacgaacgccaattactgggggagttcgaaaaagaactagaaggaatactcctaccaagcgaccgcgaccgcttaaggagcgaagtcaaggcgggcatggagagagaactcgaaaacatcatacaagagacggagaaggaactagacccagacggccttaagaaagaaagtgaaagagaccgcgcaatgctagcgctaaccagcaccctaaacaaattaataaaacgcctcgaagaaaaacaaagcccagagctcgtcaagaaacacaaaaagaaaagagtagtaccaaagaaaccacccccatcaccccagccaacagaagaagatcccgaacatagagtccgcgtacgagtcacgaaattacgcttaggaggcccaaaccaagacctgacagtgctcgaaatgaaaagagaaaacccgcaactcaaacagatagaagggctagtaaaagaactcctagagcgagaggggctaactgccgccggcaaaattgaaatcaaaatcgtacgaccatgggccgaaggcacagaagagggcgccagatggctaacagacgaggacaccagaaacctaaaagagatattcttcaacatactcgtcccaggcgcagaagaggcacaaaaagaacgccaacgacagaaagagcttgaatcgaactaccgccgagtgtggggaagccccgggggagagggaacaggcgacctagacgagttcgacttctaa

SEQ ID NO: 4407 - RNA, 2004 nt, synthetic construct
  misc_feature 1..2004: note = AAB06495 variant
  source 1..2004: mol_type = other RNA
atggcagcggaaacactactaagctcgctgctcggcctactcttactcggactgctactcccagccagcctgactggaggagtcggaagtctcaacctggaagaactatccgaaatgcgctacggaatagaaatactcccgctaccagtcatgggaggacaatcgcaatcaagcgacgtagtaatagtatcctcaaaatacaaacaacgctacgaatgccgcctgccggcaggcgcgatccacttccagcgcgaacgcgaggaggagaccccggcataccaagggccagggatcccggaattgctctcaccaatgcgagacgcaccctgcctgctcaaaaccaaagactggtggacgtacgaattttgttacggcagacatatacagcaataccacatggaagacagcgaaatcaagggcgaagttttatatctaggctattaccaatccgcgttcgactgggatgacgaaacagcaaaagcaagcaaacaacatcgactaaaaaggtaccacagccaaacctacggcaacggctccaaatgcgacctgaatggacgaccacgcgaagccgaagtcaggttcctatgcgacgaaggagccgggatatcgggcgactacatagaccgagtcgacgaacccctatcatgctcatacgtgctaacgatccgaactccgcgactctgcccacaccctctcctgcgcccgcccccgagtgcggcaccacaagcgatactctgccacccctcactccagccagaagagtatatggcgtatgtacaaaggcaagcagactcaaaacagtacggcgacaagatcatcgaggaactccaagacctaggcccgcaagtatggagcgaaacaaaatcgggcgtggcaccgcaaaagatggcgggcgcgagcccgaccaaagacgacagcaaagacagcgacttctggaagatgctgaacgagcccgaggaccaggcaccaggcggggaagaggtcccggccgaggaacaagacccgagtccagaggcggccgacagcgcaagcggagccccgaacgatttccaaaacaacgtccaagtcaaagtcatacgttcgcccgcggacctaatccggttcatcgaggaactcaagggaggcaccaagaaagggaaaccaaacataggccaagaacaacccgtggacgacgccgcagaagtgccccagagagaaccagaaaaagaaagaggagacccagaaagacaaagggaaatggaggaagaagaggatgaagacgaggacgaggacgaggacgaagacgagcgccaactcttaggcgagttcgaaaaagaactcgaaggcatactacttcccagcgacagagacaggctcagaagcgaagtaaaagcggggatggaacgggaactcgaaaacataatccaggaaacagaaaaagaactagatccggacgggctcaagaaagagagcgaacgcgatcgcgcgatgctggcccttaccagcacactgaacaaactcatcaaacgactcgaggaaaaacaatcgccagaactcgtcaagaaacacaaaaagaaacgcgtagtcccaaagaaaccaccgccctcaccccaacccacggaagaagatccggaacaccgcgtccgcgtgcgcgtgaccaaactccgcctaggtggcccaaaccaagacctgaccgtactcgaaatgaaacgagagaacccgcagctgaaacagatcgaaggcctagtaaaagaactgctcgagagagaaggcctaacggcagccggaaaaatcgaaataaaaatcgtaaggccctgggccgagggcacggaagagggcgcacgatggctaacggacgaggacacacgcaacctgaaggaaatcttctttaacatcctagtgcccggcgcggaggaagcacaaaaggaaagacaaagacaaaaggagctagaatcaaactatcgcagagtttggggctcacccgggggagaaggcacgggcgacctcgacgagttcgacttctaa

SEQ ID NO: 4408 - RNA, 303 nt, synthetic construct
  misc_feature 1..303: note = AAI13433 variant
  source 1..303: mol_type = other RNA
atgcgcgcgctcacgctcttggccttgctcgcgctcgcggccttgtgcatagccgggcaagcgggcgcgaaaccgagcggggccgagagctcgaaaggggccgcgttcgtgagcaagcaagagggctcggaagtggtcaagcgcccgcgcaggtacttgtaccagtggttgggcgcgcccgtgccctatcccgatcccctggaaccgcgcagggaagtgtgcgagctcaatcccgattgcgatgaattggccgatcacataggctttcaagaggcctatcgcaggttctatggcccggtctag

SEQ ID NO: 4409 - RNA, 945 nt, synthetic construct
  misc_feature 1..945: note = EAX06008 variant
  source 1..945: mol_type = other RNA
atgcgcatagccgtaatctgcttctgtctcctaggaataacctgcgccatcccagtcaaacaagcagactcaggcagctccgaagaaaaacaactatacaacaaatacccagacgcagtagccacatggcttaaccctgacccatcccaaaaacaaaacctactcgccccacaaaacgcagtctcctccgaagaaaccaacgacttcaaacaagaaacactccccagcaaaagcaacgaatctcatgaccacatggacgacatggacgacgaagacgacgacgaccacgtagactcacaagacagcatagactcaaacgactccgacgacgtcgacgacacagacgactcccaccaatcagacgaatcccaccactccgacgaatccgacgaactcgtcaccgacttccccacagacctaccagcaaccgaagtcttcacccccgtcgtcccaaccgtcgacacctacgacggccgaggcgacagcgtcgtatacggcctacgcagcaaatcaaaaaaattccgacgccccgacatacaataccccgacgcaacagatgaagacataacctcccacatggaatccgaagaactcaacggcgcctacaaagccatccccgtagcccaagacctcaacgccccctcagactgggactcacgtggaaaagactcctacgaaaccagccaactcgacgaccaaagcgcagaaacacacagccacaaacaatcacgcctctacaaacgcaaagccaacgacgaatcaaacgaacactccgacgtcatcgactcccaagaactctcaaaagtctcccgcgaattccacagccacgaattccactcccacgaagacatgctcgtcgtcgaccccaaatccaaagaagaagacaaacacctcaaattccgaatctcacacgaactagactccgcctcatcagaagtcaactaa

SEQ ID NO: 4410 - RNA, 903 nt, synthetic construct
  misc_feature 1..903: note = EAX06009 variant
  source 1..903: mol_type = other RNA
atgcgaatagccgtcatctgtttctgcctcctaggcatcacatgcgcaatccccgtaaaacaagccgactcaggctcctcagaagaaaaacaactatacaacaaatatcccgacgccgtcgccacctggctcaacccagacccctcacaaaaacaaaacctcctagccccccaaaccctcccctcaaaatccaacgaatcacacgaccacatggacgacatggacgacgaagacgacgatgaccacgtcgacagccaagattccatcgactccaacgactccgacgatgtcgacgacaccgacgactcccaccaatccgacgagagtcaccactccgacgaatccgacgaactcgtcaccgacttccccaccgacctccccgccaccgaagtcttcacccccgtagtccccaccgtcgacacctacgacggccgcggcgactccgtcgtttacggtctccgatccaaatcaaaaaaattcagacgccccgacatccaataccccgacgccaccgacgaagacatcacctcccacatggaatcagaagaactcaacggcgcatacaaagccatccccgtcgcacaagacctcaacgccccctccgactgggactcccgcggcaaagattcctacgaaacatcccaactcgacgaccaaagcgctgaaacccactcacacaaacaatcccgcctatacaaacgcaaagccaacgacgaatcaaacgaacactcagacgtcatcgactcgcaagaactctccaaagtctcccgcgaattccactcccacgaattccactcacacgaagacatgctagtcgtcgaccccaaatcaaaagaagaagacaaacacctaaaattccgcatctcccacgaactcgactcagcctcctccgaagtcaactaa

SEQ ID NO: 4411 - RNA, 864 nt, synthetic construct
  misc_feature 1..864: note = EAX06010 variant
  source 1..864: mol_type = other RNA
atgcgcatcgcagtcatctgcttctgcctcctcggaataacctgcgcaatacccgtcaagcaagccgactcaggctccagcgaagaaaagcaaaacgccgtctcatcagaagaaaccaacgacttcaaacaagaaacactccccagcaaatccaacgaatctcacgaccacatggacgacatggacgacgaagacgacgacgaccacgtcgactcccaagacagcatcgacagcaacgacagcgacgacgtcgacgacacagacgactcacaccaaagcgacgaaagccaccactccgacgaatccgacgaactcgtcaccgacttccccaccgacctccccgccaccgaagtcttcacacccgtagtccccacagtcgacacctacgacggccgaggagactccgtggtctacggcctccgatccaaatccaaaaaattccgacgccccgacatccaataccccgacgcaacagacgaagacataacctcccacatggaatcagaagaactaaacggcgcctacaaagccatcccagtagcccaggacctaaacgccccctcagactgggactcccgaggcaaagactcctacgaaacaagccaactcgacgaccaatccgcagaaacccactcgcacaaacaatcccgcctctacaaacgcaaagccaacgacgaaagcaacgaacacagcgacgtcatcgacagccaagaactctcaaaagtcagccgcgaattccactcccacgaattccacagccacgaagacatgctcgtagtcgaccccaaatccaaagaagaagacaaacacctcaaattccgcatatcacacgaactcgacagcgcgtcatccgaagtaaactaa

SEQ ID NO: 4412 - RNA, 984 nt, synthetic construct
  misc_feature 1..984: note = BAH12087 variant
  source 1..984: mol_type = other RNA
atgggaatcgtcccccgaagcctggacaaaaaagcccaccgcgtacaattccaactcaaccgcatcaaagccaaaatcgaactaccctggggctcactccaactagactgcctgatgaagacactaaaagaactctacaacaaataccccgacgccgtcgccacctggctcaaccccgacccctcacaaaaacaaaacctcctagccccacaaaacgccgtatcctccgaagaaaccaacgacttcaaacaagaaacactcccctccaaatccaacgaatcacacgaccacatggacgacatggacgacgaagacgacgacgaccacgtcgactcccaagacagcatagactccaacgactccgacgacgtcgacgacaccgacgactctcaccaatccgacgaatcccaccacagcgacgaatcagacgaactcgtaaccgatttccccaccgacctccccgccaccgaagtattcacccccgtcgtaccaaccgtcgacacatacgacggccgaggcgacagcgtagtctacggcctacgctccaaatccaaaaaattccggcgcccagacatccaatacccagacgccaccgacgaagacatcacctcgcacatggaatccgaagaactcaacggcgcctacaaagccatacccgtagcccaggacctcaacgccccctccgactgggactcacgcggcaaagactcctacgaaacctcccaactcgacgaccaatcagcagaaacccactcacacaaacaatcacgcctgtacaaacgcaaagcaaacgacgaaagcaacgaacactcagacgtaatcgactcacaagaactctccaaagtctccagagaattccactcccacgaattccacagccacgaagacatgctcgtcgtcgaccccaaatccaaagaagaagacaaacacctcaaattccgcatatcccacgagctagacagcgcctcctccgaagtaaactaa

SEQ ID NO: 4413 - RNA, 879 nt, synthetic construct
  misc_feature 1..879: note = AEA49030 variant
  source 1..879: mol_type = other RNA
atgcgaatagccgtcatctgcttctgcctactcggcatcacatgcgcaatacccgtcaaacaagccgactccggctcctccgaagaaaaacaactctacaacaaataccccgacgccgtagccacctggctcaaccccgaccccagccaaaaacaaaacctcctcgcaccccaaaacgccgtcagttccgaagaaaccaacgacttcaaacaagaaacactcccctcaaaatccaacgaatcccacgaccacatggacgacatggacgacgaagacgacgactctcaccaatccgacgaatcacaccactccgacgaatccgacgaactcgtaaccgacttccccaccgacctcccagccaccgaagtcttcacccccgtcgtacccacagttgacacctacgacggcagaggagactctgtagtctacggactccgaagcaaatccaaaaagttccgccgcccagatatccaataccccgacgccacagacgaagacatcacctcccacatggaatccgaagaactcaacggcgcctataaagccatccccgtcgcccaagacctcaacgccccctccgactgggactcacgcggcaaagactcttacgaaacctcgcaactagacgaccaaagcgccgaaacccactcccacaaacaatcccgcctatacaaaagaaaagccaacgacgagagcaacgaacacagcgacgtcatcgactcacaagaacttagcaaagtctcccgagaattccattcacacgaattccactcccacgaagacatgctcgtcgtcgaccccaaatccaaagaagaagacaaacacctcaaattccgcatctcccacgaactcgacagcgcctcctcagaagtcaactaa

SEQ ID NO: 4414 - RNA, 945 nt, synthetic construct
  misc_feature 1..945: note = AAA86886 variant
  source 1..945: mol_type = other RNA
atgcgcatcgcagtaatctgcttctgcctcctcggcataacctgcgcaatccccgtcaaacaagcagacagcggctcaagcgaagaaaaacaactatacaacaaataccccgacgccgtagcaacctggctcaaccccgaccccagccaaaaacaaaacctactcgccccacaaaacgcagtctcatccgaagaaaccaacgacttcaaacaggaaaccctccccagcaaatcaaacgaatcccacgaccacatggacgacatggacgacgaagacgacgacgaccacgtcgactcccaagactccatcgactctaacgacagcgacgacgtcgacgacaccgacgactcccaccaaagcgacgaatcccaccactcagacgaatccgacgagctagtcacagacttcccaaccgatctacccgccaccgaagtcttcaccccagtagtccccaccgtcgacacatacgacggccgcggcgactcagtcgtctacggcctcagatcaaaatcaaaaaaattccgcagacccgacatccaataccccgacgccaccgacgaagacataacatcccacatggaatcagaagaactcaatggggcctacaaagcaatccccgtagcacaagacctcaacgccccatccgactgggactcccgcggcaaagattcctacgaaacctcccaactagacgaccaatccgccgaaactcactcccacaaacaatcccgcctctataagcgcaaagccaacgacgaatcaaacgaacactccgacgtaattgacagccaagaactctccaaagtctcccgcgaattccactcacacgaattccactcccacgaagacatgcttgtagtcgaccccaaatccaaagaagaagacaaacaccttaaattccgcatctcccacgaactcgactccgcctcctccgaagtaaactaa

SEQ ID NO: 4415 - RNA, 1182 nt, synthetic construct
  misc_feature 1..1182: note = AAA59988 variant
  source 1..1182: mol_type = other RNA
atggaagagccacaatccgacccttctgtagaacctcccctctcccaagaaacattctcagacctctggaaacttctcccagaaaacaacgtcctctcccctctcccctcccaagcaatggacgacctcatgctctcacccgacgacatcgaacaatggttcaccgaggaccccggacccgacgaagccccacgtatgcccgaagccgccccccccgtcgccccagcccccgccgctcccacacccgcagcccccgcccccgcaccctcctggcccctatcctcctccgttccctcccaaaaaacctaccaaggctcctacggcttccgcctaggcttcctccactccggaacagcaaaatccgtcacctgcacatattcacccgctttaaacaaaatgttctgccaactcgccaaaacctgcccagtacaactctgggtcgactccacccccccaccgggaacccgcgtacgcgcaatggctatctacaaacaatcacaacacatgaccgaagtcgtaagaaggtgcccccaccacgaacgatgctcagactcagacggcctcgcccccccacaacacctcatccgcgtcgaaggaaacctccgcgtagaatacctcgacgaccgcaacactttccgccactcagtcgtagttccctacgaaccccctgaagtcggctccgattgcaccacaatccactacaactacatgtgcaactcctcctgcatgggcggcatgaaccgccgaccaatcctaaccatcatcacactcgaagactcctccggcaatctcctagggcgaaactccttcgaagtcagagtttgcgcctgccccggccgagaccgccggaccgaagaagaaaacctccgcaaaaaaggtgaaccccaccacgaattaccccccggctcaaccaaacgtgccctccccaacaacacctcaagctcaccccaacccaaaaaaaaaccactagacggcgaatacttcaccctccaaatccgaggacgcgagcgcttcgaaatgttccgagaactcaacgaagccctcgaactaaaagacgcccaagccggcaaagaacccggaggatcccgggctcactcctcccacctaaaatcgaaaaagggccaatccacatcccgacacaaaaaactcatgttcaaaacagaaggaccagactccgactaa

SEQ ID NO: 4416 - RNA, 309 nt, synthetic construct
  misc_feature 1..309: note = AAF88037 variant
  source 1..309: mol_type = other RNA
atgagcgcgcgcgtgcgctcgcgctcgcgagggcgcggggacggacaagaggccccggacgtggtcgcgttcgtggccccgggcgagagccagcaagaggaaccgcccacggacaatcaagatatcgagcccgggcaagagcgcgagggcacgcccccgatcgaggaaaggaaagtggaaggggactgtcaagagatggatctcgagaaaacgcgctcggaaaggggcgatggctcggacgtgaaagagaaaacgcccccgaacccgaaacatgccaagaccaaggaagcgggcgatggccagccctag

SEQ ID NO: 4417 - RNA, 1209 nt, synthetic construct
  misc_feature 1..1209: note = AAA60003 variant
  source 1..1209: mol_type = other RNA
atgcaaatgtccccagcccttacttgtctagttctcggcctcgcactcgtatttggcgaaggatccgccgtccaccacccaccctcatacgtcgcccacctcgcctccgacttcggagtccgcgtcttccaacaagtcgcccaagcatccaaagacagaaacgtcgtcttctccccctacggcgtagcctccgtactcgccatgcttcaactcacaaccggaggcgaaacccaacaacaaatccaagccgccatgggcttcaaaatcgacgacaagggaatggcccccgccctccgccacctctacaaagaacttatgggcccttggaacaaagacgaaatctccaccaccgacgccatctttgtccaacgcgacctcaaacttgttcaaggcttcatgccccacttcttccgcctcttccgatccaccgtcaaacaagtagatttcagcgaagtagaacgcgcccgctttatcatcaacgactgggtaaaaactcacacaaaaggcatgatctcaaacctgctcggcaaaggcgccgtcgaccagctcacccgcctagtcctagttaacgccctatacttcaacggccagtggaagacccccttccccgactcatccacacaccgacgactcttccacaaatcagacggatcaacagtctccgtcccaatgatggcccaaaccaacaaattcaactacaccgaatttaccaccccagacggacactactacgacatcctagaactcccctaccacggcgacaccctctccatgttcatcgccgccccctacgaaaaagaagtccccctctccgcactaaccaacatactatccgcccaactaatctcacactggaaagggaacatgacacgactcccacgactcttagtcctccccaaattcagcctcgaaaccgaagtcgacctccgcaaacctctagaaaaccttggcatgaccgacatgttccgccaattccaagcagacttcacctcactatccgaccaagaacccctccacgtcgcccaagccctccaaaaggtcaaaatcgaagtcaacgaatccggaaccgtagcctccagctcaaccgccgtcatcgtctccgcccgaatggcccctgaagaaatcataatggaccgacccttcctattcgtcgtccgacataacccaaccggtaccgtactcttcatgggccaagtcatggaaccctaa

SEQ ID NO: 4418 - RNA, 1248 nt, synthetic construct
  misc_feature 1..1248: note = AAA36797 variant
  source 1..1248: mol_type = other RNA
atggaagacctctgcgtcgccaatacactattcgcccttaacctcttcaaacacttagcaaaagcctcacccacccaaaacctcttcctcagcccctggtccatctccagtaccatggcaatggtctacatgggctcccgaggctccacagaagaccaaatggcaaaagtcctccaattcaacgaggtcggcgccaacgcagtcacccccatgacccccgaaaacttcacttcctgcggcttcatgcaacaaatccaaaaaggctcctacccagacgccatcctacaagcccaggccgccgacaaaatccactccagcttccgatccctatcaagcgcaatcaacgcatcaacaggcaactatctcctagaatccgtcaacaaacttttcggcgaaaaatccgcctccttccgcgaagaatacatccgcctctgccaaaaatactactcctccgaaccccaagccgtcgacttcctcgagtgcgccgaagaagcccgcaagaaaataaacagctgggtaaaaacccaaaccaaaggcaaaatacccaacctcctacccgagggctctgtcgacggagatacccgcatggtcctagtcaacgccgtatacttcaaaggcaaatggaagaccccgttcgaaaagaaactcaacggcctataccccttccgcgtcaactccgcacaaagaacacccgtccaaatgatgtacctacgagaaaaactcaacatcggctacatcgaagacctcaaagcccaaatcctcgaactcccctacgccggcgacgtctccatgttcctactcctccccgacgagatcgcagacgtgtcaacaggcctcgaactgctcgaaagcgaaatcacctacgacaaactcaacaaatggaccagcaaagacaagatggcagaagacgaagttgaagtctacatcccccaattcaaactagaagaacactacgaactccgcagcatcctccgatccatgggcatggaagacgccttcaacaaaggacgcgccaacttctccggtatgtccgaacgcaacgacctattcctatccgaagtcttccaccaagcaatggtcgacgtcaacgaagaaggcactgaagccgccgccggcaccggcggcgtcatgactggccggaccggccacggcggcccacaattcgtcgccgaccacccattcctattcctaataatgcacaaaatcaccaactgcatcctcttcttcggccgtttctccagcccataa

SEQ ID NO: 4419 - RNA, 528 nt, synthetic construct
  misc_feature 1..528: note = AAA60020 variant
  source 1..528: mol_type = other RNA
atgctcccccccatggccctaccctccgtctcctggatgctcctctcctgcctcatgctcctctcccaagtccaaggcgaagaaccccaacgcgaactcccctccgcccgcatccgctgccccaaaggctcaaaagcctacggctcccactgctacgccctattcctctcccccaaatcctggaccgacgccgacctcgcctgccaaaaacgcccctctggcaacctagtctccgtcctatccggcgccgaaggatcattcgtcagctcactcgtcaaatccatcggcaactcctactcctacgtctggatcggcctccacgaccccacccaaggcaccgaacccaacggcgaaggctgggaatggtcctcctccgacgtcatgaactacttcgcctgggaacgcaacccctccaccatctcctcccccggccactgcgcctccctctcccgctcaacagccttcctccgctggaaagactacaactgcaacgtccgcctcccctacgtctgcaaattcaccgactaa

SEQ ID NO: 4420 - RNA, 528 nt, synthetic construct
  misc_feature 1..528: note = AAT11159 variant
  source 1..528: mol_type = other RNA
atgctcccacccatggcactcccctccgtctcctggatgctcctctcctgcctcatgctactctcccaagtccaaggcgaagaaccccaacgcgaactcccctccgcccgaatccgctgccccaaaggctccaaagcctacggatcccactgctacgccctcttcctctcccccaaatcctggaccgacgccgacctcgcctgccaaaaacgcccctccggcaacctcgtctccgtcctctccggcgccgaaggctcattcgtctcctccctcgtcaaatccatcggcaactcctactcatacgtctggatcggcctccacgaccccacccaaggcaccgaacccaacggcgaaggctgggaatggtcctcctccgacgtcatgaactacttcgcatgggaacgcaacccatccaccatctcctcccccggtcactgcgcctccctctccagatccacagccttcctccgctggaaagactacaactgcaacgtccgcctcccctacgtctgcaaattcactgactaa

SEQ ID NO: 4421 - RNA, 381 nt, synthetic construct
  misc_feature 1..381: note = AAH39863 variant
  source 1..381: mol_type = other RNA
atggataaatcgctcttgctcgagctcccgatcttgctctgttgctttcgcgcgctctcgggctcgctctcgatgaggaacgatgccgtgaacgagatcgtggccgtgaaaaataactttcccgtgatcgagatcgtgcaatgtcgcatgtgccatctccagttcccgggcgagaaatgtagcaggggcaggggcatatgcacggccacgaccgaggaagcgtgcatggtcgggcgcatgttcaagcgcgatggcaatccctggctcacgttcatgggctgtctcaagaactgtgccgatgtcaagggcatacgctggagcgtgtacttggtcaatttcaggtgctgtcgctcgcacgatctctgtaacgaggacttgtga

SEQ ID NO: 4422 - RNA, 1440 nt, synthetic construct
  misc_feature 1..1440: note = CCDS42826.1 variant
  source 1..1440: mol_type = other RNA
atgaccacactcgcaggagcagtcccccgaatgatgcgacccggccccggccaaaactaccccagaagcgggtttcctctagaagtatcaacccctctcggccaaggccgcgttaaccaactcggcggagtattcataaacggccgcccccttcccaaccacatccgccacaaaatagtcgaaatggcccaccatggcatacgcccgtgcgtaatctcccgccaactccgtgtctcccacggctgcgtctccaagatcctttgccgataccaagaaaccggatcaatccgacctggcgccataggcggttccaaaccaaaacaggtaaccacaccagacgtagaaaaaaaaatcgaagaatacaaacgcgaaaaccccggaatgttctcctgggaaatcagagacaaactactcaaagacgccgtctgcgaccgcaacacagtcccctccgtctcctcaatatcccgcatcctacgctccaaattcggcaaaggcgaagaggaagaagccgatcttgaacgcaaagaagccgaagaatccgaaaaaaaagccaaacactcaatcgacggcatcctctccgaacgcgcctccgccccccaatcagacgaaggctccgacatcgattccgaacccgatctccccctcaaacgcaaacaacgccgatcccgcaccacattcaccgccgaacaacttgaagagctcgaacgggccttcgaacgaacccactaccccgacatatacacccgggaagaactagctcaacgagctaaactaacggaggccagagttcaagtctggttctccaaccgacgcgcccgctggcgcaaacaagccggagccaaccaactaatggccttcaaccacctcataccaggaggtttccccccaacagcaatgcctacactccccacataccaactctccgaaacatcataccaacccacctctatcccccaagcagtctcggaccccagctccacagtacatcgcccacaaccccttcccccctccaccgtccaccaatccactattccgtcaaacccagactcctcaagcgcctactgcctaccctccacccgacacggattctcctcctataccgactccttcgtaccaccctcaggcccctccaacccaatgaaccccaccatcggcaacggactctcaccccaagtcatgggcctactaacaaaccacggcggcgtcccccaccaaccccaaaccgactacgctctcagccccctcactggcggcctagaaccaaccacaaccgtctcagcatcatgctcacaacgcctcgaccacatgaaatccctcgactccctccccacctcccaatcttactgtcccccaacctactccaccaccggatactcaatggaccccgtcaccggctaccaatacggacaatacggacagtccaaaccatggacattctaa

SEQ ID NO: 4423 - RNA, 1176 nt, synthetic construct
  misc_feature 1..1176: note = AAA58397 variant
  source 1..1176: mol_type = other RNA
atggacctcgaaaagaactaccccacaccccgaacctcccgcaccggacacggaggcgtcaaccaactcggtggcgtcttcgtcaacggccgccccctacccgacgtcgtccgccaaagaatagtcgaactcgcccaccaaggcgttcgaccctgcgacatcagccgccaactcagagtctcccacggctgcgtctccaaaatactaggccgctattacgaaaccggctcaatcaaacccggcgtcataggaggctccaaacccaaagtagcaacccccaaagtcgtcgagaaaatcgccgaatacaaacgccaaaacccaaccatgttcgcatgggaaatccgagaccgcctcctagcagaacgcgtatgcgacaacgataccgtaccctccgtttcctccataaaccgcatcatccgcaccaaagtccaacaaccacccaaccaacctgtacccgcctcatcccactcaatcgtctccaccggctccgtaacacaagtatcctccgtctcaacagactccgccggctcctcctactcaatctcaggcatactcggcatcacctcaccttcagccgacaccaacaaacgcaaacgcgacgaaggaatccaagaatcccccgtccccaacggccacagcctccccggacgcgacttcctacgcaaacagatgcgcggcgacctcttcacacaacaacaactcgaagtactcgaccgagtcttcgaacgccaacactactcagacatctttaccaccacggaaccaatcaaacccgaacaaacaaccgaatactcagcaatggcatccctcgccggcggcctcgacgacatgaaagccaacctagcctcacccaccccagccgatatcggatcctctgtccccggcccacaatcctaccccatcgtaacaggacgagacctcgcctccacaaccctaccaggctacccaccccacgtcccacccgccggccaaggctcctactccgcccccacactcactggaatggtccccgggtccgagttctccggatccccatactcccacccacaatactcatcatacaacgactcctggcgattccccaacccaggcctcctcggcagtccatactactactccgcagccgccagaggcgccgccccaccagccgccgccaccgcctacgaccgacactaa

SEQ ID NO: 4424 - RNA, 873 nt, synthetic construct
  misc_feature 1..873: note = AAF25807 variant
  source 1..873: mol_type = other RNA
atgcgcatcttcgcagtcttcatcttcatgacctactggcacctcctcaacgcattcaccgtcaccgtccccaaagacctctacgtagtcgaatacggaagcaacatgaccatcgaatgcaaattccccgttgagaaacaactcgacctcgctgccctaatcgtatactgggaaatggaagacaaaaacataatccaattcgtccacggcgaagaagacctcaaagtccaacactccagctaccgccaacgcgcccgactactcaaagaccagctctcactcggcaacgccgccctccaaatcacagacgtcaaactacaagacgccggcgtctaccgctgcatgatctcctacggcggcgccgactacaaacgaatcacggtcaaagtcaacgccccctacaacaaaatcaaccagcgcatactcgtcgtcgaccccgtaacatccgaacacgaactcacctgccaagccgaaggctaccccaaagccgaagtcatctggacctcctccgaccaccaagtcctctccggcaaaacaaccacaaccaactccaaacgcgaagaaaaactattcaacgtcacctcgaccctccgcatcaacaccaccaccaacgaaatcttctactgcaccttccgacgcctcgaccccgaagaaaaccacacagccgaactagtcatccccgaactccccctcgcccacccacccaacgaacgcactcacctagtcatactcggagccatcctcctatgcctcggagtcgcactaaccttcatcttccgactccgaaaaggccgaatgatggacgtcaaaaaatgcggcatccaggacaccaactcaaaaaaacaatcagacacacacctcgaagaaacctaa

SEQ ID NO: 4425 - RNA, 867 nt, synthetic construct
  misc_feature 1..867: note = AAH74740 variant
  source 1..867: mol_type = other RNA
atgcaaatcccccaagccccctggcccgtcgtctgggccgtactccaactcggttggcgccccggatggttcctcgactcccccgacagaccctggaaccccccaaccttctcccccgcactactcgttgtcaccgaaggcgacaacgccactttcacctgctccttctcaaacacatccgaatccttcgtcctcaactggtacagaatgtcaccatcaaaccaaaccgacaaactcgcagccttccccgaagaccgctctcaaccaggacaagactgccgcttccgcgtcacccaactacccaacggccgcgacttccacatgtccgtcgtccgcgcacgccgaaacgactccggcacctacctctgcggcgcaatctcgctcgcacccaaagcccaaatcaaagaatccctacgcgccgaactacgagtcaccgaacgccgcgccgaagtccccaccgcccacccctcaccctccccacgccccgccggccaattccaaacactcgtcgtcggcgtcgtcggcggcctcttaggatcactcgtcctactcgtctgggtactcgcagtcatctgctcccgcgccgcccgcggaaccatcggcgcacgccgcaccggacaaccactaaaagaagacccctccgcagtccccgtcttctccgtagactacggcgaactcgacttccaatggagagaaaaaacacccgaaccccccgtcccctgcgtccctgaacaaaccgaatacgccacaatcgtcttcccctccggcatgggaacatccagccccgcccgccgaggctccgcagacggaccccgctccgcccagcccctacgccccgaagacggccactgctcatggccactataa

SEQ ID NO: 4426 - RNA, 1008 nt, synthetic construct
  misc_feature 1..1008: note = AAC95296 variant
  source 1..1008: mol_type = other RNA
atgggctcggcatcacccggcctctcatccgtctccccatcccacctcctactcccacccgacactgtaagccgcacaggactcgaaaaagccgccgcaggcgccgtcggcctagaacgacgagactggtccccaagccctcccgcaacccccgaacaaggcctctccgcattctacctatcatacttcgacatgctctacccagaggactcctcatgggccgcaaaagcccccggagcctcctctagagaagaacccccagaagaaccagaacaatgccccgtaatcgactcccaagccccagccggaagcctcgacctagtccccggcggcctaaccctcgaagaacactccctagaacaagtccaatccatggtcgtaggcgaagtcctgaaagatatcgaaacagcctgcaaactactaaacataaccgccgacccaatggactggtccccctcaaacgtccaaaaatggctactctggaccgagcaccaataccgcctcccacccatgggcaaagccttccaagaactcgcaggcaaagaactctgcgccatgtccgaagaacaattccgccaacgctcacccctaggcggcgacgtcctccacgcccacctcgacatatggaaatccgccgcatggatgaaagaacgcaccagccccggagccatacactactgcgcctccacctcggaagaatcctggaccgactccgaagttgacagctcctgctcaggccagcccatccacctctggcaattcctaaaagaactcctccttaaaccccacagctatggccgattcatccgctggctcaacaaagaaaaaggaatattcaaaatagaagactccgcccaagtagcccgactctggggcatccgtaaaaaccgccccgccatgaactatgacaaactctccagaagcatacgccagtactacaagaaaggcatcatcagaaaaccagacatctcccaacgcctcgtctaccaattcgtccaccccatataa

SEQ ID NO: 4427 - RNA, 2217 nt, synthetic construct
  misc_feature 1..2217: note = AAA36429 variant
  source 1..2217: mol_type = other RNA
atgcagccaagatgggcccaaggtgcgaccatgtggctcggcgtcttactcaccctcctcctctgcagctccctggaagggcaggaaaactcctttaccatcaacagcgtcgacatgaaatcactccccgactggaccgtccaaaatgggaaaaacctaaccctccaatgcttcgccgacgtaagcactacatcccacgtaaagccgcaacatcaaatgctcttttacaaagacgacgtcctcttctacaacatctcctcgatgaaaagcacggaatcgtatttcatacctgaggtgagaatctacgactccggcacctacaaatgcaccgtaatcgtcaacaacaaagagaaaaccactgccgaataccaactcctcgtcgaaggtgtcccgtccccacgcgtcaccctcgacaagaaagaagcaatccaaggcggcatagtacgtgttaactgctcagtacccgaagaaaaagcccccatccacttcaccatcgaaaaactagaactcaacgaaaagatggtaaaacttaaaagagagaaaaactcccgcgaccaaaacttcgtaatactagagttcccagtcgaagaacaagaccgtgtcctcagcttccgatgccaagccagaataatcagcggcatccacatgcaaacgagcgaatccacaaaatccgagctagtcaccgtaaccgaatcattcagcaccccaaaattccacatctcaccaaccggaatgatcatggaaggagcacaattacacatcaaatgcacaatccaagtaacccacctagcccaagagttcccagaaataatcatccaaaaagacaaagcaatcgtcgcccataaccggcacggtaacaaagccgtctactccgtaatggccatggtagaacactccggtaactatacctgcaaagtcgagagctcccgtatcagcaaagtcagcagcatcgtcgtaaacatcaccgaactattctccaaaccagaactagaaagctcattcacccacctcgatcaaggcgaaagactcaacctctcatgttccatcccaggcgcccctcccgcaaacttcaccatccaaaaagaagacacaatagtctcccagacccaagactttacgaaaatcgcctccaaatccgacagcggaacctacatatgtaccgcaggcatcgacaaagtcgtcaagaaatccaacaccgtccaaatcgtagtgtgcgaaatgctgtcccaaccccgaattagctacgacgcccaattcgaagtcatcaaaggccaaaccattgaggtcagatgcgaatcgatctcaggtaccctacccatatcctaccaactactcaaaacgtccaaagtactcgaaaactcaaccaaaaacagtaacgacccggccgtattcaaagacaaccccacagaagacgtcgaataccaatgcgtcgccgacaactgccactcacacgccaaaatgctctcagaagtcctccgcgtgaaagtaatcgccccagtggacgaagtccaaatcagcatcctcagctccaaagtagtggaaagcggcgaggacatagtgctccaatgcgcagtaaatgagggctccggtccaatcacctacaaattctaccgagaaaaagaaggcaaacccttctaccaaatgacgagcaatgccacccaagccttctggacaaaacaaaaagcctccaaagagcaagaaggagaatactactgcacggccttcaaccgcgcaaaccatgcaagctccgtaccacgctcaaaaatcctcaccgtacgagtaatcctcgccccgtggaagaaaggactgatagcagtcgtcataatcggggtcatcatcgccctcctcatcatagccgcaaaatgttatttcctccgcaaagcgaaagcaaaacaaatgccagtcgaaatgtcacgacccgcggtccccctcctaaactcaaacaacgagaaaatgagcgatcccaacatggaagccaacagccactacggacacaacgatgacgtccgcaaccacgcaatgaaaccaataaacgacaacaaagaaccactcaactcagacgtccaatacactgaagtccaagtatcctccgccgaatcccacaaggacttaggcaagaaagacacagaaaccgtctactccgaagtccgcaaagccgtacccgacgccgtagagtccagatactcacgaactgaagggtctctcgacgggacctag

SEQ ID NO: 4428 - RNA, 2736 nt, synthetic construct
  misc_feature 1..2736: note = AAG23134 variant
  source 1..2736: mol_type = other RNA
atggcacaactcttcctaccgctcctagcagcgctcgtcctggcacaagcaccagccgccctcgccgacgtcttagaaggagactcgagcgaggaccgcgcattcagagttcgcatagcaggagacgcacccctgcaaggagtactcggaggcgcactaacgataccatgccatgtccactacctccggccacccccatcccgcagagccgtactcggaagccccagagtcaaatggaccttcctgtccaggggacgtgaagcagaggtcctcgtggccaggggagtccgagtaaaagtcaacgaagcatacaggttcagagtcgcactcccggcatacccagccagcttgaccgacgtgtcactagcactttcagaactgagacccaatgacagcggaatctaccgttgcgaagtacaacacggtatcgacgacagctccgacgcagtcgaagtcaaggtgaaaggcgtagtattcctctaccgcgagggctcagcacgatacgcgttttcattctccggagcccaagaggcctgcgcgcgaatcggcgcacacatagcaacacccgaacaactctacgcagcctaccttggcggatacgaacagtgcgacgcagggtggctttcagaccaaacagttcgctaccccatccaaaccccacgagaagcctgctacggcgacatggacggattccccggagtaaggaactacggcgtcgtcgaccccgatgacctgtacgacgtctattgctacgcagaggacctcaacggggaactattcttaggagatccaccagaaaaactcacactagaagaagctcgcgcctactgccaggaacggggcgcagaaatcgccaccacaggacaactatacgcagcatgggacgggggactcgaccactgctcacccggatggctcgcagacggatccgtacgatatcccatcgtaaccccctcgcaacgatgcggcggcggactgccaggtgtaaaaacactcttcttattcccaaaccagacaggattcccaaacaagcacagccgcttcaacgtctactgctttagagacagcgcccagccaagcgcaataccagaagccagcaacccagcaagcaacccggcatccgacggactagaagcgattgtgaccgtcacagagaccttagaagaactacaactcccacaagaagccacagagtcagaatcacgaggggccatatactcgatccccataatggaggacggaggaggaggaagctccacccccgaagacccagcagaagcaccccgcaccctcctagagttcgaaacacaaagcatggtcccacccacgggattctcagaagaagagggaaaagcgctagaagaagaggagaaatatgaagacgaagaagaaaaagaagaagaggaagaagaagaagaagtcgaagacgaagcactgtgggcatggccgtcagaactctcgagtccaggaccggaagctagcctacccacagaacctgcagcacaagaggaatcactatctcaggcccccgccagagccgtcctacagcccggcgccagccccctacccgacggcgaaagcgaagcaagcagacccccgcgcgtacacggaccacccaccgaaacactccccacacctcgagaaagaaaccttgcctcaccatccccctcaaccctcgttgaggcccgagaagtaggagaagcaaccggaggtcccgagctaagcggcgtaccgcggggagaaagcgaggagacaggctcgtcagaaggcgcgccatcgctcctgccggccacaagagccccagaaggaacacgcgaactcgaagcacccagtgaagataacagtgggcgaacagcgccagccggcacaagcgtacaagcacaaccggtcctgcccaccgactcagcctccagaggaggagtcgccgtagtaccagccagcggtgactgcgtgcccagcccatgccacaacggaggaacttgcctcgaagaagaagaaggagtacggtgcctatgcctcccaggttacgggggcgacctctgcgacgtaggcctccgattctgcaatccaggatgggacgccttccaaggcgcctgctataaacacttcagcactcggcgcagctgggaagaggcagaaacacaatgcagaatgtacggagcacacctagcgtccatctccacccccgaagaacaagacttcataaacaatagataccgagaataccagtggataggtttaaacgaccgaaccatcgaaggggacttcctttggtcggacggtgtacccctcctatacgaaaactggaacccaggacaaccagacagctacttcctaagcggcgaaaactgcgtcgttatggtatggcacgaccagggacaatggagtgacgttccttgcaactaccacctcagctatacctgcaagatggggttggtatcatgcggaccacctcccgagctacccctggcacaagtattcggccgaccccgactacgatacgaggtcgacaccgtcctcaggtacagatgtagagaaggactagcccaacgcaacctcccactaattcgctgtcaagaaaatggccgctgggaagcaccccagatcagctgcgtcccccgtcggcccgcccgagcgctccaccccgaagaagacccagaaggcaggcaaggccgactactcggacgatggaaagcactactcataccaccaagctcaccgatgccaggcccctga

SEQ ID NO: 4429 - RNA, 3321 nt, synthetic construct
  misc_feature 1..3321: note = AAA60049 variant
  source 1..3321: mol_type = other RNA
atgcgcttaccaggtgccatgccagctcttgccctaaaaggcgagctattactactcagccttcttctcctactcgaaccccaaatatcgcaaggcctcgttgtcaccccgcccggtcccgagctagtcctaaacgtatcctccacattcgtcctaacctgctccggcagtgcccccgtagtctgggaacgcatgtcccaggaacctccccaagaaatggcaaaagcacaagacggcacattctcatccgtcctcacacttacaaacctcactggactcgacaccggagaatacttctgcacccacaacgactcccgcgggctagagaccgatgaacgcaaacgcctatacatctttgtgcccgacccaacagtcggattcctccccaatgatgccgaggaactattcatcttcctaacagaaatcaccgaaatcactatcccctgccgagtcacggatccccaactcgtagtaacactacatgagaaaaagggagacgttgcattaccagtaccctacgaccaccagcgcggcttcagcgggatcttcgaagaccgtagctacatctgtaaaacgaccatcggcgaccgcgaagtagatagcgacgcctactacgtctaccgactccaagtttcatcaatcaacgtctccgtcaacgccgtacaaaccgtagtacgacagggcgaaaacataacgctaatgtgcatcgtaatcggcaacgaagttgtaaacttcgaatggacctacccacgaaaagaaagtggccgactcgtcgagcccgtcaccgacttccttttagacatgccataccacataagatcgatactacacatcccctctgcggagcttgaagactcaggcacctacacctgtaacgtaaccgaatccgtcaacgaccaccaagatgaaaaagccattaacatcaccgtcgtcgagagcggctacgtacgcctcctcggcgaagtgggcaccctacaattcgcagaactccaccgctcccgcacactccaagtagtctttgaagcctatcccccacccacagtcctttggttcaaagacaaccgcacacttggagactcctccgccggagagattgcgctaagcacccggaacgtgtcggaaacgaggtacgtctccgaactcacgctggtacgcgttaaagtagccgaagccggacactacacaatgcgcgcatttcacgaggatgccgaagtccaactctcgttccaactccaaatcaatgtccccgtccgagtcctagagctcagcgagtctcaccccgacagcggtgaacagaccgtacgctgccgaggaagagggatgccccaacccaacatcatttggtccgcgtgccgcgacctcaaacgatgccctcgagaactacctcccaccctcctaggtaactcctccgaggaagaatctcaactagaaacgaacgtaacgtactgggaagaagaacaggagttcgaagtggtatcaaccctacgtctacagcacgtagaccgccccctgagcgtccgatgtaccctccgcaatgccgtaggccaagatactcaagaagtcatagtcgtcccccacagtttaccgttcaaagtagtagtcatctccgcaatactggcactcgtcgtgctaacaataatatccctcattatcctcatcatgctttggcaaaagaaaccccgctacgaaatccgatggaaagtcatcgaaagcgtctcttctgacggacacgaatacatctacgtcgacccaatgcaacttccatacgactccacctgggaattaccccgcgatcagctagtcctcggccgcacactaggctctggtgcgttcggacaagtcgtcgaagcgactgcacatggcctctcacactcccaagccacaatgaaagttgccgtcaaaatgctaaaatccaccgcccgatcctcggaaaaacaggccctcatgagcgaactaaaaataatgtcccacctcggccctcatctaaatgtcgtaaacctcctcggcgcctgtaccaaaggcggaccaatctacatcatcacagaatattgccgctatggcgacctagtcgactacctccaccgaaacaaacatactttcctacaacaccatagcgacaagcgacgacccccatccgcagaactctactccaacgcgctgccagtcggacttcccctgccatcgcatgtctctttaacaggagaatccgacggaggctacatggacatgtcaaaagatgaatctgtagattatgttcccatgctcgacatgaagggtgatgtcaagtatgctgacatcgaaagctctaactacatggccccgtacgacaattacgtgccatccgcccccgaaagaacatgccgcgccacccttatcaacgaatcccctgtgctctcctacatggacctagtcggtttctcataccaagtcgccaacggcatggagttcctagcctccaaaaactgcgtgcacagagacctcgcggcccgcaacgtactaatatgcgaaggcaagctagtgaaaatctgcgacttcggactcgcccgcgacataatgcgtgactcaaactacatctcaaaaggctcaacgttcctaccactcaaatggatggcaccggaaagcatcttcaactccctatacacaacactcagcgatgtctggagcttcggcatcctgctctgggaaatctttaccctaggcggcacgccctaccccgagctccccatgaacgaacagttctataacgccataaaacgcggctaccgcatggctcaaccggcccacgcatccgacgaaatctatgaaatcatgcaaaagtgttgggaagaaaagtttgagataagaccaccattctcgcaactcgtactcctactagagcgtctgctcggagaaggctacaaaaagaaataccaacaagtggacgaagaatttctccgaagtgaccaccccgcgatcctccgcagccaagcacgattaccaggattccacggcctccgcagcccactcgacacatcatcagtcctctacaccgccgtgcaaccaaacgagggggataacgactatatcatcccgctacccgatccgaaacccgaagtcgcagacgaggggcccctcgaaggctccccctccctcgcgtcatcaacactaaacgaggtaaacacatcatccacgatctcgtgcgactcaccactcgaaccccaagatgaacccgagccagaaccacaactagaactccaagtcgagcccgaacccgaactcgaacaactccctgatagcggctgcccagcgccccgcgccgaagccgaggattcattcctctaa

SEQ ID NO: 4430 - RNA, 942 nt, synthetic construct
  misc_feature 1..942: note = EAX03935 variant
  source 1..942: mol_type = other RNA
atgctactctcaaaaatcaactccctcgcccaccttcgcgccgccccatgcaacgacctccacgccacaaaactcgcccccggcaaagaaaaagaaccactcgaatcccaataccaagtcggcccactcctcggctcaggcggattcggctccgtctactcaggcatacgagtctccgacaacctccccgtagccatcaaacacgtagaaaaagaccgcatctccgactggggcgaactccccaacggaacccgagtgccaatggaagtcgtcctcctcaagaaagtatcctctggcttctccggcgtcatccgcctcctcgattggttcgaacgccccgactccttcgtcctcatcctcgaacgcccagaacccgtccaagacctcttcgacttcatcaccgaacgaggcgccctccaagaagaactagcacgctccttcttctggcaagtcctcgaagccgtccgccactgccacaactgcggcgtactccaccgcgacataaaagacgaaaacatcctcatcgacctaaaccgcggcgaactcaaactcatcgacttcggctcaggagccctacttaaagacacagtctacaccgatttcgacggcacccgagtctactcaccacccgaatggatccgctaccaccgctaccacggcagatccgccgcagtctggtcactaggcatcctactatacgacatggtctgcggagacatccccttcgaacacgacgaagaaatcatccgaggccaagtcttcttccgacaaagagtctcctccgaatgccaacacctcatccgctggtgcctcgccctccgcccatcagaccgacccacgttcgaagaaatccaaaaccacccctggatgcaagacgtcctcctcccccaagaaaccgccgaaatccacctccactccctctcgcccggcccctccaaataa

SEQ ID NO: 4431 - RNA, 303 nt, synthetic construct
  misc_feature 1..303: note = AAB81333 variant
  source 1..303: mol_type = other RNA
atggccgatgaagagaaattgcccccgggctgggaaaagcgcatgagcaggccctcgggcaggggctattactttaaccatatcacgaacccgagccagtgggagcgaccgagcgggaactcgagctcgggcgggaaaatatggcagggcgagcccgcgcgcgtgcgcaggagccatctcttggtcaagcccgtgaaagcggccttggacttggccgcgggcaatcacccggaccagggcgggggcccgggcgcggaccagcgcttgcacccggaagatcaagggcgcagggaagggctctag

SEQ ID NO: 4432 - RNA, 492 nt, synthetic construct
  misc_feature 1..492: note = AAC50492 variant
  source 1..492: mol_type = other RNA
atggccgatgaagagaaactgccaccgggctgggaaaagcgaatgagcaggagctcaggcagggtctattactttaaccatatcacgaacgcgagccagtgggagcgcccgagcgggaactcgagctcaggcgggaaaaatggccagggcgagcccgcgcgcgtgcgctgtagccatctcttggtcaagcactcgcaatcacgaaggccctcgagctggcgccaggaaaagatcacgcgcacgaaagaggaagcgctcgagctcataaacgggtacatacaaaagatcaagagcggggaagaggactttgaatcgctcgcgagccagttctcggactgtagctcggccaaggcccggggcgatctcggggcctttagcaggggccagatgcagaaaccgttcgaggacgcgagctttgccctgcgcacgggcgagatgtcgggcccggtctttaccgatagtgggatccatatcatactcaggaccgagtga

SEQ ID NO: 4433 - RNA, 138 nt, synthetic construct
  misc_feature 1..138: note = AAH31971 variant
  source 1..138: mol_type = other RNA
atgcaaaaacccttcgaagacgcctccttcgccctccgcaccggcgaaatgtccggccccgtcttcaccgactccggcatccacatcatcctccgcaccgaatgctggcgccaaacccgcggccccaactgcttctaa

SEQ ID NO: 4434 - RNA, 639 nt, synthetic construct
  misc_feature 1..639: note = AAG22596 variant
  source 1..639: mol_type = other RNA
atgaaagtattcaaattcatcggactcatgatcctcctcacctccgccttctccgccggctccggccaatcccccatgaccgtcctctgctccatcgactggttcatggtcaccgtccaccccttcatgctcaacaacgacgtctgcgtccacttccacgaactccacctcggcctaggctgcccccccaaccacgtccaaccccacgcctaccaattcacctaccgcgtcacagaatgcggcatccgcgccaaagccgtctcccaagacatggtcatctactccaccgaaatacactactcctccaaaggcacccccagcaaattcgtcatccccgtctcatgcgccgccccccaaaaatcaccctggctcaccaaaccctgctccatgcgcgtagcctccaaatcccgagccaccgcccaaaaagacgaaaaatgctacgaagtcttctccctctcccaatcctcacaacgccccaactgcgactgccccccctgcgtcttctccgaagaagaacacacccaagtcccctgccaccaagccggcgcccaagaagcccaacccctacaaccctcacacttcctcgacatctccgaagactggtccctacacaccgacgacatgatcggctccatgtaa

SEQ ID NO: 4435 - RNA, 1986 nt, synthetic construct
  misc_feature 1..1986: note = AAB00386 variant
  source 1..1986: mol_type = other RNA
atggacctcgtcttaaaacgctgtctcctccacctcgctgtcatcggcgcactacttgccgtaggcgccaccaaggtaccacgcaaccaagattggctcggagtttcccgacaactacgcacaaaagcctggaaccgccaactctaccccgaatggacagaagcacaaagactcgactgctggagaggcggccaggtctctctgaaagtttcaaacgacggtcccacactaatcggcgccaacgcatccttctcaatcgcactcaatttccccggctcccaaaaagtcctccccgacggacaagtcatctgggtaaataacaccatcatcaacggatcccaagtctggggcggacaaccagtctacccacaagaaacggacgacgcatgcatcttcccagacggtggcccatgcccatctggctcatggagccaaaaacgttcattcgtatacgtatggaaaacctggggacaatactggcaagtactcggcggcccagtctccggtctctcaataggcacgggccgggcaatgctaggcacccacacaatggaggtaaccgtctaccaccgaagaggctcacggtcctatgtaccactcgcacacagttcatcagcattcacaataacagaccaagttccattttctgttagcgtctcacaactccgagccctcgacggtggcaacaaacacttcctcaggaaccaaccacttactttcgcactacaactacacgacccaagcggatacctcgccgaagccgacctaagctatacctgggacttcggcgatagctccgggacactcatatcaagagccctcgtagtcacacacacctacctagagcccggaccagtcaccgctcaagtcgttctccaagccgcaataccgctgacatcgtgcggaagctcgcctgtacccggcacaactgacggccaccgacccaccgccgaagcccccaacaccaccgccggccaggtccccaccacagaggtcgtcggcaccacccccggacaagctcccaccgctgaaccatccggcaccacctcagtgcaagtaccaaccaccgaagtaatctctaccgcacccgtccagatgcccacagctgaatcaactggcatgacccccgaaaaggtccccgtaagcgaagtcatgggtaccacgctcgccgaaatgtcaacgccagaagccacgggcatgaccccagccgaagtctcaatagttgtcctcagcggaacaaccgccgcacaagtcaccaccacagaatgggtcgaaactaccgcgagagaactacccatacccgaacccgaaggaccagacgcatccagcataatgtccacagagtccataaccgggagcctcggccccctcctagacggtaccgcaaccctccgcctcgtaaaacgccaagtgcctcttgactgcgtactctaccgctacggatcattcagtgtaacgcttgacatcgtacaaggaatagaatccgccgaaatactccaagccgtaccatccggagaaggcgatgcattcgaactcaccgtttcatgccagggcggcctccccaaagaagcatgcatggaaatctcctcccccggctgccaaccacccgcccaacgcctctgtcaaccagtgctaccgtcacccgcctgccaactggtccttcaccaaatcctcaaaggtggttcaggcacatactgcctcaacgtatccctagctgacaccaactccctagcagtagtctccacacagctcatcatgcccggccaagaagccggcctaggccaagtccccctaatagtcggcattctcctagtcctcatggccgtagtcctggcatcccttatataccgcagacgcctcatgaaacaggacttctccgtcccacaactaccccactcatccagtcactggctacgactccccagaatcttctgcagctgccccattggagaaaatagccccctcctatccggacaacaagtttga

SEQ ID NO: 4436 - RNA, 2649 nt, synthetic construct
  misc_feature 1..2649: note = CCDS10255.1 variant
  source 1..2649: mol_type = other RNA
atggaacccgcccccgcacgctcccctcgcccccaacaagatcctgcccgcccccaagaacccaccatgccaccacccgaaacaccctcagaaggccgacaaccctccccctcccccagccccacagaacgcgctcccgcctcggaagaggaatttcaatttctgcgatgccaacaatgtcaagcagaagccaaatgtcctaagctcctaccgtgcctgcacaccttatgttccggctgcctcgaggcttcaggaatgcagtgcccaatatgccaggcaccatggcccctgggagccgacacccctgcactcgacaacgttttctttgaatcactacaacgccgcttaagcgtatacagacaaatcgtagacgcacaagcagtatgcacaagatgcaaagagagcgccgacttctggtgcttcgaatgcgaacaactcctatgcgccaaatgcttcgaagcacaccaatggttcctaaaacacgaagcccgacccctcgcagaactcagaaaccagtccgtccgagagttcctggacggaacacgaaaaaccaacaacattttctgctccaatcccaaccaccgaactccgacactaacatccatctattgcagaggctgttctaaaccactctgttgctcgtgcgccctcctcgactcttcgcattcagaactcaaatgcgatatctcagccgaaatacaacagagacaagaagaactcgacgccatgactcaagccctccaagaacaagactccgccttcggcgccgtgcatgcacaaatgcacgccgccgtcggccaactaggccgcgcccgcgccgaaacagaagaactcatacgcgaacgcgtacgacaagttgtagcccacgtccgcgcccaagaacgcgaactgctagaagcagtcgacgctaggtaccaaagagactatgaagaaatggcatcacgccttggccgcctggacgctgtcctacaaaggattcgcaccggctccgcccttgtccaaagaatgaaatgctatgcctccgaccaagaagtcctcgacatgcacggcttcctccgacaagccctctgtcgactccgacaggaagaaccccaaagcctacaggccgccgtgcgcaccgacggcttcgatgagttcaaagttcgactgcaggacctatcctcctgcatcacacaaggcaaagacgctgccgtctccaagaaagcatccccggaagccgcctcaacaccacgagatccaatcgacgttgatctcccagaagaagccgaacgcgtaaaagcacaggtccaggccctaggcctagccgaagcccagcccatggctgtagtccagtccgtaccgggggcacacccggtcccggtctacgcgttctcaattaaaggcccatcatatggcgaagacgtctctaacacgaccaccgctcaaaaacgaaaatgcagccaaactcaatgcccccgtaaagtaataaaaatggaaagcgaagaaggaaaagaggccaggctagcccgctccagcccagaacaacccagaccctcaacatcaaaagccgtatcgccgccccacctcgacggacccccatcacctagaagcccagttatcggttccgaggtcttcctgcccaactcaaaccacgtcgcaagcggagccggcgaagccgaggaaagagtcgtcgtaataagcagctcagaggactctgacgcagaaaacagcagctcccgcgaactagacgactcatcatccgaatcaagcgacctccaactcgaaggcccctcaacactaagagtcctggacgaaaacctggccgatccccaagcggaagaccgccccctagttttcttcgacctgaaaattgacaacgaaacccagaaaatctcccaactcgccgcagtaaaccgagaatcaaaattccgcgttgtcatccaacccgaggctttcttcagcatctactccaaagccgtctcactcgaagtcggccttcaacacttcctatcgttcctatcctcaatgcgccgaccaatcctagcctgctacaaactgtggggaccaggactgcccaacttcttccgagcactcgaagacataaaccgactctgggagttccaagaagcaatctcaggtttcctcgcggccctcccactcatccgcgaacgtgtaccaggcgcatccagcttcaaattgaaaaacctcgcacaaacatacctcgcccgtaacatgtcggaaagatctgcaatggccgccgtcctggcgatgcgagacttgtgtcgcctgttagaagtcagcccgggcccacaactcgcacaacacgtctaccccttctcttcactacaatgcttcgccagcctccaaccactggtacaagcagctgtccttcctagagctgaagctcgcctactcgcccttcacaacgtctccttcatggaactgctgtccgctcaccgccgagaccgccaaggcggactcaaaaagtactccagatacctctcactacaaactaccacactcccaccagctcaacctgcattcaacctacaagccctaggcacgtacttcgaaggacttctcgaaggacctgctctagccagagccgaaggagtatcaaccccactagcaggaagaggcctcgccgaacgcgccagccaacaatcgtag

SEQ ID NO: 4437 - RNA, 3228 nt, synthetic construct
  misc_feature 1..3228: note = CCDS46409.1 variant
  source 1..3228: mol_type = other RNA
atggttgtagaagtcgatagcatgcccgccgcatcctccgtaaagaagccatttggacttagaagtaaaatgggcaaatggtgctgccgctgcttcccatgctgccgcgaatcaggtaagagcaacgtggggacctcaggcgatcacgacgattccgcaatgaaaacgctacggagcaaaatgggcaaatggtgcaggcactgctttccctgctgcaggggatccggaaaaagtaacgtcggcgcatccggcgaccatgacgacagtgcaatgaagacactaagaaacaaaatggggaaatggtgctgtcactgttttccatgttgccgaggctccagtaagtcaaaagtaggcgcttggggagactacgacgactcagctttcatggaaccacgatatcatgtccgaggagaagacctcgataaactacacagagcagcgtggtggggaaaagtaccacgcaaggacctaatcgtcatgttgcgcgacacagacgttaacaaacaggacaaacagaagagaaccgcacttcacctggccagcgccaacggaaattccgaagtcgtaaaacttcttttagaccgacgctgccaactaaacgtcctagataacaaaaagcggaccgcgctaatcaaggcagtacaatgccaagaagacgaatgcgccctcatgctcctcgaacacgggaccgaccccaacatccccgacgaatacgggaacaccacgctccactacgcaatatacaacgaagacaaacttatggcaaaagcactcctactctacggagcggacatcgaaagcaaaaacaagcacggactaacacccctcttactcggtgtccacgaacaaaaacaacaagtcgtaaaattcctgatcaaaaagaaagccaacctcaatgccctggaccgttacgggcgcaccgccctaatactcgcagtatgttgcggctcagcctctatagtatcgctactcctagaacagaacatagacgtaagcagccaagacctatcagggcaaacagcacgtgaatatgcagtatccagccaccaccacgtaatctgccaactactaagcgactacaaagaaaaacaaatgctgaagattagctctgaaaactccaacccagaacaggacctaaaactgacctccgaagaagagagccaacgcttcaaaggcagcgaaaacagccaaccagagaaaatgtcccaggaacccgaaataaacaaagacggagaccgagaagtcgaagaagagatgaagaaacacgagtccaacaacgtgggactgctagaaaacctcaccaacggagtgacggcaggcaatggcgacaacggcctcataccccaacgaaaaagcagaacaccggaaaaccaacaattccccgacaacgaatcggaggaataccacagaatctgcgaactactgagcgactacaaagagaaacaaatgcctaaatactccagcgagaactccaatccagaacaggacctaaagctcacttcagaagaagaaagccaacgattaaaaggaagtgaaaacggccagcccgagaaaaggagccaagaacccgaaatcaacaaggacggagaccgcgagctagagaacttcatggcaatagaagaaatgaagaaacaccgctccacccacgtagggttccccgagaacctcaccaacggagcgaccgctggaaacggagacgacggcctaatcccaccaaggaaaagtagaacccccgaatcccagcaattcccagatacggaaaatgaagaataccactccgacgaacaaaacgatacacagaaacaattctgcgaagaacaaaacactggtatactacacgacgagatccttatacatgaggaaaaacagatcgaagtagtcgagaaaatgaactcagaactcagtctatcctgcaagaaagaaaaagacatactccacgaaaattccaccttacgcgaggaaatcgctatgctccgtctggagctagacaccatgaaacaccaaagtcaactgcgggaaaagaaatacctggaagacatcgagtcagtaaagaaacgcaacgacaacctactcaaagccctccaactaaacgaactcaccatggacgacgacacggctgtactcgtaatcgacaatggaagcggaatgtgcaaagcagggttcgccggagacgacgctccccgagcagtgttcccatcaatagtcggaagacccaggcaacaggggatgatgggcggcatgcaccaaaaagagagctacgtcggcaaagaagcccagagcaaacgggggatcctcaccctcaaatacccaatggaacacggcatcataacaaactgggatgatatggaaaagatctggcaccacacattctacaacgaactacgcgtcgccccggaggaacatcctgtgctccttaccgaagccacactcaatcccaaagcaaatagagagaaaatgacacaaatcatgttcgaaaccttcaacacacccgccatgtacgtggcaatccaagcagtcctatcactctacacctccggccggacaacaggcatagtcatggactcaggcgacggagtaacacacacagtcccgatatacgaaggaaacgccctgccacacgccacactacgtctggacttagccggacgagaactaccagactacctcatgaaaatattgacagagcacgggtaccggtttactacaatggcggaacgggagatcgtacgagacatcaaagaaaaactctgctacgtcgcattagatttcgagcaagagatggcaaccgtggcgagctcatcaagcctagagaaaagctacgaactccctgacggacaagtgataacgataggcaacgaaaggttccgatgcccagaagcactgttccagccttgcttcctcggcatggaatcatgcggaatacacgagaccaccttcaacagcatcatgaaaagcgacgtggacataagaaaagacctatacaccaacaccgtactatccggcggtactacaatgtaccccggaatggcccaccgaatgcagaaagaaatagctgccctcgcacccagcatgatgaaaataagaataatcgccccgcccaaacgtaaatacagcgtctgggtaggaggaagtatactcgcatcactttcgacgttccagcaaatgtggatatcaaaacaagagtacgacgaatcgggcccctccatcgtacaccgcaaatgtctttaa

SEQ ID NO: 4438 - RNA, 1755 nt, synthetic construct
  misc_feature 1..1755: note = CCDS13562.1 variant
  source 1..1755: mol_type = other RNA
atggtagcagaagtgtgctcaatgcccactgcatccaccgtgaagaagcccttcgacctccgaagcaaaatgggaaagtggtgccaccacagattcccctgctgcaggggatcagggaaaagcaacatgggaacctcaggcgaccacgacgactccttcatgaaaatgctaagaagcaaaatgggaaaatgctgcagacactgcttcccatgctgccgaggctccgggaccagcaacgtaggcacgagcggcgaccacgaaaactccttcatgaaaatgctccgctcgaaaatgggcaaatggtgctgccactgcttcccctgctgccgaggaagcggaaaatcaaacgtcggggcatggggagactacgatcacagcgccttcatggaaccccgatatcacatacgacgcgaagacctcgacaaactccaccgcgccgcctggtggggcaaagtaccacgaaaggacctcattgtcatgctgcgcgacaccgatatgaacaagcgcgacaaagaaaaacgaacagcactccatctcgccagtgcaaacggaaattccgaagtggtccaactactattagaccgaagatgccaactcaacgtcctagacaacaagaaacgcacggcactcatcaaagcaatacaatgccaagaagacgaatgcgtactaatgctactcgaacacggagccgacagaaacatacccgacgaatacgggaataccgcactccactacgctatatacaacgaagacaaactcatggccaaggcattgctcctctacggcgcagacatcgaatccaaaaacaaatgcggcctaacacccttactgctcggcgtccacgagcaaaaacaacaagtcgtaaaattcctcattaagaagaaagccaacctgaacgtactagaccgctacggcagaaccgcactcatccttgccgtctgctgcggctcagcatccatagtaaacctactactcgagcaaaacgtagacgtatcaagtcaggacctaagcggacaaaccgctagagaatacgcagtaagcagccaccaccacgtcatatgcgaactactatccgactacaaagagaaacaaatgctgaaaatcagcagcgaaaacagcaaccccgaacaagacctcaagctcacaagcgaagaagaaagtcaacgactgaaagtgagcgaaaactcgcaaccagagaagatgagccaggaacccgaaatcaacaaagactgcgaccgcgaggtagaagaagaaatcaagaaacacggcagcaaccccgtcggcctcccagagaacctaacaaacggagcctcagcaggaaacggcgacgacggcctaataccacaacgccgctcaagaaaacccgaaaaccaacaattcccagacaccgagaacgaagaataccacagcgacgaacagaatgacacacgcaaacaactgagcgaagaacagaacacgggcatcagccaagacgagatcctaacgaacaaacaaaaacaaatagaagtcgcagaacagaaaatgaacagcgaactatcactaagccacaagaaagaagaagacctcctacgcgagaactccgtactccaagaagaaatcgccatgctacgactcgaactggacgaaaccaaacaccaaaaccagctcagagaaaacaaaatactcgaagaaatagagagcgtaaaagagaaaaccgacaaactactaagagcgatgcaactaaacgaagaagccctcaccaaaacaaacatataa

SEQ ID NO: 4439 - RNA, 1530 nt, synthetic construct
  misc_feature 1..1530: note = EAW59519 variant
  source 1..1530: mol_type = other RNA
atggaacgccgccgactctggggctcaattcaatcacgatacatctccatgtccgtctggacgtcaccacgcagactcgttgaactcgccggccaatccctcctcaaagacgaagccctagctatcgccgccctcgaactcctcccccgagaactcttccctcccctcttcatggccgccttcgatggccgtcactctcagactctaaaagcaatggtccaggcatggccatttacctgcctcccactaggagttctcatgaaaggacaacaccttcatctcgaaaccttcaaagcagtcctcgacggcctcgacgttcttctcgcccaggaagtccgccctcgacgctggaaactacaagtccttgacctccgcaaaaacagccaccaagacttctggaccgtctggtccggtaatagagcatccctctactccttcccagaacctgaggccgcccaacccatgaccaagaaaagaaaagtcgatggactttccactgaagccgaacaacccttcatccccgtcgaagtcctagtcgacctcttcctcaaagaaggcgcctgcgatgaactcttcagctacctcatcgaaaaagtcaaacggaaaaagaacgtcctacgactctgttgcaagaaacttaaaatcttcgccatgcccatgcaagacatcaaaatgatcctcaaaatggtccagcttgactccatagaagacttagaagtaacctgtacatggaaactccccacactcgcaaaattctccccatacctcggccaaatgatcaatctccgccgcctcctcctctcacacatccacgcctcctcctacatatcacccgaaaaagaagaacaatacatcgcccaattcacctctcaattcctctccctacaatgcctccaggccctatatgtcgactccctattcttccttcgcggccggctggaccaactccttcgacacgtcatgaaccccctcgaaactctttccatcactaactgccgtctatcagaaggagacgtcatgcacctatcacaatccccctcagtctcccaactcagcgtactatccctctccggcgtaatgctaaccgacgtctcccccgagcccctacaagccctactcgaacgagcatccgcaacactccaagacctcgtattcgacgaatgcggcataacagacgaccaactcctagccctactcccctccctctcacactgctcccaacttactaccctctccttctacggcaactccatttctatctccgccctccaatccctcctccaacacctcatcggtctctcaaacctcacccacgtcctataccccgtacccttagaatcatacgaagacatacacggcacccttcacctcgaacgcctagcttacctccacgcccgactacgcgagctcctatgtgaactaggacgcccttctatggtctggctctcggccaacccctgcccccactgcggcgaccgaaccttctacgaccccgaacccatcctctgcccctgcttcatgcccaactag

SEQ ID NO: 4440 - RNA, 1530 nt, synthetic construct
  misc_feature 1..1530: note = AAC51160 variant
  source 1..1530: mol_type = other RNA
atggaacgccgccgcctctgggggtccatccaatcccgctacatcagcatgtccgtctggacctcaccccgccgactcgtcgaactcgccggacaatccctcctcaaggacgaagccctggccatcgctgcacttgaactcctcccccgcgaactattcccacccctcttcatggccgcgttcgacgggcgacattcccaaacgcttaaagccatggtccaagcctggccctttacctgcctccccctaggcgtcctcatgaaaggccaacaccttcacctagaaactttcaaagccgtcctcgacggtcttgacgtcctcctagcacaagaagtccgaccccgacgctggaaactccaagtactcgacctccgcaaaaattcacaccaagacttctggacagtctggtccggaaaccgtgcatcactctactctttccccgaacccgaagccgcccagcccatgaccaagaaacgaaaagtcgacggcctctcgaccgaagcagaacaacccttcatccccgtcgaagtactcgtcgacctcttcctcaaagaaggcgcctgcgacgaactattctcctacctcatcgaaaaagtcaaaagaaagaaaaacgtcctacgcctctgctgcaagaaactgaaaatattcgcaatgcccatgcaggacatcaaaatgatcctcaaaatggtacaactcgactctattgaagacctagaggtcacatgcacctggaaactacccaccctagccaaattctcaccctacctaggccaaatgatcaacctccgccgcctcctcctatcacatatccacgcatcttcctacatctcacccgaaaaagaagaacaatacatcgcccaattcacctcccaattcctaagcctccaatgtctccaagccctatacgtcgacagcctattctttctacgcggccgcctcgaccaactccttcgccacgttatgaaccctctcgaaaccctatccatcaccaactgccgcctctccgaaggcgacgtaatgcacctatcccaatccccctccgtctcacaactctccgtcctctccctatctggcgtcatgctcaccgacgtctcccccgaaccccttcaagccctactagaacgcgcatccgcaaccctccaagacctcgtcttcgacgaatgcggcataacagacgatcaactcctcgccctacttccctccttatctcactgctcccaactcaccactctatccttctatggcaactcaatctcaatctcagccctccaatctctcctacaacacctcatcggcctatcaaacctaacccacgtcctctaccccgtaccactcgaatcctacgaagatatccatggaacccttcacctggaacgcctcgcctacctccacgcacgcctacgcgagctcctatgtgagctcggtcgcccttcaatggtctggctctccgctaacccatgcccccactgcggagaccgcacattctacgaccctgaacccatcctatgcccctgtttcatgcccaactaa

SEQ ID NO: 4441 - RNA, 645 nt, synthetic construct
  misc_feature 1..645: note = CCDS8069.1 variant
  source 1..645: mol_type = other RNA
atggggctggcgggggtatgtgcgttgaggaggagtgcggggtatatattggtagggggagcgggagggcagagcgcggcggcggcggcgaggagatatagcgagggggaatgggcgagtggaggggtgaggagctttagtagggcggcggcggcaatggcgccgataaaagtgggggatgcaataccagcggtggaggtgtttgaaggggagccggggaataaggtgaacttggcggagctgtttaaggggaagaagggggtgctgtttggggtgccgggggcgtttacgccggggtgtagcaagacacatttgccgggatttgtggagcaggcggaggcgctgaaggcgaagggagtacaggtggtggcgtgtctgagcgtaaatgatgcgtttgtgacgggagagtgggggagagcgcacaaggcggaggggaaggtgagattgttggcagatccgacgggagcgtttgggaaggagacggatttgttactggatgatagtttggtgagtatattcggaaacaggaggttgaagaggtttagtatggtggtgcaggacgggatagtgaaggcactgaatgtggagccggatgggacggggttgacgtgtagcctggcgccaaatataataagccagctgtga

SEQ ID NO: 4442 - RNA, 309 nt, synthetic construct
  misc_feature 1..309: note = AAA63250 variant
  source 1..309: mol_type = other RNA
atggtcaggtacagggtccgcagcttgagcgagagatcgcacgaggtctatcgccagcaattgcacgggcaagagcaagggcaccatggccaggaggaacaagggctctcgcccgagcacgtggaagtgtacgagcgcacgcacgggcaatcgcactatcgcaggcgccattgctcgcgcaggcgcttgcacaggatccatcgcaggcaacatcgctcgtgcaggcgcaggaaaaggcgctcgtgcaggcacaggcgcaggcacaggcgcgggtgcaggaccaggaaaaggacctgtcgcaggcactag

SEQ ID NO: 4443 - RNA, 1662 nt, synthetic construct
  misc_feature 1..1662: note = AAH50416 variant
  source 1..1662: mol_type = other RNA
atggtacaacgactatgggtatcccgcctacttcgccaccgaaaggcccaacttctcctagtcaatctactaaccttcggactcgaagtctgtcttgcagccggcatcacctacgtccctcccctcctcctagaagtcggcgtagaagaaaaattcatgactatggtccttggtataggacccgtcctaggacttgtctgtgtccccctcctaggctccgcttccgaccactggcggggtcgctatggtcgtcgccgccccttcatttgggccctttcccttggaatcctactctccctcttcctaattccccgagccggctggcttgccggcctcctctgccccgacccccgccccctcgaactagccctcctaatactaggcgtcggcctcctcgacttctgcggacaagtctgcttcacccctctcgaagcactactatctgacctcttccgcgaccccgaccactgccgacaagcctactcagtctacgccttcatgatcagtttaggcggttgccttggatacctccttccagccatcgactgggacacatccgccctagcaccctacctcggaacccaagaagaatgcctcttcggcctcctcacactcatctttctaacctgcgttgccgccacactcctcgtcgcagaagaagccgccttaggccccaccgaacccgccgaaggcctctcagcaccatcactctcgccccactgctgcccatgccgcgctcgactagccttccgcaacctaggcgctttattaccccgtctccaccaactctgctgcagaatgccccgcacccttcgacgtctattcgtcgccgaactatgctcctggatggcactaatgacattcacactattctacaccgacttcgtaggtgaaggcctttatcaaggtgtaccccgcgccgaacccggcacagaagcccgacgccactacgacgaaggagtccgaatgggctccctcggcctttttcttcaatgcgccatctcactcgtcttctccctcgttatggatcgactcgtccagaggttcggcacccgagctgtctacctggcctccgtcgccgccttccccgtcgcagctggcgccacttgcctctcacacagcgtagccgttgtaaccgcatccgccgccctcactggattcacctttagcgccctccaaatcctcccatacacactcgcctccctttaccatcgcgaaaaacaggtcttcctcccaaagtaccgaggcgacacgggcggcgcctccagcgaagactccctaatgacctccttcctccccggcccaaaacccggagccccattccccaacggccacgtcggagccggcggatccggacttctgcccccaccacccgccctatgcggcgcaagcgcatgcgacgtctccgttcgagtcgtagtaggagaacccacagaagctcgcgtcgtcccaggccgcggaatctgtctcgacctagccattctcgactccgcattcctactctcccaagtagcgccatccctcttcatgggctccatcgtacaactctcccaatcagttaccgcctacatggtatctgctgccggcctcggattagtcgctatctactttgcaacccaagtcgtcttcgacaaatcagacctcgccaaatactcagcctaa

SEQ ID NO: 4444 - RNA, 648 nt, synthetic construct
  misc_feature 1..648: note = CBI83574 variant
  source 1..648: mol_type = other RNA
atggcctccctccaaatgcgcggcaacccaggatcccacttctgcggcggcactctcatccacccctccttcgtcctaaccgccgcccactgcctccgagacatcccccaacgcctcgtcaacgtcgtcctcggcgcacacaacgtccgcacccaagaacccacccaacaacacttttcagtagcccaagtcttcctaaacaactacgacgccgaaaacaaactaaacgacatcctcctcatccaactctcctcccccgccaacctatccgcctccgtcgccaccgtccaactcccccaacaagaccaacccgttccccacggcacacaatgcctagccatgggatggggccgcgtcggcgcccacgacccacccgcccaagtcctccaagaactcaacgtaaccgtcgtcaccttcttctgccgaccccacaacatctgcaccttcgtcccccgccgcaaagccggcatctgcttcggcgactccggcggacccctcatctgcgacggcatcatccaaggcatcgactcattcgtcatctggggctgcgccacacgcctcttccccgacttctttacccgcgtcgccctatacgtcgactggatccgctccaccctccgccgcgtcgaagccaaaggccgcccataa

SEQ ID NO: 4445 - RNA, 771 nt, synthetic construct
  misc_feature 1..771: note = AAH96183 variant
  source 1..771: mol_type = other RNA
atggcccaccgcccaccctcccccgccctcgcctccgtcctactcgccctactcctatccggcgccgcacgcgccgccgaaatcgtcggcggccacgaagcccaaccccactcccgaccctacatggcatccctccaaatgcgcggcaaccccggctcccacttctgcggaggcacactaatacacccctccttcgtcctcaccgccgcccactgcctccgagacatcccccaacgcctcgtcaatgtcgtcctcggcgcccacaacgtccgaacccaagaacccacccaacaacacttctccgtcgcccaagtcttcctaaacaactacgacgccgaaaacaaactcaacgacgtcctcctcatccaactctcctcacccgccaacctatccgcctccgttgccaccgtacaactcccccaacaagaccaacccgtcccacacggaacccaatgcctagccatgggctggggcagagtcggcgcacacgacccacccgcccaagtcctccaagaactaaacgtcacagtcgtcaccttcttctgccgcccccacaatatctgcacattcgtcccccgacgcaaagccggcatatgcttcggcgactccggcggccccctcatctgcgacggaatcatccaaggcatcgactccttcgtcatctggggctgcgctacccgcctcttccccgacttcttcacccgcgtcgccctctacgtcgactggatccgctcaacactccgccgcgtagaagccaaaggccgaccttaa

SEQ ID NO: 4446 - RNA, 2760 nt, synthetic construct
  misc_feature 1..2760: note = CCDS45721.1 variant
  source 1..2760: mol_type = other RNA
atgtggctggctgcagccgccccctccctagcccgccgcctactcttcctcggtcccccacccccacccctcctcctgctcgttttctcgagatcatccagacgacgactgcacagcttaggcctcgccgcgatgcccgagaaaagaccgttcgaaagactacccgccgacgtaagcccaatcaactactccctatgcctcaaaccagacctcctcgatttcacattcgaagggaaactcgaagccgcagcgcaagttagacaagcaaccaaccaaatcgttatgaattgcgccgacatcgacatcataacagcatcctatgccccagaaggggatgaagaaatccacgcgacaggattcaactaccaaaacgaagacgaaaaagtaaccctctcttttcccagcacactccagaccggcaccggaacactaaaaattgacttcgtcggcgaattgaacgataaaatgaaaggattctacagatcaaaatacacaaccccatccggtgaagtccgctacgcagccgtaacacaattcgaagccaccgacgcccgacgagcgttcccgtgctgggacgaacccgcaatcaaagccacgttcgacatctccctagtagtccccaaagaccgagtagcactctcaaatatgaacgtcatcgaccgcaaaccctaccccgacgatgaaaacctagtcgaggtcaaattcgcacgaacccccgttatgtcaacctacctcgtcgcgttcgttgtgggcgaatacgacttcgtagaaacccgatccaaggatggcgtatgcgtcagagtctacacacctgtaggcaaagcagagcaaggtaagttcgccctagaagtcgcggccaaaaccctgcccttctacaaagactacttcaacgtaccatatccactgccaaaaatagacctcatagctatcgcggactttgcagccggtgcaatggaaaactggggactggttacataccgcgaaaccgccctattaatcgaccccaaaaacagctgcagcagctcacgccagtgggtcgcccttgtcgtaggccacgaactggcccaccaatggttcggcaacctcgtcacaatggaatggtggacccacctctggttaaacgaagggttcgcgagctggatagaatacctgtgcgtcgaccactgcttcccagagtacgacatctggacccaattcgtctccgccgactacacacgagcccaggaactggacgccctagataactcccaccccatcgaagtctccgtaggccacccctccgaagtcgacgagatattcgacgccatctcctactccaagggcgcaagcgtaatccgcatgctacacgactacataggcgacaaagactttaagaaaggaatgaacatgtacctaaccaaattccaacagaaaaacgcagccaccgaagacctctgggaaagcctcgaaaacgcaagcggcaaacccatcgcggccgtaatgaatacatggaccaaacaaatgggcttcccactcatctacgtagaagcagaacaagttgaggacgatcgcctcctcagactctctcaaaagaaattttgtgccggcgggagctacgttggggaagactgcccccaatggatggtccccatcaccatatcaacctccgaagacccaaaccaagctaaactcaaaatcttaatggacaagccagaaatgaacgtagtcctcaaaaacgtaaaaccagaccaatgggtcaaactaaacctaggcacagtcgggttctatcgaacccaatactcatctgcaatgctagaatcactactccccggcatcagagacttaagcctcccacccgtagaccgtctcggcctacaaaacgacctgttctccctagccagagcgggcataatcagcacggtcgaggtgctcaaagtgatggaagcattcgtaaatgagcccaactacacagtatggtccgacctaagctgcaacctcggcatccttagcacactactctcacacaccgacttctacgaggaaatacaggagttcgtaaaagacgtctttagccccataggcgaacgccttggctgggaccccaagcccggggaaggccacctagacgcactactgcgcggactcgtcttagggaaacttggaaaagcaggccacaaggcaaccctcgaagaagccagacgcagattcaaagaccacgtagaagggaaacaaatcctatccgccgacctccgctcccccgtctatctcaccgtcctaaagcacggagacggcaccactctagacatcatgcttaagctccacaaacaggcagacatgcaagaagagaaaaacaggattgaaagagtactgggtgctacactgttacccgacctcatacaaaaagtattgacctttgcactctccgaagaagtacgaccccaagacaccgtctccgtcatagggggcgtcgctggcggaagcaaacacggccggaaagccgcatggaaatttatcaaagacaactgggaggaactatacaaccggtaccaaggcggattcctcatctcccgactaataaaactcagtgttgaaggattcgccgtcgacaaaatggcaggcgaagtcaaggctttcttcgaatcacacccagcccccagtgccgaacgaaccatccaacagtgctgcgagaacatacttctaaacgcagcatggctcaaacgcgacgcagaatccatacaccaatacctccttcagaggaaagcatcaccaccaacagtctag

SEQ ID NO: 4447 - RNA, 660 nt, synthetic construct
  misc_feature 1..660: note = AAH65513 variant
  source 1..660: mol_type = other RNA
atgctgcgcgcgggcgcgcccacgggcgatctaccgcgcgcgggcgaggtacataccgggaccacgatcatggccgtggaatttgacgggggcgtagtcatgggctcggactcgcgagtgagcgcgggagaggccgtggtaaaccgcgtgttcgataaactgagcccactccacgaaaggatctattgcgcgctatcgggatcggccgcggacgcgcaagcggtcgcggacatggcagcgtaccagctagagctccatggcatagaactagaggaaccaccgctcgtgctcgcggccgcgaacgtggtcaggaacataagctataaatatcgcgaggacctgagcgcgcacttgatggtggccggatgggatcaaagggaagggggccaggtctatggcacactcggaggtatgctaacgcgacagccctttgccataggcgggagcgggagcacgttcatatacgggtacgtggacgcagcctataaaccgggcatgagcccggaagagtgcaggagatttaccacggacgcgatcgcgctcgcgatgtcgcgcgatggctcgagcgggggcgtaatctatctcgtgaccataaccgcggccggggtcgaccacagggtaatactcgggaacgagctcccgaaattctacgatgaatag

SEQ ID NO: 4448 - RNA, 345 nt, synthetic construct
  misc_feature 1..345: note = EAW82312 variant
  source 1..345: mol_type = other RNA
atggccggcctcgccctccaacccggcaccgccctcctctgctactcctgcaaagcccaagtctccaacgaagactgcctccaagtcgaaaactgcacccaactcggcgaacaatgctggaccgcccgcatccgcgccgtcggcctcctcaccgtcatctccaaaggctgctccctcaactgcgtcgacgactcccaagactactacgtcggcaaaaaaaacatcacctgctgcgacaccgacctctgcaacgcctccggcgcccacgccctccaacccgccgccgccatcctcgccctcctccccgccctcggcctcctcctctggggccccggccaactctaa

SEQ ID NO: 4449 - RNA, 372 nt, synthetic construct
  misc_feature 1..372: note = AAC39607 variant
  source 1..372: mol_type = other RNA
atgaaagccgtcctcctcgccctcctcatggccggcctcgccctacaacccggcaccgccctcctatgctactcctgcaaagcccaagtctccaacgaagactgcctccaagtcgaaaactgcacccaactcggcgaacaatgctggaccgcccgaatccgcgccgtcggccttctcacagtcatctccaaaggctgctccctaaactgcgtcgacgactcccaagactactacgtcggcaaaaaaaacatcacctgctgcgacaccgacctctgcaacgcctccggcgcccacgccctccaacccgccgccgccatcctcgccctcctccccgccctcggcctcctcctctggggccccggccaactctaa

SEQ ID NO: 4450 - RNA, 963 nt, synthetic construct
  misc_feature 1..963: note = AAG40776 variant
  source 1..963: mol_type = other RNA
atgagctcatgcaacttcacccacgccaccttcgtcctaatcggcatcccaggactcgaaaaagcccacttctgggtaggcttccccctactttccatgtacgtagtcgccatgttcggaaactgcatcgtcgtcttcatcgtccgcacagaacgctcccttcacgcaccaatgtatctcttcctctgcatgctggccgccatagaccttgccctctccactagcaccatgcccaaaatcctcgccctcttctggttcgactcgcgcgaaatctccttcgaagcctgcctcacccaaatgttcttcatccacgccctctccgcaatcgaatccactatactcctcgccatggccttcgaccgatacgtcgccatatgccaccccctccgccacgccgccgtcctcaacaacacagtcaccgcccaaatcggcatcgtcgccgtcgtacgcggatcactcttctttttccccctcccactactcataaaacgtctcgccttctgccactccaacgtcctctcccactcatactgcgtccaccaagacgtaatgaaactcgcctatgcagacaccctacccaatgtcgtctacggccttaccgccattctcctcgtaatgggagtcgacgtcatgttcatttccctctcctatttcctcatcatccgcaccgtcctccaactcccctccaagtctgaacgtgccaaagcattcggaacctgcgtctcccacatcggcgtcgtactcgccttctacgtccccctcatcggcctctctgtagtccaccgcttcggcaactcactccaccccatcgtccgcgtcgtcatgggagacatataccttctcctccctcccgtaatcaaccccatcatctacggcgccaaaaccaaacaaatccgcacccgcgtcctcgccatgttcaaaatctcatgcgacaaagacctccaagcggtaggcggcaaataa

SEQ ID NO: 4451 - RNA, 2253 nt, synthetic construct
  misc_feature 1..2253: note = AAA60209 variant
  source 1..2253: mol_type = other RNA
atgtggaacctcctccacgagacagacagcgccgtcgccacagcacgccggccccggtggctctgtgccggggccctcgtcctagccggcggattcttcctcctaggtttcctcttcggatggttcataaaaagcagcaacgaagcaaccaacatcacacccaaacacaacatgaaagcattcctagacgaactgaaagcagaaaacataaagaaattcttatacaacttcacgcaaatcccgcacctcgccggaacagaacaaaactttcaactcgccaaacaaatacaatcccaatggaaagaatttggccttgactccgttgaactcgcccactacgatgttctgctctcatacccaaacaagacacaccccaattacatctcaatcataaacgaagacggaaacgaaatattcaataccagcctattcgagcccccaccaccaggctacgaaaacgtctccgacatcgtcccacccttctccgcgttctcaccccaaggaatgccagaaggcgacctcgtctacgtcaattacgccagaaccgaggacttcttcaaacttgaacgggacatgaaaataaattgctcaggcaaaatcgtcatagctcgatacgggaaagtattcagaggcaataaagtcaaaaacgcacaactggccggggcgaaaggagtcatactgtacagcgaccccgcggactacttcgccccaggcgtaaaatcatacccagacggctggaacctacccggcggcggcgttcaacgaggcaacatccttaacctcaacggagccggagaccccctcacgcctggctacccagccaacgaatacgcctaccgccgaggtatcgcagaagcggtcggactaccctccatccccgtccacccaatcggctactatgacgcccagaaactcctcgagaaaatgggagggtcagcccctccagactcctcatggcgcggttccctaaaagtaccctataacgtaggccccggctttacaggaaacttctccactcaaaaagtaaaaatgcacatccactccaccaacgaagtcacacgtatatacaacgtcatcggcaccctccgaggtgctgtcgaacccgaccgatacgtgatcctaggaggacaccgcgactcatgggttttcgggggcatcgacccccaatccggcgcggccgtcgttcacgaaatcgtccgctcattcggcaccctcaagaaagagggctggcgcccccgacgcaccatcctattcgcttcctgggacgcagaagagttcggactcctaggaagcacagaatgggcagaggaaaactcccgtctactacaggaacgaggagttgcctacattaacgccgacagctccatagaaggaaactacaccctacgcgtcgactgcacacccctcatgtattccctagtccacaatctaaccaaagagctcaaaagccccgacgagggattcgaaggcaaaagcctctacgaatcttggaccaaaaagtccccatcccccgagttctccggcatgccgagaatctccaaactcggttcaggtaacgacttcgaagtcttcttccaacgactaggcatcgcctctggacgcgcccgctataccaaaaactgggaaacaaacaaattctcaggataccccctctaccactccgtctatgaaacgtacgaactggtagaaaaattctacgaccccatgtttaagtaccacctcacagtagctcaagtccgcggcggcatggtcttcgaactggccaactccatcgttctcccattcgactgtcgcgactacgccgtagtactcagaaaatacgccgacaagatctacagtatatctatgaaacacccccaagaaatgaaaacatactcagtcagcttcgatagccttttcagcgccgtcaaaaacttcaccgaaatcgcatcaaaattctccgaacgcctccaagatttcgacaagtcaaatcccattgtactccgcatgatgaacgaccaactgatgttcctagaacgcgcattcatagacccccttggactccccgaccgtcccttctaccggcacgttatctacgcgccatcctcccacaataagtacgccggcgaatccttcccgggaatctacgacgcactgtttgatatagaaagcaaagtcgatccctccaaggcttggggagaagtcaaacgccaaatctacgtcgcagccttcaccgtacaagccgcagccgaaaccctatcagaagtcgcctaa

SEQ ID NO: 4452 - RNA, 3921 nt, synthetic construct
  misc_feature 1..3921: note = CCDS1397.2 variant
  source 1..3921: mol_type = other RNA
atgaccatgtacctctggctaaaactgctagcgttcggatttgcctttctagacaccgaggtattcgtaacgggccaatcccccacgccctcgcccacgggcttgacaacagctaaaatgccgtccgtaccactctcttcagaccccctcccgacacacaccaccgcctttagtccagcttccacatttgaacgcgaaaacgacttttccgaaaccacgacgtcactcagccccgataacacatccacccaggtgtctcccgactccctcgacaacgcatcagcattcaacaccaccggagtatcctcagtacagaccccgcacctccccactcacgccgactcacaaacaccctcagccggcaccgacacccagactttctccggaagcgcagccaacgccaagctcaaccctactcctggttccaacgctatctcagacgtcccgggagagcgatcaacagcgtcaacttttccaaccgacccggttagccctctcacgaccaccctatcgctagcacaccacagctcagccgcgctaccggcacgcacctccaacaccacaattaccgctaacacatccgacgcctacctcaacgcctccgaaacaactacactctccccctcagggtcagccgtaatttccacgaccactatcgccaccacaccctccaaacccacctgtgacgagaaatacgcaaacataaccgtcgactacctctataacaaagagaccaaacttttcaccgccaaactcaatgtcaacgaaaatgtagagtgcggaaacaacacctgtaccaacaacgaggtccacaacctaaccgaatgcaagaacgcctcggtatccatctctcataattcatgtaccgcgccagacaagactctcatccttgatgtgccccctggggtcgaaaagttccaactacatgactgcacacaagtcgaaaaagccgacaccacaatctgcctcaaatggaaaaacatagaaaccttcacgtgcgacacacagaacatcacttacaggttccaatgcgggaacatgatcttcgacaacaaagaaattaaactcgaaaacctcgaacctgaacacgagtacaagtgcgactccgaaatcctctacaataaccacaaattcaccaacgccagcaaaataatcaaaacggacttcggcagcccaggtgaaccgcaaataatcttctgcagatccgaagcagcccaccagggcgtaatcacctggaacccaccccagcgtagctttcacaacttcaccctctgttacataaaagagacggaaaaagactgccttaacctcgacaaaaacctcatcaagtacgacctccaaaatctcaagccatataccaaatacgtactcagcctccacgcctacatcatagcgaaagtgcaacgaaacggaagcgcagccatgtgccatttcacgaccaaatctgcgcccccatcacaagtctggaatatgaccgtctccatgacctcagacaactcgatgcacgtcaaatgtcgaccaccccgagaccgcaacggcccccacgaacgataccacctagaagtcgaagccggaaacaccctagtacgcaacgaatcccacaagaactgcgatttccgtgtaaaagacctccaatatagcaccgactacacattcaaggcctactttcataatggtgactaccccggcgaaccctttatcctacaccatagcacctcgtacaacagcaaagcactcattgcgttcctagcattccttatcatagtaacatcaatcgcattactcgtcgtactatacaagatctacgacctccacaaaaagcgctcctgtaacctcgacgaacaacaagaactcgttgagcgagacgatgaaaaacaactcatgaatgtcgagccaatacacgccgacatcctcctagaaacatacaaaagaaaaatcgccgacgaaggccgactattcctagctgagttccaaagtataccccgcgtgttctcgaaattcccgattaaagaagcccgcaaaccattcaaccaaaacaaaaatcgatacgtagacatcctcccctacgactacaaccgcgtcgagctcagcgaaataaacggcgacgcaggatccaactacataaatgcctcgtacatcgacggcttcaaagaaccgcgcaagtatatcgccgcgcaaggcccgcgcgacgaaactgtagacgatttctggcggatgatctgggaacaaaaggctaccgttatcgtgatggtaacccgttgcgaagagggaaaccgcaataagtgcgctgaatattggccgagcatggaagaaggtacgcgcgccttcggagacgtcgtcgtcaagataaaccagcacaagcgctgtcccgactacataattcaaaagctcaatatagtcaacaagaaagaaaaagccacagggagagaagtcacccacatccagtttacatcatggcccgaccacggcgtcccagaagacccacacctccttctcaaattgagacgacgcgtaaacgccttctcaaacttcttcagcggccccattgtcgtacattgctccgcgggcgtgggacgtacaggaacctacataggcatcgatgccatgctcgaaggcctcgaagcagaaaataaagttgacgtatatgggtacgtagtaaaactccggagacaacgctgcctcatggttcaagtagaggctcagtacatccttatccaccaagccctagtagaatacaaccaattcggcgaaaccgaggtcaacctaagcgaactccacccatacctccacaacatgaaaaagcgggacccaccgtccgaaccatcccctttagaagccgaatttcaaagacttccatcataccgatcgtggaggacccagcacataggcaaccaagaagaaaacaagagcaaaaaccgaaactcgaacgtgataccgtatgactataaccgagtcccactaaaacatgaactagaaatgagcaaagaaagcgaacatgactccgacgaatccagcgacgacgactcggatagcgaagaaccatccaaatacatcaatgcatcgttcatcatgtcatactggaaacccgaggtcatgatcgcggcccagggaccccttaaggagaccatcggagacttttggcaaatgatcttccaaagaaaagtgaaagtcatagtcatgctcacggagctcaaacacggagaccaagaaatctgcgcccagtactggggtgaagggaaacaaacatatggggatatcgaggtcgacctcaaagacaccgacaaatcctcaacttacacgctacgagtgttcgagttacgacactctaaaaggaaggatagccggacggtctaccaataccaatacaccaactggagtgtagaacagctccctgcggagcccaaagaactaatctcaatgatacaggtggtcaaacaaaaattgccccagaaaaactcctcagagggaaacaaacatcacaagagcaccccattactcatacactgcagagacggctcccaacaaaccggtattttctgcgctctcctcaacctacttgagagcgccgagaccgaagaagtcgtcgacatattccaggtagtcaaggcactgaggaaggcacgccccggcatggtctccaccttcgagcagtatcagttcctctacgatgtaatagcctcaacctaccccgcccaaaatggccaagtcaagaaaaacaaccatcaagaagacaagattgagttcgacaacgaagtagacaaagtaaagcaagacgcaaactgcgtcaaccccctcggcgccccagaaaaactaccagaagcaaaagaacaagccgagggatcggaaccgacatccgggacagaagggcctgagcactcagtaaacggcccagccagccccgccctcaaccagggatcataa

SEQ ID NO: 4453 - RNA, 624 nt, synthetic construct
  misc_feature 1..624: note = AAH02977 variant
  source 1..624: mol_type = other RNA
atggcgaaaacgtacgattacctgttcaagctcctgctcataggcgacagcggggtcgggaaaacgtgcgtactattccgcttcagcgaggacgcgttcaacagcacgttcataagcacgataggaatcgacttcaagatcagaaccatagaactggacgggaaaagaatcaagctccagatctgggacacggccgggcaagagcgcttccgcacgatcacgaccgcgtactaccgcggggccatgggaataatgctggtctacgacataaccaacgaaaagagcttcgacaacatcaggaactggatcaggaacatagaagaacacgcgagcgcagacgtggagaaaatgatactcgggaacaagtgcgacgtcaacgacaagcgccaggtctcgaaagagcgcggagaaaagctagcgctagattacggaatcaagttcatggaaacgagcgcgaaagcgaacataaacgtggaaaacgccttcttcacgctcgcgcgcgacatcaaggccaagatggacaaaaagctcgagggcaacagcccgcaagggagcaatcaaggggtcaagatcacgcccgaccaacagaaaaggagctcattcttccgctgcgtcctgctctag

SEQ ID NO: 4454 - RNA, 1260 nt, synthetic construct
  misc_feature 1..1260: note = BAA81688 variant
  source 1..1260: mol_type = other RNA
atgaaaaattacaaagccataggtaaaataggcgaaggcaccttctcggaagtcatgaaaatgcaatcactacgcgacggcaactactacgcatgcaaacaaatgaagcaaagattcgaatcaatcgaacaagtcaacaacctccgcgaaatccaagccctacggcgactaaacccccaccccaacatcctcatgcttcacgaagtagtattcgaccgaaaaagcggctccctagccctcatctgcgaactaatggacatgaacatctacgaactaataagaggacgccgctacccattaagcgaaaagaaaatcatgcactacatgtaccaactctgcaaatccctcgaccacatacaccgcaacggcatcttccaccgcgacgtcaaacccgaaaacatcctcatcaaacaagacgttctcaaactcggcgacttcggctcctgcagaagcgtatactccaaacaaccctacaccgaatacatctcaacacgatggtatcgcgcccccgagtgcctactcaccgacggcttctacacgtacaaaatggacctctggtccgcaggctgcgtcttctacgaaatcgcctccctccaacccctcttcccaggcgtaaacgaacttgaccaaatctccaaaatccacgacgtcatcggaactcccgcacagaaaatactcaccaaattcaaacaatcccgggccatgaacttcgacttcccattcaagaagggctccggcatccccctcctcaccaccaacctcagcccccaatgcctatccctcctacacgccatggtagcctacgaccccgacgaacgcatcgccgcccaccaagcacttcaacacccctacttccaggaacaacgcaaaaccgaaaaacgcgcactcggctcacaccgcaaagccggctttcccgaacaccccgtcgcccccgaacccctctccaactcctgccaaatctcaaaagaaggacgcaagcaaaaacaatccctcaaacaagaagaagaccgccccaaacgccgcggccccgcatacgtcatggaactacccaaactcaaactatcaggagtcgtcaggctctcgtcctactcctcacccaccctccaatcagttctaggatccggaacaaacggccgagtcccagtcctccgacccctcaaatgcatcccagcatccaagaaaacagacccacaaaaagacctaaaacccgcaccccaacaatgccgcctacccaccatcgtacgcaaaggcggccgctaa

SEQ ID NO: 4455 - RNA, 1389 nt, synthetic construct
  misc_feature 1..1389: note = AAH08727 variant
  source 1..1389: mol_type = other RNA
atggcttccaactcctcctcctgccccacccccgggggaggccacctcaacggctacccagtccccccctacgcgtttttcttccccccaatgctcggcggcctaagcccccccggcgccctcaccaccctacaacaccaactaccagtctccggctactctaccccctcccccgcaaccatcgaaacacaatcctcatcctccgaagaaatagtacccagcccccccagcccccccccccttccacgcatttacaaaccatgcttcgtctgccaagataaatcctccgggtaccactacggagtatccgcctgtgaaggttgcaaaggcttcttccgaagatcaatccaaaaaaacatggtgtacacgtgccaccgagacaaaaactgcatcatcaacaaagtgacccgcaaccgatgccaatactgccgcctacaaaaatgcttcgaagtcggaatgtcaaaagaatcagtacgcaacgaccgcaacaaaaaaaaaaaagaagtccccaaaccagagtgctccgaatcttacaccctcacccccgaagtcggcgaactcatagaaaaagtacgtaaagcgcaccaagaaaccttccccgccctttgccaactcggtaaatacactacaaacaactcatccgaacaacgcgtctccctcgacatagacctctgggacaaattctcagaactatccaccaaatgcattatcaaaaccgtcgaattcgccaaacaactcccaggcttcacaaccctcaccatcgccgaccaaatcaccctactcaaagccgcctgcctagacatcctgatcctccgtatatgcacccgctatacccccgaacaagacactatgaccttctcagacggacttaccctcaaccgaacacaaatgcacaacgcaggattcggcccactgactgaccttgttttcgccttcgccaaccaactcctccccctcgaaatggacgacgccgaaaccggcctcctctcagccatatgcctcatctgcggcgaccgccaagacctcgaacaaccagacagagtcgacatgctccaagaacccctcctcgaagccctcaaagtctacgtacgcaagcgccgaccctcccgacctcacatgtttcccaaaatgctcatgaaaatcaccgaccttcgatcaatctccgcaaaaggcgcggagcgagtcatcaccctaaaaatggaaatccccggctcaatgccaccccttatccaagaaatgctcgagaattcagaaggcctagataccctatccggccaaccaggtggcggaggtcgcgacggcggcggcctggcacccccaccaggctcctgctccccctccctctcaccatcctccaacagatccagccccgccacgcactccccctaa

SEQ ID NO: 4456 - RNA, 570 nt, synthetic construct
  misc_feature 1..570: note = AAB02605 variant
  source 1..570: mol_type = other RNA
atgaccgaatacaaactagtcgtcgtcggcgccggcggagtcggcaaatccgcactcaccatccaactcatccaaaaccacttcgtcgacgaatacgaccccaccattgaagactcataccgaaaacaagtcgtcatcgacggcgaaacctgcctactcgacatcctcgacaccgccggacaagaagaatactccgccatgcgcgaccaatacatgcgcaccggcgaaggcttcctctgcgtcttcgcaataaacaacaccaaatccttcgaagacatccaccaataccgagaacaaatcaaacgcgtcaaagactccgacgacgtccccatggtcctcgtaggcaacaaatgcgacctcgccgcccgcaccgtcgaatcacgccaagcacaagacctcgcccgctcctatggcatcccctacatcgaaacctccgcaaaaacccgacaaggcgtcgaagacgccttctacacccttgtccgcgaaatccgccaacacaaactccgcaaactcaacccccccgacgaatccggccccggctgcatgtcatgcaaatgcgtcctctcataa

SEQ ID NO: 4457 - RNA, 570 nt, synthetic construct
  misc_feature 1..570: note = AAB59445 variant
  source 1..570: mol_type = other RNA
atgaccgaatacaaactcgtcgtcgtcggcgccggcggcgtcggcaaatccgccctgaccatacaactaatccaaaaccacttcgtcgacgaatacgaccccaccatcgaagactcctaccgcaaacaagtcgtaatcgacggcgaaacctgcctcctagacatcctagacacagcaggccaagaagaatactccgccatgcgcgaccaatacatgcgaaccggagaaggcttcctctgcgtcttcgccatcaacaacaccaaatccttcgaagacatacaccactaccgagaacaaataaaacgcgtcaaagactccgaagacgtccccatggtcctcgtcggcaacaaatgcgacctcccatcccgcaccgtggacaccaaacaagcccaagacctggcccgatcctacggcatccccttcatcgagacctccgccaaaacccgccaacgcgtcgaagacgccttctacaccctagtccgcgaaatccgccaataccgcctcaaaaaaatctccaaagaagaaaaaacccccggctgcgtcaaaataaaaaagtgcatcatcatgtaa

SEQ ID NO: 4458 - RNA, 570 nt, synthetic construct
  misc_feature 1..570: note = AAA60255 variant
  source 1..570: mol_type = other RNA
atgacggaatacaaactggtcgtggtaggggccggaggcgtgggaaagagcgcgctcacaatccagctaatacaaaaccacttcgtcgacgaatacgacccgaccatagaagacagctaccgcaagcaagtggtcatagacggggaaacgtgcctgctcgacatcctagacacggccggacaagaggaatacagcgcgatgagggaccagtacatgcgcacgggagagggcttcctctgcgtcttcgccataaacaacagcaagagcttcgccgacatcaacctataccgcgaacaaataaaaagggtcaaggactcggacgacgtcccgatggtgctcgtgggcaacaaatgcgacctgcccacgcgcacggtcgacaccaaacaagcgcacgagctcgcgaaatcgtacggaatcccgttcatagaaacgagcgcaaaaacgcgccagggcgtggaagacgccttctacacgctcgtgcgagagatcaggcaataccgcatgaaaaagctcaacagctcggacgacggcacgcaagggtgcatgggcctgccatgcgtcgtaatgtag

SEQ ID NO: 4459 - RNA, 546 nt, synthetic construct
  misc_feature 1..546: note = AAB84001 variant
  source 1..546: mol_type = other RNA
atgtgcaaaggcctcgccgccctcccccacagctgcctcgaacgcgccaaagaaatcaagatcaaactcggcatcctcctccaaaaacccgactccgtcggcgacctcgtcatcccctacaacgaaaaacccgaaaaacccgccaaaacccaaaaaacctccctcgacgaagccctccaatggcgcgactccctcgacaaactcctccaaaacaactacggcctcgcctccttcaaatcattcctaaaatcagaattctccgaagaaaacctcgaattctggatcgcctgcgaagactacaaaaaaatcaaatcccccgccaaaatggccgaaaaagccaaacaaatctacgaagaattcatccaaaccgaagccccaaaagaagtcaacatcgaccacttcaccaaagacatcacaatgaaaaacctcgtcgaacccagcctcagctccttcgacatggcccaaaaacgcatccacgcgctcatggaaaaagactccctcccccgcttcgtccgcagcgaattctaccaagaactaataaaataa

SEQ ID NO: 4460 - RNA, 2175 nt, synthetic construct
  misc_feature 1..2175: note = CCDS4362.1 variant
  source 1..2175: mol_type = other RNA
atgtcattcccaaaagcgccactcaaacgattcaacgaccccagcggctgcgcaccatcccccggcgcatacgacgtaaagaccctagaagtgctaaaaggaccggtcagcttccaaaagtcccaacgattcaagcaacaaaaagagagtaagcaaaacctaaacgtcgacaaagacacaacactaccagcaagcgccagaaaagtaaaaagcagcgagagcaaagaaagccagaaaaacgacaaagacctcaaaatcctcgagaaggaaatacgtgtgctacttcaagaacgaggcgcgcaagaccgacgcattcaagacctggaaacagaactagagaaaatggaagcacggctaaacgccgccctcagggaaaagacgagcctaagcgcgaacaacgcgacgctcgaaaaacaactcatcgaactaacaaggacaaacgaattactaaaaagcaaattctcggaaaacggcaaccagaaaaacctccgcatactctcgctagaactaatgaaactgcgaaacaaacgcgaaaccaagatgagagggatgatggccaaacaagagggaatggaaatgaaactacaagtcacacaacgcagcctagaggagagccaaggcaaaatcgcccaactagaaggaaaactcgtgagcatagagaaagagaaaatagacgagaaaagcgaaacggaaaaactactcgaatacatcgaagaaatcagctgcgcaagcgaccaagtcgaaaaatacaaactcgacatagcacaactagaagaaaacctgaaagaaaagaacgacgaaatcctcagcctaaaacagagcttggaagagaacatagtcatcctcagcaaacaagtggaagacctgaacgtaaagtgccagctgctggaaaaagaaaaggaagaccacgtcaaccgcaaccgggaacataacgaaaacctcaacgccgaaatgcaaaacctcaaacaaaaattcatcctagaacagcaagagcgcgagaaactccagcaaaaagagctccaaatcgacagcctcctacaacaagagaaagaactcagcagcagcctacaccaaaaactctgcagcttccaagaagaaatggttaaagaaaagaacctcttcgaagaggaactgaaacaaactctcgacgaactagacaaactccaacaaaaagaagaacaagcagaaagactcgtaaaacagctcgaagaagaagccaaaagccgcgcagaagaactaaagctgctagaagaaaaactcaaaggaaaagaagcagaactagagaaaagcagcgccgcgcacacccaggccaccctactactgcaagaaaaatatgactccatggttcaatccctcgaggacgtaaccgcacaattcgagagctacaaagcgctaacagcgagcgaaatcgaggaccttaaactagaaaacagcagtctccaagaaaaagccgcaaaagcaggcaaaaacgcggaagacgtgcaacaccaaatcctagcaaccgagtcgagcaaccaagaatacgtcagaatgctcctcgacctacaaacaaaaagcgccctgaaagaaacagagataaaagaaataacagtgtcattcctacagaagataacggacctccagaaccaactcaaacagcaagaagaggacttccgaaaacaactagaagacgaggagggacgaaaagccgagaaagaaaacacaacggcagagctaaccgaagaaataaacaaatggagactcctctacgaagaactctataacaaaacgaaacccttccaactacaactagacgcgttcgaagtagaaaaacaagcactcctcaacgaacacggcgcagcccaggaacagctaaacaaaatacgcgacagctacgccaaactcctgggacaccagaacctaaaacagaaaataaaacacgtcgtcaaactcaaggacgagaactcccaactcaaaagcgaagtgagtaagctcagatgccaactagcaaagaagaaacagagcgagaccaaactacaagaggaactgaacaaagtgcttgggatcaaacacttcgaccccagcaaggcgttccaccacgaatcgaaagaaaacttcgcgttgaaaacaccgctcaaggagggaaacaccaattgctacagagcccccatggagtgccaagagagctggaaatag

SEQ ID NO: 4461 - RNA, 582 nt, synthetic construct
  misc_feature 1..582: note = AAC33179 variant
  source 1..582: mol_type = other RNA
atggcagcgatcaggaaaaagctcgtgatcgtgggcgatggcgcatgcgggaaaacatgcctgctcatagtcttcagcaaggaccagttcccggaagtgtacgtacccacggtcttcgaaaactacatagccgacatcgaagtcgacggcaaacaagtggaactggccctgtgggacacagcgggccaggaagactacgaccgcctacgcccgctctcatacccggacacagacgtgatcctgatgtgcttctcaatcgacagcccagactcactcgagaacatacccgagaaatggaccccggaagtgaaacacttctgccccaacgtcccgatcatactcgtgggcaacaaaaaggacctgcgccaggacgagcacacgcgcagggaattggccaagatgaagcaagagcccgtgcgctcagaagagggcagggacatggccaaccgcataagcgcgttcgggtacctagaatgcagcgcgaaaacgaaagagggcgtgcgcgaggtcttcgaaatggccacgcgcgcgggcctgcaagtgcgcaagaacaagcgaaggcgcgggtgcccgatcctgtga

SEQ ID NO: 4462 - RNA, 888 nt, synthetic construct
  misc_feature 1..888: note = AAA36161 variant
  source 1..888: mol_type = other RNA
atgtcaggcgccctagacgtactccaaatgaaagaagaagacgtcctcaaattccttgccgccggcacccacctcggaggaaccaacctcgacttccaaatggaacaatacatctacaaacgcaaaagcgacggcatatacataatcaacctcaaacgaacatgggaaaaactgctcctagccgcacgcgcaatcgtagccatagaaaaccccgccgacgtcagcgtaatctcatccagaaacacaggccaacgcgccgtcctcaaattcgccgcagccactggcgcaacaccaatcgcaggccgattcacccccggcaccttcaccaaccaaatacaagccgccttccgcgaacccagactactcgtcgtaacagacccaagagcagaccaccaacccctaaccgaagcctcatacgtaaacctccccacaatcgccctatgcaacaccgacagccccctccgatacgtcgacatcgcaatcccatgcaacaacaaaggcgcacactccgtcggactcatgtggtggatgctagcaagagaagtgctccgcatgcgcggcaccatctcccgcgaacacccatgggaagtaatgcccgacctctacttctacagagaccccgaagaaatcgaaaaagaagaacaagccgccgcagaaaaagcagtcaccaaagaagaatttcaaggcgaatggacagcccccgcccccgagttcaccgccacccagcccgaagtcgcagactggagcgaaggcgtacaagtcccctcagtcccaatccagcaattccccacagaagactggtcagcccaacccgcaaccgaagactggagcgcagccccaaccgcccaagccaccgaatgggtaggagccaccaccgactggagctaa

SEQ ID NO: 4463 - RNA, 2601 nt, synthetic construct
  misc_feature 1..2601: note = AAH14614 variant
  source 1..2601: mol_type = other RNA
atgaacggcgaacaacaactagacgccgacgcaggctccggcatggaagaagtcgaactcagttgggaagattacttagaagaaaccggcagcacagcagtcccctacggctcattcaaacacgtagatacacgcctacaaaacgggttcgcacccggcatgaaactagaagtcgcagtccgcacagacccagagacctactgggtagccaccgtaataacaacctgcgaacaactactactcctccggtacgacggctacggagaagaccggcgcgcggacttctggtgcgacatccgaaaagcagacctgtaccccataggatggtgcgagcaaaacaagaaaaccctcgaagcgccggaggggatccgcgacaaagtatccgactgggatgagttcttgcgacaaaccctcatcggagcctgctcacctcccgtacccctcctcgaaggcctccggaacggtcgtaaccccctcgacctgatcgcacccggaagccgactagaatgccaagcattccaagactccctatcgacgtggatcgtaacggtagtagaaaacataggcggccggcttaaactcagatacgaaggtcttgaatcatcagacaactatgaacactggctctactacctagatcccttcctccatcacgtcggctgggccgcccagcaagggtacgaactccagcctccctccgccatacgccacctcaaaaacgaagccgaatggcaagaaattctagccaaggtaaaagaagaggaagaggaacccctaccctcatacctcttcaaagataaacaagtcataggcatccacacattctcggtcaacatgaaactcgaggcagtcgacccatggtccccattcggcataagtccagcgacagtcgtcaaagtattcgacgaaaaatacttcctagtagaaatggacgacctacgcccagagaaccacgcacgcagatccttcgtctgccacgccgactcacccggcatattcccagtacaatggtccctaaagaacggcctgcacatatcacccccgcccggctacccctcccaagactttgactgggccgactatctcaagcaatgcggcgcggaagcagccccacaacgctgcttcccaccacttatatccgaacacgagttcaaagagaacatgaaactcgaagctgtaaacccaatattacccgaagaggtatgcgtcgccacaatcaccgcagtccgaggaagctacctatggctacagctcgaaggctcaaagaaacccatccccgagtgcatagtctccgtagaatcaatggacatattccctctcggctggtgcgaaaccaatggccaccccctatccacgccccgtcgtgccagggtctacaaacaacgcaaaatcgccgtagtccaaccagaaaaacaggtaccttccagccgaaccgtacacgaaggcctccgaaaccaggaactaaacagcaccgagtctgtcatgatcaacggaaaatattgctgcccaaaaatatacttcaaccaccgctgcttctccgggccatacctcaacaaaggccgaatcgcagagttaccccagtgcgtaggccccggaaactgcgtccttgtcctacgagaagtactcaccctcctaataaacgcagcctataaaccaagccgagtccttcgcgaacttcaactggacaaagacagcgtatggcatggctgcggcgaagtactcaaagcaaagtacaagggcaaatcctacagagcaacagtggaaatcgtcaaaactgcggacagagttacggagttctgccgccaaacctgcatcaagctggaatgctgcccaaacctcttcggaccccgtatggtgctcgataagtgttctgaaaactgcagcgtcctcacaaaaacaaaatacacacactactatggtaaaaagaaaaacaaacgcataggtagacccccaggaggccactccaacctcgcctgcgcactcaaaaaggccagcaaacgccgcaaaagacgcaaaaacgtgttcgtccacaaaaagaaaagaagcagcgccagcgtcgacaatacgccagccggatccccacaaggcagcggaggtgaagacgaggacgaccccgacgaaggagacgacgacagcctctcagaaggctcaaccagcgagcagcaagacgaactgcaagaagaatcagaaatgtctgaaaagaaaagctgcagttcaagccccacccaatccgaaataagcacctcactcccaccggaccgccagagacgcaaaagagagctacgcacattctccttctccgacgacgaaaacaaaccaccatcacccaaagaaatccgtatcgaagtggcagaacgcctgcacctcgactcaaaccccctcaaatggagcgtcgcggacgtcgtccgctttatacgatctaccgattgcgcaccactcgcccgcatcttcctagaccaagagatagacggacaagcactacttctactaaccttgccaactgtccaagaatgcatggacttaaaactcggacccgccatcaaactgtgccaccacatcgaacgcataaaatttgcattctacgagcaattcgccaactaa

SEQ ID NO: 4464 - RNA, 1431 nt, synthetic construct
  misc_feature 1..1431: note = CCDS4550.1 variant
  source 1..1431: mol_type = other RNA
atgtccggaagcagcgcaaggtcatcacacctcagccaaccagtcgtgaaaagcgtcctagtatacagaaacggggacccattctacgcaggaaggagagtagtaatacacgaaaagaaagtcagcagcttcgaggtgttcctcaaagaagtcacagggggagtccaagccccgttcggagccgttcgaaacatctatacaccacgaacaggacaccgtataagaaaactcgaccaaatacaaagcggcggaaactacgtagcgggcggccaggaagcattcaagaaattaaactacctagacatcggcgaaatcaagaaaaggccaatggaagtagtaaacacagaagttaaaccggtaatacacagccgaataaacgtaagcgcaaggttccgcaaaccgctccaagaaccctgcacaatcttcctgatagccaacggggacctaataaacccagcgtcacgcctactaataccccgaaaaacactgaaccaatgggaccacgtactgcaaatggtaaccgagaaaataaccctaagaagcggagcggtacacagactctacacactcgaaggaaaactcgtcgaaagcggagcagaactcgagaacggccaattctacgtggccgtaggccgcgacaaattcaagaaattaccatacagcgaactcctcttcgacaaatccacaatgagacgccccttcgggcaaaaagcaagcagcctacccccgatcgtaggctcccgaaagtcaaaagggagcggaaacgacagacacagcaaaagcaccgtcggcagctcagacaacagttccccacaaccactcaaacggaaagggaaaaaggaagacgtaaactcagaaaaactaacaaaactaaaacaaaacgtgaaactcaaaaacagccaagaaacaatacccaactccgacgaaggcatattcaaagccggcgccgaaagaagcgaaaccagaggggcagccgaagtacaagaagacgaagacacacaagtagaggtaccagtcgaccaacgaccagccgaaatagtagacgaagaggaagacggagaaaaagcaaacaaagacgcagagcaaaaagaggacttcagcgggatgaacggagacctagaggaagagggagggcgcgaggccaccgacgcacccgaacaggtagaagaaatactcgaccacagcgaacaacaagcaagaccagcccgagtcaatggaggcacagacgaagaaaacggagaagaactacaacaagtaaacaacgaactacagctagtactcgacaaagaaagaaaaagccaaggcgcaggatccggacaagacgaagcagacgtagacccccaaagaccacccagacccgaagtgaaaatcacaagcccggaagaaaacgaaaacaaccaacaaaacaaggactacgcagcagtcgcctaa

SEQ ID NO: 4465 - RNA, 1362 nt, synthetic construct
  misc_feature 1..1362: note = BAA07903 variant
  source 1..1362: mol_type = other RNA
atgcgcatccccgttgacgcctccacttcacgccgcttcacccctccctccaccgccctctcccccggtaaaatgtcagaagcactcccactcggagcccccgatgccggcgccgccctcgccggaaaactacgctcaggcgacagatccatggttgaagtcctcgccgaccaccccggcgagctagtacgaacagactcccccaacttcctctgctcagtccttccaacacactggcgctgcaacaaaacactccccatcgccttcaaagtcgtcgccctaggtgacgtacctgacggcacactcgtaaccgtcatggcaggaaacgacgaaaactactccgccgaactccgaaatgcaaccgcagcaatgaaaaaccaagtcgcccgcttcaacgacctccgcttcgtcggccgttccggacgcggcaaatccttcaccctcacaatcaccgtcttcacaaatcccccacaagtagccacctaccaccgcgcaattaaaatcactgttgacggcccccgcgaaccccgacgacaccgacaaaaactagatgaccaaacaaaaccaggctcactatctttctcagaaagactctccgaactcgaacaactccgaagaacagccatgcgcgtatcaccccatcatcccgcacctacccccaacccccgcgcctccctaaaccactcaacagccttcaacccacaaccccaatcccaaatgcaagacacccgacagatccagccatccccaccctggtcctacgaccaatcctaccagtaccttggctcgatcgcctcaccctcagtgcaccccgctacccccatctcacccggccgcgcctccggtatgaccacactctcagccgaactctcctcccgcctatccacagcacccgacctcacagccttttcagacccacgccaattccccgccctcccctccatatctgacccccgcatgcactaccccggagcattcacttactcccccacacctgtcacctccggcatcggcatcggcatgtccgccatgggatccgccacccgctaccacacctaccttcccccaccctaccccggctcctcccaagcacaaggcggacccttccaagcctcctccccctcttaccatctatactacggagcctccgcaggctcctaccaattttcaatggtgggcggcgaacgctcacccccacgcatcctaccaccctgtactaacgcatccaccggttcagccttactaaatccctcccttccaaaccaatcagacgttgtcgaggccgaaggctcacactctaactcacccaccaacatggccccctccgcccgcctcgaagaagccgtctggcgcccctactaa

SEQ ID NO: 4466 - RNA, 1080 nt, synthetic construct
  misc_feature 1..1080: note = ACI46041 variant
  source 1..1080: mol_type = other RNA
atgcccctggaactcgaactctgcccaggcagatgggtaggcgggcaacacccctgcttcatcatcgccgaaatcggccaaaaccaccaaggagacctcgacgtcgccaaacgcatgatccgaatggcaaaagaatgcggcgccgactgcgccaaattccaaaagagcgaactcgaattcaaattcaatcgcaaagccctagaacgaccatacaccagcaaacacagctggggcaaaacctacggagaacataaacgccacctcgaattctcccacgaccaataccgcgaactacaacgctacgccgaagaagtcggcatcttcttcaccgcctccggcatggacgaaatggccgtagaattcctccacgaactaaacgtccccttcttcaaagtcggctccggcgacacaaacaacttcccatacctagaaaaaaccgccaaaaagggacgaccaatggtaatcagctccggcatgcaaagcatggacaccatgaaacaagtctaccaaatcgtcaaacccctaaaccccaacttctgcttcctacaatgcacctcagcgtacccccttcaacccgaagacgtcaacctccgcgtcatctccgaataccaaaaactattccccgacataccaatcggctactccggccacgaaaccggaatcgccatcagcgtggcagcagtcgcactaggggccaaagtcctcgaacgccacatcaccctcgacaaaacctggaaaggctccgaccactcagcctcactcgaaccaggcgaactcgccgaactcgtacgcagcgtacgcctcgtcgaacgcgcactcggaagcccaacaaaacaactcctcccctgcgaaatggcctgcaacgaaaaactgggcaaatccgtcgtcgccaaagtaaaaatcccagaaggaaccatcctaaccatggacatgctaacagtcaaagtcggcgaacccaaagcctacccccccgaagacatcttcaacctagtaggcaaaaaagtcctcgtgacagtcgaagaagacgacaccatcatggaagaactagtcgacaaccacggaaaaaaaataaaatcctaa

SEQ ID NO: 4467 - RNA, 2715 nt, synthetic construct
  misc_feature 1..2715: note = CCDS14652.1 variant
  source 1..2715: mol_type = other RNA
atgcaagcctcacccctgcaaacatcccaacccactcccccagaagaactacacgcagcagcctacgtcttcaccaacgacggccaacaaatgcgatcagacgaagtcaacctggtcgccacgggccaccaatccaagaagaaacactcccgaaaaagcaaacggcattcctcgtccaaacgccgcaaatccatgtcatcctggctcgacaaacaagaagacgccgcagtcacgcactccatctgcgaagaacgaatcaacaacggacaaccagtagcagacaacgtcctctcaaccgcaccaccctggcccgatgccaccattgcccacaatatacgagaggagcgaatggaaaacgggcaaagccgcaccgacaaagtactctccacagcacctccacaactcgtacacatggccgccgccggtatcccctcaatgagcacccgagaccttcactccaccgtaacacacaacatccgtgaagaacgcatggaaaacggccaaccccagcccgacaacgttcttagcacaggacccaccggccttataaacatggccgccacccccatccccgccatgagcgcccgcgacctctacgcaacagtaactcataacgtttgtgaacagaaaatggagaacgtacaaccagcccccgacaacgtcctcctcactctacgcccgagacgcatcaatatgacagacaccgggatatccccaatgtcaaccagagacccctacgcaacaataacatacaacgtcccggaagagaaaatggaaaaaggacaaccacaacccgacaacatcctgtccaccgccagtaccggcctaataaacgtcgcaggagccggcacccccgccatcagcaccaacggcctatactctaccgtaccccacaacgtctgcgaagagaaaatggaaaatgaccaaccacaaccaaataacgtcctctccaccgtccaaccagtaattatatacttaacagcgaccggcatccccgggatgaacacgcgcgaccaatacgccacaatcacccacaacgtatgcgaagaacgagtcgttaacaatcaaccactcccatcaaacgccctatccactgtacttccaggcttagcatacctagccaccgccgacatgcccgccatgtccacacgagatcaacacgccactatcatacacaacctacgcgaagagaaaaaggataactcccaaccaacacccgacaacgtactctctgccgtcacacccgaactaataaacctcgcaggcgcgggcataccgcccatgtccaccagagaccaatacgccactgtaaaccaccacgtacacgaagcccgcatggaaaacggacaacgaaaacaagacaacgtcctttcaaacgtactctctggactcatcaatatggcgggtgcaagcatacccgccatgtcctcacgagacctatacgccacaatcacccactccgtacgcgaggagaaaatggaatccggcaaaccacaaacagacaaagtcatatccaacgacgcgccccaactaggccacatggcagccggaggaatccccagcatgagcacaaaagacctctatgccaccgtaacacaaaacgtacatgaagaaaggatggaaaacaatcaaccccaaccatcctacgacctcagcaccgttctaccaggcctcacgtacctcacagtcgctggcatacccgccatgtcaacacgcgaccaatacgctaccgtcacccacaacgtacacgaagagaaaatcaaaaatggccaagccgcctccgataacgtcttctccaccgtcccacccgccttcatcaacatggcagcaaccggcgtctcctccatgtccacacgcgaccaatatgccgccgtgacccataacatccgtgaagagaaaatcaacaactcccagcccgcgcccggaaacattctctccaccgctccaccctggttaagacatatggccgccgccggtatctcaagcacaatcactagagacctatacgtaaccgcaacccactcagtccacgaagagaaaatgaccaacggacaacaagcacccgacaactcgctctcgaccgtaccacccggatgcatcaacctctccggcgccggcatatcttgtaggtcaacgcgcgacctatacgccaccgtaatacatgatatccaggaagaagaaatggaaaacgaccaaactccacccgacggatttctatcgaactcagactcccccgaattaatcaacatgaccggacactgtatgcctcccaatgcgctcgactcattctcccatgactttacttcactgtccaaagacgaactcctctacaaacccgatagcaacgagttcgccgtcggaaccaaaaactacagtgtcagcgctggagacccacccgtaacagttatgtcacttgtcgaaacggtaccgaacacaccccaaatatctccagcgatggcaaagaaaattaacgacgatataaaataccaactcatgaaagaagtccgccgatttggccaaaactacgaacgaatattcatattacttgaagaagtacaaggttccatgaaagtgaaacgacagttcgtcgagttcacaatcaaagaagccgcccgcttcaaaaaggtcgtactcatccaacaactggaaaaagccctcaaagaaatagactcccactgtcatctacgcaaagtaaaacacatgcggaaacgctaa

SEQ ID NO: 4468 - RNA, 2403 nt, synthetic construct
  misc_feature 1..2403: note = AAH01058 variant
  source 1..2403: mol_type = other RNA
atggggagcagtaagaaacacagaggagagaaggaggcagcgggaacgacggcggcagcgggaacaggaggcgcaaccgaacaaccaccaaggcacagagagcacaagaaacacaaacaccggagcggcggaagcggtggcagcggaggagagagaaggaagaggagccgcgagagagggggtgagagaggaagcgggaggagaggggcagaggcagaggcaagaagtagcacacacggacgagaacgcagccaagcggagccaagcgagcggagggtaaagagggagaaacgggacgatggatatgaagcagcagcaagctcgaagacgagctcgggggacgcgagcagcttaagcatagaggagacaaacaagctgagggcgaaactgggcctgaaaccactcgaggttaacgccatcaaaaaggaggcggggacgaaggaggagccggtgacagccgacgtgataaacccgatggcactacggcaaagggaggaactgagagaaaagctagcggcggcaaaagagaagaggctcctaaatcaaaaactgggaaaaataaagacactgggggaggacgatccatggctcgacgatactgccgcctggatagaaagaagccggcaactacagaaagaaaaggatctggcagagaaaagggcgaagctgctagaggaaatggaccaggagttcggggtatcgacactggtagaggaggagtttgggcaaaggagacaggacctgtacagtgcgagagacctgcaaggcctaacagtagaacacgcaatagatagcttcagagaaggcgagacaatgatattgacgcttaaagataagggagtactacaggaggaagaggacgtgctagtgaacgtgaacctagtagacaaagagagagcggaaaagaacgtagagctgagaaagaagaaaccagactacctcccctatgcggaggacgagagcgtggacgacctagcgcaacagaaaccgcgaagtattctatcaaagtacgacgaggaactagagggggagaggccgcacagcttcaggctagagcaagggggaaccgcggacggattgcgggagagagagctagaggagataagagcaaaactgagactgcaagcacagagtctgtcgacggtgggaccaagattggcaagcgaatacttaacgccagaggagatggtaacgttcaagaaaacgaaaagaagagtaaagaagataagaaagaaagaaaaagaagtggtagtacgagcagacgacctcctgccgctaggagaccagacgcaagacggagacttcggaagcaggttacgggggagggggagaaggagggtaagcgaagtagaggaagagaaggaaccagtgccacaaccactcccgagcgacgacacgagggtagaaaacatggacatcagcgacgaggaagagggaggtgcaccacctccaggcagcccacaagtgttagaagaggacgaagcggagctagaactccaaaagcagctcgagaagggaagaaggctgagacaactacagcaactacagcaattgagagattcgggcgaaaaggtcgtagaaattgtaaagaaacttgagtcaaggcaaaggggatgggaggaggacgaggacccagaacgaaaaggggcaatagtgttcaacgcaaccagcgagttctgcagaacgctaggagaaatcccgacttacggattagcggggaacagagaggaacaagaggaactaatggactttgaaagggacgaagaaaggagcgcgaacggagggagcgaaagcgacggggaagagaacatagggtggagcacagtgaacctcgacgaagagaaacagcaacaggacttcagcgcgagcagcacgacaatactggatgaagaaccgatagtgaacagagggctggcagcggccttgctactgtgccaaaacaagggcttgctggagacgacggtacagaaagtggccagggtaaaggcaccaaacaagagcctgccaagtgccgtatattgcatagaggacaaaatggcaatcgatgacaagtacagtaggagagaagaatacaggggattcacacaagacttcaaagagaaggacgggtacaaaccggacgtaaagatagaatacgtggacgaaacaggacggaaactaacaccgaaagaagcattccgccagctaagtcacaggttccacggaaaggggagcggtaagatgaagacggagcgcaggatgaagaaactggacgaagaggcgctattaaagaaaatgagtagcagtgacacgccattaggaacggtggcgttgctgcaagagaaacaaaaagcgcagaaaacaccatacatagtgctgagcggcagcggaaagtcaatgaacgcaaacactataacaaagtga

SEQ ID NO: 4469 - RNA, 2877 nt, synthetic construct
  misc_feature 1..2877: note = AAF00087 variant
  source 1..2877: mol_type = other RNA
atgcgtacccatacacgtggcgccccctccgtcttcttcatatacctcctatgcttcgtctccgcttacatcaccgatgagaacccagaagtcatgatcccattcaccaacgccaactacgactcccaccccatgctatatttctcccgcgccgaagtggccgaacttcagcttcgcgccgcatcctcccacgagcacatagccgcccgcctgaccgaggcagtacacaccatgctatcctcacccctcgaatacctaccgccatgggaccctaaagactactccgcacgatggaatgaaattttcggcaacaacctcggagcccttgctatgttttgcgtcctgtaccccgaaaacatcgaagcacgcgacatggctaaagactacatggaacgcatggctgcacaaccatcctggttagtaaaagacgctccgtgggacgaagtacccctcgcccactctctagtgggcttcgcaacagcatacgacttcctctataactacctatcaaagacacaacaagaaaaattcctagaagtcatcgccaacgccagcggctacatgtacgaaactagctatcgacgcggatggggatttcaatacctccacaaccaccaacccaccaactgtatggccctactcaccggttccctagtactcatgaaccagggatacctccaggaagcgtacctttggacaaagcaggttcttactatcatggaaaaatcattagtcctactgagagaggttaccgacggcagtctctacgaaggagtagcttacggctcatacacgacgcgctcactctttcagtacatgttcctagtccagcgccacttcaacatcaaccactttggccacccatggctaaaacaacacttcgccttcatgtaccgtacaatcctccccggcttccaacgcaccgtagccatagccgactccaattacaactggttctacggtccagaatcccaactcgtattcctcgacaaattcgttatgcgaaacggaagcggcaactggctcgctgaccaaatccgccgcaaccgagttgtagaaggccccggaaccccttccaaaggacaacgctggtgcactctccacacagagttcctctggtacgacggatcgctcaaatccgtgccgcctcccgacttcggcacccccactctacactacttcgaagactggggagtcgttacctacggctcagccctccccgccgaaattaaccggtcattcctctcattcaaatccggcaaacttggaggacgtgccatctacgacatagttcaccgcaacaaatacaaggactggatcaaaggctggcgaaacttcaatgctggacacgaacaccccgatcaaaacagcttcaccttcgcccccaacggagttcccttcatcaccgaagcactgtacggaccaaaatacacattcttcaacaacgtcctgatgttctcccccgccgtgtctaaatcatgcttcagcccatgggtaggacaagtaaccgaagactgctccagcaaatggtccaaatacaaacatgaccttgccgcttcctgtcaaggcagagtagtcgcggccgaagagaaaaacggcgtcgtcttcatacgcggagaaggcgttggagcctacaaccctcaacttaacctcaaaaacgtccagcgcaacctcatcctactccacccgcaactactgctgcttgtcgaccaaattcacctaggcgaagaatcacccctggaaaccgccgcttccttctttcacaacgtagacgtgccgttcgaagaaaccgttgtcgacggtgttcacggggcctttattcgccaaagagacggactctacaaaatgtactggatggacgataccggctactcagaaaaagccaccttcgcctccgtcacttacccccgagggtacccgtacaacggcaccaattacgtaaacgtaaccatgcacctccgctcacctataacccgagccgcctacttgttcatcggcccgtccatcgacgttcaatccttcaccgtacatggcgactctcaacaattagatgtattcatcgctacctcaaaacacgcatacgcaacctacctctggactggcgaagccaccggccaatccgccttcgcacaagtcatcgcagaccgccacaagatcctcttcgatcgcaactcagctataaaaagctctatagtacctgaagtaaaagactacgcggcaatagtcgaacagaacctccagcacttcaaaccagtcttccaactattagagaaacaaatcctgtcccgcgtacgcaacacggcctctttccgcaaaaccgcagaaagactccttcgcttctccgacaaacgccaaaccgaagaagctatcgacagaatctttgccatctcccagcagcaacaacaacaatccaaatcaaagaaaaaccgacgcgcgggaaaacgctacaaattcgttgacgccgtccccgacatcttcgctcaaattgaagtaaacgaaaagaaaatccgccaaaaagcacagatattagcccagaaagagctccccatcgacgaagatgaagagatgaaagacctactcgacttcgcagacgtcacctacgaaaaacacaaaaacggcggtcttatcaaaggccgattcggacaagcgcgtatggtcacaaccacgcacagccgcgccccctcactctccgcctcctatacccgactatttctcatcctcaacatcgcaatcttcttcgtaatgctggcaatgcagctcacatacttccaacgcgcccaatccctgcacggccaacgctgcctatatgccgtactactaatcgactcctgtatactcctgtggctctactcatcctgctcccaatcccaatgttaa

SEQ ID NO: 4470 - RNA, 2892 nt, synthetic construct
  misc_feature 1..2892: note = AAH93784 variant
  source 1..2892: mol_type = other RNA
atggccacggccgcagaaaccagcgcgagcgaaccggaggcagaaagtaaagccggaccgaaggccgacggagaagaggacgaagtaaaagcagcaagaacccgacgcaaagtactgagcagggcggtagcagcagcaacatacaaaacaatgggaccagcctgggaccaacaagaagaaggagtgagcgaatcggacggagacgaatacgcaatggcaagttcagcagaaagcagccccggagaatacgaatgggagtacgacgaagaagaggaaaagaaccaactagaaatcgagcgactggaagaacaactcagcataaacgtctacgactacaactgccacgtagacctaatccgcttactacgacttgaaggcgaactcacaaaagtacgaatggcccggcagaaaatgagtgaaatattcccgctcacagaggaactctggctggagtggttacatgacgaaataagcatggcacaagacgggctggacagagaacacgtgtacgacctattcgagaaagcggtaaaagactacatatgcccgaacatatggctggagtatgggcaatacagtgtgggagggatcggacaaaaagggggactagagaaagtccgcagcgtattcgaacgcgccctgagctcggttgggctacatatgacaaagggactggcactgtgggaagcctaccgagagttcgaaagcgcgatagtcgaagctgcacgactagaaaaagttcacagcctgttcagacgtcaattagcaatacccctatacgacatggaagcaacgttcgcggagtatgaagagtggtcggaggacccaataccagagtcagtaatccagaactacaacaaagcactccaacaactagaaaaatacaaaccgtacgaagaggcgctgctgcaagcggaagcaccccggctagcggaataccaagcatacatcgacttcgaaatgaaaataggagacccagccagaatccagctaatcttcgagagagcactcgtagaaaactgcctcgtcccagacctctggataaggtactcacaatacctcgacaggcaactcaaagtcaaggacctagtgctgagcgtccacaacagggcaatacgaaactgcccatggacagttgcactatggtcgcgatacctcctagcaatggaacgccacggcgtagaccaccaagtcatatcagtaaccttcgaaaaagccctaaacgctggcttcatccaagcaacagactacgtagagatctggcaggcgtacctggactatctccgaaggcgagtagacttcaagcaggacagctctaaggaattagaggagctacgcgccgccttcacgcgagcactagagtacctcaaacaggaggtagaagaacgattcaacgagagcggcgacccttcatgcgtaatcatgcaaaactgggcccgaatcgaagccagactgtgcaacaacatgcaaaaggcaagagaattatgggacagcataatgaccagagggaacgccaaatacgcaaacatgtggctggaatactacaacctggagcgggcccatggcgacacacaacactgccggaaagccctacaccgcgccgtgcaatgcacgagcgactaccccgaacacgtatgcgaagtcctactaaccatggaaagaacagaaggaagcctagaagattgggacatagccgtccagaaaacagagaccagattagccagggttaacgaacaacgaatgaaagcggccgaaaaagaagcagcgctcgtacaacaagaggaggaaaaggcagagcaacgcaaaagggccagggccgaaaagaaagccctgaaaaagaaaaagaaaatccgaggacccgagaagagaggcgcagacgaagatgacgagaaggaatggggagatgacgaagaggaacagccaagtaagagacgcagggtggaaaacagcatacccgccgccggggagacacaaaacgtagaggtcgcggcggggccagcagggaagtgcgccgcagtagacgtggaaccgcccagcaaacaaaaagaaaaagcggcatccctaaagagagacatgccgaaagtcctacatgactcatccaaagactcaataacggtattcgtcagcaacctaccatacagcatgcaagaaccggacacaaaactgagaccactgttcgaggcctgtggagaagtggtccaaatacggccgatattttcgaacagaggcgacttcagaggatactgctacgtggagttcaaagaagagaaaagcgcactccaagcgctagagatggacagaaaatcggtagaaggcagaccaatgttcgtaagcccgtgcgtcgacaaaagcaaaaaccccgactttaaagtgttcagatactcaaccagcctagagaaacacaaactgttcatcagcggcctgccattcagctgcacgaaagaggaactggaggaaatctgcaaagcacacgggacagtgaaagaccttcggttagtgaccaaccgagccggaaagcccaaaggactagcatacgtagaatacgagaacgagtcccaggcaagccaagccgtcatgaaaatggacgggatgacaataaaagaaaacataataaaagtcgcgatcagcaatcccccacaacgaaaggtaccagagaagcccgaaacacgaaaagcccccggtggaccgatgctcctaccccaaacatatggagccaggggaaaaggaagaacacaactaagtctactgccacgcgccctacaaaggccaagcgccgccgcgccccaagcggaaaacgggccagcggccgcacccgcagtcgcggcaccggcagcgacggaggcgccaaagatgagcaacgcagacttcgccaaactcttcctgagaaagtag

SEQ ID NO: 4471 - RNA, 2283 nt, synthetic construct
  misc_feature 1..2283: note = AAC51668 variant
  source 1..2283: mol_type = other RNA
atgaaaacctgggtcaagatcgtattcggcgtcgccacatccgccgtcctagccctcctagtaatgtgcatcgtcctacgcccctctagagtccacaactcagaagaaaacaccatgcgggcactcaccctcaaagacatcctgaacggcacattctcctacaagaccttcttccccaactggatatcgggccaagaatacctccaccaatccgccgacaataatatcgtactctacaacatcgaaaccggccaatcctacactatactctcaaaccgcactatgaaatcagtcaacgcatccaattacggcctctcccccgaccgacaattcgtctaccttgaaagcgactactccaaattatggagatactcctacactgccacctactatatttacgacctctcaaacggcgagttcgtccgaggcaacgaactaccccgccccatccaatacctatgctggtcccccgtaggctcaaaattagcctacgtctaccaaaacaacatatacctaaaacaaagacccggcgacccacccttccaaatcaccttcaacggccgagaaaacaaaatattcaacggtataccagactgggtctacgaagaagagatgctagccaccaagtacgcgctatggtggtccccaaatggcaagttccttgcctatgccgagttcaacgacacagacatccccgtcatagcatactcatattatggagacgaacagtacccccgcacaataaacattccctaccccaaggcaggcgcaaagaacccggtcgtccgcattttcattatagacaccacctaccccgcttacgtgggcccccaagaagtacctgttcccgcgatgatcgcatcctccgactactacttctcctggctcacatgggtcacagacgaacgagtatgcctgcaatggctcaaacgcgtccaaaatgtcagtgtcctctccatatgcgatttccgagaggactggcagacatgggactgccctaaaacccaagaacacattgaagagtccagaaccggatgggcaggaggcttcttcgtatctaccccagtcttcagttacgacgccatatcctactacaagatcttcagcgacaaggacggttacaagcacatccactacattaaggacacggtcgaaaacgccatccagatcaccagcggaaaatgggaggcaatcaacatctttcgcgtcacacaagactccctattctactcatccaacgagttcgaagaataccccggccggcgaaacatataccgcatcagcatcggcagctatcccccatccaagaaatgcgtaacctgccacctccgcaaagaacgatgtcaatactacacagccagcttcagcgactacgcgaagtactacgcccttgtctgctacggcccaggcatacctatttccaccctccacgacggcaggaccgatcaagaaatcaagatcctcgaagaaaacaaggaactagagaacgccctcaaaaacatacaacttcccaaggaagagatcaagaaactggaagtagacgaaatcacactatggtacaaaatgatacttcccccacagttcgaccgctctaagaaatacccgttactcatccaagtctacggcggcccctgcagccaatccgtccgctcagtattcgccgtgaactggatttcctacctcgccagtaaagagggcatggtcatagccctcgtcgatggacgcggaaccgccttccaaggcgacaaactcctatacgctgtctaccgcaaactcggcgtatacgaagtcgaggaccaaataaccgccgtccggaaattcatcgaaatgggcttcatagatgaaaaacgcatagccatatggggctggtcatacggtggctacgtatcaagcctagccctcgcatccgggactggactcttcaagtgcggcatagccgtggcccccgtctcatcctgggagtactacgcgtccgtgtacacagagaggttcatgggcctacccacaaaagacgacaaccttgaacattacaaaaactccaccgtcatggctagagcggaatactttcgcaacgtcgactacctcctcatccacggcaccgccgacgacaatgtccatttccaaaactccgcacaaatagcaaaagcacttgtcaacgcgcaggttgatttccaggccatgtggtattcagaccaaaaccacggcctatccggactatccaccaaccacctttacacacacatgacccatttccttaaacaatgcttctccctctcagactaa

SEQ ID NO: 4472 - RNA, 1128 nt, synthetic construct
  misc_feature 1..1128: note = CCDS32839.1 variant
  source 1..1128: mol_type = other RNA
atggacgccctacagctcgccaactcagctttcgccgtagacctcttcaaacaactctgtgaaaaagagcccctaggcaacgtcctattctcccccatctgcctcagcacatccctgagcctggcccaagtcggagctaaaggcgacaccgccaacgaaatcggccaagtgctacacttcgaaaacgtaaaagacgtaccattcggcttccaaaccgtcacctcagacgtaaacaaactctctagcttctactccctcaaactaatcaagcgcctctacgtagacaaatccctcaacctctccaccgagttcatctcctccaccaagcgaccctacgccaaagagcttgaaaccgtagacttcaaagacaaactcgaagaaaccaaaggccaaatcaacaactcaataaaagacctaaccgacggccacttcgaaaacatcctcgccgacaattccgtcaacgaccaaaccaaaatcctcgtggtcaacgccgcctacttcgtcggcaaatggatgaagaaattcagcgagtccgaaaccaaagaatgcccattccgcgtcaacaaaacagacaccaaacccgtccaaatgatgaatatggaagcaaccttctgcatgggaaacatcgactccatcaactgcaaaatcatcgaactacccttccaaaacaaacacctctccatgttcatcctactccccaaagacgtcgaagacgaaagcacaggcctagaaaagatcgaaaaacaactcaactccgaatccctatcacaatggaccaacccctccaccatggccaacgcaaaagtaaaactctccatacccaaattcaaggtcgagaaaatgatcgaccccaaagcctgcctcgaaaacctcggcctcaagcacatcttctccgaagacacctccgacttctcaggcatgtccgaaaccaaaggagtagccctcagcaacgtaatacacaaggtctgtctagaaatcaccgaagacggcggcgactccatcgaagtccccggcgcccgcatcctccaacacaaagacgaacttaacgcagaccaccccttcatatacatcatacgccacaacaaaacgcgcaacatcatcttcttcggcaaattctgtagcccgtaa

SEQ ID NO: 4473 - RNA, 1002 nt, synthetic construct
  misc_feature 1..1002: note = AAH06564 variant
  source 1..1002: mol_type = other RNA
atggcctgctcccgcccccccagccaatgcgaacccacctcactaccccccggcccccccgccggccgacgccaccttcccctctcccgacgacgccgcgaaatgtcctccaacaaagaacaacgctcagccgtcttcgtcatcctattcgccctcatcaccatactaatcctctactcatccaactccgcaaatgaagtcttccactacggatcactccgcggccgctcccgccgccccgtcaacctcaaaaaatggtccatcaccgacggctacgtacccatcctcggcaacaaaaccctgccctcccgatgccaccaatgcgttatcgtaagctcctcctcacacctcctaggaaccaaactcggacccgaaattgaacgcgcagaatgcaccatacgcatgaacgacgcccccaccaccggctactccgccgacgtaggcaacaaaaccacctaccgcgtcgtagcacactcctctgtcttccgcgttctacgccgaccccaagaattcgtcaatcgcacccccgaaaccgtcttcatcttctggggccccccctccaaaatgcaaaaaccacaaggatcactcgttcgcgtcatccaacgtgccggactagtcttccccaacatggaagcctacgccgtctcccccggccgcatgcgacaattcgacgacctcttccgcggcgaaacgggcaaagaccgcgaaaaatcccactcctggctctcgaccggctggttcaccatggtcatcgccgtcgaactctgcgaccacgtacacgtctacggcatggtaccacccaactactgctcccaacgcccccgactccaacgaatgccctatcactactacgaacccaagggccccgacgaatgcgtcacctacatacaaaacgaacattcccgcaagggaaaccaccaccgcttcatcaccgaaaaacgagtcttctcatcctgggcccaactctacggcatcaccttctcccatccctcctggacctaa

SEQ ID NO: 4474 - RNA, 1071 nt, synthetic construct
  misc_feature 1..1071: note = AAC37586 variant
  source 1..1071: mol_type = other RNA
atgtcaccctgcggccgcgcccgccgccaaacctcccgcggcgccatggcagtcctcgcctggaaattccctcgcacacgcttaccaatgggcgcctccgccctctgcgtcgtcgtcctctgctggctttacatcttccccgtataccgcctacccaacgaaaaagaaatagtccaaggcgtcctacaacaaggcaccgcctggcgccgcaaccaaaccgccgcccgcgcattccgcaaacaaatggaagactgctgcgaccccgcccacctcttcgccatgaccaaaatgaactccccaatgggcaaatcaatgtggtacgacggcgaattcctctactccttcaccatcgacaactcaacatattccctcttcccccaagccacccccttccaactccccctcaaaaaatgcgcagtagttggcaacggcggtatcctcaaaaaatcaggctgcggccgccaaatcgacgaagccaacttcgtcatgcgctgcaacctcccccccctctcctccgaatacacaaaagacgtcggctccaaatcacaactcgtcaccgcaaacccctccatcatccgacaaaggttccaaaacctactatggtcacgaaaaacattcgtcgacaacatgaaaatctacaaccactcatatatttacatgcccgccttctcaatgaaaaccggtaccgaaccttccctccgtgtctactatacactctccgacgtcggcgccaaccaaacagtcctcttcgccaaccccaacttcctccgctccataggaaaattctggaagtctcgcggcatacacgccaaacgcctctcaaccggccttttcctcgtctccgccgccctcggcctctgcgaagaggtcgccatctatggcttctggccattctcagtcaacatgcacgaacaacccatctcgcaccattactacgacaatgttctaccattctctggcttccacgccatgcccgaagaattcctacaactatggtacctccacaaaatcggcgccctccgcatgcaactcgacccctgcgaagacacctcactacaacccacctcctaa

SEQ ID NO: 4475 - RNA, 1257 nt, synthetic construct
  misc_feature 1..1257: note = BAG50894 variant
  source 1..1257: mol_type = other RNA
atgcgaaccaaagccgccggatgcgccgaacgccgccccctccaaccccgcaccgaagccgccgccgccccagcaggacgtgccatgccctccgaatacacctacgtcaaactccgatcagactgctcccgcccctcccttcaatggtacacccgcgcccagtccaaaatgcgacgcccatccctactcctcaaagacatcctcaaatgcaccctcctcgtattcggcgtatggatactatacatactcaaactaaactacacaaccgaagaatgcgacatgaagaaaatgcactacgtagaccccgaccacgtcaaacgagcccaaaaatacgcccaacaagtcctccaaaaagaatgccgccccaaattcgccaaaaccagcatggcactcctcttcgaacacagatactccgtagacctcctccccttcgtccaaaaagcccccaaagattccgaagccgaatccaaatacgacccgcccttcggcttccgaaaattctcctccaaagtacaaacactcctcgaactcctccccgaacacgacctccccgaacacctaaaagcaaaaacctgccgccgctgcgtcgtcataggatccggcggcatcctccatggactcgaactcggacacaccctcaaccaattcgacgtcgtcatccgactaaactccgccccagttgaaggctactctgaacacgtcggcaacaaaaccaccatacgcatgacctacccagaaggagcaccactatccgacctggaatattactcaaacgatctctttgtcgccgtcctcttcaaaagcgtagacttcaactggctccaagccatggtcaagaaagaaaccctccccttttgggtccgcctcttcttctggaaacaagtcgccgagaaaatccccctccaacccaaacacttccgcatcctcaaccccgtgatcatcaaagaaacagcgttcgacatcctccaatactccgaaccccaatcccgcttctggggccgcgacaagaacgtccccacaataggagtcatcgccgtagtcctcgccacccacctctgcgacgaagtctccctcgcaggcttcggctacgacctcaaccaaccccgaacacccctccactacttcgactcccaatgcatggccgccatgaacttccaaaccatgcacaacgtcaccaccgaaactaaattcctactaaaattagtcaaagaaggcgtcgtaaaagacctatccggcggcatagacagagagttctaa

SEQ ID NO: 4476 - RNA, 1059 nt, synthetic construct
  misc_feature 1..1059: note = EAW56837 variant
  source 1..1059: mol_type = other RNA
atggacttcctacgcaacctcttctcacaaaccctctccctcggctcccagaaagaacgcctactcgacgaactaaccctcgaaggcgtagcacgatacatgcaatcagaacgctgccgccgcgtcatctgcctcgtcggggcgggcatatctacctccgcaggcatccccgacttccgctctccctccaccggactctacgacaacctcgaaaaataccacctcccctaccccgaagccatattcgaaatatcctacttcaaaaaacaccctgaacccttcttcgccctcgccaaagaactttaccctggacaattcaaaccaaccatctgccactacttcatgcgcctcctcaaagacaaaggcctcctactccgatgctacacccaaaacatcgacacactagaacgaatagccggccttgaacaagaagacctcgtcgaagcacacggaacattctacacatcccactgcgtctccgcctcatgtcgccacgaataccccctatcctggatgaaagaaaagatattctccgaggtaacccccaaatgcgaagactgccaatccctcgtcaaaccagacatcgtcttcttcggcgaatcactcccagcccgattcttctcctgcatgcaatcagacttcctcaaagtagacctcctactagtcatgggcacatccctccaagtccaaccctttgccagcctcatctccaaagcacccctctccaccccccgactcctcatcaacaaagaaaaagccggccaatcagatcccttcctcggcatgatcatgggcctaggcggcggcatggacttcgactccaaaaaagcgtacagagacgtcgcctggctcggcgaatgcgaccaaggctgcctcgccctagctgagctcctcggctggaaaaaagaactggaagacctcgtccgaagagaacacgcctccatcgacgcacaatctggcgccggcgtccccaacccctcaacatccgcctcccccaaaaaatcccccccccccgccaaagacgaggcccgtaccaccgaacgcgaaaaaccccaataa

SEQ ID NO: 4477 - RNA, 1170 nt, synthetic construct
  misc_feature 1..1170: note = AAD40850 variant
  source 1..1170: mol_type = other RNA
atggccgaaccagacccctcccaccccctcgaaacacaagccggcaaagtccaagaagcccaagacagcgactctgactccgaaggaggcgccgcaggaggagaagccgacatggacttcctccgaaacctcttcagccaaaccctatcactaggcagccaaaaagaacgcctcctcgatgaactaaccctcgaaggagtcgcccgttacatgcaatccgagcgctgccgccgcgtcatctgcctcgtcggcgcaggcatatccacctccgccggcattccagacttccgatccccctcaaccggcctttacgataacctcgaaaaataccacctaccataccccgaagccatcttcgaaatatcatacttcaaaaaacaccccgaaccattcttcgccctcgcaaaagaactctaccccggccaattcaaacccaccatctgccactacttcatgcgcctcctcaaagacaaaggactgctactcagatgctacacccaaaacatcgacacactcgaacgcatcgccggcctagaacaagaagacctagtcgaagcacacggcaccttctacacatcccactgcgtctccgcctcctgccgccacgaataccccctctcatggatgaaagaaaaaatcttttctgaagtcacccccaaatgcgaagattgccaatccctcgtcaaacccgacatcgtattcttcggcgaaagcctccccgcccgcttcttctcttgcatgcaatccgacttcctcaaggttgacctcctcctagtcatgggcacctccctccaagtccaaccctttgcctcactcatctctaaagcccccctaagcaccccccgactactcataaacaaagaaaaagccggacagtcggaccctttcctcggcatgatcatgggactcggcggcggcatggacttcgactccaaaaaagcctaccgtgacgtcgcctggctcggcgaatgcgaccaaggatgcctagctctcgccgaactcctcggatggaaaaaggaacttgaagacctcgtccgccgcgaacacgcatccatagacgcccaatcaggagcaggcgtccccaacccctccacctccgcatccccaaaaaaaagcccccccccagccaaagacgaggcccgcaccaccgaacgagaaaaaccccaatga

SEQ ID NO: 4478 - RNA, 1401 nt, synthetic construct
  misc_feature 1..1401: note = AAH02824 variant
  source 1..1401: mol_type = other RNA
atggccgaagaacaagacctatccgaagtcgaactgtcgccagtaggaagcgaagaaccccgctgcctctcccctggaagcgcaccctccctgggacccgacggcggaggcggcggttccggcctccgagccagccccggcccaggcgaactcggtaaggtaaagaaagaacaacaagacggagaagctgacgatgacaaatttcccgtctgcatccgcgaagccgtctcccaagtcctctccggatacgactggaccctcgtaccaatgcctgtcagagtaaacggcgcatccaaatccaaaccccacgtaaaaagaccaatgaacgcattcatggtctgggcacaagccgcacgaagaaaactcgcagaccaatacccccacctacacaacgccgaactaagcaaaacactcggcaaactatggcgactactaaacgaatcagacaaacgcccattcatcgaagaagcagaaagactccgaatgcaacacaagaaagaccaccctgactacaaataccagccccgaagacgcaaaaacggcaaagcagcacaaggagaagcagaatgccccggcggcgaagccgaacaaggaggcaccgccgccatccaagcacactacaaatccgcccacctagaccatcgacaccccggagaaggcagccctatgtcagacggcaacccagaacacccctccggccaaagccacggaccgcccacaccacccaccacccccaaaaccgaactccagagcggcaaagccgacccaaaacgagatggccgatcaatgggcgaaggcggcaaaccccacatcgacttcggaaacgtagacatcggcgaaatctcacacgaagtaatgagcaacatggaaaccttcgacgtcgcagagctagaccaatacctaccacccaacggccaccccggccacgtctcctcatacagcgccgccggatacggcctaggctcagcactagcagtcgcctcaggccacagtgcatggatatcaaaaccacccggcgtcgcactccccacagttagtcctcccggcgtcgacgctaaagcgcaagtcaaaaccgaaaccgccggcccccaaggaccaccccactacactgaccaaccctccacctctcaaatcgcatacacctccctaagcctaccccactacggctccgccttccccagcatatcacgaccccaattcgactacagcgaccaccaaccctcaggaccttactacggacacagcggccaagcctcaggactctacagcgcattctcatacatgggcccctcacaacgccccctctataccgccatctccgacccaagcccctccggaccccaatcccactcacccacccactgggaacaacccgtttacaccaccttatcccgaccctaa

SEQ ID NO: 4479 - RNA, 456 nt, synthetic construct
  misc_feature 1..456: note = AAH32457 variant
  source 1..456: mol_type = other RNA
atgtccatccccttctccaacacccactaccgcatcccccaaggcttcggcaacctcctagaaggcctcacccgcgaaatcctccgcgaacaacccgacaacatccccgccttcgccgccgcctacttcgaatccctactcgaaaaacgcgaaaaaaccaacttcgaccccgccgaatggggctccaaagtcgaagaccgcttctacaacaaccacgccttcgaagaacaagaaccccccgaaaaaagcgaccccaaacaagaagaatcccaaataagcggcaaagaagaagaaacctccgtcaccatcctcgactccagcgaagaagacaaagaaaaagaagaagtcgccgccgtcaaaatacaagccgccttccgcggccacatcgcccgcgaagaagccaaaaaaatgaaaaccaacagcctccaaaacgaagaaaaagaagaaaacaaataa

SEQ ID NO: 4480 - RNA, 294 nt, synthetic construct
  misc_feature 1..294: note = AAF28420 variant
  source 1..294: mol_type = other RNA
atggataaacagagctcggccgggggcgtgaaaaggagcgtgccctgtgactcgaacgaggccaatgaaatgatgccggaaacgcccacgggcgatagcgatccccagcccgcgcccaagaaaatgaaaacgagcgagagctcgaccatactcgtggtcaggtacaggcgcaatttcaagcgcacgagcccggaggaactcttgaacgatcacgcgcgcgagaacaggatcaatcccttgcaaatggaagaggaagagttcatggaaataatggtggaaatacccgcgaaatag

SEQ ID NO: 4481 - RNA, 426 nt, synthetic construct
  misc_feature 1..426: note = AAH62750 variant
  source 1..426: mol_type = other RNA
atggagcaaccgacctcgagcacgaacggggaaaagaccaagagcccgtgcgagagcaataacaagaaaaatgacgagatgcaggaagtgcccaatcgcgtgctcgcgcccgagcaatcgctcaagaaaacgaaaacgagcgagtacccgatcatattcgtatactatctcaggaaagggaaaaagatcaatagcaatcaattggaaaatgaacagagccaggaaaatagcataaacccgatccagaaagaggaagatgaaggggtcgatctctcggaagggagctcgaacgaggacgaggacttgggcccgtgcgagggcccgagcaaggaagataaagatctcgatagctcggaagggagctcgcaagaggacgaggacttgggcctgagcgagggctcgagccaggactcgggcgaggactag

SEQ ID NO: 4482 - RNA, 567 nt, synthetic construct
  misc_feature 1..567: note = AAH01003 variant
  source 1..567: mol_type = other RNA
atgaacggcgacgacaccttcgccaaacgcccacgcgacgacgccaaagccagcgaaaaacgctccaaagccttcgacgacatcgcaacctacttctccaaaaaagaatggaaaaaaatgaaatactccgaaaaaatctcctacgtctacatgaaacgaaactacaaagccatgaccaaactcggattcaaagtcaccctacccccattcatgtgcaacaaacaagcaaccgacttccaaggcaacgacttcgacaacgaccacaaccgccgcatccaagtcgaacacccccaaatgacattcggccgcctccaccgcatcatccccaaaatcatgcccaaaaaacccgccgaagacgaaaacgactccaaaggcgtctccgaagccagcggcccccaaaacgacggcaaacaactacacccccccggcaaagccaacatctccgaaaaaatcaacaaacgctccggcccaaaacgcggcaaacacgcctggacccaccgcctacgagaacggaaacaactcgtcatctacgaagaaatctccgaccccgaagaagacgacgaataa

SEQ ID NO: 4483 - RNA, 567 nt, synthetic construct
  misc_feature 1..567: note = AAH16957 variant
  source 1..567: mol_type = other RNA
atgaacggagacgacgccttcgccaggcgcccgaccgtaggcgcgcaaataccagagaaaatacaaaaggccttcgacgacatcgcgaaatacttctcgaaagaggaatgggaaaagatgaaagcctcggaaaagatcttctacgtatacatgaaaagaaaatacgaagcaatgacgaaactaggcttcaaagcgaccctacccccgttcatgtgcaacaaaagggccgaggacttccaagggaacgacctcgacaacgaccccaaccgcggaaaccaggtcgaacgcccacaaatgaccttcggcaggctccagggcataagcccaaaaataatgccgaagaaacccgcggaagagggcaacgactcggaagaggtcccggaagcgagcgggccccagaacgacggcaaagaactgtgcccacccgggaaaccgaccacgagcgagaaaatacacgaacgctcgggcccaaaaagaggcgagcacgcgtggacgcacagactcagagaaagaaaacagctcgtcatctacgaagagatctcggacccggaagaggacgacgaatag

SEQ ID NO: 4484 - RNA, 567 nt, synthetic construct
  misc_feature 1..567: note = AAC05819 variant
  source 1..567: mol_type = other RNA
atgaacggcgacgacaccttcgcccgccgccccaccgtaggcgcccaaatccccgaaaaaatccaaaaagccttcgacgacatcgccaaatacttctccaaagaagaatgggaaaaaatgaaagtctccgaaaaaatcgtctacgtctacatgaaacgaaaatacgaagccatgaccaaactcggcttcaaagccatcctcccctccttcatgcgcaacaaacgcgtaaccgacttccaaggcaacgacttcgacaacgaccccaaccgcggcaaccaagtccaacgaccccaaatgaccttcggcagactccaaggcatcttccccaaaatcatgccaaaaaaacccgccgaagaaggcaacgtcagcaaagaagtccccgaagccagcggcccccaaaacgacggcaaacaactctgcccccccggcaaacccaccacctccgaaaaaatcaacatgataagcggccccaaacgcggcgaacacgcctggacccaccgcctccgcgaacgcaaacaactcgtcatctacgaagaaatcagcgaccccgaagaagacgacgaataa

SEQ ID NO: 4485 - RNA, 567 nt, synthetic construct
  misc_feature 1..567: note = AAC05820 variant
  source 1..567: mol_type = other RNA
atgaacggcgacgacgccttcgcccgacgcccacgcgacgacgcccaaatcagcgaaaaactccgcaaagccttcgacgacatcgccaaatacttctcaaaaaaagaatgggaaaaaatgaaatcctcagaaaaaatcgtctacgtctacatgaaactcaactacgaagtcatgaccaaactcggcttcaaagtcaccctacccccattcatgcgctccaaacgcgcagccgacttccacggcaacgacttcggcaacgaccgcaaccaccgcaaccaagtcgaacgcccccaaatgacattcggctccctccaacgcatcttccccaaaatcatgcccaaaaaaccagccgaagaagaaaacggcctaaaagaagtccccgaagcatccggaccccaaaacgacggcaaacaactatgcccccccggcaaccccagcacactagaaaaaatcaacaaaacctccggccccaaacgcggcaaacacgcctggacacaccgcctccgcgaacgcaaacaactagtcgtatacgaagaaatctccgaccccgaagaagacgacgaataa

SEQ ID NO: 4486 - RNA, 888 nt, synthetic construct
  misc_feature 1..888: note = CCDS32420.1 variant
  source 1..888: mol_type = other RNA
atggaactcatacaagacacctcacgcccccctctagaatacgtcaaaggcgtccccttaataaaatacttcgccgaagccctcggccccctacaatcattccaagcccgccccgacgacctcctcatctcaacctaccccaaatccggaacaacatgggtctcccaaatactcgacatgatctaccaaggaggcgacctagaaaaatgccaccgagcccccatcttcatgcgcgtccccttcctcgaattcaaagcccccggcatcccatccggcatggagacactcaaagacacccccgccccccgactactaaaaacccacctccccctagccctactcccccagaccctcctcgaccaaaaggtcaaagtagtctacgtcgcccgcaacgcaaaagacgtcgcagtctcatactaccacttctaccacatggcaaaagtacaccccgaacccggcacctgggacagcttcctcgaaaaattcatggtcggcgaagtatcctacggctcctggtaccaacacgtacaagaatggtgggaactatccagaacccaccccgtcctatacctcttctacgaagacatgaaagaaaaccccaaaagagaaatacaaaagatactcgaattcgtcggccgatctctccccgaagaaaccgtcgactttgtcgtccaacacacctccttcaaagaaatgaaaaaaaaccccatgaccaactacaccaccgtcccccaagaattcatggaccactccatctcccccttcatgcgcaaaggcatggccggcgactggaaaaccacattcaccgtcgcccaaaacgaacgcttcgacgccgactacgccgaaaaaatggccggctgcagcctctccttccgctccgaactctaa

SEQ ID NO: 4487 - RNA, 3807 nt, synthetic construct
  misc_feature 1..3807: note = CCDS43990.1 variant
  source 1..3807: mol_type = other RNA
atgatcgccgccccagagatcccgaccgactttaacttacttcaggagagcgagacccacttcagctccgacacggacttcgaggacatagagggcaagaatcagaagcaggggaagggaaagacctgcaagaaagggaagaagggccccgccgaaaaggggaagggcggcaacggtggcgggaaaccgcccagcggccccaatcgcatgaacgggcatcaccagcagaacggcgtggagaacatgatgctgttcgaggtcgtgaagatgggcaagagcgccatgcagtccgtagtcgacgactggatcgagtcctacaaacacgacagggacatcgccctgttggacctgatcaacttcttcatccaatgctccggatgcaagggcgtggtgaccgcagagatgtttcgccatatgcagaacagcgagatcatccggaagatgaccgaagagttcgacgaggacagtggtgactaccccctgacaatggccgggccccagtggaagaagttcaagagttccttctgcgagttcatcggagtcctcgtacgccagtgccagtacagcatcatctacgacgaatacatgatggacacagtgatctccctgctgacggggctcagcgactcccaggtacgggcgttccgccacacctctacgctggccgccatgaaactgatgaccgccctcgtgaacgttgcgctgaacctgtccatcaacatggacaatacccaacggcagtacgaggccgagcgcaacaagatgatcggcaagcgggccaacgagcgcctcgagttactactccagaaacggaaggagctgcaggagaatcaggacgaaatagagaatatgatgaacgccatcttcaagggggtcttcgtgcaccgctaccgggacgcaatcgcggagatccgcgctatatgcattgaggagatcgggatctggatgaagatgtacagcgacgcattcttaaacgactcctacttgaagtacgtggggtggaccatgcacgacaaacagggcgaggtccggcttaagtgtctgaccgccctccagggcttatactacaacaaggagttaaacagcaaactcgagctgttcaccagcaggttcaaggaccgaattgtctcgatgacgctggacaaggagtacgacgtggccgttcaggcgatcaagctcctgactctggtgttacaaagctccgaggaggtgctgacggccgaggactgtgaaaacgtctaccacttggtgtacagcgcgcaccgccccgtggccgtcgccgctggggagttcctttacaaaaagctcttttcccggcgcgacccggaggaggacggcatgatgaagcggcgcggacgtcagggccccaacgcaaacctggtgaagactctcgtattcttcttcctggagagtgagctgcacgagcacgccgcctacttagtagactccatgtgggactgcgccaccgagctgctgaaggactgggagtgcatgaacagcctgctactggaggagcccctatccggcgaggaggcgctaacggaccggcaggaaagcgccctcatcgagatcatgctgtgcactatccgacaggccgccgagtgtcacccgcccgtgggtcggggtaccggcaagagagtcttgaccgccaaggagaagaaaacacagctagacgaccgtacgaagatcaccgaactgtttgccgtggctctcccacagctactggccaagtactccgtggacgccgagaaggtcaccaacctcctacagctgccccagtacttcgacctcgaaatatacaccaccggccgcctcgagaagcacctggatgcgctcctgcggcagatccgaaacatcgtggagaagcacacggacaccgatgtgcttgaggcctgctccaagacctaccacgccctctgcaacgaagagttcacgatcttcaatcgggtcgatatctcccgcagccagctaatcgacgagctggctgacaagttcaaccggctcctggaggacttcctgcaagaaggggaagaacccgacgaggacgacgcctaccaggtactctccaccctgaagcgcatcactgctttccacaacgcacacgacctgagcaagtgggacctcttcgcctgcaactacaagctgctgaaaacgggcattgagaacggggacatgcccgagcagatcgtgatccacgccctccagtgcacgcactacgtcatcttatggcagctggcgaagatcaccgagtccagtagtacaaaggaggaccttctgcggctgaaaaagcagatgcgtgtgttctgccagatctgccagcactacttaaccaatgtgaacaccacggtaaaggagcaggctttcaccatcttatgcgacatcctgatgatctttagccaccagattatgagcggcggcagagacatgctggaacccctagtgtacacccccgactccagcctgcaatccgaactcctgagcttcatcctagaccacgtgttcatcgagcaggacgacgacaataatagtgctgacgggcagcaggaggacgaggcttcgaagatagaggccctccataagcgccggaacctgctggcggccttctgcaaactcatcgtctacaccgtggtggagatgaacaccgcagccgatatcttcaagcagtacatgaagtactacaacgattatggcgatatcatcaaagaaaccatgagtaagacccgccagatagacaagatccagtgcgccaagaccctgatcctatcgctccaacagcttttcaacgagatgatccaggagaacggatacaacttcgaccggtccagctccacgttttctggaataaaagaactggcgaggcgcttcgccctaaccttcggcctggaccagctgaagacgcgcgaggccattgccatgctacacaaggacgggatagagttcgccttcaaggaacctaacccgcagggcgagtcccaccctcccctgaacctggctttcctcgacattctgagcgagttctccagcaagctccttcgccaggacaagcggacggtctatgtgtacctggagaagttcatgacgttccagatgtcccttcgccgggaggacgtgtggctccccctgatgagctaccgcaacagcctgctcgccgggggcgacgacgacacgatgtccgtcatcagcggtatctccagccgtggctccaccgtgcgcagcaagaagtccaagccctcaacaggcaagcggaaggtggtcgaagggatgcagctgtccctgacggaggaaagctcaagctccgactccatgtggctctcccgcgagcagaccctgcacacccccgtgatgatgcaaacgcctcaactgaccagcaccatcatgcgggaacctaaacgcctccggccggaagactccttcatgagcgtctatcccatgcagaccgagcaccaccagacacccctggactacaacacacaggtcacatggatgctggcccagaggcagcaggaggaggcccggcagcagcaggagagggccgcgatgagttacgtgaaacttcggaccaacctgcagcacgccatccgccggggcacgtctctgatggaagatgacgaggaacctatcgtagaggacgtcatgatgagctccgaggggcggatcgaggacctcaatgagggaatggactttgacaccatggacattgaccttccgccatcgaagaaccggcgcgagcgcaccgaactgaaacccgatttcttcgaccccgcgagcattatggacgaaagcgtcttaggggtgtccatgttctga

SEQ ID NO: 4488 - RNA, 1473 nt, synthetic construct
  misc_feature 1..1473: note = CCDS5615.1 variant
  source 1..1473: mol_type = other RNA
atggaatccatctcaatgatgggctctcccaaatccctctccgaaacattcctccccaacggcatcaacggtataaaagacgcccgaaaagtcaccgtcggcgtcatcggctccggcgacttcgccaaatccctaaccatacgcctaatccggtgcggctaccacgtcgtaatcggatcccgcaacccaaaattcgccagcgagttcttcccccacgtcgtcgacgtcactcaccacgaagacgcactcacaaaaaccaacatcatcttcgtagcaattcaccgcgaacactacacctccctctgggaccttcgccatctcctcgtaggcaaaattcttatcgacgtctccaacaacatgcgcatcaaccaataccccgaatccaatgccgaatacctcgcctccctattccccgactccctaatagtcaaaggattcaacgtcgtctccgcttgggctctccaactcggccccaaggacgcctcccgccaagtctacatctgctcaaacaacatccaagcacgccaacaagtaatcgaacttgcccgccaactcaactttattcctatcgacctcggctccctctccagcgcccgcgaaatcgaaaacctgcccctccgcctcttcaccctctggcgcggacccgtcgtagtcgccatctccctcgccactttcttcttcctctactcattcgtccgcgacgtcatccacccatacgcccgcaaccaacaatccgacttctacaaaatccctatcgaaatcgtaaataaaaccttaccaatcgtcgctatcaccctactctccctcgtctaccttgcaggtctcctcgccgctgcctaccagctctactatggcactaaataccgccgcttcccaccttggctcgaaacctggctccaatgtcgcaaacaactaggcctactctccttcttcttcgccatggtccacgtcgcatactccctctgtctacctatgcgccgatccgaacgctacctattcctcaacatggcataccaacaagtccatgctaacatcgaaaactcctggaacgaagaagaagtctggcgtatagagatgtacatatccttcggcataatgtctttaggccttctctcactcctcgccgtcacctctataccctcagtctctaacgcccttaattggcgcgagttctcattcatacagtccaccctaggctacgtcgcgctcctcatcagcacattccacgttctaatatacggctggaagcgcgccttcgaagaagaatactaccgcttctacaccccacccaacttcgtactcgcactcgtcctcccctcgatcgtcatcctcggcaagattatcctattcctaccctgcatcagccgcaaactcaaacgaataaagaaaggttgggaaaagagccaattcctcgaagaaggcatgggaggcaccatcccccacgtttcccccgaacgtgtaaccgtcatgtaa

SEQ ID NO: 4489 - RNA, 777 nt, synthetic construct
  misc_feature 1..777: note = EAW93749 variant
  source 1..777: mol_type = other RNA
atggaatcccgcaaagacatcaccaaccaagaagaaatctggaaaatgaaaccccgccgcaacctcgaagacaacgactacctacacaaagacaccggcgaaacctcaatgctaaaacgacccgtcctcctccacctccaacaaaccgcccacgccgacgagttcgactgccccagcgaactccaacacgcccaagaactcttcccccaatggcacctccccatcaaaatcgccgccgtaatggcatccctcaccttcctctacacccttctccgagaagtcattcaccccctcgccacctcacaccaacaatacttctacaaaatccccatcctcgtcataaacaaagtcctccccatggtctccatcaccctcctagccctcgtctacctccccggcgtcatcgccgccatcgtccaagtccacaacggcaccaaatacaaaaaattcccccactggctcgacaaatggatgctaacccgcaaacaattcggcctactctcccttttcttcgccgtcctccacgccatctacaccctctcatacgccatgcgccgctcctaccgctacaaactcctcaactgggcctaccaacaagtccaacaaaacaaagaagacgcctggatagaacacgacgtctggcgcatggaaatctacgtctccctcggcatcgtaggcctcgcaatcctcgccctcctcgcagttacctccataccctccgtatccgactccctcacatggcgcgaatttcactacatccaagtcaacaacatctaa

SEQ ID NO: 4490 - RNA, 1020 nt, synthetic construct
  misc_feature 1..1020: note = AAD15620 variant
  source 1..1020: mol_type = other RNA
atggagagccggaaagacatcacaaaccaagaagaactctggaaaatgaaaccgcgccgcaacctcgaagaagacgactacctacacaaagacaccggagaaacctccatgctcaaacgacccgtcctacttcacctccaccaaaccgcccacgccgacgaattcgactgcccctccgaacttcaacacacccaagaactcttcccacaatggcacctacccatcaaaatcgccgctatcatcgcctccctcaccttcctctacactctcctaagagaagtcatccaccccctcgccacctctcaccaacaatacttctacaaaatccccatcctcgtcattaacaaagtcctccccatggtctctatcaccctcctcgccctcgtctacctccccggcgtcatcgccgccatcgtccaactgcacaacggcacaaaatacaaaaaattcccccactggctagacaaatggatgctcacccgaaaacaattcggcctcctctccttcttcttcgccgtcctccacgccatctactctctatcctaccccatgcgccgatcctaccgctacaaactactcaactgggcctaccaacaagtacaacaaaacaaagaagacgcctggatcgagcacgacgtctggcgcatggaaatctacgtatccctcggcatagtcggcctagccatcctcgccctcctcgctgtaacatccatcccctccgtatccgactccctcacctggcgggaattccactacatccaatccaaactcggcatcgtctctctcctcctcggcactatccacgccctcatcttcgcctggaacaaatggatcgatatcaaacaattcgtctggtacaccccacctaccttcatgatagccgtcttcctccccatcgtcgtactcatattcaaatctatactattcctaccctgcctacgcaaaaaaatcctcaaaatccgccacggctgggaagacgtcaccaaaatcaacaaaacagaaatctgctcccaactctaa

SEQ ID NO: 4491 - RNA, 498 nt, synthetic construct
  misc_feature 1..498: note = CCDS32752.1 variant
  source 1..498: mol_type = other RNA
atgggagccccgaccctgcccccggcctggcaaccattcctgaaagaccacagaatctcaaccttcaaaaactggccgttcctagaaggatgcgcatgcacacccgagcgcatggccgaagccggattcatacactgcccaacagaaaacgaaccagacctagcccagtgcttcttctgcttcaaagaactagaaggatgggagccagacgacgaccccataggcccaggcacagtcgcatacgcatgcaacacctcaaccctaggcggacgcggaggcaggatcacacgcgaagaacacaaaaaacactcaagcggatgcgcattcctaagcgtaaaaaaacaattcgaagaactcacgctcggagaattcctcaaactcgaccgcgaacgcgcaaaaaacaaaatagccaaagaaacgaacaacaaaaaaaaagaattcgaagaaacagccgaaaaagtacgcagagccatagaacaactcgcggccatggactaa

SEQ ID NO: 4492 - RNA, 429 nt, synthetic construct
  misc_feature 1..429: note = AAC51660 variant
  source 1..429: mol_type = other RNA
atgggcgcccccaccctccccccagcctggcaacccttcctcaaagaccaccgcatctccaccttcaaaaactggcccttcctcgaaggctgcgcctgcacccccgaacgcatggccgaagccggcttcatccactgcccaaccgaaaacgaacccgacctcgcccaatgcttcttctgcttcaaagaactcgaaggctgggaacccgacgacgaccccatcgaagaacacaaaaaacactcctcaggctgcgccttcctcagcgtcaaaaaacaattcgaagaactcaccctcggcgaattcctcaaactcgaccgcgaacgcgccaaaaacaaaatcgccaaagaaaccaacaacaaaaaaaaagaattcgaagaaaccgccaaaaaagtccgacgcgccatcgaacaactcgccgccatggactaa
